United States Patent Application Publication US 2017/0114356 A1 - sequence listing, part 94

SEQ ID NO: 154816 - DNA, 2413 bp, Zea Mays
cctccgccacttcaagccccctctgttcccatggccaccacgagcttccgctcactcctgctcctgttcctctccgtcctcggcgcctccgcgcgcaacgaggaggacgcccgcgcgctcgcggcgctcaagcgggcgctagacccggccggccgggtcctcggctcctgggacccctccggcgacccatgcgccggctcattcgtcggcctgacctgcggccgcgacggccgcgtcaccgccgtatcgctgcagggccgcgggctctcgggaaccctgccgccggcggtcgccgggctgcggcggctccaggggctgtacctccactacaacggcatcaaggggcccattccgcgggagattgggaagctgtccgagctcacggacctgtacctcgacgtgaaccatctcaccgggcccgtgcccgtggagattgctgccattgccaacctccaagtgttgcagcttggttacaatcagttgacaggcagcatacctccccagctgggcaacctgaataagctaaccgtgctcgcgatgcagtctaatcagcttgatggagccattccggcaacccttggtgagctaacacagctgagacggcttgatttgagcttcaacagcctgtttggttcaatcccatccaagattgctgaggttccattgcttgaggtctttgatgttcgcaacaacaccctttctgggagtgtccctgttggattgaggagactgaatggtggcttccagtatatgaataacaaagggctttgtggcgctggcttcagtttgctagagctttgcctttcttcagaggatggcctgaagcccagcaagcccgagccttttggaccagacggtactgtcaagacaaggcaggtgcctcaatcagcaaatccagacggctgctcaggcgctagctgctcaaagtccgcaaacgcgtcccaaggagttcttatcgtcgctgttgtcgcggcggtgatcggtgctgcattttgcggtttatttgcgttctcctggtaccgccggcagaaacagaagatcggaagctcgctggaggtttctgatagcaggctcagcaccgaccatttccagcagaaggaagcctgcagaaggagcgcctctcctttgatcagcgtcgagtactcgaacagctgggacccgttgtctgcaggtggggctggtgttggatcacccggtcaagtagttggtgatagcttcagattcaacctagaggaggtagagtgcgcgacgcagtacttctccgacgtgaacttgctcgggaagagtggcttcgccgccgcgacgtacaaagggatccttcgggatggatcggtagtcgctgtcaaaagcctcagcaagacgagctgcaagcaagaggagtcggatttcctgcgtggtctgaagatgctcaccctcctacagcacgacaatcttgtcagcctgaggggattctgctgctccagggggagaggggaatgcttcctcgtgtatgacttcatggttaatggctgcctgtcgcggtatctggacgtcaaggatggttcttccggtgctaccgttcttgattggcctacaagagtttccatcatcagaggcattgcgaaaggaattgagtacctccacagcaagaagggcagcaagccaccggtggtgcaccagaacatatcggccgacaagatcctccttgaccaccacctggcgccgaggctctcggtgccggggctgcacaagctcctcgcagacgacgtcgtcttctcggccctgaaagcgagcgccgccatgggctacctcgcgcccgagtacgccgccacgggccggttcacggacaagagcgacgtcttcgcgttcggggtcgtggtcctccaggtcctcacgggaaggagggacgtctcccagctgaaggtcggcgccgccgctgtcagcgacctcggcggcctggtcgacgcgaacctcgacggcgcgttctcgagaacggaggcggcgaggctggcggctgttgctgcgtattgcacgagcgagacgccaggtcagcggccgaccatggaggccgtggttcagcagctcagcagcacccagtgagtgagtgagttacaagctgctgccgaggtgtagtgtctagcgaagtagcgagtgagtcgtgtgatgacacggtgatggaatggaagctaggctggctgggtattgcggtcagagatgatggattgtgggagcgatggtagtgaactgatgttttgtaatgacggggcaatgacccagttgccacttacatgctagtggagttttgattattgtagttaaccagtctactgatcgttgtatttgatgacccagttcctaatgtgtattaggttctgaatttgataagcatgtttgtttggctctaatatgtattgccttatataatttttataat

SEQ ID NO: 154817 - DNA, 692 bp, Zea Mays
attgtgcggttcgttaagctgccattggttgacaagatcaccgcttggatcttcctggaaaagttattgttattcttgtgttcatatgtcttgcaatcgactgaccatgggcattattttgtgatattcatggccattataaggagattgaacattatgcgtcatgggtcgtgcaagtacacttgagtttatttgcttgatttattcgtgatattgatgaagaaattccagatccagaggaatagaaacactttttcacaaagggagaagatcatttgcgctacagtgcgacgatggccagggccaaggtgctgaaggaggtgaggaacgtcgcagcaatgatctccatggagaagggtgcattggccataggtagtgggcatcaccagcatggtggccacaggcacgatggctagcagcaacaacaactgctgcttcaacgacaagcgtgcgcgagctctgagcagactcaagcgatcctatcaagtagttcattgtatttcaccattcatttttcttttttacgtccatgtgagatgaggttgtttgtttggcgagtggagcggtgggaaagccacagaggtatacgagatttatgttactcccccaccccaaagagtcttccctgtccatctcactgaaatttggcgacgcttagatatcgtgtcatcatattgggacacttttattgc

SEQ ID NO: 154818 - DNA, 621 bp, Zea Mays
atggggaaccgcgccaccgggagaggccgcgcccgctggggaggggctgcgcaggggctgttccggcgcgccatggggaaccgcgccgccgggagaggccgcgcccgctggggaggggctgcgcagggggcgcggacgccggagaggggggaagagggctggccgcaagggagccaggcgggtggaggagagcgtggcagtggtgaaggagtcgacggacccgctgggcgacttccgccggtccatgctgcagatgatcgtggagaaggagatcgtgggcggcgcggagctccagcagctcctgcaccggtgcggcagcagcaccaccactcgccggcccaggtgctcaagaacttcagcagcatccacaacctccgcatggagctccccgtgtgcgacgtcggcaccaacgacgacgacgtcctcaggtggaaggttgtgttcggcagcacgctacagagctgcgtcatcctcggcggcgcaaaggtggaccaggccaccgcagggccccgtgcccccaccggcaccgacgccgatgccgaggacacgagtgacggcggcggtggtggtagcatcctggagtcctacaccaacggcgggctaaagctgcgcgtggtctag

SEQ ID NO: 154819 - DNA, 1566 bp, Zea Mays
gcgggtgccgaggagatcgtgctgcagcccatcaaggagatctccggcaccgtcaagctgccggggtccaagtcgctttccaaccggatcctcctgctcgccgccctgtccgaggggacaacagtggttgataacctgttgaacagtgaggatgtccactacatgctcggggccttgaggactcttggtctctctgtcgaagcggacaaagctgccaaaagagctgtagttgttggctgtggtggaaagttcccagttgaggattctaaagaggaagtgcagctcttcttggggaatgctggaactgcaatgcggccattgacagcagctgttactgctgctggtggaaatgcaacttacgtgcttgatggagtaccaagaatgagggagagacccattggcgacttggttgtcggattgaagcagcttggtgcagatgttgattgtttccttggcactgactgcccacctgttcgtgtcaatggaatcggagggctacctggtggcaaggtcaagctgtctggctccatcagcagtcagtacttgagtgccttgctgatggctgctcctttggctcttggggatgtggagattgaaatcattgataaattaatctccattccctacgtcgaaatgacattgagattgatggagcgttttggtgtgaaagcagagcattctgatagctgggacagattctacattaagggaggtcaaaaatacaagtcccctaaaaatgcctatgttgaaggtgatgcctcaagcgcaagctatttcttggctggtgctgcaattactggagggactgtgactgtggaaggttgtggcaccaccagtttgcagggtgatgtgaagtttgctgaggtactggagatgatgggagcgaaggttacatggaccgagactagcgtaactgttactggcccaccgcgggagccatttgggaggaaacacctcaaggcgattgatgtcaacatgaacaagatgcctgatgtcgccatgactcttgctgtggttgccctctttgccgatggcccgacagccatcagagacgtggcttcctggagagtaaaggagaccgagaggatggttgcgatccggacggagctaaccaagctgggagcatctgttgaggaagggccggactactgcatcatcacgccgccggagaagctgaacgtgacggcgatcgacacgtacgacgaccacaggatggccatggccttctcccttgccgcctgtgccgaggtccccgtgaccatccgggaccctgggtgcacccggaagaccttccccgactacttcgatgtgctgagcactttcgtcaagaattaataaagcgtgcgatactaccacgcagcttgattgaagtgataggcttgtgctgaggaaatacatttcttttgttctgttttttctctttcacgggattaagttttgagtctgtaacgttagttgtttgtagcaagtttctatttcggatcttaagtttgtgcactgtaagccaaatttcatttcaagagtggttcgttggaataataagaataataaattacgtttcagtgg

SEQ ID NO: 154820 - DNA, 296 bp, Zea Mays
gtcacactggtactttatcttcatgaataaaaaatatggacaaaacggcaacccaaagcttactctgaagtggcagtatcaataagaagtttctgcaagcttctgaaaagaacttcatatgagtatttatgtgacttcgcttcagctatatgaggtatcaatgctggctggtcgatttcctgatataataaagaaaccaaaaaaagaagttaaactactatgctgtgtacttggtagtttgaacaaaacaatacttcagcaacaatatagatttcaaagattaaaaataaataaat

SEQ ID NO: 154821 - DNA, 643 bp, Zea Mays
acggaaatatacgctattctgatccacacaaggatgtcatcaacatttctgagagcaggatttttcgttgctatgtgtaattttcattagattttgattggtttatcttttgcaaatatacctcctctgattgtttttctatctcatttgtggagcaacatagcaaccaatcttgatttgctattttatctcacttttctttgacttaatcggcttaagtgttatagatctctatattgacaagttttttgtctgtaaacatcatgtatcttctaagtgtgtccacgacatatctggtttttattgatttccgaagctatttatttttaccttgtaaatggctgaatgtctcatttggtattctacatttatatgtagctcagtgattgtagccaattacattggcaatatacgctatgctgacctcagttcgatgaacatttttactgagagctgcattctgcccacaatagctttaccagtaatctggccttttaaaattgtttattttttagtattctatgcatctttgggatctgatggctcaatgatttcaaccagtcactcttgatatatacgctattctgattgctgctgttgaaaaaaatatccatgagagcaccattgtaccctatcaacatgc

SEQ ID NO: 154822 - DNA, 2156 bp, Zea Mays
gccgactgaaaatgcatacgtcgtcggaagtggcagctccaatgacgtggctcgttctcacgctcctgctctcatcagcggtttacttttgccttcttcctttgattttttgtccttcgattggatggcacccgccgacgatttacatttcacctacgcatacgcatgtgccgcaggccgccgccgtggagacggtgaaagtggtcaccaccccagtcttccctcagatccctcggctccaggcaagcaaagacttccaggtggtggtgcgcctcgaggcgccaccggtggcgcagcagaaggcgcgcgtccccgtcgacctcgccgtggtgctcgatgtgggtgccggtggcggtggcagcaccggctcggcgaggctggatgcggtgaagaaggccgtcaagtttatcatcgggcagatccatgacaacgaccgtctcgccgtcgtcgggccgtcgcccaaccgccggctagtcatcgggtttccgagcactcacgaggctcgacagaatgccgaaaaatccgtcgacgacctggagccccgtggcgagttcgcgtccggcgccggcttggaggaggccgtcaagatcctcggggagttaccggcgacggcgagcgggagcagccgcgcgcgcttcgtcatcctggtgaccgacacggcggtgacggagggcagcggcggcagattcggcaagctgcggcgcgagctcctccccccggtgcacacgttcggcctcggcgcggggcacgaccccagggcgctgctctccatcgccagggagtcccagggcacctactccttcgtcgacgaccagaacacggacggcatcacgggcgccatcgccatctgcctcagcgggctcaaggacgtggtcgccgtcggcacgcgcgtccgcgttgaggcgcctgtcgggagcggggtcacgatcgagaggatcgagtcggggggggtgcctgctctgccttcgacgtcggcgatgacgacctcctcttccgtcgacaacggaggctgcgacaagcaacagctgctcaccgtcaccttcgccggccactacgccaccagggacgagggaggtgccacgtctccagcttctccaagtccgacagtgaccaccacagcaatcttgtacgtgcaaaggccgccgccggaagccctcgacgtcgccggcggcggcgcgctgttcagagtccccgtccccgcggtgatgaacctcatcgcgcggttcggcgtgctggagatggtgaccaccttcgtcgagaacgagatctggcggcttagttcttccagttccagcacggtggaagtggcgacaaagctgcggacgcagtgggagcagttcgtgcaggcccggcagttctggagcggcctggacctgggagtcctcgacgtcgaggtcaacaggatggcgagcatcctagaagcagcaggaacccgaatcggttcgtcggcgacggcctacatgctgtcgtggctgtcgagctaccagatgcagcggccgacggccatgggctcgccgagcatcgtggccgccgcgttcgtcaccgtgaagatgcagctcacgctgcagcaggcgaccatcgtcaccattcgtccacaaccatgcatcggcggctgcccggcgtgcgagtgcgggtgcgaggaccgctgcgtgcagccactgccgccgccggtgctcctgccgtccggacgcggcgacgacacctaccgcgtcaaccccgcgtacccgcagggcgtactgttcaacgccatcaaccaagcaatggagcagatgtacctggcgttggtccgggcgagcaatctgacgcgttgcgacgacgctgcccgcgtcgagttgttcctgccggcatgatccggcgaccgatcgacgacgactcacggggtacgggcaactcgccgccgatcgatccatcaaggatctagctagctgtaccgtctaccgtataccgttctagtaggctagtagtatacggtggtgtgcttaactatacaagctaagtactgtacgaccaagcttagcttgtcataaataagcaatcgatcatacgcactccataactagtacatgctcgtatgcgttgccttgtgctctcatttcctttctatccagaaaccctctacactacatctacacagttatgtacttatgttactcgcc

SEQ ID NO: 154823 - DNA, 875 bp, Zea Mays
gttcatgcagtccacctcgattgtgagctacaaccacttgggaaacaacgacggcatgaacctgtctacccctcaaacattcaggtccaaggagatctccaagagcaacgtggtggatgacatggtctcaagcaatgccattctctatgggcctggcgagcatcccgatctcgttgttgtcatcaagtatgtgctgtacgtgggagacagtaagagggctatggacgagtacacatcagagatcttcatgggcagcaagaacaccatcgtgctacacaacacctatgaggactcgctcctcaccacaccgatcatccttgatctggtgctcctggctgagctcagcaccaggatccagctaaaacctgagggaacggacaagttccactccttccacccggtggccaccatccttagctacctcaccaaggcaccactggttccgcccggcacactggtggtgaacgctctggcaaagcagagggcggtgctggagaacatcatgagggcctgcgttggcctggccctagagaacaacatgatcctagagtacaagtgagcgaagtggcgtggcctgcagctggatatgcaggaggctgcatggagggaactagagaggcgagaatagctgtgggattatgttggcttctcgtgttttcttttgtgttctttcctggtcatcgttgtcgcgctattgtattttatttgttggactctcgtgccaacaatgtcatcaaacgtgtatggtggtgcgtgcctgagactgacaatgtacgagggaacttctaccgacaggtgtggcacgtactctgcaatgacgagacaatgcaaattgtggcatatatcgaagtctacatgataatgatggttgaaat

SEQ ID NO: 154824 - DNA, 114 bp, Zea Mays
ctgattgatcttgctatcaagaacaactgcctgatcggtggtgacgacttcaagagtgggaagaccaagatgaaatcggtcctggttgatttccttgttggtgctggaataaag

SEQ ID NO: 154825 - DNA, 1071 bp, Zea Mays
atggcgtctccgtcagaccggacatcaggcttctccataccgccccacggcggagcgccggaggccaatggcgacgcgaaggacaacgtgccctacacttcttcttttgtttattatagcctacattttgtagagagaaaagagactaatagagaaggcagaggaagaagagtgtttaagaaaagagaaggaaaaaagagaataaaagaagaagctgaaaagacatttcaagttggtcatgtgaattgcatcaaacagggagttagggacgatattgaagttgtggctgtggatgacccttttgttgatgctaagtacatgattctggacatttcatttaatagcaatgacatgaaatacataccaggttttgtgccaagtccatctttactgctcaagagcttgagcatggatgaaaattcccagatgatcgcaaagattgttgtggtttgtaatgatgcaatcattggccactctgagcatcaatatgttgctacagggatgcccacaaaagctgctctgaaggacaatgcttccaccagcgcggccgtagaggcagaagcaaggggttgggcttctgtcggtgctggacagcgcgatgccaaacgtgccagcccactctcgttgtcgtccgccaccctcttccacgataggttcgcccgcaccgagcctatacgcagacagctctcgaacgtccgctacaatgctgtcgaaggtgaatcttattctcttctgctcacaggttgcgaggcttgggctgagaattcagagatggtaatggaggaggcctcgcccgggacggtggaggagctgctgctggtgagcgcaatcagagggaaaaaggttgagagggcaccaatctggctcatgaggcaagccgagagtgcctcaagattctgaaggtgaggttcgccttggtttgtccaagggacctatctgccctagcttcagttgaggcagtgaatgtagttctgcggttctgccgcacgttgatgcaccttagtccagtacacttgggtcaataaaagaccacattaggatggtgaaacggtgaaaactgatggcttgcat

SEQ ID NO: 154826 - DNA, 1759 bp, Zea Mays
cgagagcgagcggtggttctgcttcctctccactcgctcactccactccactccacagtggcacagacgcacagtctcgcactctcgctcagagtcagatcacgcccctcccctccatttctctcctccctataaagcggcgtcccgaggcaagaatccagcctccactacccccagccgggccagcccccccaagccaagcagaatcctcgccccgcaatgcagcacctggccgccgtgctcctcgtcctggcggctaccaccgcgctgccgcccggcgcggcggcgtggcgcccgtggccgccgcgcgacaacgcgacggctgcggcgggccttggcgcgtccaagaggctggagggctcgtcggagttcgtgaagctggagtaccacatgggcccggtcctggcgtcggccatcacggtgcacccgatctggtacgggccctggccggcggcgcagaagcgcacgatccgcgcgttcctccgctccctgtcgccttctgccgccatcccttcgccgtccgtgtcggcgtggtggcgcacggtgcggctgtacgcggaccagacctcggcgaacgtgtcggcgtcggtgtcgctgggcgcggagaagtcggacgcgcgcatgtcccgcggcgcgcggctgtcgcgcatggacatccaggcagtggtccgcgacgccgtgacggcgcgcacccggcccctgcccgtggacgccagcggcggcgtgtacctggtgctcacgtccccggacgtcgccgtggacgacttctgcgggcaggtgtgcggcttccactacttcaccttcgcgtcggtggtcgggtccacgctgccgtacgcgtgggtgggcaactcggcgcgcaggtgccccgaggtgtgcgcgtacccgttcgcggtcccggcgtacgtgcgcgggcgcaggcccgagtccccgcccaacggcgacgtcggggtggacggcatggtcagcgtcatcgcgcacgagctcgcggagatggcgtccaacccgctcgccaacgcctggtacgccggcggcgacccgtcgttccccacggagatcgcagacctctgcgagggcatctacggcaccggcgggggaggggcgtacacggggcagctgctcacggacgcgcgctccggcgcggcctacaacgtgaacggcgtcggcgggcgcaggttcctcgtgcagtgggtgtggaaccccgtgctcagctactgctccggccccaacgcgctcgaccagtagctgtttggtttcggtttcgtttcatctcctactaggatggaatggaatgggattttactacgtaccaatgaatcgaatcctctagcgcatttggattttcctctcctctcctctcctctccccggggaaatccatgggatgcttctgtatagagttgttattatcaattaattaatgccactttcggtggaaggaaaaggaacatgtctgtaacctgcagagctggctgggttaaaaccgtcagggtttaccatccattggctggctttactagcaggtgcagtacacagagtggtgggcttcttctctcaaatgatgatggcgctaacacagcaagcattttagcaggacagtgcgtaccatgcttcggagggagtagcacagcacagtgcagtgtgcagagcagaaaaggacaagggccggagtgcactgtgcagcctgcagcgcgcaatgattccccgggactcggactgggtgagggcggtttgtagtgactgcgctgggtggtaggcgtgtc

SEQ ID NO: 154827 - DNA, 294 bp, Zea Mays
tcagcgcgacacgatggttccgaaccagtcgatgccgtcaaactccggcgcgaaccgcggtggcgccgccgccgctccccctccgctcgcgtgagctccgccgtcgcgggagcgcaagtctcgcttctccctgtcctcgtcctcctcctgctgctgctcccgccgcggcgcacgctggtcgtccgcgcccctccgccacgacagccgcgcccagctcccgccgaagccggcgcccgtggaggagaggtcggccggcgacgcgctcaggatcgagaaggccagcaccttgtccat

SEQ ID NO: 154828 - DNA, 1124 bp, Zea Mays
cagcaaccagcaagcggcaagcgcgcgcacacaccaaacgcaactgcaactgcaactgcaagagcacgccacagcagaaaccaacagttccacacgaagcaaaaaaaggggaccctacccctctgccgatttccatccgccgccgtcgtctgtgaccgaccagaccatggacaagatcctggccttctccatcctgagctcgtcgccggcggacatctccgcggccggcctctcctcctcctcctccgccgcccggctctcgtggcgggctcggccccaggcggcggcggcggacgcggcgccaacgccgaggcaggagaaggcggccgaccagcgggccccggcggccgagcgccggcgggagacgcggccgcggttcgcgcccgagttcgacgggctgcactgcttcgagtccatcgtctccgcctgaacttcgaggggcctcctcgtcacatgccgcccccgcgcttggattcgttcctgtcggcggtcaccgagtgaaaaggcgacggcgacgagtaatttgtacagacctgttgtactgtataccgcacccaaaaagtgaatggattaccttcgtttcatactttggtttcgttataaggtttggtccgatgcgtcttcggccttcaattgtggcagaagatggaatttgtgggaggttcccatgaatgtgatcaccttcgattcgattcgacactgaagttgctctgttcgtcgtcctactctacgaaaaggcaatggtggttcttcttcgggggagaaacaataaataaacataagatggatgacggatttgttgtgcactgattggatgatgtaacgtcgtcccgtggatgatgctgtgtcggattatccattggagcacgacaagtaccagtttttaagtagagtgtagcaataatttaactcgtctggtcataaacgaaggcaccggcagcgcgtacacgttaccccccagcggcccagccatatgatgaaactgacgcatgtgctgtcgcgcctcgcgaccagccatggaactgaacgggacagttcggcttgggttcatccaccggcagattacctggagctggaggactcggtttcaaattggagaccatccatccatttcggtacagaaa

SEQ ID NO: 154829 - DNA, 87 bp, Zea Mays
ccgacaataccgacgccaactacttctttctcattaatttctcaagcagttcgggttctttttttttggggaaaagaaatgaagaga

SEQ ID NO: 154830 - DNA, 504 bp, Zea Mays
aactttgcccgatcgtcgtcgtcgtcgtcgtcccgtacgtacgtgctctagctaaccgtagcgtcggccggcggtcgcgtgggcagggcagcgggcaacggagggcggcaccggcatggacaggatcctggccatgtccctcgtcggtgcggggccaggcaacgtcttcggcccgggcatgagcgccggcgcgctggagagcttcgcacgccccgcggggcgcgccaggacggagcgcagcggcggcaggggtggcgcggcggcgcggggcgcaaggtcggcgtcggcggagaagtgcggcgccgaccagatcaggacgggtgcggcggaggctgacggtgccggtggccaggaggggggcgccgccggtgcggacgcggcgcggtactgcccggcggcgttggaccgcgggttctgcttcgacgccgtcgtcgcaccgtactgacatgcgcgccgccacgtggcgcaagttctcggcgagttcttgtttggacgcgatagggg

SEQ ID NO: 154831 - DNA, 2328 bp, Zea Mays
cccgtcacatccatccatcgaccgatcgatcgccacagccaacaccacccgccgaggcgacgcgacagccgccaggaggaaggaataaactcactgccagccagtgaagggggagaagtgtactgctccgtccaccagtgcgcgcaccgcccggcagggctgctcatctcgtcgacgaccagtggattaatcggcatggcggctctagccacgtcgcagctcgtcgcaacgcgcgccggcctgggcgtcccggacgcgtccacgttccgccgcggcgccgcgcagggcctgagggggggccggacggcgtcggcggcggacacgctcagcatgcggaccagcgcgcgcgcggcgcccaggctccagcaccagcagcagcagcaggcgcgccgcggggccaggttcccgtcgctcgtcgtgtgcgccagcgccggcatgaacgtcgtcttcgtcggcgccgagatggcgccgtggagcaagaccggcggcctcggcgacgtcctcggcggcctgccgccggccatggccgcgaatgggcaccgtgtcatggtcgtctctccccgctacgaccagtacaaggacgcctgggacaccagcgtcgtgtccgagatcaagatgggagacaggtacgagacggtcaggttcttccactgctacaagcgcggagtggaccgcgtgttcgttgaccacccactgttcctggagagggtttggggaaagaccgaggagaagatctacgggcctgacgctggaacggactacagggacaaccagctgcggttcagcctgctatgccaggcagcacttgaagctccaaggatcctgagcctcaacaacaacccatacttctccggaccatacggggaggacgtcgtgttcgtctgcaacgactggcacaccggccctctctcgtgctacctcaagagcaactaccagtcccacggcatctacagggacgcaaagaccgctttctgcatccacaacatctcctaccagggccggttcgccttctccgactacccggagctgaacctcccggagagattcaagtcgtccttcgatttcatcgacggctacgagaagcccgtggaaggccggaagatcaactggatgaaggccgggatcctcgaggccgacagggtcctcaccctcgacaacatcatgcgcctcaccggcatcaccggcatcgtcaacggcatggacgtcagcgagtgggaccccagcagggacaagtacatcgccgtgaagtacgacgtgtcgacggccgtggaggccaaggcgctgaacaaggaggcgctgcaggcggaggtcgggctcccggtggaccggaacatcccgctggtggcgttcatcggcaggctggaagagcagaagggacccgacgtcatggcggccgccatcccgcagctcatggagatggtggaggacgtgcagatcgttctgctgggcacgggcaagaagaagttcgagcgcatgctcatgagcgccgaggagaagttcccaggcaaggtgcgcgccgtggtcaagttcaacgcggcgctggcgcaccacatcatggccggcgccgacgtgctcgccgtcaccagccgcttcgagccctgcggcctcatccagctgcaggggatgcgatacggaacgccctgcgcctgcgcgtccaccggtggactcgtcgacaccatcatcgaaggcaagaccgggttccacatgggccgcctcagcgtcgactgcaacgtcgtggagccggcggacgtcaagaaggtggccaccaccttgcagcgcgccatcaaggtggtcggcacgccggcgtacgaggagatggtgaggaactgcatgatccaggatctctcctggaagggccctgccaagaactgggagaacgtgctgctcagcctcggggtcgccggcggcgagccaggggtcgaaggcgaggagatcgcgccgctcgccaaggagaacgtggccgcgccctgaagagttcggcctgcaggccccctgatctcgcgcgtggtgcaaacatgttgggacatcttcttatatatgctgtttcgtttatgtgatatggacaagtatgtgtagctgcttgcttgtgctagtgtaatatagtgtagtggtggccagtggcacaacctaataagcgcatgaactaatttgcttgcgtgtgtagttaagtaccgatcggtaatttttatattgcgagtaaataaatggacctgtagtggtggagtaaataatccctgctgttcggtgttcttatcgcttctcgtatagatgttatatagagtacattttctttctgaatcctacgtttttcaagtgtttttgaattaa

SEQ ID NO: 154832 - DNA, 2295 bp, Zea Mays
cccgtcacatccatccatcgaccgatcgatcgccacagccaacaccacccgccgaggcgacgcgacagccgccaggaggaaggaataaactcactgccagccagtgaagggggagaagtgtactgctccgtccaccagtgcgcgcaccgcccggcagggctgctcatctcgtcgacgaccagtggattaatcggcatggcggctctagccacgtcgcagctcgtcgcaacgcgcgccggcctgggcgtcccggacgcgtccacgttccgccgcggcgccgcgcagggcctgagggggggccggacggcgtcggcggcggacacgctcagcatgcggaccagcgcgcgcgcggcgcccaggctccagcaccagcagcagcagcaggcgcgccgcggggccaggttcccgtcgctcgtcgtgtgcgccagcgccggcatgaacgtcgtcttcgtcggcgccgagatggcgccgtggagcaagaccggcggcctcggcgacgtcctcggcggcctgccgccggccatggccgcgaatgggcaccgtgtcatggtcgtctctccccgctacgaccagtacaaggacgcctgggacaccagcgtcgtgtccgagatcaagatgggagacaggtacgagacggtcaggttcttccactgctacaagcgcggagtggaccgcgtgttcgttgaccacccactgttcctggagagggtttggggaaagaccgaggagaagatctacgggcctgacgctggaacggactacagggacaaccagctgcggttcagcctgctatgccaggcagcacttgaagctccaaggatcctgagcctcaacaacaacccatacttctccggaccatacggggaggacgtcgtgttcgtctgcaacgactggcacaccggccctctctcgtgctacctcaagagcaactaccagtcccacggcatctacagggacgcaaagaccgctttctgcatccacaacatctcctaccagggccggttcgccttctccgactacccggagctgaacctcccggagagattcaagtcgtccttcgatttcatcgacggctacgagaagcccgtggaaggccggaagatcaactggatgaaggccgggatcctcgaggccgacagggtcctcaccgtcagcccctactacgccgaggagctcatctccggcatcgccaggggctgcgagctcgacaacatcatgcgcctcaccggcatcaccggcatcgtcaacggcatggacgtcagcgagtgggaccccagcagggacaagtacatcgccgtgaagtacgacgtgtcgacggccgtggaggccaaggcgctgaacaaggaggcgctgcaggcggaggtcgggctcccggtggaccggaacatcccgctggtggcgttcatcggcaggctggaagagcagaagggacccgacgtcatggcggccgccatcccgcagctcatggagatggtggaggacgtgcagatcgttctgctgggcacgggcaagaagaagttcgagcgcatgctcatgagcgccgaggagaagttcccaggcaaggtgcgcgccgtggtcaagttcaacgcggcgctggcgcaccacatcatggccggcgccgacgtgctcgccgtcaccagccgcttcgagccctgcggcctcatccagctgcaggggatgcgatacggaacgtgcaacgtcgtggagccggcggacgtcaagaaggtggccaccaccttgcagcgcgccatcaaggtggtcggcacgccggcgtacgaggagatggtgaggaactgcatgatccaggatctctcctggaagggccctgccaagaactgggagaacgtgctgctcagcctcggggtcgccggcggcgagccaggggtcgaaggcgaggagatcgcgccgctcgccaaggagaacgtggccgcgccctgaagagttcggcctgcaggccccctgatctcgcgcgtggtgcaaacatgttgggacatcttcttatatatgctgtttcgtttatgtgatatggacaagtatgtgtagctgcttgcttgtgctagtgtaatatagtgtagtggtggccagtggcacaacctaataagcgcatgaactaatttgcttgcgtgtgtagttaagtaccgatcggtaatttttatattgcgagtaaataaatggacctgtagtggtggagtaaataatccctgctgttcggtgttcttatcgcttctcgtatagatgttatatagagtacattttctttctgaatcctacgtttttcaagtgtttttgaattaa

SEQ ID NO: 154833 - DNA, 2517 bp, Zea Mays
atcgtggggggcgcgggcggaggagagcgtggcgagggccgagagcagcgcgcggccgggtcacgcaacgcgccccacgtactgccctccccctccgcgcgcgctagaaataccgaggcctggaccggggggggccccgtcacatccatccatcgaccgatcgatcgccacagccaacaccacccgccgaggcgacgcgacagccgccaggaggaaggaataaactcactgccagccagtgaagggggagaagtgtactgctccgtccaccagtgcgcgcaccgcccggcagggctgctcatctcgtcgacgaccagtggattaatcggcatggcggctctagccacgtcgcagctcgtcgcaacgcgcgccggcctgggcgtcccggacgcgtccacgttccgccgcggcgccgcgcagggcctgagggggggccggacggcgtcggcggcggacacgctcagcatgcggaccagcgcgcgcgcggcgcccaggctccagcaccagcagcagcagcaggcgcgccgcggggccaggttcccgtcgctcgtcgtgtgcgccagcgccggcatgaacgtcgtcttcgtcggcgccgagatggcgccgtggagcaagaccggcggcctcggcgacgtcctcggcggcctgccgccggccatggccgcgaatgggcaccgtgtcatggtcgtctctccccgctacgaccagtacaaggacgcctgggacaccagcgtcgtgtccgagatcaagatgggagacaggtacgagacggtcaggttcttccactgctacaagcgcggagtggaccgcgtgttcgttgaccacccactgttcctggagagggtttggggaaagaccgaggagaagatctacgggcctgacgctggaacggactacagggacaaccagctgcggttcagcctgctatgccaggcagcacttgaagctccaaggatcctgagcctcaacaacaacccatacttctccggaccatacggggaggacgtcgtgttcgtctgcaacgactggcacaccggccctctctcgtgctacctcaagagcaactaccagtcccacggcatctacagggacgcaaagaccgctttctgcatccacaacatctcctaccagggccggttcgccttctccgactacccggagctgaacctcccggagagattcaagtcgtccttcgatttcatcgacggctacgagaagcccgtggaaggccggaagatcaactggatgaaggccgggatcctcgaggccgacagggtcctcaccgtcagcccctactacgccgaggagctcatctccggcatcgccaggggctgcgagctcgacaacatcatgcgcctcaccggcatcaccggcatcgtcaacggcatggacgtcagcgagtgggaccccagcagggacaagtacatcgccgtgaagtacgacgtgtcgacggccgtggaggccaaggcgctgaacaaggaggcgctgcaggcggaggtcgggctcccggtggaccggaacatcccgctggtggcgttcatcggcaggctggaagagcagaagggacccgacgtcatggcggccgccatcccgcagctcatggagatggtggaggacgtgcagatcgttctgctgggcacgggcaagaagaagttcgagcgcatgctcatgagcgccgaggagaagttcccaggcaaggtgcgcgccgtggtcaagttcaacgcggcgctggcgcaccacatcatggccggcgccgacgtgctcgccgtcaccagccgcttcgagccctgcggcctcatccagctgcaggggatgcgatacggaacgccctgcgcctgcgcgtccaccggtggactcgtcgacaccatcatcgaaggcaagaccgggttccacatgggccgcctcagcgtcgactgcaacgtcgtggagccggcggacgtcaagaaggtggccaccaccttgcagcgcgccatcaaggtggtcggcacgccggcgtacgaggagatggtgaggaactgcatgatccaggatctctcctggaagggccctgccaagaactgggagaacgtgctgctcagcctcggggtcgccggcggcgagccaggggtcgaaggcgaggagatcgcgccgctcgccaaggagaacgtggccgcgccctgaagagttcggcctgcaggccccctgatctcgcgcgtggtgcaaacatgttgggacatcttcttatatatgctgtttcgtttatgtgatatggacaagtatgtgtagctgcttgcttgtgctagtgtaatatagtgtagtggtggccagtggcacaacctaataagcgcatgaactaatttgcttgcgtgtgtagttaagtaccgatcggtaatttttatattgcgagtaaataaatggacctgtagtggtggagtaaataatccctgctgttcggtgttcttatcgcttctcgtatagatgttatatagagtacattttctttctgaatcctacgtttttcaagtgtttttgaattaa

SEQ ID NO: 154834 - DNA, 2487 bp, Zea Mays
atcgtggggggcgcgggcggaggagagcgtggcgagggccgagagcagcgcgcggccgggtcacgcaacgcgccccacgtactgccctccccctccgcgcgcgctagaaataccgaggcctggaccggggggggccccgtcacatccatccatcgaccgatcgatcgccacagccaacaccacccgccgaggcgacgcgacagccgccaggaggaaggaataaactcactgccagccagtgaagggggagaagtgtactgctccgtccaccagtgcgcgcaccgcccggcagggctgctcatctcgtcgacgaccagtggattaatcggcatggcggctctagccacgtcgcagctcgtcgcaacgcgcgccggcctgggcgtcccggacgcgtccacgttccgccgcggcgccgcgcagggcctgagggggggccggacggcgtcggcggcggacacgctcagcatgcggaccagcgcgcgcgcggcgcccaggctccagcaccagcagcagcagcaggcgcgccgcggggccaggttcccgtcgctcgtcgtgtgcgccagcgccggcatgaacgtcgtcttcgtcggcgccgagatggcgccgtggagcaagaccggcggcctcggcgacgtcctcggcggcctgccgccggccatggccgtaagcgcgcgcaccgagacatgcatccgttggatcgcgtcttcttcgtgctcttgccgcgtgcatgatgcatgtgtttcctcctggctcgtgtatgtgactgacgtgtgtgttcgggcatgcaatgcatgcaggcgaatgggcaccgtgtcatggtcgtctctccccgctacgaccagtacaaggacgcctggaacggactacagggacaaccagctgcggttcagcctgctatgccaggcagcacttgaagctccaaggatcctgagcctcaacaacaacccatacttctccggaccatacggggaggacgtcgtgttcgtctgcaacgactggcacaccggccctctctcgtgctacctcaagagcaactaccagtcccacggcatctacagggacgcaaagaccgctttctgcatccacaacatctcctaccagggccggttcgccttctccgactacccggagctgaacctcccggagagattcaagtcgtccttcgatttcatcgacggctacgagaagcccgtggaaggccggaagatcaactggatgaaggccgggatcctcgaggccgacagggtcctcaccgtcagcccctactacgccgaggagctcatctccggcatcgccaggggctgcgagctcgacaacatcatgcgcctcaccggcatcaccggcatcgtcaacggcatggacgtcagcgagtgggaccccagcagggacaagtacatcgccgtgaagtacgacgtgtcgacggccgtggaggccaaggcgctgaacaaggaggcgctgcaggcggaggtcgggctcccggtggaccggaacatcccgctggtggcgttcatcggcaggctggaagagcagaagggacccgacgtcatggcggccgccatcccgcagctcatggagatggtggaggacgtgcagatcgttctgctgggcacgggcaagaagaagttcgagcgcatgctcatgagcgccgaggagaagttcccaggcaaggtgcgcgccgtggtcaagttcaacgcggcgctggcgcaccacatcatggccggcgccgacgtgctcgccgtcaccagccgcttcgagccctgcggcctcatccagctgcaggggatgcgatacggaacgccctgcgcctgcgcgtccaccggtggactcgtcgacaccatcatcgaaggcaagaccgggttccacatgggccgcctcagcgtcgactgcaacgtcgtggagccggcggacgtcaagaaggtggccaccaccttgcagcgcgccatcaaggtggtcggcacgccggcgtacgaggagatggtgaggaactgcatgatccaggatctctcctggaagggccctgccaagaactgggagaacgtgctgctcagcctcggggtcgccggcggcgagccaggggtcgaaggcgaggagatcgcgccgctcgccaaggagaacgtggccgcgccctgaagagttcggcctgcaggccccctgatctcgcgcgtggtgcaaacatgttgggacatcttcttatatatgctgtttcgtttatgtgatatggacaagtatgtgtagctgcttgcttgtgctagtgtaatatagtgtagtggtggccagtggcacaacctaataagcgcatgaactaatttgcttgcgtgtgtagttaagtaccgatcggtaatttttatattgcgagtaaataaatggacctgtagtggtggagtaaataatccctgctgttcggtgttcttatcgcttctcgtatagatgttatatagagtacattttctttctgaatcctacgtttttcaagtgtttttgaattaa

SEQ ID NO: 154835 - DNA, 2395 bp, Zea Mays
atcgtggggggcgcgggcggaggagagcgtggcgagggccgagagcagcgcgcggccgggtcacgcaacgcgccccacgtactgccctccccctccgcgcgcgctagaaataccgaggcctggaccggggggggccccgtcacatccatccatcgaccgatcgatcgccacagccaacaccacccgccgaggcgacgcgacagccgccaggaggaaggaataaactcactgccagccagtgaagggggagaagtgtactgctccgtccaccagtgcgcgcaccgcccggcagggctgctcatctcgtcgacgaccagtggattaatcggcatggcggctctagccacgtcgcagctcgtcgcaacgcgcgccggcctgggcgtcccggacgcgtccacgttccgccgcggcgccgcgcagggcctgagggggggccggacggcgtcggcggcggacacgctcagcatgcggaccagcgcgcgcgcggcgcccaggctccagcaccagcagcagcagcaggcgcgccgcggggccaggttcccgtcgctcgtcgtgtgcgccagcgccggcatgaacgtcgtcttcgtcggcgccgagatggcgccgtggagcaagaccggcggcctcggcgacgtcctcggcggcctgccgccggccatggccgcgaatgggcaccgtgtcatggtcgtctctccccgctacgaccagtacaaggacgcctggaacggactacagggacaaccagctgcggttcagcctgctatgccaggcagcacttgaagctccaaggatcctgagcctcaacaacaacccatacttctccggaccatacggggaggacgtcgtgttcgtctgcaacgactggcacaccggccctctctcgtgctacctcaagagcaactaccagtcccacggcatctacagggacgcaaagaccgctttctgcatccacaacatctcctaccagggccggttcgccttctccgactacccggagctgaacctcccggagagattcaagtcgtccttcgatttcatcgacggctacgagaagcccgtggaaggccggaagatcaactggatgaaggccgggatcctcgaggccgacagggtcctcaccgtcagcccctactacgccgaggagctcatctccggcatcgccaggggctgcgagctcgacaacatcatgcgcctcaccggcatcaccggcatcgtcaacggcatggacgtcagcgagtgggaccccagcagggacaagtacatcgccgtgaagtacgacgtgtcgacgtgtacgtacgtgcgtgcgacggtggtgtggtgtccggttcaggccgtggaggccaaggcgctgaacaaggaggcgctgcaggcggaggtcgggctcccggtggaccggaacatcccgctggtggcgttcatcggcaggctggaagagcagaagggacccgacgtcatggcggccgccatcccgcagctcatggagatggtggaggacgtgcagatcgttctgctgggcacgggcaagaagaagttcgagcgcatgctcatgagcgccgaggagaagttcccaggcaaggtgcgcgccgtggtcaagttcaacgcggcgctggcgcaccacatcatggccggcgccgacgtgctcgccgtcaccagccgcttcgagccctgcggcctcatccagctgcaggggatgcgatacggaacgccctgcgcctgcgcgtccaccggtggactcgtcgacaccatcatcgaaggcaagaccgggttccacatgggccgcctcagcgtcgactgcaacgtcgtggagccggcggacgtcaagaaggtggccaccaccttgcagcgcgccatcaaggtggtcggcacgccggcgtacgaggagatggtgaggaactgcatgatccaggatctctcctggaagggccctgccaagaactgggagaacgtgctgctcagcctcggggtcgccggcggcgagccaggggtcgaaggcgaggagatcgcgccgctcgccaaggagaacgtggccgcgccctgaagagttcggcctgcaggccccctgatctcgcgcgtggtgcaaacatgttgggacatcttcttatatatgctgtttcgtttatgtgatatggacaagtatgtgtagctgcttgcttgtgctagtgtaatatagtgtagtggtggccagtggcacaacctaataagcgcatgaactaatttgcttgcgtgtgtagttaagtaccgatcggtaatttttatattgcgagtaaataaatggacctgtagtggtggagtaaataatccctgctgttcggtgttcttatcgcttctcgtatagatgttatatagagtacattttctttctgaatcctacgtttttcaagtgtttttgaattaa

SEQ ID NO: 154836 - DNA, 1021 bp, Zea Mays
agcagtacatgggcggcggcaggcaggcgcccgcgccggacaccaagccggcgctgctggagcagctggaccatctgcaccaccaccttgccgcagcgcctactactagggccgccgccggcttctactacgggaagttcatgaagctcccgcccctcgagcacgccggcctgccgccaagcccaccaccaccaggagcgcgcgagtacggcgccgccgccgccgccggctgggacgacgacgacgacgcgctggaccgcctcgccgcctacgaccacctcaacggcctctccaacgacgcgtccaagaacatggccgccgccgccgtggacggcgacctgtggagcctcgcacggtccgtgtcggcgctgcacgcggacttgaccatgaacaacaacgtctagctcccgaccaacaacaacagggccccgatacacatccatatggcgtgtgcatgcatgcatgcacgcattgcataccgcgcgcaccactaaccactcgaccagcatgcatgcatacgtgcgcaccccacccgcgcccggggccgctagtgcgtcgtgctcccgtagtgcgtgcatgcatggccgccgcacgtacgtattgcacgctcgctcgcgcgtacgtgtacgtacgtacgtacgtgcgcgaataagctagctagccctaggatcggaaacatatgtatgcatatccattgcatggccggatgtacatcaggagctgctgctggtgtatgtccgccgccgccgtccaaactccaaagtgagctgagatcgatcgatcgagctcgctcgctccaggtgtgcagtacgtacgtacgtaagcgcctgtgtatgtgtaagcagacagcgtggtagtagctctagctagtagaacatacttacacacactatatactgcataccgtttgtacctatcatatatagattactactgtattattgcaaaccgctttggggggtttttttagggagtgcagtgaggtgtgatatcatttcacctaatttaatttgctagtgct

SEQ ID NO: 154837 - DNA, 3264 bp, Zea Mays
atggccgcctcgtcgtcaccgcgcgccgcggggctccgcgggccctccctgaccgtcctcctctttctcgtcgccgcgatggtgtcggttccccccgcggcggccgagatccgggagaccgcgatccgggccgacccgcggagcatcatcccgctggacgagttcggcttctcccactcgggcgtgctggagctcaacgtctccggcatcgctttcgatccgcaggcctccgcggagctggacctctcccagctcggcttcttcctctccacgctcgacgcctgggttcacgtcctccgccagcttcaggacctagacgtcacctgcgcgctccagtcggagctcgtcaagctcgccttctcctttgaccgcctccgcccgccctccaaccctgccggcgtcgaggtagcccgctcttcctccttctctaccgccttccgcgtgtcggagccagggcagtacacgctcgttttcgccaactgcctcggcggcggcctcaaggtcgacatggacgtccgctccgccatgtacaacgtcgacccggccaccggggagcgccagtacctctccgcgggagcctcggcgctgccctccttctacttcctcttctgcctcgcttacgctggcctcgccgccgcctgggtttccatcctcctccgcaagcgggccgccgtcttccggatccactacttcatgctcgccgtgctcgtgctcaaggctctcaacctcctcgccgaggccgaggacaagtcatgcatcgagcgcaccggcacgacccacggatgggacgtgctcttctacatcttcagcttcctcaaggggatctcgctcttcacgctcatagtgctcatcggcaccggctggtctttcctcaagccctacctggccgaccgagagaagaaggtgcttatggcggtcatccccctgcaggtcgtagccaacatcgcgcaggtggtgattgacgaatctggaccctatgctcgggactgggtcacctggaagcagattttcttgctggttgatgtgatatgctgttgtgctgtgctcttcccgattgtgtggtccatcaagaaccttcgggaggctgctcgctcggatgggaaggccgctgtgaacctcatgaagctcaccctcttccgccagtactatgtggtcgtcatctgctacatttacttcacgcgtgttgtagtgtacgctacagaccatcacctcataccgcgcgtccgtcgcatttaccgacccaccacgccaccccccttcggcccttccccacgcgccgctcgcccgccctctccaaatcccaaatccaacccaccggccaccgcaccaccgccgcctatcgtccccacccgcagccccccgcccccgatcgcggcggcacccataatggccgcctcgtcgtcaccgcgcgccgcggggctccgcgggccctccctgaccgtcctcctctttctcgtcgccgcgatggtgtcggttccccccgcggcggccgagatccgggagaccgcgatccgggccgacccgcggagcatcatcccgctggacgagttcggcttctcccactcgggcgtgctggagctcaacgtctccggcatcgctttcgatccgcaggcctccgcggagctggacctctcccagctcggcttcttcctctccacgctcgacgcctgggttcacgtcctccgccagcttcaggacctagacgtcacctgcgcgctccagtcggagctcgtcaagctcgccttctcctttgaccgcctccgcccgccctccaaccctgccggcgtcgaggtagcccgctcttcctccttctctaccgccttccgcgtgtcggagccagggcagtacacgctcgttttcgccaactgcctcggcggcggcctcaaggtcgacatggacgtccgctccgccatgtacaacgtcgacccggccaccggggagcgccagtacctctccgcgggagcctcggcgctgccctccttctacttcctcttctgcctcgcttacgctggcctcgccgccgcctgggtttccatcctcctccgcaagcgggccgccgtcttccggatccactacttcatgctcgccgtgctcgtgctcaaggctctcaacctcctcgccgaggccgaggacaagtcatgcatcgagcgcaccggcacggcccacggatgggacgtgctcttctacatcttcagcttcctcaaggggatctcgctcttcacgctcatagtgctcatcggcaccggctggtctttcctcaagccctacctggccgaccgagagaagaaggtgcttatggcggtcatccccctgcaggtcgtagccaacatcgcgcaggttgtgattgacgaatctggaccctatgctcgggactgggtcacctggaagcagattttcttgctggttgatgtgatctgctgctgtgctgtgctcttcccgattgtgtggtccatcaagaacctccgggaggctgctcgctcggatgggaaggccgctgtgaacctcatgaagctcaccctcttccgccagtactatgtggtcgtcatctgctacatttacttcacgcgtgttgtggtgtatgcgctacagaccatcacctcataccggtacctgtggactagcgtcgtggccggggagctcgcgacgctcgcgttctatgtctttactgggtacaagttccggcctgaggtgcataacccatactttgccattgatgatgaggaagaggaggctgcagctgaggcgctaaagttggatgatgaattcgagctatgattgaggggttaggaattggcatatcctccgtgccagtggtgatattggtgttgtatgtcccagcagaggacaagtggcatagactggtacctagtccatatccttttgtttctccttttgagttggttacattttatcttaatgtaattgggtagtgacaacaaccctgtgtctgttaagcaatgcagtttggctttgccttaaattttatacacaaccattgagatgaggtgtttccattctagatgttcattttgttcacatagttaaaactgactgtatgatactgaatgtacttctgagttctgacttgctcaagttcatctgtctagtttcactttgctcttacactataggaacccctattggcggaaaacatgctgattttaatattcaagtgtaacgtttcctatatttgctatgtcactcaaaaaaaaaactaagattctgttgccacagaatcgcctacaaggagttgcagatgctgtc

SEQ ID NO: 154838 - DNA, 192 bp, Zea Mays
ttacaatcattgtttctgtttaattacaatcatagtttctgtttaatagtttctgttttttgttatccatattttaagttgctactgttcatatgattgtaattcaaatgattgtaattagttcaatgagaaaaattactagcaggaggatctgtttaattcagattattgtaaatcatatttagatgattg

SEQ ID NO: 154839 - DNA, 360 bp, Zea Mays
atggaggcgtgctactgcttgtcctcatcggcgtcgtcgcccttcagcgtccatcctcgtcgggaagctggtgaacaacatgatctcgtggcgaggggactcggcgttgcgcgacggcgaggatgccaagctggacctatccaggggcatgtacgacacaggcgaccacgtgaagttcgggacgcgtcggcgttcctggtgtacaagcccgccaacgcgacgtacatgtcttcgctcctcctcgaccacatcgagcggctgtttgcattcgccgacgcataccggggctcctacacgcgcacgttcctggagctcagcgactactacaactccactatgtaccaggacgagctcatgtag

SEQ ID NO: 154840 - DNA, 159 bp, Zea Mays
gagcggcagctgccacccagtgatcaacatgaaagagagcacaagcggagagaagaggaaggggagaaaaggcaagggtgaaggagagaagatggcaaaaaagttaaatgttccagaggcaactgcaggggaaggagatcaccaatgcagcgaatcagg

SEQ ID NO: 154841 - DNA, 2140 bp, Zea Mays
ccaaagtccaaaagcgaggaaaggaaggaggacgtcgcgcaagaaacgaaagccacccgccccgcccgcctccaaccgcgcttaaatgcgcgcctttcttcttccgcgttaaaccctccggctgtctcatcgctccgcgtagtaaactcttgttacaaaaggccagctgctcgtttgctccgccgcgcgccgtcggttggctgctcgctcgctctggctgggcggcgtcggttgctcggctgagtccggccggggagcgagcaatgcacattgcgacctgcgtgtggcaagagaaggcgtcggccggcggcatggggggagctgctgctggtggaggcggctgcgccggcggagagtggggcgcggcgcgcgcgaaggtggcgtcggtgctgggcgtggccgggtgcgcgctcaactgcgcggtgagcttcgtggtgttctcggcgctggacgtgctggacgtggtgctgtgcctggtgtacaagctggtggactacgcggcggaggcggagtggaagtcgtgctactgcgcggcggcgtcgggcccgcgggcggcgcagctgcccctcgccgccgcgccaccagcggcgggcgggcccaaggtggtgcggctgtcggcgtcgtccgcgaagctgcagctggaggacgtgtcggacacgctgtacgtgcggccgtcgctgctggccgacgcgacgcgggcgggcaacggcagcggcagcggcgtggcccccgcgctcaccgtgagccccgccatcgcggagctgatccgcgggaagatggaccgggccccgcggccgccgcggcaggcgccgtgctggtccgactgcgactgcaaggtgtgccacgcctggagcgggtccccggcgtcgtcgtcccacctgtacgtgcacgtccaggcgccggcgatggcggtggagacggaggacgtggtgttcatccacggcttcatctcgtcgtccgtgttctggacggagacggtgttcccggcgttcagcccctcggcgcggtcccggtaccggatgttcgccgtggacctgctggggttcgggcgcagccccaagccggcggagtcgctgtacacgctgcgcgagcacgtggagatgatcgagcgctccgtgctccggcgctaccggatcgggtcgttccacgtggtggcgcactccctcgggtccgtgctggcgctcgccctcgccgtcaagtaccccgccgccgtcaggtcgctcacgctcctcgcgccgccctacttcccggtgccggagtcggagtcggagtcggcggcgcagtacgtgatgcggcgcgtggctccgcggcgggtgtggccgccgatcgcgttcggggcgtccatggcgtgctggtacgagcacgtgagccgcaccatctgcctcaccatctgccgccaccaccgcgtctgggaccgcctcttcaggatcttcaccaggaacagggtgcggacgttcctgatcgaggcgttcatgtgccacacgcacaacgcggcgtggcacacgctgcacaacatcatctgcggcagcgcggggcggatgggcgcgtacctggacgcggtggacagggggctgtcctgcaaggtggcgttcttccacggccgcgacgacgagctgctccccgtcgaatgcacgctggcggcgggcgccagggtgccccgcgcgcgcgtcaccgtctacgaccgcaaggaccacatcaccatcgtcgtcggacaggagcgactcttcgccgccgagctagaggccatctggagggccgactagctagcgctagctgcctctgctagtacgtacccgttgcgttgcgttgcgttgcttgcgtacgtccctctcggacgacaaacgcttttgctgctgctgctggttctggttctggcagtcagtgtgcacagaacgaatgaagctaggcaataacatgcatggtagcctgcaaaacatccaagaacatgtacgtacaattgtaggatgaccgctgtatcatctctctctctctctttttttttctggtataaattcgagtgtcctcaacggaccatatatatatatgtgtatgtataccctaaacctatacgagagtacgagactcactcgtcagtcagtcagtcattcagtccctattattgattgttcgattggaccaa

SEQ ID NO: 154842 - DNA, 2352 bp, Zea Mays
aaaccctggttctaccacgcgactaactgagccgccgacgccaggcctccacgccgcatccgcgtgaccgcgcctccgagctccatagccccgggccgccggcgccgggccatcgtgatctcgtccgcctcccagcatcgaccggacctgcccgcagcccgcgcccaggccatcgcgccgccgacccgagcttcgccaggcgcctaggccgctcgcccgcccggccggcaggacgactgggcgagctcctccccgcggaggcggggacggcggacccgcccccaggccgagtcgccgagctccgtcccgcgcgggcgcccccctgcccagtcccagccgccccgctcctgtcccggccaggctcagctccgccctgttccggcctctgtacagcatccaggcacgacgacgcgagacgagatggcaggcctcgaacggcctcgccgccgccctccgccagaccccgtcgccgtgctccggggccaccgcgccgcagtcaacgacgcctgcttccacccctccctccccctcctcttctccggcgcggccgacggggagctcagggcctgggacaccgcgagccaccgcaccgcttcctctgtgtgggctcatgctgggtcggtgggagtgtattctgtcgctgctggtgctggacttggcaataagataatcagccagggcagggatgggacttgtaaatgttgggcgattgaagaagctgggctttcaaggaagccactacttacaatcaaaacaagtacataccatttctgcaagatgtcactggtgaagtcttcttttacacatgccactgaatctggctctagcagctcagctagtgacgtggaaccacaaatagtgccaactgaaaatgcagaatgccatggtgtaaaccctacaataggcccccaagaacatgatcaatgcactacctctaatgggcataatatgctggcaattgctggtcaagaatcctctcaggttgagctttgggacattacaagtgctagaaagatcgtaaccttgccccaaacatgtagtgccaatgcgacagatcatcctactaagaaaaagggactatgcatggctgtgcaagctttcatcccccatgaatccgcaggctacgtaaatattttgtcaagttatgaagatggaagcactctttggtgggatgtacgaaagcctggattacctttatcttcagtgaagtatcattcagaatcagctttatccattgctattgatggattttgcaatggtggaatctcaggaggtgctgatgataaagtagtcatgttcacgctcgaccatccaaagggcacatttattcttaggaaagaaatagaactcgagcgaccgggtattgctggcacagcaattcgtccagacaacaagatcgctgcaaccgctggctgggatcacaggattcgagtgtacaactacaacaaaggaaatgctctagccgtgttgaagtatcacagtgcttcgtgcaatgcagtgaccttctcatctgactgcaagctcatggcttcctgctcggcggataccacggttgcgctgtgggacctctatcccccaaaaccccaaagcaaagcggacatcacagaaacagacgaggcctcctgctagctcatgtagtttgggccttcctgataccttctggcagaattttggagcttccgtgcaatgaaaatctgaacttgtcgcaacagtgcaagcgatttattctttttcgtcaaagaaaagagtaagttatgatgtgccttccacagggaaacgcaaacgtatgcatgcaactgttgttaggaacggttctcttgatttctttatttttcattgaaattctactcggtttcgtggaacagttgtagtgtctcaagagcatgaaattgatttaaaggcaaggcagttgaagaactgactctttgaatactcagatgattgatttgaacaaatttctgcaaatttccagtacactgtacacctacatttgctactgttcgatccaatggcagtactgaaccgggatgcagttcttgctgttgtgcatgtccaggaaagagggtatcgtatcccaatgttccatgtagttggggggttctattgctagaaaagaacattagtccttgctgactcggtgactccaatgcgatgcgagcccatgaacgacggtcctaaccttcacgcgcaacagccgcaatcgccgctcgttctagttctttggcgtcggccagccacggccgcctcaacgccgccgtatcttcaacgtcacttgcggcatccgacgacggagccgaggtgccatcgaaggtgccgtcgaacggcgcctcgcagaaggccatcgcggccacg

SEQ ID NO: 154843 - DNA, 1062 bp, Zea Mays
aaaccctggttctaccacgcgactaactgagccgccgacgccaggcctccacgccgcatccgcgtgaccgcgcctccgagctccatagccccgggccgccggcgccgggccatcgtgatctcgtccgcctcccagcatcgaccggacctgcccgcagcccgcgcccaggccatcgcgccgccgacccgagcttcgccaggcgcctaggccgctcgcccgcccggccggcaggacgactgggcgagctcctccccgcggaggcggggacggcggacccgcccccaggccgagtcgccgagctccgtcccgcgcgggcgcccccctgcccagtcccagccgccccgctcctgtcccggccaggctcagctccgccctgttccggcctctgtacagcatccaggcacgacgacgcgagacgagatggcaggcctcgaacggcctcgccgccgccctccgccagaccccgtcgccgtgctccggggccaccgcgccgcagtcaacgacgcctgcttccacccctccctccccctcctcttctccggcgcggccgacggggagctcagggcctgggacaccgcgagccaccgcaccgcttcctctgtgtggttcgacacttctgctcttgtgctctctgcagccatgagcgatttagttttgtgccagatttggtgtgatggcaattgcatgatatttttgtagggctcatgctgggtcggtgggagtgtattctgtcgctgctggtgctggacttggcaataagataatcagccagggcagggatgggacttgtaaatgttgggcgattgaagaagctgggctttcaaggtatcatttgctcacgctatttgagttcaaaaaacaactcatttttcttcaggagaggcaggtgcacacatctactttttttttcaaatgaaacatatgaccttaaatttgaaggattatctactatctagtgaaaaataaactctcatgaatgtaaatgaaaagggaaaacctcacatttgtcacacacacatacgtaggcagaaaatattgctaaacttagaagacatatagatg

SEQ ID NO: 154844 - DNA, 661 bp, Zea Mays
cgcccagctgccgctgtttagtttttttccctggcttctctgctgttcgcctgttctagtgttcttcacggtcacgggcaggctgcagctttgcagattgtctccatcccgccaatcccgccagcaacccagcacaaccgctcgtcagatttgctgctagcttcttccgtgtggctgttctccaagagtctgacgcccacaaatttgctgctagcttccaccctctgactcccacgctgcccgcactaccatctcgtgtgaaggaagagctgtgcgcgagaaagttctgcatatgtgttgttggcctgctgtgcactagttcttcacgtggcggctctccacaagacagcaagcgcaggacagcgacgagttgggtggaggcgctggcacaattcctgcgatgttgtgggattcggacagcgaagatgaagtgcacgtggttgaccatcctagtgagcatcgtgttgctactcacgtagagaaaggaaagaccatggctgatgccaacgcatcttttagtggtgctgatgtggtgcttgatcgatatggggtaccccaagactcctaaactctgctggtaaccaccatcagcacaagctgcaaaggtctgatgggcgtaatacaggtcaaagctccatccactcaagggacacgatcttgc

SEQ ID NO: 154845 - DNA, 1666 bp, Zea Mays
ctcccccaatccccagcagcctcctccaacccacgaggccacgagagagagagagagaggcagaggcagccgctgccccggagccacgcctcccctcgcctcagacccgcggctggtgctcgctcgccggcggcggagcgccggggcaggtaagccggcccccccgtgcccgtccttcggaagtgtctctgcagcagaggaggacacgctgctgacagtgtgatccactgctatcattactgccctattttgctggctgcaggcttgtgataatggacaaccttgggcatagagaaaatggcaggcaaaggcctgagcaatataaagcgcttcatactcagtggatgatacctcaaaggcagctaaaagaccatcaaagtatgaatctcctggcactgatgaatgagaaggacagtgccatccgagaaagggaccatgctctcgctgagaagaaagcagctatagctgagcgagatatggcattcgcccagcgggatgctgcaatggctgaacggaatgctgcaatagtggagagggacaacgccctagctgcactcgaactcgcccgtacaaatgggtttaatatgaatagtgggaatggatttcaccaaggacctcctctcaatggaacaaagaacatccatcaccatgaccatctgtctcatgtccaaacatccccgctgcagctggccaattctccatatgaccatgtcagggagatgcacatatcagaagcataccctatcgcaacagctcccgcaagtgttgggaaggctaagaagccaaggaagagcaattctcaagcttctccatcgaagaggccatcaggtgtactccgaaaaaccaagaaagcaaccagcgactggaagaatgcggggactactggtggagcaggagattcagcccgcgcttctgtgatgaagaacgagtggaaggaccaggatctcggcctgaaccaggtggtgttcgacgagtcaaccatgcccgcgcctgcctgctcatgcacaggggagctccaccaatgctacaaatggggcagtggtgggtggcagtcgtcttgctgcaccatgaacatgtccatgcacccgctcccggtgatgcccaacaggcgccacgctcgcatggggggaaggaagatgagcgggggcgcgttcgcgaagctgctcagccggctggcagcagaaggtcatgacctctcgactccggtggacctcaaggaccactgggccaagcatggcacgaaccggtacatcaccatccggtagccagccggcggccacgttgaagcctgagcctggaaggggggagagatcacacaaacgtcgccttgccctgcatcccctaaaccctctcttttgctatgctctgtaatgccattggtttgtagtggatggagcacttctgcgttcatgaaaccacagcgttgtaggttctcccctccattgtgctggactagtaaactgtgctcgcgagctggagtgctgaagtccgcgagaatccatgtgtaattgtagctcagaagtattcgtcgcgtgatagctgtacagtttgacatctggattcgagtcgagtggtggtagttgaaggtctactgtatatagttggcttcagtatcatggccgccgttgatctgaagccgacgttccagaaatccagacagatacac

SEQ ID NO: 154846 - DNA, 1544 bp, Zea Mays
gaggcagaggcagccgctgccccggagccacgcctcccctcgcctcagacccgcggctggtgctcgctcgccggcggcggagcgccggggcaggtaagccggcccccccgtgcccgtccttcggaagtgtctctgcagcagaggaggacacgctgctgacagcttgtgataatggacaaccttgggcatagagaaaatggcaggcaaaggcctgagcaatataaagcgcttcatactcagtggatgatacctcaaaggcagctaaaagaccatcaaagtatgaatctcctggcactgatgaatgagaaggacagtgccatccgagaaagggaccatgctctcgctgagaagaaagcagctatagctgagcgagatatggcattcgcccagcgggatgctgcaatggctgaacggaatgctgcaatagtggagagggacaacgccctagctgcactcgaactcgcccgtacaaatgggtttaatatgaatagtgggaatggatttcaccaaggacctcctctcaatggaacaaagaacatccatcaccatgaccatctgtctcatgtccaaacatccccgctgcagctggccaattctccatatgaccatgtcagggagatgcacatatcagaagcataccctatcgcaacagctcccgcaagtgttgggaaggctaagaagccaaggaagagcaattctcaagcttctccatcgaagaggccatcaggtgtactccgaaaaaccaagaaagcaaccagcgactggaagaatgcggggactactggtggagcaggagattcagcccgcgcttctgtgatgaagaacgagtggaaggaccaggatctcggcctgaaccaggtggtgttcgacgagtcaaccatgcccgcgcctgcctgctcatgcacaggggagctccaccaatgctacaaatggggcagtggtgggtggcagtcgtcttgctgcaccatgaacatgtccatgcacccgctcccggtgatgcccaacaggcgccacgctcgcatggggggaaggaagatgagcgggggcgcgttcgcgaagctgctcagccggctggcagcagaaggtcatgacctctcgactccggtggacctcaaggaccactgggccaagcatggcacgaaccggtacatcaccatccggtagccagccggcggccacgttgaagcctgagcctggaaggggggagagatcacacaaacgtcgccttgccctgcatcccctaaaccctctcttttgctatgctctgtaatgccattggtttgtagtggatggagcacttctgcgttcatgaaaccacagcgttgtaggttctcccctccattgtgctggactagtaaactgtgctcgcgagctggagtgctgaagtccgcgagaatccatgtgtaattgtagctcagaagtattcgtcgcgtgatagctgtacagtttgacatctggattcgagtcgagtggtggtagttgaaggtctactgtatatagttggcttcagtatcatggccgccgttgatctgaagccgacgttc

SEQ ID NO: 154847 - DNA, 1463 bp, Zea Mays
ctcccccaatccccagcagcctcctccaacccacgaggccacgagagagagagagagaggcagaggcagccgctgccccggagccacgcctcccctcgcctcagacccgcggctggtgctcgctcgccggcggcggagcgccggggcaggtgatccactgctatcattactgccctattttgctggctgcaggcttgtgataatggacaaccttgggcatagagaaaatggcaggcaaaggcctgagcaatataaagcgcttcatactcagtggatgatacctcaaaggcagctaaaagaccatcaaagtatgaatctcctggcactgatgaatgagaaggacagtgccatccgagaaagggaccatgctctcgctgagaagaaagcagctatagctgagcgagatatggcattcgcccagcgggatgctgcaatggctgaacggaatgctgcaatagtggagagggacaacgccctagctgcactcgaactcgcccgtacaaatgggtttaatatgaatagtgggaatggatttcaccaaggacctcctctcaatggaacaaagaacatccatcaccatgaccatctgtctcatgtccaaacatccccgctgcagctggccaattctccatatgaccatgtcagggagatgcacatatcagaagcataccctatcgcaacagctcccgcaagtgttgggaaggctaagaagccaaggaagagcaattctcaagcttctccatcgaagaggccatcaggtgtactccgaaaaaccaagaaagcaaccagcgactggaagaatgcggggactactggtggagcaggagattcagcccgcgcttctgtgatgaagaacgagtggaaggaccaggatctcggcctgaaccaggtggtgttcgacgagtcaaccatgcccgcgcctgcctgctcatgcacaggggagctccaccaatgctacaaatggggcagtggtgggtggcagtcgtcttgctgcaccatgaacatgtccatgcacccgctcccggtgatgcccaacaggcgccacgctcgcatggggggaaggaagatgagcgggggcgcgttcgcgaagctgctcagccggctggcagcagaaggtcatgacctctcgactccggtggacctcaaggaccactgggccaagcatggcacgaaccggtacatcaccatccggtagccagccggcggccacgttgaagcctgagcctggaaggggggagagatcacacaaacgtcgccttgccctgcatcccctaaaccctctcttttgctatgctctgtaatgccattggtttgtagtggatggagcacttctgcgttcatgaaaccacagcgttgtaggttctcccctccattgtgctggactagtaaactgtgctcgcgagctggagtgctgaagtccgcgagaatccatgtgtaattgtagctcagaagtattcgtcgcg

SEQ ID NO: 154848 - DNA, 1206 bp, Zea Mays
gtcacagcgagtaccgagtaggagcaaccgcttgcgtcagacgcacactgacggagagtgatcactgatttctggtcatggcaaccgtaactgaggaagttgctccggtcgtcaccgtctccgaggagccggcgccggaagcggcgaaggaggtggtggagaagccggaggaggggaagaagcccgacgaggagggtgacgagaggaagaaggccgaccccgccgccgagaaggagaagaaggcgaggaagccgcggagcaggaagcccaagtccgccgggctgcaccacccgccctatttcgagatgatcaaggaggcgatcctgtcgcaggacggcgggaaggtcggggcgagcccgtacgcgatcgccaagcacatgggggagaagcaccgggacgtgctcccgcccaattaccgcaaggtgctggccgtgcagctgcgcggcttcgccgccaagggccgcctcgtcaaggtcaaggcctccttcaagctcgccgccgccgaggagaggaagccctccgcggccgcgaaggcgaagaagaaggcgtcggcgggaatggccaagcgcaagagggccgccgcgccggccaagatgaagccggcggccgctgcctcggcgccgtcgagggaggcacgtaaggtgcgcgcgaagcgagcgaggaaggtggccccggcgcccgcgcagcccaagcccaagccagcccgcgccgccgcttccggtgccggcaagaaggtcaacaaggccagcgcctgattagcggcggccgtcctggtccccccgcgcgcgcctccgtgtattatactagccggtagtagcagtaggagttgcaagtactagcagcgtcgtagtcgtgatgatgttgtggtcgtcgtctccgccggcccgatcgatcgggcgctctgttccgccgtgtggcagagttttgtaaataactagtctggtgtgatgcgctcatggcaataaagcgcgcgcttctagcttccttgatgaaacatccatgatccattatcagtgcagtcttgtggttatcgtgttggttagttcgatcactggaactggctcatcatcttcggcttctgggcgaggatgtggtggaggttgggttctgtagtgagtggagtatgttcacgatttcgtcgttgccaatgaacacccttcacccattgtgactcccggtcttttctacttcagtttcaccgtaatg

SEQ ID NO: 154849 - DNA, 1248 bp, Zea Mays
caccgatcactcgtcacagcgagtaccgagtaggagcaaccgcttgcgtcagacgcacactgacggagagtgatcactgatttctggtcatggcaaccgtaactgaggaagttgctccggtcgtcaccgtctccgaggagccggcgccggaagcggcgaaggaggtggtggagaagccggaggaggggaagaagcccgacgaggagggtgacgagaggaagaaggccgaccccgccgccgagaaggagaagaaggccgaccccgccgccgagaaggagaagaaggcgaggaagccgcggagcaggaagcccaagtccgccgggctgcaccacccgccctatttcgagatgatcaaggaggcgatcctgtcgcaggacggcgggaaggtcggggcgagcccgtacgcgatcgccaagcacatgggggagaagcaccgggacgtgctcccgcccaattaccgcaaggtgctggccgtgcagctgcgcggcttcgccgccaagggccgcctcgtcaaggtcaaggcctccttcaagctcgccgccgccgaggagaggaagccctccgcggccgcgaaggcgaagaagaaggcgtcggcgggaatggccaagcgcaagagggccgccgcgccggccaagatgaagccggcggccgctgcctcggcgccgtcgagggaggcacgtaaggtgcgcgcgaagcgagcgaggaaggtggccccggcgcccgcgcagcccaagcccaagccagcccgcgccgccgcttccggtgccggcaagaaggtcaacaaggccagcgcctgattagcggcggccgtcctggtccccccgcgcgcgcctccgtgtattatactagccggtagtagcagtaggagttgcaagtactagcagcgtcgtagtcgtgatgatgttgtggtcgtcgtctccgccggcccgatcgatcgggcgctctgttccgccgtgtggcagagttttgtaaataactagtctggtgtgatgcgctcatggcaataaagcgcgcgcttctagcttccttgatgaaacatccatgatccattatcagtgcagtcttgtggttatcgtgttggttagttcgatcactggaactggctcatcatcttcggcttctgggcgaggatgtggtggaggttgggttctgtagtgagtggagtatgttcacgatttcgtcgttgccaatgaacacccttcacccattgtgactcccggtcttttctacttcagtttcaccgtaatg

SEQ ID NO: 154850 - DNA, 246 bp, Zea Mays
tccacctcttgtgatgatttattagctatgtcatgttcttcaactatagattattgttattcttccttgtcttgtgggactaaccttttgaaggaaaataataagctcaaaaacaaagtgaagaatttaagcaacatgtttgagaggtggcataaatcaaaagtcactcatgatcttataatgaaaaatcaaataagatatgatgacaagagtggccttggtttcaacaagagcaatatcaaaggc

SEQ ID NO: 154851 - DNA, 2386 bp, Zea Mays
cgcccgcgcaacccaattcccgccttcctcccacccacccgctatgctgccgccgcccggcgccggcgcgcgctccacaccacgacgccgcggcacgggctgccgccgcgcccatgagggacggcggcgacggcgacgacgacggccacgcgacatcccgcgcgacgaggacgaagaggaagccgtcacgcgacccgcggccgcggccgcgcgccgacggcgggatgcgcatcgtggtgccgctgcagggggtggtgcagggccggggcggcctggtgctcggctccctcatcccctgcgcgctcttctacttcttccagctctacatcaagcgcaaccgccccgcgccggcgccggcgccggcgccggcgccgggctccccgccgcccgcggccgcctccccgatcctccgctcccactcgcggggcctcctcacgccgcgcgccgcgctgccgtcgctctccgcgcgcggggccgtcgtgcgggccggggacgaggactcgctctactacgccggtctccgtcggtgcgccgccgacccttaccaccccgcgtccaaccccgacggtgtcgtcaacctcggcctcgccgagaaccacctgtcgctggatttggtggggcggtggatggaggagcacgcgggggcggcgatgctggacggcctcgcggcagccggggacgaggtcagggacctcaccatcagggggctcgcaacctaccagccctacgatgggatacttgccttgaagatggctcttgctggattcatgcggcagaccatgcatggatcagtatcctttgatccatctcaaatggtgattacatgtggggcaactcctgcaatggaaatactgagtttctgtattgctgatccaggaaatgcatttcttgtgccatcaccttactacccgggttgggatagggacataaaatggcgaactggtgttgagttgatacctgttccttgtcgtagtactgataactttaatgtcagtgtcactgctcttgaaatagcttacaaacaggcaaaaaagcgaggaataagagttcgtggggttctcatatctaacccttccaacccaacaggaggcattgtgccaaaagaaatactgcatgaccttctacagtttgctgcagagaagaacatacacttaatttctgatgaaatatttgctggttcaacatatggaagtgacaagtttgttagcgtggcagatgttgtggatgaactagaggactttgataaaggcagagttcatatcatatatgggctctcaaaagacctatctcttgccgggtttcgagttggagtgatatattcctacaatgaacacattgtatcggctgctgctaagattgctcgattttcatctgtctcaagtccaacacaacgtttgcttgtttccatgctttcagatcaaaagtttatttcagaatacataaaggttaacagagagaggctccggaaaatgtaccttctgttttctgatgctttgaaacaacttgggatagaatgcttcaagagcagcggcgggttctattgctgggcagacatgagcaggtacatccgatcttacagcgagaaaggagagcgcaagctctgggataggctgttggaggaagcaaaggtcaacgttaccccaggttcttcttgccattgcattgagcctggatggttcaggtgttgcttcacaacattgagtgaggaggacattcctgtcttggtggaaagactgaggagggtcacagatagcttcaaatccaaacgttgaaacgctagaatagtttattttttggaacccctgcggtatcgaaataaccatatctcaccaggtgctctatagtggattgcagggggcactcaggaaaaggttggacaatctatttattttagaccatagatattcaggggcttcttgctatacagctgcataacaattgctggaagcccctaggctggtggaaggataagtgggggatttgggggacttgtccatgactccatgctggtcagctgtcttcggtttcttacgagccatgatgccgtagcattctggatgtttatgtcctgttggtctggcgatgaggctgatgtgctgagcattcttttcatccagatccgaccatgttctacttttcctttttactcttccttttttttctttggtcacataagctagtgttcaggttcagggattgtaaagcagtggatcctgcatgtgctgccagggttttggacgctgtccatacgtggagtgaatgaacatgcagtcatcatgttttccatcattttttttctttagtttgtttgcgggtatgacattttgtcaaaatgattttgtgcttagttactgggaagggaataaaagaaaggactttttgaggt

SEQ ID NO: 154852 - DNA, 3706 bp, Zea Mays
caaccacagtcacgtcgctatcgccagcgccaccagaaaaacgcatcccacgcagaacccctcgcactcctactccctctctgcctccctttcctctccttgtgcccgtcgcattgaaatggagcagcagcagcagaagcacttgcgccggtgctagctgcgacgtgagcccgcagcagccactgccaaggacttcctggcccgcccggcttcgctgttgccggaaaggcggtggctttgggggaagcaaaagcaagcgacggttgcggaaggttcttgcggattcgcgcgcgggaggaatggcagcgcggtcgtcggcggcagcggtggcggtgctgcttcttgcggctgcgggggctgcggcggcagcaggaggagcggagggcgatggggacggccaggcgctgatggcggtcaaggcggggttccggaacgcggcaaacgcgctggcggactgggacggcggccgcgaccactgcgcctggcgcggcgtcgcctgcgacgccgcctccttcgccgtcgtcggcctgaacctgtcaaatctaaacctcggaggggagatctcgccggctatagggcagctcaagagcctacagttcgtggatctcaagctgaacaagctcacaggccaaatcccagatgagattggggattgcgtctccttaaaatatttggatttgtcgggcaacttgctgtatggagacatccccttctccatctctaagctcaagcaacttgaggacctgattttgaagaacaaccaactcaccggacccatcccctccacactgtcacagattccaaatctcaagaccttggatctggcgcagaacaaacttaccggcgacatccccaggctcatctactggaatgaagtactacaatacctaggcttgaggggtaactcactgactggaactttgtcacctgacatgtgccaactgactggcctgtggtactttgacataagggggaacaatctcacaggaacaattccagagggcatagggaactgcactagctttgagattctggatatttcatacaaccaaatctctggagaaataccatacaacataggttaccttcaagtagccacactgtcacttcaaggaaatagactgattggcaaaattcctgaagtgattggcctcatgcaggctcttgctgtcctagaccttagtgagaatgaactggtggggcctattcctcctatacttggcaacctgtcctacacaggcaaactctatttacatggcaacaaactcactggacatataccaccagaactggggaacatgagtaaacttagctacctgcagctgaatgacaatgaattagtgggcacaatcccagctgagcttggcaaactcacagagttatttgaattgaatcttgccaacaacaatcttgagggccatatccctgcaaacatcagctcttgcagtgcactgaacaaattcaatgtgtatggcaatagactgaatggctctatccctgctggtttccagaagctggagagtttgacatacctaaacctttcttcaaacagtttcaaaggccagattccctctgagcttggtcacatagtcaacttggacacactagatctttcctacaatgaattctccgggccagttcctcctactattggtgatctcgagcatcttcttgaattgaatttgagtaaaaaccatctcactggatctgtgcctgctgaatttggaaacttgagaagtgtccaagtgattgacatgtccagcaacaacctgtctggctacctccctgaagaacttggacagctgcaaaaccttgatagcctgattcttaacaacaacagtttggctggggagatccctgctcagctggctaactgcttcagtttagtcagcctaaacctgtcatacaacaacttctctgggcacgtcccgtcatcgaaaaacttctcaaagttcccaatggagagcttcatgggtaatctgatgctccatgtgtactgccaagactccagctgtggacattctcatggaaccaaagttagcatctctcggacggcggttgcctgcatgatcttaggcttcgtcatattgctctgcatcgtgctgctggcgatatacaagaccaaccagccacagctacctgagaaagcatccgacaagccagtgcaagggccaccaaagctggtggttcttcagatggacatggccgtgcacacgtacgaggacatcatgaggctgaccgagaacctgagcgagaagtacatcatcggatacggcgcgtcgagcaccgtgtacaggtgtgacctcaagagcggcaaggccatcgccgtcaagcggctctacagccagtacaaccacagcctccgggagttcgagacggagctggagacgatcggcagcatccggcacaggaacctcgtcagcctccacggcttctcgctctcccctcacgggaacctgctgttctacgactacatggagaacggctccctgtgggatcttctccatggcccgtcgaagaaggtgaagctggactgggacacgaggctgaggatcgcagtgggcgccgcgcaggggctggcgtacctccaccacgactgcaacccgcgcatcgtgcaccgggacgtcaagtcctccaacatcctgctggacggcagcttcgaggcgcacctgtccgacttcggcatcgccaagtgcgtgccggccgccaagtcccacgcctccacctacgtgctgggcaccatcgggtacatcgacccggagtacgcccgcacgtccaggctcaacgagaagtccgacgtctacagcttcggcgtcgtcctgctggagctgctcacggggaggaaggccgtggacaacgagtccaacctgcaccagctgatactctcgaaggccgacgacgacacggtgatggaggccgtggacccggaggtgtcggtgacgtgcacggacatgaacctggtgcggaaggccttccagctcgcgctgctgtgcaccaagcgccaccccgcggaccggccgaccatgcacgaggtcgcgagggtgctgctctccctcctgccgcccgccgccaagcctcccgcgtccaaggcggcggcggcttcggcggcggccggcgactacacgcgcttcctcgcgacggcggccgacctgaggcgcggcggcgtggccgacgacgacaccggcgacaacagctcctccgacgagcagtggttcgtgcggttcggcgaggttatatccaagcacacgctgtcatgatcgtccgtccgtccgtctccctaactcccccccagaaagttttctcccaagtagagatcgaagtgaaagcataggagcacagcgcaggaaatagacgtagggttatgttgtgaggtccgccgtagaatggagacgatgtccgttggttcaggagtggtccaaatggaaggagaggcgttggttactctgccgctgctgctgggacgacgcatttgcagtggttggtttggttgtccttgggtgtaatcacacggcggcacgacaggtgccccccccccccccccccgtccccgtgaacggacgtaagttttcttggatcctagcaggaaccgcattgaatcggaccatgcatcctgcctgcattggaccagggtcgttgtaaatgagatgcatcaccgtattattatttttggctgccatttatgagctgcaccgcggcttgctttcgt

SEQ ID NO: 154853 - DNA, 3756 bp, Zea Mays
caaccacagtcacgtcgctatcgccagcgccaccagaaaaacgcatcccacgcagaacccctcgcactcctactccctctctgcctccctttcctctccttgtgcccgtcgcattgaaatggagcagcagcagcagaagcacttgcgccggtgctagctgcgacgtgagcccgcagcagccactgccaaggacttcctggcccgcccggcttcgctgttgccggaaaggcggtggctttgggggaagcaaaagcaagcgacggttgcggaaggttcttgcggattcgcgcgcgggaggaatggcagcgcggtcgtcggcggcagcggtggcggtgctgcttcttgcggctgcgggggctgcggcggcagcaggaggagcggagggcgatggggacggccaggcgctgatggcggtcaaggcggggttccggaacgcggcaaacgcgctggcggactgggacggcggccgcgaccactgcgcctggcgcggcgtcgcctgcgacgccgcctccttcgccgtcgtcggcctgaacctgtcaaatctaaacctcggaggggagatctcgccggctatagggcagctcaagagcctacagttcgtggatctcaagctgaacaagctcacaggccaaatcccagatgagattggggattgcgtctccttaaaatatttggatttgtcgggcaacttgctgtatggagacatccccttctccatctctaagctcaagcaacttgaggacctgattttgaagaacaaccaactcaccggacccatcccctccacactgtcacagattccaaatctcaagaccttggatctggcgcagaacaaacttaccggcgacatccccaggctcatctactggaatgaagtactacaatacctaggcttgaggggtaactcactgactggaactttgtcacctgacatgtgccaactgactggcctgtggtactttgacataagggggaacaatctcacaggaacaattccagagggcatagggaactgcactagctttgagattctggatatttcatacaaccaaatctctggagaaataccatacaacataggttaccttcaagtagccacactgtcacttcaaggaaatagactgattggcaaaattcctgaagtgattggcctcatgcaggctcttgctgtcctagaccttagtgagaatgaactggtggggcctattcctcctatacttggcaacctgtcctacacaggcaaactctatttacatggcaacaaactcactggacatataccaccagaactggggaacatgagtaaacttagctacctgcagctgaatgacaatgaattagtgggcacaatcccagctgagcttggcaaactcacagagttatttgaattgaatcttgccaacaacaatcttgagggccatatccctgcaaacatcagctcttgcagtgcactgaacaaattcaatgtgtatggcaatagactgaatggctctatccctgctggtttccagaagctggagagtttgacatacctaaacctttcttcaaacagtttcaaaggccagattccctctgagcttggtcacatagtcaacttggacacactagatctttcctacaatgaattctccgggccagttcctcctactattggtgatctcgagcatcttcttgaattgaatttgagtaaaaaccatctcactggatctgtgcctgctgaatttggaaacttgagaagtgtccaagtgattgacatgtccagcaacaacctgtctggctacctccctgaagaacttggacagctgcaaaaccttgatagcctgtaagctcgccttcatggtactgctacgttgacacatactgcgttgcaatcctactcaactgtggtgttgtcgcgcaggattcttaacaacaacagtttggctggggagatccctgctcagctggctaactgcttcagtttagtcagcctaaacctgtcatacaacaacttctctgggcacgtcccgtcatcgaaaaacttctcaaagttcccaatggagagcttcatgggtaatctgatgctccatgtgtactgccaagactccagctgtggacattctcatggaaccaaagttagcatctctcggacggcggttgcctgcatgatcttaggcttcgtcatattgctctgcatcgtgctgctggcgatatacaagaccaaccagccacagctacctgagaaagcatccgacaagccagtgcaagggccaccaaagctggtggttcttcagatggacatggccgtgcacacgtacgaggacatcatgaggctgaccgagaacctgagcgagaagtacatcatcggatacggcgcgtcgagcaccgtgtacaggtgtgacctcaagagcggcaaggccatcgccgtcaagcggctctacagccagtacaaccacagcctccgggagttcgagacggagctggagacgatcggcagcatccggcacaggaacctcgtcagcctccacggcttctcgctctcccctcacgggaacctgctgttctacgactacatggagaacggctccctgtgggatcttctccatggcccgtcgaagaaggtgaagctggactgggacacgaggctgaggatcgcagtgggcgccgcgcaggggctggcgtacctccaccacgactgcaacccgcgcatcgtgcaccgggacgtcaagtcctccaacatcctgctggacggcagcttcgaggcgcacctgtccgacttcggcatcgccaagtgcgtgccggccgccaagtcccacgcctccacctacgtgctgggcaccatcgggtacatcgacccggagtacgcccgcacgtccaggctcaacgagaagtccgacgtctacagcttcggcgtcgtcctgctggagctgctcacggggaggaaggccgtggacaacgagtccaacctgcaccagctgatactctcgaaggccgacgacgacacggtgatggaggccgtggacccggaggtgtcggtgacgtgcacggacatgaacctggtgcggaaggccttccagctcgcgctgctgtgcaccaagcgccaccccgcggaccggccgaccatgcacgaggtcgcgagggtgctgctctccctcctgccgcccgccgccaagcctcccgcgtccaaggcggcggcggcttcggcggcggccggcgactacacgcgcttcctcgcgacggcggccgacctgaggcgcggcggcgtggccgacgacgacaccggcgacaacagctcctccgacgagcagtggttcgtgcggttcggcgaggttatatccaagcacacgctgtcatgatcgtccgtccgtccgtctccctaactcccccccagaaagttttctcccaagtagagatcgaagtgaaagcataggagcacagcgcaggaaatagacgtagggttatgttgtgaggtccgccgtagaatggagacgatgtccgttggttcaggagtggtccaaatggaaggagaggcgttggttactctgccgctgctgctgggacgacgcatttgcagtggttggtttggttgtccttgggtgtaatcacacggcggcacgacaggtgccccccccccccccccccgtccccgtgaacggacgtaagttttcttggatcctagcaggaaccgcattgaatcggaccatgcatcctgcctgcattggaccagggtcgttgtaaatgagatgcatcaccgtattattatttttggctgccatt

SEQ ID NO: 154854 - DNA, 3647 bp, Zea Mays
caaccacagtcacgtcgctatcgccagcgccaccagaaaaacgcatcccacgcagaacccctcgcactcctactccctctctgcctccctttcctctccttgtgcccgtcgcattgaaatggagcagcagcagcagaagcacttgcgccggtgctagctgcgacgtgagcccgcagcagccactgccaaggacttcctggcccgcccggcttcgctgttgccggaaaggcggtggctttgggggaagcaaaagcaagcgacggttgcggaaggttcttgcggattcgcgcgcgggaggaatggcagcgcggtcgtcggcggcagcggtggcggtgctgcttcttgcggctgcgggggctgcggcggcagcaggaggagcggagggcgatggggacggccaggcgctgatggcggtcaaggcggggttccggaacgcggcaaacgcgctggcggactgggacggcggccgcgaccactgcgcctggcgcggcgtcgcctgcgacgccgcctccttcgccgtcgtcggcctgaacctgtcaaatctaaacctcggaggggagatctcgccggctatagggcagctcaagagcctacagttcgtggatctcaagctgaacaagctcacaggccaaatcccagatgagattggggattgcgtctccttaaaatatttggatttgtcgggcaacttgctgtatggagacatccccttctccatctctaagctcaagcaacttgaggacctgattttgaagaacaaccaactcaccggacccatcccctccacactgtcacagattccaaatctcaagaccttggatctggcgcagaacaaacttaccggcgacatccccaggctcatctactggaatgaagtactacaatacctaggcttgaggggtaactcactgactggaactttgtcacctgacatgtgccaactgactggcctgtggtactttgacataagggggaacaatctcacaggaacaattccagagggcatagggaactgcactagctttgagattctggatatttcatacaaccaaatctctggagaaataccatacaacataggttaccttcaagtagccacactgtcacttcaaggaaatagactgattggcaaaattcctgaagtgattggcctcatgcaggctcttgctgtcctagaccttagtgagaatgaactggtggggcctattcctcctatacttggcaacctgtcctacacaggcaaactctatttacatggcaacaaactcactggacatataccaccagaactggggaacatgagtaaacttagctacctgcagctgaatgacaatgaattagtgggcacaatcccagctgagcttggcaaactcacagagttatttgaattgaatcttgccaacaacaatcttgagggccatatccctgcaaacatcagctcttgcagtgcactgaacaaattcaatgtgtatggcaatagactgaatggctctatccctgctggtttccagaagctggagagtttgacatacctaaacctttcttcaaacagtttcaaaggccagattccctctgagcttggtcacatagtcaacttggacacactagatctttcctacaatgaattctccgggccagttcctcctactattggtgatctcgagcatcttcttgaattgaatttgagtaaaaaccatctcactggatctgtgcctgctgaatttggaaacttgagaagtgtccaagtgattgacatgtccagcaacaacctgtctggctacctccctgaagaacttggacagctgcaaaaccttgatagcctgattcttaacaacaacagtttggctggggagatccctgctcagctggctaactgcttcagtttagtcagcctaaacctgtcatacaacaacttctctgggcacgtcccgtcatcgaaaaacttctcaaagttcccaatggagagcttcatgggtaatctgatgctccatgtgtactgccaagactccagctgtggacattctcatggaaccaaagttagcatctctcggacggcggttgcctgcatgatcttaggcttcgtcatattgctctgcatcgtgctgctggcgatatacaagaccaaccagccacagctacctgagaaagcatccgacaagccagtgcaagggccaccaaagctggtggttcttcagatggacatggccgtgcacacgtacgaggacatcatgaggctgaccgagaacctgagcgagaagtacatcatcggatacggcgcgtcgagcaccgtgtacaggtgtgacctcaagagcggcaaggccatcgccgtcaagcggctctacagccagtacaaccacagcctccgggagttcgagacggagctggagacgatcggcagcatccggcacaggaacctcgtcagcctccacggcttctcgctctcccctcacgggaacctgctgttctacgactacatggagaacggctccctgtgggatcttctccatggcccgtcgaagaaggtgaagctggactgggacacgaggctgaggatcgcagtgggcgccgcgcaggggctggcgtacctccaccacgactgcaacccgcgcatcgtgcaccgggacgtcaagtcctccaacatcctgctggacggcagcttcgaggcgcacctgtccgacttcggcatcgccaagtgcgtgccggccgccaagtcccacgcctccacctacgtgctgggcaccatcgggtacatcgacccggagtacgcccgcacgtccaggctcaacgagaagtccgacgtctacagcttcggcgtcgtcctgctggagctgctcacggggaggaaggccgtggacaacgagtccaacctgcaccagctggtgagccgacgacgacacggtgatggaggccgtggacccggaggtgtcggtgacgtgcacggacatgaacctggtgcggaaggccttccagctcgcgctgctgtgcaccaagcgccaccccgcggaccggccgaccatgcacgaggtcgcgagggtgctgctctccctcctgccgcccgccgccaagcctcccgcgtccaaggcggcggcggcttcggcggcggccggcgactacacgcgcttcctcgcgacggcggccgacctgaggcgcggcggcgtggccgacgacgacaccggcgacaacagctcctccgacgagcagtggttcgtgcggttcggcgaggttatatccaagcacacgctgtcatgatcgtccgtccgtccgtctccctaactcccccccagaaagttttctcccaagtagagatcgaagtgaaagcataggagcacagcgcaggaaatagacgtagggttatgttgtgaggtccgccgtagaatggagacgatgtccgttggttcaggagtggtccaaatggaaggagaggcgttggttactctgccgctgctgctgggacgacgcatttgcagtggttggtttggttgtccttgggtgtaatcacacggcggcacgacaggtgccccccccccccccccccgtccccgtgaacggacgtaagttttcttggatcctagcaggaaccgcattgaatcggaccatgcatcctgcctgcattggaccagggtcgttgtaaatgagatgcatcaccg

SEQ ID NO: 154855 - DNA, 3426 bp, Zea Mays
caaccacagtcacgtcgctatcgccagcgccaccagaaaaacgcatcccacgcagaacccctcgcactcctactccctctctgcctccctttcctctccttgtgcccgtcgcattgaaatggagcagcagcagcagaagcacttgcgccggtgctagctgcgacgtgagcccgcagcagccactgccaaggacttcctggcccgcccggcttcgctgttgccggaaaggcggtggctttgggggaagcaaaagcaagcgacggttgcggaaggttcttgcggattcgcgcgcgggaggaatggcagcgcggtcgtcggcggcagcggtggcggtgctgcttcttgcggctgcgggggctgcggcggcagcaggaggagcggagggcgatggggacggccaggcgctgatggcggtcaaggcggggttccggaacgcggcaaacgcgctggcggactgggacggcggccgcgaccactgcgcctggcgcggcgtcgcctgcgacgccgcctccttcgccgtcgtcggcctgaacctgtcaaatctaaacctcggaggggagatctcgccggctatagggcagctcaagagcctacagttcgtggatctcaagctgaacaagctcacaggccaaatcccagatgagattggggattgcgtctccttaaaatatttggatttgtcgggcaacttgctgtatggagacatccccttctccatctctaagctcaagcaacttgaggacctgattttgaagaacaaccaactcaccggacccatcccctccacactgtcacagattccaaatctcaagaccttggatctggcgcagaacaaacttaccggcgacatccccaggctcatctactggaatgaagtactacaatacctaggcttgaggggtaactcactgactggaactttgtcacctgacatgtgccaactgactggcctgtggtactttgacataagggggaacaatctcacaggaacaattccagagggcatagggaactgcactagctttgagattctggatatttcatacaaccaaatctctggagaaataccatacaacataggttaccttcaagtagccacactgtcacttcaaggaaatagactgattggcaaaattcctgaagtgattggcctcatgcaggctcttgctgtcctagaccttagtgagaatgaactggtggggcctattcctcctatacttggcaacctgtcctacacaggcaaactctatttacatggcaacaaactcactggacatataccaccagaactggggaacatgagtaaacttagctacctgcagctgaatgacaatgaattagtgggcacaatcccagctgagcttggcaaactcacagagttatttgaattgaatcttgccaacaacaatcttgagggccatatccctgcaaacatcagctcttgcagtgcactgaacaaattcaatgtgtatggcaatagactgaatggctctatccctgctggtttccagaagctggagagtttgacatacctaaacctttcttcaaacagtttcaaaggccagattccctctgagcttggtcacatagtcaacttggacacactagatctttcctacaatgaattctccgggccagttcctcctactattggtgatctcgagcatcttcttgaattgaatttgagtaaaaaccatctcactggatctgtgcctgctgaatttggaaacttgagaagtgtccaagtgattgacatgtccagcaacaacctgtctggctacctccctgaagaacttggacagctgcaaaaccttgatagcctgattcttaacaacaacagtttggctggggagatccctgctcagctggctaactgcttcagtttagtcagcctgtatgttttctgtgccgacttagtcttcacagcatggttacttaatttcccagcatgaaataatgtgttacttccatttcagaaacctgtcatacaacaacttctctgggcacgtcccgtcatcgaaaaacttctcaaagttcccaatggagagcttcatgggtaatctgatgctccatgtgtactgccaagactccagctgtggacattctcatggaaccaaagttagcatctctcggacggcggttgcctgcatgatcttaggcttcgtcatattgctctgcatcgtgctgctggcgatatacaagaccaaccagccacagctacctgagaaagcatccgacaagccagtgcaagggccaccaaagctggtggttcttcagatggacatggccgtgcacacgtacgaggacatcatgaggctgaccgagaacctgagcgagaagtacatcatcggatacggcgcgtcgagcaccgtgtacaggtgtgacctcaagagcggcaaggccatcgccgtcaagcggctctacagccagtacaaccacagcctccgggagttcgagacggagctggagacgatcggcagcatccggcacaggaacctcgtcagcctccacggcttctcgctctcccctcacgggaacctgctgttctacgactacatggagaacggctccctgtgggatcttctccatggcccgtcgaagaaggtgaagctggactgggacacgaggctgaggatcgcagtgggcgccgcgcaggggctggcgtacctccaccacgactgcaacccgcgcatcgtgcaccgggacgtcaagtcctccaacatcctgctggacggcagcttcgaggcgcacctgtccgacttcggcatcgccaagtgcgtgccggccgccaagtcccacgcctccacctacgtgctgggcaccatcgggtacatcgacccggagtacgcccgcacgtccaggctcaacgagaagtccgacgtctacagcttcggcgtcgtcctgctggagctgctcacggggaggaaggccgtggacaacgagtccaacctgcaccagctgatactctcgaaggccgacgacgacacggtgatggaggccgtggacccggaggtgtcggtgacgtgcacggacatgaacctggtgcggaaggccttccagctcgcgctgctgtgcaccaagcgccaccccgcggaccggccgaccatgcacgaggtcgcgagggtgctgctctccctcctgccgcccgccgccaagcctcccgcgtccaaggcggcggcggcttcggcggcggccggcgactacacgcgcttcctcgcgacggcggccgacctgaggcgcggcggcgtggccgacgacgacaccggcgacaacagctcctccgacgagcagtggttcgtgcggttcggcgaggttatatccaagcacacgctgtcatgatcgtccgtccgtccgtctccctaactcccccccagaaagttttctcccaagtagagatcgaagtgaaagcataggagcacagcgcag

SEQ ID NO: 154856 - DNA, 2835 bp, Zea Mays
atggcagcgcggtcgtcggcggcagcggtggcggtgctgcttcttgcggctgcgggggctgcggcggcagcaggaggagcggagggcgatggggacggccaggcgctgatggcggtcaaggcggggttccggaacgcggcaaacgcgctggcggactgggacggcggccgcgaccactgcgcctggcgcggcgtcgcctgcgacgccgcctccttcgccgtcgtcggcctgaacctgtcaaatctaaacctcggaggggagatctcgccggctatagggcagctcaagagcctacagttcgtggatctcaagctgaacaagctcacaggccaaatcccagatgagattggggattgcgtctccttaaaatatttggatttgtcgggcaacttgctgtatggagacatccccttctccatctctaagctcaagcaacttgaggacctgattttgaagaacaaccaactcaccggacccatcccctccacactgtcacagattccaaatctcaagaccttggatctggcgcagaacaaacttaccggcgacatccccaggctcatctactggaatgaagtactacaatacctaggcttgaggggtaactcactgactggaactttgtcacctgacatgtgccaactgactggcctgtggtactttgacataagggggaacaatctcacaggaacaattccagagggcatagggaactgcactagctttgagattctggatatttcatacaaccaaatctctggagaaataccatacaacataggttaccttcaagtagccacactgtcacttcaaggaaatagactgattggcaaaattcctgaagtgattggcctcatgcaggctcttgctgtcctagaccttagtgagaatgaactggtggggcctattcctcctatacttggcaacctgtcctacacaggcaaactctatttacatggcaacaaactcactggacatataccaccagaactggggaacatgagtaaacttagctacctgcagctgaatgacaatgaattagtgggcacaatcccagctgagcttggcaaactcacagagttatttgaattgaatcttgccaacaacaatcttgagggccatatccctgcaaacatcagctcttgcagtgcactgaacaaattcaatgtgtatggcaatagactgaatggctctatccctgctggtttccagaagctggagagtttgacatacctaaacctttcttcaaacagtttcaaaggccagattccctctgagcttggtcacatagtcaacttggacacactgaatttgagtaaaaaccatctcactggatctgtgcctgctgaatttggaaacttgagaagtgtccaagtgattgacatgtccagcaacaacctgtctggctacctccctgaagaacttggacagctgcaaaaccttgatagcctgattcttaacaacaacagtttggctggggagatccctgctcagctggctaactgcttcagtttagtcagcctaaacctgtcatacaacaacttctctgggcacgtcccgtcatcgaaaaacttctcaaagttcccaatggagagcttcatgggtaatctgatgctccatgtgtactgccaagactccagctgtggacattctcatggaaccaaaggcttcgtcatattgctctgcatcgtgctgctggcgatatacaagaccaaccagccacagctacctgagaaagcatccgacaagccagtgcaagtgtcccaggaggactcatctatcactttccttgaccacattgcagggccaccaaagctggtggttcttcagatggacatggccgtgcacacgtacgaggacatcatgaggctgaccgagaacctgagcgagaagtacatcatcggatacggcgcgtcgagcaccgtgtacaggtgtgacctcaagagcggcaaggccatcgccgtcaagcggctctacagccagtacaaccacagcctccgggagttcgagacggagctggagacgatcggcagcatccggcacaggaacctcgtcagcctccacggcttctcgctctcccctcacgggaacctgctgttctacgactacatggagaacggctccctgtgggatcttctccatggtgaggccgggttcctgagctctctttcttttttttttcttaattcatgtcgcttcgtccttccgataacccacgggccacggccattcccaggcccgtcgaagaaggtgaagctggactgggacacgaggctgaggatcgcagtgggcgccgcgcaggggctggcgtacctccaccacgactgcaacccgcgcatcgtgcaccgggacgtcaagtcctccaacatcctgctggacggcagcttcgaggcgcacctgtccgacttcggcatcgccaagtgcgtgccggccgccaagtcccacgcctccacctacatactctcgaaggccgacgacgacacggtgatggaggccgtggacccggaggtgtcggtgacgtgcacggacatgaacctggtgcggaaggccttccagctcgcgctgctgtgcaccaagcgccaccccgcggaccggccgaccatgcacgaggtcgcgagggtgctgctctccctcctgccgcccgccgccaagcctcccgcgtccaaggcggcggcggcttcggcggcggccggcgactacacgcgcttcctcgcgacggcggccgacctgaggcgcggcggcgtggccgacgacgacaccggcgacaacagctcctccgacgagcagtggttcgtgcggttcggcgaggttatatccaagcacacgctgtcatga

SEQ ID NO: 154857 - DNA, 2218 bp, Zea Mays
ccgtcgcattctgcagcgccagctcgctcctcgccccgcccccttctctcagcggcgacgcctcgggcgttcctaccctgccccctctccggacccccacgccgtcggcgaagcagccgggcaagagcccgatccagaccccgcgagcaatccttgatatacctgatggctatgattgatgagcctctgtacccaattgctgtactgattgatgagcttaagaatgaggacatccagttgcgtctaaactccattagaagactttcgacaattgcacgggctcttggagaagaaagaaccaggaaggagctgattccctttcttagtgaaaacaatgacgatgaagatgaggtgcttcttgcaatggctgaggaattgggtgtgttcattccttatgttgggggtgtagaacatgctcatgttttgcttccccctttggaaacattgtgtacagtagaagaaacttgtgtccgtgataaggcagttgaatctctgtgccgtattggtgcacaaatgaaggaaactgacatagtcgactggttcattccagtagtaaagaggctagcagctggtgagtggtttacagctcgtgtatcatcctgtggtcttttccacatagcctatccaagtgcattggaccaattgaaaacagaattaaggactatctatggtcagttatgtcaggatgacatgcctatggtcagaagagctgctgcatcaaatcttggaaagtttgcagccacagttgaacagaatcatttgaagacagaaataatgtcaatatttgatgacttaacccaagatgatcaagattcagtgcgtttgttggctgttgaaggttgtgctgctcttggtaaattgttggagccacaagattgtgtagctcacattcttccagtcattgtcaatttctcccaggataaatcatggcgtgttcgttatatggtcgccaatcagttatatgagctctgtgaggctgttggccctgagcccacaagagctgatttggtgcctgcatatgttcgtctccttcgcgataatgaggctgaagtgcgaatagcggctgctggaaaagtaactaagttctgccgcatattaaatccacagctttcaatccaacatattcttccgtgcgttaaggaattgtcatcagattcatcccagcatgttcgttcagctttagcctcagtcattatgggaatggctcctgtactgggaaaggatgctaccatggaacagcttcttccaatttttctctctttgctgaaggatgaatttccagatgttcggcttaacataatcagcaagcttgatcaggttaatcaggttattggcattgactttttatcccaaacactgctaccagccattgtagaacttgcagaggataggcactggagagtccggcttgcaataattgagtacatcccattgctggcgagtcagttaggtgttgggttttttgatgacaagctgggggcactctgcatgcaatggttggaagataaggtcttctcaatcagagatgctgccgccaacaacttgaagcgccttgcggaagagttcggtccagagtgggcaatgcagcatataattcctcaggtgctggagaagatcaacaatccgcactatttgtaccgcatgacgattctgcaggctatctccttgctagctcccgtcatgggtgcagagatcacttgtcaaaagctgcttccagtcgtcattaattcttcaaaggacagggttcctaacatcaagttcaacgttgcaaaagtactaaagtcacttgtaccgatcctcgatcaatctgtcgtggagaagaccgtgaaaccatgccttgttgagctcagcgaggaccctgacgtcgatgtgaggtactacgcgaaccaggcgctgcaggcgtgcgatcaaatgatggtgtcgagctaactagccgtgtgcccgagtacttagagttcgatgcctcatagtccaattttggattacctgtaatttgttgggccttttagattgaagagttttccgtctagcctcggtggacagatcgacgctgcccatgctgataaatggacggtcctgatccattgttcgttgtgttattaatgttgtataattgagcaggacacaacacgtacgttactctctgtgtctgtgtgtgtttgcatggcattgtctcgcaggtagttgagcaaccacgtaataattctttccagcgcat

SEQ ID NO: 154858 - DNA, 2206 bp, Zea Mays
ccgtcgcattctgcagcgccagctcgctcctcgccccgcccccttctctcagcggcgacgcctcgggcgttcctaccctgccccctctccggacccccacgccgtcggcgaagcagccgggcaagagcccgatccagaccccgcgagcaatccttgatatacctgatggctatgattgatgagcctctgtacccaattgctgtactgattgatgagcttaagaatgaggacatccagttgcgtctaaactccattagaagactttcgacaattgcacgggctcttggagaagaaagaaccaggaaggagctgattccctttcttagtgaaaacaatgacgatgaagatgaggtgcttcttgcaatggctgaggaattgggtgtgttcattccttatgttgggggtgtagaacatgctcatgttttgcttccccctttggaaacattgtgtacagtagaagaaacttgtgtccgtgataaggcagttgaatctctgtgccgtattggtgcacaaatgaaggaaactgacatagtcgactggttcattccagtagtaaagaggctagcagctggtgagtggtttacagctcgtgtatcatcctgtggtcttttccacatagcctatccaagtgcattggaccaattgaaaacagaattaaggactatctatggtcagttatgtcaggatgacatgcctatggtcagaagagctgctgcatcaaatcttggaaagtttgcagccacagttgaacagaatcatttgaagacagaaataatgtcaatatttgatgacttaacccaagatgatcaagattcagtgcgtttgttggctgttgaaggttgtgctgctcttggtaaattgttggagccacaagattgtgtagctcacattcttccagtcattgtcaatttctcccaggataaatcatggcgtgttcgttatatggtcgccaatcagttatatgagctctgtgaggctgttggccctgagcccacaagagctgatttggtgcctgcatatgttcgtctccttcgcgataatgaggctgaagtgcgaatagcggctgctggaaaagtaactaagttctgccgcatattaaatccacagctttcaatccaacatattcttccgtgcgttaaggaattgtcatcagattcatcccagcatgttcgttcagctttagcctcagtcattatgggaatggctcctgtactgggaaaggatgctaccatggaacagcttcttccaatttttctctctttgctgaaggatgaatttccagatgttcggcttaacataatcagcaagcttgatcaggttaatcaggttattggcattgactttttatcccaaacactgctaccagccattgtagaacttgcagaggataggcactggagagtccggcttgcaataattgagtacatcccattgctggcgagtcagttaggtgttgggttttttgatgacaagctgggggcactctgcatgcaatggttggaagataaggtcttctcaatcagagatgctgccgccaacaacttgaagcgccttgcggaagagttcggtccagagtgggcaatgcagcatataattcctcaggtgctggagaagatcaacaatccgcactatttgtaccgcatgacgattctgcaggctatctccttgctagctcccgtcatgggtgcagagatcacttgtcaaaagctgcttccagtcgtcattaattcttcaaaggacagggttcctaacatcaagttcaacgttgcaaaagtactaaagtcacttgtaccgatcctcgatcaatctaccgtgaaaccatgccttgttgagctcagcgaggaccctgacgtcgatgtgaggtactacgcgaaccaggcgctgcaggcgtgcgatcaaatgatggtgtcgagctaactagccgtgtgcccgagtacttagagttcgatgcctcatagtccaattttggattacctgtaatttgttgggccttttagattgaagagttttccgtctagcctcggtggacagatcgacgctgcccatgctgataaatggacggtcctgatccattgttcgttgtgttattaatgttgtataattgagcaggacacaacacgtacgttactctctgtgtctgtgtgtgtttgcatggcattgtctcgcaggtagttgagcaaccacgtaataattctttccagcgcat

SEQ ID NO: 154859 - DNA, 2217 bp, Zea Mays
cccgtcgcattctgcagcgccagctcgctcctcgccccgcccccttctctcagcggcgacgcctcgggcgttcctaccctgccccctctccggacccccacgccgtcggcgaagcagccgggcaagagcccgatccagaccccgcgagcaatccttgatatacctgatggctatgattgatgagcctctgtacccaattgctgtactgattgatgagcttaagaatgaggacatccagttgcgtctaaactccattagaagactttcgacaattgcacgggctcttggagaagaaagaaccaggaaggagctgattccctttcttagtgaaaacaatgacgatgaagatgaggtgcttcttgcaatggctgaggaattgggtgtgttcattccttatgttgggggtgtagaacatgctcatgttttgcttccccctttggaaacattgtgtacagtagaagaaacttgtgtccgtgataaggcagttgaatctctgtgccgtattggtgcacaaatgaaggaaactgacatagtcgactggttcattccagtagtaaaggctagcagctggtgagtggtttacagctcgtgtatcatcctgtggtcttttccacatagcctatccaagtgcattggaccaattgaaaacagaattaaggactatctatggtcagttatgtcaggatgacatgcctatggtcagaagagctgctgcatcaaatcttggaaagtttgcagccacagttgaacagaatcatttgaagacagaaataatgtcaatatttgatgacttaacccaagatgatcaagattcagtgcgtttgttggctgttgaaggttgtgctgctcttggtaaattgttggagccacaagattgtgtagctcacattcttccagtcattgtcaatttctcccaggataaatcatggcgtgttcgttatatggtcgccaatcagttatatgagctctgtgaggctgttggccctgagcccacaagagctgatttggtgcctgcatatgttcgtctccttcgcgataatgaggctgaagtgcgaatagcggctgctggaaaagtaactaagttctgccgcatattaaatccacagctttcaatccaacatattcttccgtgcgttaaggaattgtcatcagattcatcccagcatgttcgttcagctttagcctcagtcattatgggaatggctcctgtactgggaaaggatgctaccatggaacagcttcttccaatttttctctctttgctgaaggatgaatttccagatgttcggcttaacataatcagcaagcttgatcaggttaatcaggttattggcattgactttttatcccaaacactgctaccagccattgtagaacttgcagaggataggcactggagagtccggcttgcaataattgagtacatcccattgctggcgagtcagttaggtgttgggttttttgatgacaagctgggggcactctgcatgcaatggttggaagataaggtcttctcaatcagagatgctgccgccaacaacttgaagcgccttgcggaagagttcggtccagagtgggcaatgcagcatataattcctcaggtgctggagaagatcaacaatccgcactatttgtaccgcatgacgattctgcaggctatctccttgctagctcccgtcatgggtgcagagatcacttgtcaaaagctgcttccagtcgtcattaattcttcaaaggacagggttcctaacatcaagttcaacgttgcaaaagtactaaagtcacttgtaccgatcctcgatcaatctgtcgtggagaagaccgtgaaaccatgccttgttgagctcagcgaggaccctgacgtcgatgtgaggtactacgcgaaccaggcgctgcaggcgtgcgatcaaatgatggtgtcgagctaactagccgtgtgcccgagtacttagagttcgatgcctcatagtccaattttggattacctgtaatttgttgggccttttagattgaagagttttccgtctagcctcggtggacagatcgacgctgcccatgctgataaatggacggtcctgatccattgttcgttgtgttattaatgttgtataattgagcaggacacaacacgtacgttactctctgtgtctgtgtgtgtttgcatggcattgtctcgcaggtagttgagcaaccacgtaataattctttccagcgcat

SEQ ID NO: 154860 - DNA, 2270 bp, Zea Mays
cccgtcgcattctgcagcgccagctcgctcctcgccccgcccccttctctcagcggcgacgcctcgggcgttcctaccctgccccctctccggacccccacgccgtcggcgaagcagccgggcaagagcccgatccagaccccgcgagcaatccttgatatacctgatggctatgattgatgagcctctgtacccaattgctgtactgattgatgagcttaagaatgaggacatccagttgcgtctaaactccattagaagactttcgacaattgcacgggctcttggagaagaaagaaccaggaaggagctgattccctttcttagtgaaaacaatgacgatgaagatgaggtgcttcttgcaatggctgaggaattgggtgtgttcattccttatgttgggggtgtagaacatgctcatgttttgcttccccctttggaaacattgtgtacagtagaagaaacttgtgtccgtgataaggcagttgaatctctgtgccgtattggtgcacaaatgaaggaaactgacatagtcgactggttcattccagtagtaaagaggctagcagctggtgagtggtttacagctcgtgtatcatcctgtggtcttttccacatagcctatccaagtgcattggaccaattgaaaacagaattaaggactatctatggtcagttatgtcaggatgacatgcctatggtcagaagagctgctgcatcaaatcttggaaagtttgcagccacagttgaacagaatcatttgaagacagaaataatgtcaatatttgatgacttaacccaagatgatcaagattcagtgcgtttgttggctgttgaaggttgtgctgctcttggtaaattgttggagccacaagattgtgtagctcacattcttccagtcattgtcaatttctcccaggataaatcatggcgtgttcgttatatggtcgccaatcagttatatgagctctgtgaggctgttggccctgagcccacaagagctgatttggtgcctgcatatgttcgtctccttcgcgataatgaggctgaagtgcgaatagcggctgctggaaaagtaactaagttctgccgcatattaaatccacagctttcaatccaacatattcttccgtgcgttaaggaattgtcatcagattcatcccagcatgttcgttcagctttagcctcagtcattatgggaatggctcctgtactgggaaaggatgctaccatggaacagcttcttccaatttttctctctttgctgaaggatgaatttccagatgttcggcttaacataatcagcaagcttgatcaggttaatcaggttattggcattgactttttatcccaaacactgctaccagccattgtagaacttgcagaggataggcactggagagtccggcttgcaataattgagtacatcccattgctggcgagtcagttaggtgttgggttttttgatgacaagctgggggcactctgcatgcaatggttggaagataaggtcttctcaatcagagatgctgccgccaacaacttgaagcgccttgcggaagagttcggtccagagtgggcaatgcagcatataattcctcaggtgctggagaagatcaacaatccgcactatttgtaccgcatgacgattctgcaggctatctccttgctagctcccgtcatgggtgcagagatcacttgtcaaaagctgcttccagtcgtcattaattcttcaaaggacagggttcctaacatcaagttcaacgttgcaaaagtactaaagtcacttgtaccgatcctcgatcaatctgtgagttcatccggttattttgcaagttgttaccgttttgaaaagcgctgcgtttgtatttccgcgttattggggaatatcgtgaatgcttacttcgcaggtcgtggagaagaccgtgaaaccatgccttgttgagctcagcgaggaccctgacgtcgatgtgaggtactacgcgaaccaggcgctgcaggcgtgcgatcaaatgatggtgtcgagctaactagccgtgtgcccgagtacttagagttcgatgcctcatagtccaattttggattacctgtaatttgttgggccttttagattgaagagttttccgtctagcctcggtggacagatcgacgctgcccatgctgataaatggacggtcctgatccattgttcgttgtgttattaatgttgtataattgagcaggacacaacacgtacgttactctctgtgtctgtgtgtgtttgcatggca

SEQ ID NO: 154861 - DNA, 2422 bp, Zea Mays
gcttgcgcagttgcgcctgcctcgggcactcgccgtctcttgccgcgggcgcacgactttttccccaacaaccgatcgcccacgcaaacctctcctcaactcgatcaaaccggggacggaaaaggcccaccaaaatcccccaaaatttcgtacctcctcagccccagcaatctcgaatcccgatgctcacagcctccaccgaatccctggcggtcgtcatcagcgcatgagctttcttcgctcgctagcggactccttctcatcgctgctcttctcgtcgggaggcggggcggtgtccatggacgcggcgggggcggccccgtcgccggcggcggtggtgggggagcgcgtggcggtgaagctcagggggtacttcgacctcgccaaagaggagatcgacaaggccgtgcgcgctgaggagtgggggctccccgacgaggccaccgcgcactaccgcaacgcgatgcgggtcatgctcgaggccaaggccgcgcgcgtccccgatgccgtctcctccagcgagagggggcaggtcagggtgtaccaggagaagatcgccaagtggcaggcccaggtcgaggagcggctcagagtgcttggtcagagaagcggtgaaggggccactgctgcagaagtgcccaagaaggttgctgcaaacaatcctatcattaggactgcaaaaacagcgtcaaatagcatccaaagatctcccttgcaaaatagccctaccttcaacaggggtggccaagcatctacacatcagaagatagggagcggagcttccagaccagttcagaaggctggtggaaactatgatgacaagcttgttgaaatgattaatacaacaattgtggacagaagcccttctgttaaatgggatgacgttgctggtcttgacaaagcaaagcaagcactcatggaaatggttattttgccttctaaacgaagggatttgttcaccggacttcggagacctgctaggggtttgcttctctttggcccacctgggaatggaaaaacaatgcttgccaaagctgttgcatcagaatctgaagcaacattttttaatgtttcggcttcttcattgacatcaaagtgggtaggagaagctgaaaaacttgtcaggacacttttcatggttgcaattgatagacaaccatctgttatttttatggacgagattgatagtgtcatgtctacaaggttagctaatgagaatgactctagcaggcgtctgaaatctgaatttcttatccagtttgatggggtgtcctcaaacccagatgatctagtaattgttataggggctactaataaacctcaagaattggatgatgctgttcttcgaaggctggtaaaaagaatatatgtgccactacctgatccaaatgtacgaaggttacttctgaaaaatcagctcaaaggacaatcattcaaactgtcgaaccatgattttgaaagacttgctgtggagaccgaagggtattctggaagtgacctgagagccttgtgtgaagaagctgcaatgatgccaataagagagctcggtccacaaaatattcttactatcaaagcaaatcagctgcgacctttgaggtacgaggacttcaagaacgcgatgacggtgatcaggccaagcttgcagaagagcaaatgggacgagctggagaactggaacgaggaattcggttcgagctgacggagacgcgcgctgcctgatgatgatgatcaagcggccctatttccagatgtacatgatttatgtctcacacacacatggtggcttacacacacacacgcgcccatcggccatcgatgcgtcctcagtctggacagcgcgtcttcaacagaagcagaaggtacaatataatgctgggaacagccctatatgtatacccattgaaatgccgctgcccaagttatttaaaaaaacaaacctctagtgtgtgttattattagcctatagctgctctgggccgccgagggcgaaatcgaagtatcgtcgggcgtgttcggcaggctgcaagccgacactgttgcagctgtttggactgctgcagctgcaatccatagagagaaaaatactgtagaagccgcagccgcagccggattgcagccgcagcaagccgcagcgaacaagccggtcgttgtgtaaaaagaaacacaaaacctacatgcttaatgactcgtatatgtgttattattagcccatagctgctctgggccgccgagggcgaaatcgaagtatcgtcgttgtgtaaaaagaaacacaaaacctacatgcttaatgactcgtatatgtgttattattagcccatagctgctctgggccgccgagggcgaaatcgaagtatcgtcgttgtgtaaaaagacaaacacaaaacctacatgcttaatgactcgtatatattttaacaaacag

SEQ ID NO: 154862 - DNA, 1790 bp, Zea Mays
gcttgcgcagttgcgcctgcctcgggcactcgccgtctcttgccgcgggcgcacgactttttccccaacaaccgatcgcccacgcaaacctctcctcaactcgatcaaaccggggacggaaaaggcccaccaaaatcccccaaaatttcgtacctcctcagccccagcaatctcgaatcccgatgctcacagcctccaccgaatccctggcggtcgtcatcagcgcatgagctttcttcgctcgctagcggactccttctcatcgctgctcttctcgtcgggaggcggggcggtgtccatggacgcggcgggggcggccccgtcgccggcggcggtggtgggggagcgcgtggcggtgaagctcagggggtacttcgacctcgccaaagaggagatcgacaaggccgtgcgcgctgaggagtgggggctccccgacgaggccaccgcgcactaccgcaacgcgatgcgggtcatgctcgaggccaaggccgcgcgcgtccccgatgccgtctcctccagcgagagggggcaggtcagggtgtaccaggagaagatcgccaagtggcaggcccaggtcgaggagcggctcagagtgcttggtcagagaagcggtgaaggggccactgctgcagaagtgcccaagaaggttgctgcaaacaatcctatcattaggactgcaaaaacagcgtcaaatagcatccaaagatctcccttgcaaaatagccctaccttcaacaggggtggccaagcatctacacatcagaagatagggagcggagcttccagaccagttcagaaggctggtggaaactatgatgacaagcttgttgaaatgattaatacaacaattgtggacagaagcccttctgttaaatgggatgacgttgctggtcttgacaaagcaaagcaagcactcatggaaatggttattttgccttctaaacgaagggatttgttcaccggacttcggagacctgctaggggtttgcttctctttggcccacctgggaatggaaaaacaatgcttgccaaagctgttgcatcagaatctgaagcaacattttttaatgtttcggcttcttcattgacatcaaagtgggtaggagaagctgaaaaacttgtcaggacacttttcatggttgcaattgatagacaaccatctgttatttttatggacgagattgatagtgtcatgtctacaaggttagctaatgagaatgactctagcaggcgtctgaaatctgaatttcttatccagtttgatggggtgtcctcaaacccagatgatctagtaattgttataggggctactaataaacctcaagaattggatgatgctgttcttcgaaggctggtaagatctattctgacatttaaatggtgtggtgctgtttttttgttgaggaccgggtgctagagcccgggcggtggaggtggccttggcctttcaccaggtcgggggttcgaacccccgatttctcaccaaaaaatcccctcgctgcccctcgcccactctcggggagcggctcggctgtggccgcctcaggcctggggtgggcctttgcagtgtggacaacctgagacggcccgttagtgacaggagggcagggttcgggggttttctaggacaggaccatggttcgggttccatctttatcagaaaaccgggagggcggtctccccgtcccagttttttactgttttttgttgggttcagagtttgttacgcatggaagctatgcacctgattccttaaatacctttgcctcaatttattgcattagcctttg

SEQ ID NO: 154863 - DNA, 2484 bp, Zea Mays
ctgcaggcaggcaagatgcgcaggggccgatcgattcgaagagagctgagctgctgggccagccacccgttcccgcgctatctcccggcccaggccctcccctcccgcttcctgctctgctcaactcgatcccgccccaccatgccgcaccagggtagccaccgcccgggcgcgccggtccagggagaccccgtgttcccgcgcgccacgtccacagtgctgcccgacccgtcccgcttcttcgcgccgccgctcctcgccgcgccgctgcccaccaactccttcttccagaacttcgtgctcaaggacggggacatgcccgagtacatccacccctactccgtccgctccccgggcggcggcgcgctcgacgtgtgctacccgtcgcgggtccactcgccgtcgtccgtcacccagacgttcgtcgccgacctcaccgtctccgacgccgccgccgggagcgcgcagcgccacgtcgtgtcggccttcgacgacctctccgtcacgctcgacgtgtccccgtccctccgcgcgcacctcgtccgcggctgcccctacgtcaccgtcaccacgaccgccggaccgatcgacgtctccgtctcttccgtccacgccttcgtcgagctggtcggctcaaggtccagccaccacggctcgcccggcaccaaatggcgcctccggatggacagcggccagaccttcctgctctacgcgtcggccccgatccacctcgcgcaggccagccccacgcagctctcggcgaccgccttcgccggcgccatccgggtcgcctacctcccggacgcgtccatggagccggtcctcgaccgctacagccgctgcttcccgaccgccgggcacgccgcgctggacccgatccaccggcccttccgcgtcgactacgcctggcacagagagggacccggggagctgctgatgctcgcgcacccgctccacctccgcctactggcactggccgccgcggaccacggcgagaaccgtgccgcgcgggtgctctacggcttccggtaccggagcatcgacggcgacatggtcggcgtcgtcggcggctgctggacgctgcgcgccgacccggtgcccccggcgtggcactccacccgcggcgtccgcgcggacggcgtggccgaggtagtggccgcgctgcgcgccgacgtgggcgccctcgcgcccgccgcagtcaccaccacctcgtcctacttctacgggaaggcggtcgcgcgcgccgcgcggctggcggtggtcgcggaggaggtcgggtgcgccgacgtcatcccggcggtgcgggagttcctcacggccactgtcacgccgtggctggacggcagcttccaggagaacggcttcctgtacgacgccacgtggggcgggctggtcacgctgcaggggctcagcgactccagcgccgacttcgggttcggcatctacaacgaccaccactaccacctgggctacttcctgtacgccatcgcggtgctggcgaggctggacccgggctggggccgcgagcacgcgccgcaggcctacgccatggtggccgatttcatgacggtatcgtgcaacaaggccggggacggcggtggcttcttcacgcggctgcggatgttcgacctctggacgctgcactcgtgggcaggggggctggcggcgatccccgacgggcgcaaccaggagagcaccagcgaggccgtgaacgcctactactcggcagcgctggtggggctcacctacggggacgcgcgcctcgcctcgctgggcgcgacgctcgcggcgctggagatgctggcggcgcagacgtggtggcacgtccgtgacggggagggcatgtacgaggaggacttcagcgggagcaaccgcgtcgtcggggtgctgtgggcgaacaagcgcgacagcgggctgtggttcgcgccgcccgagtggagagagtgccgcctcgggatccagctgctgcccctgctgcccatcagcgaggcgctgttcccggacgtggcgttcgtcagggacctggtggcgtggacgctccccgcgctggacagggacggcgtcggcgactggtggaagggcttcgtgtacgcgttggaagggatctacgacacggaggcggcgctgaccaagatccgcgcgctcaccgcgcatgacaatggcaactcgctgaccaacctgttgtggtggctgcacagccgcgggcccgccgtaacgtcgtcggggacggggacgccgggttcgggttcgggcgttgccgctggtaccgccactgactctgacagtggcagtggtgggcaacacgagcagtggcggagacaggcatagggccgctagggctcgggccctactcttgagccgaaaaattactaggggcccaaatatgttccgaagaattgagagaatttgtataatccgttcatggtcatatatgtcattatctatatatttgtatgatttaagtttttctaactgatataaata

SEQ ID NO: 154864 - DNA, 1167 bp, Zea Mays
cgagcatgcacgtggagcaaaagccttcccattttaagcacaacgctactgccctcgtttcgtctcgtctctcccaccaagccgcaacacagcgcagacggcggcggctgctagcctgcaacgaacaaaccagcgagcgagcgggcggaggaggagatgccgggaaaggggcagcggcggagggagaagaacttccgggcggcgcacggcggggtaccgtgcctgcccccgccgccaaagcagagggagctcgaggccatcccgactaaactccgccgcctcatcgccttccagaacaagcacaacgccaatgctgacgcgtcctcaggaggtgctcccaagaagcaagacgatgggttaaggaagaacaagctagcaacagacaaggcaaaggacaagaaaaccaagaagcaggcattggtggttcctgctgatagcaaagcatcagatattaaaggtaatgataaacgttcagctgccaatgaggatgtgaatgcagagggaagtaaggggaagagaaagaggggaaatgttaaggaccttcgtttcgaggaactggacaagaacatctcagcctcgaagaagcagaggaggaagcagcacctggatgagaagaaaaagaagcgcaaggacaataagacagaaactctaccagactttcctgggcgcgagaaagtcaaatttggtgaagttgttgtggctccaccaaaattgtcattcccgaaggtgaagagtgcttcagatgcttctcgcgagatgctgaggaaagaggcaattgagaattacagatatatcaaaggctggacatcgaggcctggactgcagcttccaacgctagcagaatcacaatagatattttctctgtttatcgttgtcaaacttactctgtttatatcagagaagtttagagtatcaattgtgtaatttgtactctcatgtaggcaattccgaacaaatattcctgtctggatttcctctcttcttttgtgtgtttgtttttccaattggatcattgttgtgctcttgccaatagggtattatgtgattaagaaagaaaatgctgactgtttgatcagtggcttggattttggaaaattgcccatatttggttcaagtccattctttgatgtggcaattggagcataatcaactaatatttcaggatat

SEQ ID NO: 154865 - DNA, 1374 bp, Zea Mays
cgagcatgcacgtggagcaaaagccttcccattttaagcacaacgctactgccctcgtttcgtctcgtctctcccaccaagccgcaacacagcgcagacggcggcggctgctagcctgcaacgaacaaaccagcgagcgagcgggcggaggaggagatgccgggaaaggggcagcggcggagggagaagaacttccgggcggcgcacggcggggtaccgtgcctgcccccgccgccaaagcagagggagctcgaggccatcccgactaaactccgccgcctcatcgccttccagaacaagcacaacgccaatgctgacgcgtcctcaggaggtgctcccaagaagcaagacgatgggttaaggaagaacaagctagcaacagacaaggcaaaggacaaggtagttcctgggtagagtaagagtaaaattcggccctgcttgtcctcagccccgcacttcactgcagtttacttgattcataccatgtgttgttgtggttcatggttgcctgccagttgtctgtgcaatagatgctgttaagaatgtgatgcgctaacttcttcgcgtttttttatcttcaattcaatttttatggtgttcatgtagaaaaccaagaagcaggcattggtggttcctgctgatagcaaagcatcagatattaaaggtaatgataaacgttcagctgccaatgaggatgtgaatgcagagggaagtaaggggaagagaaagaggggaaatgttaaggaccttcgtttcgaggaactggacaagaacatctcagcctcgaagaagcagaggaggaagcagcacctggatgagaagaaaaagaagcgcaaggacaataagacagaaactctaccagactttcctgggcgcgagaaagtcaaatttggtgaagttgttgtggctccaccaaaattgtcattcccgaaggtgaagagtgcttcagatgcttctcgcgagatgctgaggaaagaggcaattgagaattacagatatatcaaaggctggacatcgaggcctggactgcagcttccaacgctagcagaatcacaatagatattttctctgtttatcgttgtcaaacttactctgtttatatcagagaagtttagagtatcaattgtgtaatttgtactctcatgtaggcaattccgaacaaatattcctgtctggatttcctctcttcttttgtgtgtttgtttttccaattggatcattgttgtgctcttgccaatagggtattatgtgattaagaaagaaaatgctgactgtttgatcagtggcttggattttggaaaattgcccatatttggttcaagtccattctttgatgtggcaattggagcataatcaactaatatttcaggatat

SEQ ID NO: 154866 - DNA, 2522 bp, Zea Mays
aacttcatcgctgcccagaagtcgcacgcagcacggcctccgatcgatttcctcttgtccgcgtgtcccagcgaatcgccgtcatgccgcgcccgatggcctcctcctccgccaggggccgggcgaaggattccgacccctcatcatcctcggcagcggcggattcctccatggcatccctaatcgagcgcgccacctccaccacggcgcacgccgtcgacccggtgctcctccgcgccatcaaatcttcggcccgtgcctccgatgccgccatccgggacgcgttccgcctcatcctctccctcatgtccaagccccactcccacgtgcggctcctcgccttcagcatcgccgacgagctcttcatgcgctccaagctcttccgctccctccttgctgactcgctcgacggcttcctcccgctcgccgtcgggttccgccgagcaaaccccctcccgccgccgaccacgtccgctgccttactccggaaggccgccgtccaggcgctcgagcgctggcaccatctctttggtgcgcactaccgccagctccgcctggccgtcgagtacctcaaggagtccgcgcgcgtccagttctctggtctgcgggccaccgttgatgctcgtgcagctcgtgaggctcgcatgcaggagatctatgctggcaaggttgagcagttgcgtgaaaaccttgcgtcaatcaaggcggagattcggtccacgattgatgagattcgcaatggattggagatcatccgtgctgaacataagaaatttgagggttattatgtggatgacgaggaggagattgcatccttgtcaatgcggagcattagaacagcatcattgatggctggggagtgggtgcctgagactcaggagaatgaggcagtttttgatgcactgagggaagcacaccggttgcttgtgtcaaagcatttggtcacagtacaggagtggataactgtgcttgtgagggtcaaccttccagacaaccgtttccgagattctgcattgaaggatttcattgatgttaagaatgagataagggctgtgagagatcattgcagtgagcttggtcttgaccttgataattttcataggcggaagggtgaccaggaggaagaggacaatgagttctgggtggagggaaacatagaggcaccaaatcgtgccagagtccagagcagtttagatgttgcgagcactagcaaggacactgagaagggaaagtgggtggttggtggagtgtgtcacattggcaaggcaccagttgcagctaatggaacgagaaatcttgatccagaaaaatcaaaactcctcgctgaagcccctgtgctgccatggagctctgtcttggatcgctggggctcaagtggggatgtacacgtaaaccagaggggacttgaggtcgagagtcattggggaagagtggataatgatgccactatacctgcagcaaagattgcagagttgaatgttcattgctcaatttatagagaagccccagttgagatcctaccatgccacgcccctctaaaaaaaggaggactttgccagagaagggatcttagggtatgtcctttccatggaccgattgtcccacgtgatgcagaaggaaatccaattgagcagaacagtggtagttctgatgcagaagtaaatcctgttgagcacttagacattggaggacattcaaatgagcttaatggaatcagtgatgatgattatatggagggaacctcttcaagaatgacaggtgtcaataatgattatggtgacatagctggaacttgtgatctaggtaagattactgcagagcagttagcaagacaatcagttaaaaatgtccggaaaagagaaatggatcgcaaggcacaggaaagggcccaacgtgcaagaatccgtcagcacaatgaagatgtcctgcgaaatgcggctcttgcttcaacttcctattctgcagcagcctatgagcagcctacagaagcacatggtcggcgaggacgccgaggtaaggcaaaggcaccaacgctggcatcgatgctgaaaaagaaagttaccaccaaagacagaattgcagagaggcttctgaacactcgagccacagatgccacagtaagggatgtttctcataatgaagatatgagctacagggaagcatttccaaatcagtggtagcagaagcagttgagttgttcttgtgtaggctggataaacacgttaggaatggaatcgatgttgtttattggttcatactgtcagctaaataatacatattctgttgctatctaaatcagcacagaactgtgagtatgtttcctgatattctgttcttgtacagttagtaggataagttccttgtacatttcctaatgttcagtcttactatgtgtttttgaacttacactgctattgcttgcatttcaaagtgaacttgtttgtaaaacccgtaaaccgtgccctgttaagatgtactccttacataccaaataatcaaattggcaatggattgaacaggaa

SEQ ID NO: 154867 - DNA, 952 bp, Zea Mays
gaggagtcgctaggggcttcaacttcatcgctgcccagaagtcgcacgcagcacggcctccgatcgatttcctcttgtccgcgtgtcccagcgaatcgccgtcatgccgcgcccgatggcctcctcctccgccaggggccgggcgaaggattccgacccctcatcatcctcggcagcggcggattcctccatggcatccctaatcgagcgcgccacctccaccacggcgcacgccgtcgacccggtgctcctccgcgccatcaaatcttcggcccgtgcctccgatgccgccatccgggacgcgttccgcctcatcctctccctcatgtccaagccccactcccacgtgcgtaagcctcttcccctgctccaatcccccaatttcatcgaaccctaacgctctgatcccctcccttctcgctgcaggtgcggctcctcgccttcagcatcgccgacgagctcttcatgcgctccaagctcttccgctccctccttgctgactcgctcgacggcttcctcccgctcgccgtcgggttccgccgagcaaaccccctcccgccgccgaccacgtccgctgccttactccggaaggccgccgtccaggcgctcgagcgctggcaccatctctttggtgcgcactaccgccagctccgcctggccgtcgagtacctcaaggagtccgcgcgcgtccagttctctggtctgcgggccaccgttgatgctcgtgcagctcgtgaggctcgcatgcaggagatctatgctggcaaggttgagcagttgcgtgaaaaccttgcgtcaatcaaggcggagattcggtccacgattgatgagattcgcaatggattggagatcatccgtgctgaacataagaaatttgagggttattatgtggatgacgaggaggagattgcatccttgtcaatgcggagcattagaacagcatcattgatgg

SEQ ID NO: 154868 - DNA, 2598 bp, Zea Mays
atggggggtctgtgcgattatgtgggagctgtagcttggacccaatttagatctgtcctcaacttcaacttcaaccctcaagatcagtatttaaaaatcaagatggttaacttcgggaagaaattgatggcagatcaaattccagaatggaaaggatattatatcaattacaagttgatgaagaagaaagttaaacagtatggccagcagctccagcagggggaaaaagatcgtcgtcgggttctgaaggatttctcgaagatgcttgatgatcagatagagaagatcgtcctgtttctgttggaacaacaaggactattggcaagcaggattgagaagttaggaaagcaaagggcaatactacaagagcagccagatatatctggcattgctgagttacgagaagcttatagggaagttggtatcaatctcatcaaacttctcaagttcgttgaccttaatgcaactggcattcggaaaatcttgaagaagtttgataagcgttttggctatagatttactgattactatgtgacaagtagatcgaatcacccttactctcagctgcaacaggtctttaagcatgtgggtgtaggagctgttgtaggagctttgtcacgtaaccttgctgaactccaagaacgtcaaggaagctacttatctatttatgatcagccatcttctgctcttaagctgaccgtttttggttttgatcccctgcaggaccccatcattgatatgataaattcttcagttgataagttgacaaggtcaactaattttcttcgctttttggggcaacatgccatgattgtggatgaggagtctcctagcactgcaggagaggaagaaatagaagatcagaaataccatttcatgtcccttatgctgaacctggtgaacacattcctttacatggtcaacacgtacatcattgtgccaactgcagatgactattcagtgagccttggggcagcttctactgtttgtggtgtggtcattggttcaatggctgttgcgcaaatattttcctctatttacttcagtgcatggtccaacaagtcatatttcaaaccgcttgttttcagtagcattgttttgttcttggggaatatatgctatgctatggcatatgatatgaagtctctaacggtccttattatcggccgtttactctgtgggatgggttctgcaagagctgtcaatcgccgatatattagtgattgtgtccctgcaaggatacgcatgcaagcttcggctggatttgttagcgcaagtgcacttggcatggcctgtgggccagcgctagctggtttacttcagtggaaattcaaggtctacatggttacattcaatcaatcgactctaccgggttgggtgatggcagttgcatggctattgtatttgatttggctatggttctcattcaaagaaccgaaccgtgctaccgaggtgaatgaagccccacaaaatcctgcttctggacaaactgttgatattggacgactagagaatggaattgcacagcctctgctcaaggattccgtggataaacaaaatgaagatgaagacgaagttgatgatattgaagaaactgcagatgattctcgcaaacctgcaacatcaattggctcagcataccgattgcttaccccgtcagtgaaggtccagttgttgatatacttcatgctcaaatacgcaatggagattttgctttcggagtcgagtgttatcaccaatcactatttcagttggaatacaagcgcagtggcaatatttctagcaatcctagggttgacagtccttcctgtaaacgctgttgttggaacatacatcagcaatatgtttgaggacaggcaactcctcatggtgtctcaaattacgttgctagtaggcattatcttcagcttcaaagtcacgagcacatactatgtcgtccagtatgttgtctcagcactggtcacatttgtttctgccgaagttcttgaaggcgtcaacctttccctcctatcgagcgtgatgtcgtcccgcctctcccgtggcacgtacaacggtggtctcctctcgacggaggctgggaccctggccagggtggtcgccgactgcaccatcaccgcggcggggtacctgggcgtggggaagctcctcaacgtcaccctgctaccgtcgctggtgatatgtgttgcgtccatcgcctgcaccttcctgacgtacaactcgcttttctgatggagcttcgcgacgtatttgtgtcgtcatgattcgttccaaatcaaggcagctgggagaccgccgttgccattgcccgaaggggctgttgtgttattatattatatatgtgcgtcgatttgattgctgtaaattgacaaaatgatggcagccactggccttgccctgcaaaattttgatcgcttatgtccgtgacgttgtcaatgctatgttgtgttgacgtgttggtccaaactgtaattatgctactctcgactgatctgatctccgctgcgatgcggttttgagagtggagtcgtacgagagtggatcggcgtttttgtccattgggcttgattggatttatgagataaatagtttgtcggctaa

SEQ ID NO: 154869 - DNA, 2755 bp, Zea Mays
ggtcgaagaaatgataccttggagatcggggatggattgggagtggcggaaaaggagcagcagcgcgtcgtcggccgcggaggcggtggagcgaaggaatccgagcaggctgcggagcccacgcgcgcggaggaaggagaagtccgccttggcgtcgcgcaaccctgagtgcagcgccagcgtcacctcccggtacaaacgtcgccgcgccagcgcatctgccagctcccggccactgccacttcctcctcccccatcagtggcagacgaagaagacccatcctgtcctgccggctccgcctccttccgactcatccccgtcgcctccgaccgccggcgacgtcgcccccctcccctcctcttcgttctccgtctttcccgttttacccctggctaatggggagaaaccgacggcttgtaatttcagagcccacggcccatcaaggcccagaaaagcccaacgcgatcacacgagtgggactggggagtagtgaggcgagagcttctccccgcgccgccgccaaaaccctcaaaacccgagacgccggcggtgaagaggagagggcggaggcggagatggcgacgcggatgaaggacgtggcgcggaggtcgaccaagaagtacgtggaggaggcgctgtaccggcgtctgttccggaaggggtcgacgccgcaggcggttcgagaggaggtggatggcttcctcgacagccggaagcgggcgttcaagtgggaggtgggcgtttgcgtccgccggatgcggcggaacgcgctctaccgcccgtcgctcaagctttctgaagttatggcgagaagaggcatgaatcctactgttagtgatcaagcaatccgcctggatctcattgccaaatcgagaggcatcgctgctgccgagaagtactttttggacctcccagaaacatccaagactcatcttacatatggcgctcttctcaattcttactgcaaagagttgatgactgagaaggccgagtcccttatggagaaaatgaaggagctcaactttgctttcactgccatgtccttcaacagcttaatgacgatgtacaccaaagtcaaccaagctgagaaggtccccagtatcattcaggacatgaaggcagatgacgtattgccagatgtctttacttataatgtttggatgagggcgcttgcagctctcaaggacataccaggggttgagagggtgattgaagagatgaaacgggatggccgtgttgctcctgattggacaacatacagcaacctggcttccatatatgttgaggctggaatgtttgagaaggcagaggctgctcttaaggagcttgagaagcggaacaccagcaatgacatcgaagcctaccagttccttattacattgtatgggcgtacacagaacttagtggaagttcaccgtgtctggcgatcgctgaagcgggataaccctagaatggcaaacatgagctaccttaacatgattcaggttttggccaacttgaaggacctgtctgctgccgaagcctgttttaaggagtgggaagcccgacacatccatccacccaagaccaacacaaagggctcgggggcagataatacacctggtgcagatccaaaatctccaagtaacccgcctaataatcagtctggcaccaaggaaaccggggacgagacagcagaggacctccagccgaagcatccaaaatatgacatccgggtagcaaacgctatgatcaaggcgtacattaccgagggcatgcttgacaaagctgtcgccatgaagaagcgtgccaagatgcgcggcggaaggctgaacgccaagacatgggagatcttcatggagcattacctcaagacgggggatctcaagatggcccattggtgcgcggaccgcgcgatgaagaaggggcacagcagcggcaggatttgggtgccgccgcccgccgtgacggagaccctgatgagctacttcgaggagaacaaggacgtcgatggggccgagcggtacgtgggggctctgaagaaggtgcagaaggatctgggcgcaccggtgttcgagccgctggtgcggacgtacgctgccgccgggaagaagttccccgggatgcggcagcggctgaagatcgagaacgtggaggtcggggaggggacggcccagctgcttgactctatctgcgccgatcaataggtggttttcttttgtcctcgccgtttgtgtttgtctcaataacagcaggaccgtttcgagcgctcggctatttgctctgcaagcgctgtgatgcctgtatgtactctgaaatccggccaacgtttctgttcttttcgacatcatcagcccaagcacgtcctagaggcggtggcagcgttggtggcggctgctatgcgatgggggcaccacctccgttgatgtattgtctggtgcgggactgcgagtgacctctgaggcgggggcggagaataactggatctacctaacgtcggaatggagacctgcaggtccatttgaaattaaacagaaggttggtaagagtgtgatggtgctcattttgcgttttagaggatccatacttgcatgtagccaaagaaactattttagtaccttttttccttgtactttttttttgtcttattgctttgcctggagctacttgaaatgctccacagttatgtcctctttttaactgagatgtcgttggcctgaacaaaggatgcttgacgcttcgaagtcacacgcaatgataaattcagtttgcagc

SEQ ID NO: 154870 - DNA, 1423 bp, Zea Mays
gcaagctagcgccactctcctctcactgctctagctatttatacccccgtgccttgcgtctccttcctctagagtcctccaccccaccttccctacctatctatcctacagcggctagtctactcaactctgctctgctcgcgcggcgatcgaggcaccgtcgtcgccaccatcagcggctagcaccgatcgagccaccggccgatcagatcggccggcccaacgaccatgctggcctcgctgcggtacctggccggcacggcggggccgagcggcttcggctcgcggacgaccgccgaggaggccgcggccggcgacctgcgccacgtcaccgccatcatcacgggcgccacgtcggggatcggcgcggagacggcgcgggtgctggccgggcgcggcgcgcggctggtgctgccggcgcggagcctcaaggccgccgaggaggcccgcgcgcgggtgcgcgccgagtgcccgggcgccgacgtcgccgtgctgccgctcgacctcagctcgctcgcctccgtgcgccgcttcgtcgcgcggttcctcgacctcgggctccccctcaacctcctcgtcaacaacgccggcaagtacgccgaccgcttcgccgtgtcggaggacggcgtggagatgaccttcgccaccaactacctgggccacttcctgctcaccaggctgctgctggacaagatggcggacacggcgcgggccaccggcgtccagggccgcatcgtcaacgtctcctccaccatccacagctggttccccggcgacggcgacgccctcggctacctcgaccgcgtcacacggaggaagataccgtatgatccgacgagggcgtacgcgctgtccaagctcgccaacgtcctgcacaccagagcgctcgccgaccggctcagcgagatgggcgccaacgtcacggccaactgcgtccaccccggcatcgtccggacccgtctcatccgcgaccgcgacggcctcatcaccaacacagtgttcttcctggcgtccaagctcctcaagacgattcctcaggcggccgcgacgacgtgctacgtggcggcgcacccggcggtggccggagtgtccgggaagtacttcgccgactgcaacgaggcctcgccgtccaggctgggcgccagctgcgaggaggccgccaggctgtgggccttctccgagaacgtaacggcagagaaggttcagaggacgacgacaacgactggtgtccatgtcgctgtcggcacgggactactccggccccaagctcatcagagctccgacgcggaccgcgccatggccctcgcggcgtagcggcctacagatccgcaagttttgatcgccgcccgatgtgtgtgtgtgtgcccctggtcaggtcacacatcctaaaacgtggacaggtagtatcagtctcggaaatgaa

SEQ ID NO: 154871 - DNA, 1701 bp, Zea Mays
gctcctctcctgtgctgcgcagccttgccctgctttctccgccgacccaccggccacctcccatcaccactcagtcagatccagtgctccacctacctaccagctccagccgccggcgatggccgtgtccttacccgtcccgatcccgccggcgctcctccacgcggccgcggcgctcgcgctcgccgccgccgcccacttcctccacctcccttccctcttcctctacgccctccacacctacatccacccggacgccgtcccctccaacaccccgcgcgcagtcctccgcccgccgggctccaacgccggtcccgccccgggttcctccaagcgcggcgccgccaaggacaaggacccgttcgacgccacttccgcgcagctctaccgcctccggctctcccacgccacgctcgcctcccgcccccatttcgccgcctaccacctcgcgctcctcctcccgctcgcgctccttctgcccgcgctcctgctcccggccgcccccggggcctccccgctcgcgccgctcgtccccgcggcctacctcttcgttgcactcctccgccacgtcgtcgtcccgtcgccgcgccccgcgctgctcgccgccgcgctcggcgcgctcctcgttaccactctgctctcatccagccccttcgccggcgcgctcgcgtcgctcgccgcgctcccagccgcgcggttcgcgcgcgcattctggcttggcactgaccagccccgcaccgggctcgccgtgctatcgtcctctgcgccggcgcgcctcatcttccaccttaccgtcctcgtctcctccacggccacgatcctacgatgctgcggattcatggatggcgcggaacaggaggcgaagctgctcgccgccgcggctgggctgcagctgctggcggcgcggcctgccgtgcaaatgtacctcaatgaggctgtgttctgctggtaccagcgtctgcacgcgagccgtgcgccggacactgagtacggccgggccaaggttttcttgcacaaccaccacctctgcgccgtggccacgcagctcgttgcgccgccactgctcgtgctgtcgctgcttgcattgtggcgggttcaagggaaggacttctttgagggcttagaggggatgtactggcttgttggatggtctgttgccatgaaggaggccgcattgcttgcggcccggtggatcgtggctgtgtggtcggcggcgacggtgatcacactcatgtgctacaaacgtggatggttattcgtctcgtgatcctttcttctcttgcttcctgcctgcgtgattggttcatatggagaccggagttgtgtacctgtgtttgatagagtgagatcccaacctggatctctggagttctggtaccacggcacaagtttttgtgtgcactgtttattttgcaagagaaatgttggatcaaattcttttgatttccttgtgtctgttcttactggagaagcaatttgaggtcagattttttgtccgccctttggggtggagtaatgtaacagaaaactgactggccagtcaccctgttgtaccctttgattgatggatatcaatgaatcatattcttccttttatgatcagaatgcatatgttgaagactatatcgtgttacatatttacctacgtgattttgacttctctgtgtaattcgtcactttgatttcaagaaagaaaaaaaa

SEQ ID NO: 154872 - DNA, 754 bp, Zea Mays
acgtgacgtggctagcagcaactccatctccttttccggtcttcccgaccgagcgatccagccagcgagaggttgcgagaagtagccgccggaggagcacgccaaggccgccgcctacgaggacggccatggggttctgggtgaccacgctcatctttctcctcgccggcgtcgccgcatccctcttcacgctcctctgctgcaaccgcgggccctccacaaacctattccatttgaccttggtgactacagctgtaatttgttgttggatgatgtatgctatcgtttaccttgctcagatgaagccattgatcaaccccatcctgagcggggagtgatctctcctctgcattaaaaagaatgaaagctaggtctgctgtaccattattcagtctgtgaacttcctattcatttggccccacctgatgaaataaataaactgccatgagtttttttttttttgctactccttcactgcagacattgagaaggctcgctgtgattagtgtatgcaattgtatgatatacgcaataataataatagtatctaaatatatgtgtgccgctcattggaatgtctgggtgcgtgtacccaactttgttcgtcacgactcaggtgtttgtctgcttgaaatggaattatgaacgtaaaacaatgtagcacaattttctgctttcagtgggtgttttgacttttgagcttacattttttggtggttctagtactggtacactgccaaatgtctgctatttt

SEQ ID NO: 154873 - DNA, 1923 bp, Zea Mays
cgtaacagagaatcgccgcccgccaggccaggcgatagctagcgcgcggcggccatcgccaacgcccggcccggccccgggcagctcggctcctcacgcgcgcgtttgcagcgtgatcgtcgagcgccgccacgtacatacacgcgcctcctcctccccgcctccaggctggttggctagctgcaaccactcgcgagctagagctagctaactggccagcagctccaggtcgaacgaagcttagctagctagctcaccggcaggagcggagctacccctcgagtactcgcgcgcgcatgggaaacgccctcgggtgcgcggggctcggcgagcggctggcggccggcgccagggacggcgacgcggcggaggtgcggcggctgctggacgccaacccggggctcgcccgctgcgccgccttcggcagcctcagctcgccgctccacctcgccgccgccaaaggccaccacgagatcgctgcgttgctgctggagaacggagcggacgtgaacggcaggaacatctacggccagacggcgctgatgcaggcgtgccggttcggccactgggaggtggttcagacgctgctgctgttcagatgcaacgtgtccaaggcggacagcctgagcggcaggacggcgctgcacgtggcggcggcgggcggccacgtcaggtgcgcgcgcctgctgctcgcgggcgccggcagcggcaggagcaagctcgtgaaccgggcggccagcggcggcggcggcggcgtgacggcgctgcacctggcggcgctgcacgggcacgccgactgcgtgcacctgctggtggacgagcgcgccgacgtcgccgcgcgcacgctgccctgcgccgcgccgcccatggcgtccgtcggcgccgggagcgcgccgctgcactacgcggccgccggcggcgaggtcaagtgctgccagatcctcgtgtcgcgcggggcggacagggccgccgtcaactgcaacggtcaggtggctcccggtggacgtggccaggacgtgggggtgccactggctggagcacgtcctgtcgcccaagtctctgctgcccatccccaggttcccgccctccgcatacctctcgtcgccgctcgccagcgtcatcaccctcgcgaggtacgtacccaccgccgtttcaataagaaccatcacgagcactttctgaacatggatggatggatcgatgatacgtgcagggattgcggcctggctctgaacatgtcgtcgctgccaatggacaccatggacggcggcgccgacgacggcgacgcatgcgcagtctgcctcgaaagaccctgcaacgtcgctgccgaagtgtgcgggcacgagctgtgcgtcaagtgcgcgctggacctgtgctcggtgatcaggtcctacgacgcgccggggatcgccggcaccatcccgtgcccgctctgccggagcggcatcgcctcgttcaggagacgggccgcggcggccgaggccgagcctggcgccaatgccggcgaccggcaggcgtcgtccagcccacacaagaagcggagcacggagtccgaccaggacggcctccccctcgtctgcgctcctcccgccgtcatgtcgtcctgatcagcgctgcagacatagaaatagaagctgctgtgctgcatcgtctcttcgtcggtagaaatctgcagggtacagcagcagcatgggtggatcacaggatgcatagaagctagacagacagattgtttggttctgtttgctgatgctcgccttcggcatcggtggattttattttattttcattttattttttatggtgattcacatggcattagctagtctgctagtgtaacacgttgatttgctgtagaaaaagatggaacattcttttgctgtaaaaaaaatggggttggttggtttcgggcgttttgactca

SEQ ID NO: 154874 - DNA, 985 bp, Zea Mays
gcgaaaacccctctcgtatgtcgcatcgcgtctaaacccttgtctccttcttatccccacctccctcgcggatcactcgccgccgccgccggtatctcattcgcccctctcctcccttcctcgagtgggactcttcccgtgcccggaatccttacccgatccgtcgttctgcaggccgcagccatcgccgtgatgctgtccctgtcgagggcgatcgggaggcggctcttctcgtccgccgaggccgcgtcgacggctgcggtgaggacggcgcagaacccgctcgaggagttcttcgaggtcgagcggagcaccgaggagggcaagcctcctccccactacggtcgcagctggaaggcttctgaactgcgactaaaatcttgggatgaccttcagaaattgtggtatgttcttctaaaggaaaagaacatgctaatgacacagcgtcaaatgctgcattcagagagcatgaggttcccaaatccagaacgaatttccaaggtaaagaaatcaatgtgccggataaagcatgtcttgactgagagggctatagcggagcccgatccaaggagatcttcggaaatgaagcggatgataaatgccctgtgattcactcacaggcattctcccttgggacttttgatggtacttattagaaagatctgctgccttcttttgtatctttatcccataagaactgtgagaccaaatcttttcgatgcccatggtatggtagcaaaaattagactttaacttatccgatccaataattgtctgttgagcttattttttcttcggaatgtgattccaatttagcccttaattgggttgccaatccaactgctcgattgagcagcgatgctggaattttacccctctagggatccgtagtcttgcacttatgcggcattacgactccaacaccctcatacagactgtgcaatactctatttattttaaattataagatgttatatttctttct

SEQ ID NO: 154875 - DNA, 983 bp, Zea Mays
ggattttgaaattgatgaagaatcaaaagaatacctcgcacttcatcctcaggcagccacaaaggagcctcgcctgattgaagaacattttgatagtgttagcgaggacgatcaacaatctgatggtaacatatctgacactctagcggaatctgacagtgatgatgtcatgcataattcaaagcgtataaggttatacgaggtcaaggatgaacaccatgcggaagcatttttgaacagcgtctctttatcaaacgaggatgctgttccccttgaggataggatagctgccctggaaaggaaacagaactccaaagcacttgatgcggtcaagtacgggcctggtggctcacgagagatttcgtttttctctaaaagccgtagaaggcacaaggaagagtcgtctagcgacgatgaacccaagggtgtcaaaaagagagctgtgcagccgctgggcttgaagcagggaaaagccgagttctatatgtttggcggaaatcgtggcagaggtagaggcggtggtggcagaggtggaggcggtcgaggaagaggtggaggtggtcgaggaagaggtggaggacgaggcaggggcaggggcagaggatgaatggggcccgtcacattgaccccgttcctgcctttgcaggggttttggtaagcttgaaatggattgatcctgcacatgcagtgggtagaaagtgtgttccttcacaacataggcaagagctagagtaactgaggattgctgcttcagaatttttgggaagagaactttgttagaagacaatattacatatcttatggtctaccttgtaacggatcgttgcattctggtgggtgtctatgggtacggtatagcattttttttgtaataggcaacataactgctggcattttcatttttgagtactgaaggctctccaaatccatgattagtagacatgcgttcatagaaacagaaccaatattaatatctaaaaata

SEQ ID NO: 154876 - DNA, 1282 bp, Zea Mays
agtgcctgatttagtagagcgcactagcgaaaacccctctcgtatgtcgcatcgcgtctaaacccttctctccttcagtccttctcatccccacctccctcgcggatcactcgccgcctccgccgccgccgccggccgcagccgccgccgtgattctgtccctccaacttccttaaatcctagagccagcagcaggcaaccagcgccgacgaggaggaggagcgcggagtagaggggctccggcgaccgcgtcggagatggcggcaagccacggcgcggggacgctcaagtccacctccatcaacggggtcaagctctactcgctcaacggcggccgctatgtcgccccctgggtcgtcgcgaagaagaagcgcgccctccgcaaggacaaagagtatcagcggaggctggatttgatccacgacctgaggttcgagaccgccaccaccaagatcaagctgacgcccgatgaccagtacctgatcgcctcaggtatttaccccccgcaagttaaagtctacgagttgaaggaattgtcgatgaagttcgagcggcacatgatctcagaaattgtagatttccagatccttggtgatgactattccaaactcgcgtttttgtgtgctgatcgttctgtaaatttgcacgctaagtatggaagccattatagcttgagaattccaagagtgggaagggacatggcctacgattgctggtcctgcgacttgctatgtgctgcttcatcaccagatctgtacaggataaacctagagcagggacgattccttgcttctctttcctccgaatcaccagcaataaatgcggttacacgaagtaagatccatgggcttgttgcttgcggtggtgaggatggtgcggttgagtgttttgatatgaggaaaaaaacttctgttggcagaattaatattccagctgttagttctgaagattattctcaggaggtcacgtctttgcaatttgatgaagatcaaggatactttatggcagtggggaccagtacaggaaagatatcaatatatgatttacgcatgtcttctcctctgagagttaaggatcacatgtatggtagcccaatattaaatatcaaatggcaccagacacttaattgtactgaacctaaactgatcactgctgataagcacatagtgagaatctgggatcctaatacagtgagtttcttcctttccattttgttcaaatgttttcttcattagtattcatggtgtaattttacatatatattgggtttgatgtggattta

SEQ ID NO: 154877 - DNA, 1145 bp, Zea Mays
agactcttcccgtgcccggaatccttacccgatccgtcgttctgcaggccgcagccgccgccgtgattctgtccctccaacttccttaaatcctagagccagcagcaggcaaccagcgccgacgaggaggaggagcgcggagtagaggggctccggcgaccgcgtcggagatggcggcaagccacggcgcggggacgctcaagtccacctccatcaacggggtcaagctctactcgctcaacggcggccgctatgtcgccccctgggtcgtcgcgaagaagaagcgcgccctccgcaaggacaaagagtatcagcggaggctggatttgatccacgacctgaggttcgagaccgccaccaccaagatcaagctgacgcccgatgaccagtacctgatcgcctcaggtatttaccccccgcaagttaaagtctacgagttgaaggaattgtcgatgaagttcgagcggcacatgatctcagaaattgtagatttccagatccttggtgatgactattccaaactcgcgtttttgtgtgctgatcgttctgtaaatttgcacgctaagtatggaagccattatagcttgagaattccaagagtgggaagggacatggcctacgattgctggtcctgcgacttgctatgtgctgcttcatcaccagatctgtacaggataaacctagagcagggacgattccttgcttctctttcctccgaatcaccagcaataaatgcggttacacgaagtaagatccatgggcttgttgcttgcggtggtgaggatggtgcggttgagtgttttgatatgaggaaaaaaacttctgttggcagaattaatattccagctgttagttctgaagattattctcaggaggtcacgtctttgcaatttgatgaagatcaaggatactttatggcagtggggaccagtacaggaaagatatcaatatatgatttacgcatgtcttctcctctgagagttaaggatcacatgtaagtctctatttcctcttgtgaagggttttcacttgttaatctttatcaaaagttagttccagccaatcaaccatttctacataaatcttctgaaggaattctctcattggatggggttttcttactctacttccttctgcaaacaggg

SEQ ID NO: 154878 - DNA, 396 bp, Zea Mays
atggcggtgtggcgtagacctttgggtggctttgggggaagaagaaatcgcggtagtgccgagaattgtcttgaaagcacttcttgctgttttactattcgaaaagaagcaaaaggcaaaaactatcgatataatattaatagggataagggctatggcggtattgtgctcaagtcctggtcaagatgggctatttatggcatgctggatgatcaagagctacgttacatggtacttgaatttgttaagcagctgggagaggctttgcattcagtcaattccaaatcaagtagccaccatttggaattaatttatgttattccagctccaagaatgcaaaagctcaataatcaggactttgacccaaagatctcatgcatctggctgacactgtag

SEQ ID NO: 154879 - DNA, 1097 bp, Zea Mays
tttcccacctgacaaaatgttcagatgaatgaaaaccatacttgtttattccatttccttctaactcggaacagagattacaagctaaacagacatggtgaaagaatgacaagtgtacataaagaataaagaattacaactactaacaattgaatcttttatcctatcacctataaaaacaaagctacaaacaaatctttcttactcctttgcttctttttttttgttcttctgattgtataaaagaattgtcagactgtataatgaactaagttttcagtaacagcaaaagaaccactgaaaaaccatgttcttttcttcttcacttcaccttgtgtcttccccccattcagctatgctgagaatgggatgctgtggtggagacagacgcagacaccgtgctgcccccgtcgctgaccggcgtccacgcggacacggtgtacatggcctggtccatccaccggagcgtgagcccctcgccgtcgccctgcacctgcacgctgtagttgcccggcgcgaacatcctcgcgatcatgcgcccctgcaacgcctcccggtcgccgatgccggcgttctggaacccgccttcctgcatgcgctgccgccacccggtgaaggtctcgtgccgctcgaagcggtccgcggcctcgaacgccaccgcgttgcggatctcccgcgcgaacatctcctccgccttggccctcgcggggctggcgtccgccagcccagccgcctccacggcgtcgaacgccgcggcgtagtaccgcagcgcgcgcgcgaaccgcgcctcccaccgcccggagttgagggcgtcctcgtgctcgcccaggaggaggatggcggcgcccgtgctgcgcgtgagcccgaggaagtcggccaccgcggcgccggtctcgtcgcggagcaggcggtgcgccgcgaggacgcagttcacggcgacgcactcgccgcgcttcacgtggagcatccacaggcggacgtcctcgaggcggtccaccacggcgtggaactcgaacgcgagcccgagcgcggcggccacgcgccccagccgcgcgccggtctcctgcagctcctgtcttgactcgccgacgccggtg

SEQ ID NO: 154880 - DNA, 1142 bp, Zea Mays
ctttcactattacagcaagatcactaatagagagggcatagccgatttcccacctgacaaaatgttcagatgaatgaaaaccatacttgtttattccatttccttctaactcggaacagagattacaagctaaacagacatggtgaaagaatgacaagtgtacataaagaataaagaattacaactactaacaattgaatcttttatcctatcacctataaaaacaaagctacaaacaaatctttcttactcctttgcttctttttttttgttcttctgattgtataaaagaattgtcagactgtataatgaactaagttttcagtaacagcaaaagaaccactgaaaaaccatgttcttttcttcttcacttcaccttgtgtcttccccccattcagctatgctgagaatgggatgctgtggtggagacagacgcagacaccgtgctgcccccgtcgctgaccggcgtccacgcggacacggtgtacatggcctggtccatccaccggagcgtgagcccctcgccgtcgccctgcacctgcacgctgtagttgcccggcgcgaacatcctcgcgatcatgcgcccctgcaacgcctcccggtcgccgatgccggcgttctggaacccgccttcctgcatgcgctgccgccacccggtgaaggtctcgtgccgctcgaagcggtccgcggcctcgaacgccaccgcgttgcggatctcccgcgcgaacatctcctccgccttggccctcgcggggctggcgtccgccagcccagccgcctccacggcgtcgaacgccgcggcgtagtaccgcagcgcgcgcgcgaaccgcgcctcccaccgcccggagttgagggcgtcctcgtgctcgcccaggaggaggatggcggcgcccgtgctgcgcgtgagcccgaggaagtcggccaccgcggcgccggtctcgtcgcggagcaggcggtgcgccgcgaggacgcagttcacggcgacgcactcgccgcgcttcacgtggagcatccacaggcggacgtcctcgaggcggtccaccacggcgtggaactcgaacgcgagcccgagcgcggcggccacgcgccccagccgcgcgccggtctcctgcagctcctgtcttgactcgccgacgccggtg

SEQ ID NO: 154881 - DNA, 860 bp, Zea Mays
cgtccttctcggctgtctgtgcagttgtgctcgcttgctccccacgcccacgtcattccccgtccgctgcggctcacctccagcctcacggtcccgcgaccgctatggccgacgcgtactggagatgtacccggtgcacctgacacggctggctattatccacgcgatgaagaaagggcagggtatcgtgctgctagagataccgagtctcttaacgcttcctacgaacgttttctacgtactgggcaaattcaatcctttggtggtggacatgctggagaacctattaggcctgctgtgggtggcaatgctgcctacccagttgatgatcgttcaatgatggctgctaggggtatggatagcagaaatattggtttcgttggtggaatgccagagccaccccttccacctgatgcctcaaacaccttatatatagaaggcgttccatctgactgtacacgtcgagaagtttcacgtatccttagatatatatcttttctgccgctctttgtttctaaacatctatttgcataaactgtgatcaaacataactagtccttcacttcccccagacatcttccgaccatttgttggctttcgtgaggttagacttgtaaacaaagaaccgaaacatcctggtggtgaccctattgtcctttgttttgttgattttgcggaacctacacaatctgctattgcattggatgctttgcaaggctataagtttgacgagcatgatcgcaattcacccaatctgcggctgcagtttgctcgtttcgcaggtccaaaggggaattcaggacctggtggtcgtggtaggcgataagttattggcgttcctttttgccaggtgattcacg

SEQ ID NO: 154882 - DNA, 763 bp, Zea Mays
cgtccttctcggctgtctgtgcagttgtgctcgcttgctccccacgcccacgtcattccccgtccgctgcggctcacctccagcctcacggtcccgcgaccgctatggccgacgcgtactggagatgtacccggtgcacctgacacggctggctattatccacgcgatgaagaaagggcagggtatcgtgctgctagagataccgagtctcttaacgcttcctacgaacgttttctacgtactgggcaaattcaatcctttggtggtggacatgctggagaacctattaggcctgctgtgggtggcaatgctgcctacccagttgatgatcgttcaatgatggctgctaggggtatggatagcagaaatattggtttcgttggtggaatgccagagccaccccttccacctgatgcctcaaacaccttatatatagaaggcgttccatctgactgtacacgtcgagaagtttcacacatcttccgaccatttgttggctttcgtgaggttagacttgtaaacaaagaaccgaaacatcctggtggtgaccctattgtcctttgttttgttgattttgcggaacctacacaatctgctattgcattggatgctttgcaaggctataagtttgacgagcatgatcgcaattcacccaatctgcggctgcagtttgctcgtttcgcaggtccaaaggggaattcaggacctggtggtcgtggtaggcgataagttattggcgttcctttttgccaggtgattcacg

SEQ ID NO: 154883 - DNA, 1007 bp, Zea Mays
cactccgaagcgctcgtcgcaaaagctgtggcactgccgcactggcacagtggcacgcgattcctttccttccgcgtccgcgtccttctcggctgtctgtgcagttgtgctcgcttgctccccacgcccacgtcattccccgtccgctgcggctcacctccagcctcacggtcccgcgaccgctatggccgacgcgtactggaggtacgcggccgctgccccgcgccagcagcagcagcagcagcagccgccgccctccgccggcgggggcgtcgcgcaccccggcatgggcggcggcgcaccgcagatggcccccgccggggggcagcagcagcccatgaagcggccccgccccaccgaattctcagatgtacccggtgcacctgacacggctggctattatccacgcgatgaagaaagggcagggtatcgtgctgctagagataccgagtctcttaacgcttcctacgaacgttttctacgtactgggcaaattcaatcctttggtggtggacatgctggagaacctattaggcctgctgtgggtggcaatgctgcctacccagttgatgatcgttcaatgatggctgctaggggtatggatagcagaaatattggtttcgttggtggaatgccagagccaccccttccacctgatgcctcaaacaccttatatatagaaggcgttccatctgactgtacacgtcgagaagtttcacacatcttccgaccatttgttggctttcgtgaggttagacttgtaaacaaagaaccgaaacatcctggtggtgaccctattgtcctttgttttgttgattttgcggaacctacacaatctgctattgcattggatgctttgcaaggctataagtttgacgagcatgatcgcaattcacccaatctgcggctgcagtttgctcgtttcgcaggtccaaaggggaattcaggacctggtggtcgtggtaggcgataagttattggcgttcctttttgccaggtgattcacg

SEQ ID NO: 154884 - DNA, 511 bp, Zea Mays
cactccgaagcgctcgtcgcaaaagctgtggcactgccgcactggcacagtggcacgcgattcctttccttccgcgtccgcgtccttctcggctgtctgtgcagttgtgctcgcttgctccccacgcccacgtcattccccgtccgctgcggctcacctccagcctcacggtcccgcgaccgctatggccgacgcgtactggaggtacgcggccgctgccccgcgccagcagcagcagcagcagcagccgccgccctccgccggcgggggcgtcgcgcaccccggcatgggcggcggcgcaccgcagatggcccccgccggggggcagcagcagcccatgaagcggccccgccccaccgaattctcaggctataagtttgacgagcatgatcgcaattcacccaatctgcggctgcagtttgctcgtttcgcaggtccaaaggggaattcaggacctggtggtcgtggtaggcgataagttattggcgttcctttttgccaggtgattcac

SEQ ID NO: 154885 - DNA, 276 bp, Zea Mays
atgtcgagcggtaagaagatgtcagtggtcgtcatcatgttcatggccgcgctgctgctgctgctgctggcaactgtggagtcgtcgtcgtcgtcgtcggcggcgtcgtcagccatggcctccagctcatccgaccagctgggcgggctggtggcgcttgaggcggcaggaagaaagctactgcagatcgacttatgcggaggacggttctgcaccattgttgatgactgctgcattaccaaccctcgctgtattgccaacgcttgcaccgcctaa

SEQ ID NO: 154886 - DNA, 2553 bp, Zea Mays
atggcccaacaggcagtttttgcggtgctggagcggggtggtagcattgcagttgatgaggccgtatacttgttgggcgtctctgaaaagctggaatcagccaagaagcaactcctactcatgcaagcctttctcatggacctggatgaaaagatgctgaagggtaacttcatggctaggcatctagcttccgaggttcgggagatcgcatatgaggtggaggacatcattgacaccgccaacatcttgatgaggagaaacggccccaagacatcagtcagaggggccatgtccaaatatgcttgcttccccatatacctcactcgtctccacaagctgggatcaaggatagattcaactgaagaaaggatgaaaaaacttttcggcgactttgagaaattcaacatcgctgctaatgcaattgcagaagaaccacggcgttacatcaccgaggatgatgacattcggcataggcgattggttcatcccaactcgggtgatcaagttggtgtcattgggtttgatgagcagattaaacagatcgagtatgacttgctagacacaaagaacaggcacctaaccgttgtttccattgtaggtcccggtggggcaggcaaatcaacaatggctaagaaggtgtatagtttgcctgcagtgaagggacactttaaagttcattgttggttaactgtgtcccaacgagctgttgcaactcatgattttttgaaagaggtggttaagatggttgtgccttctcacctcatgaaagttatggagcatgaggtgaaaaagctgcttcacgagtttgcactgagtcaaaggtatttgatagtgttggatgatatatggagcaaagatgcctgggatgctatcaagcatgccttccctaatcagaagaatggcagcagaatcattctgaccacacgcaatgtggatgttgcaaagcttcccggtgcaaggaagaaaatctacaggccaaagctcctgaatgaagatgaaagcacccagttgcttcttaccacggccctcccagagtacatcttggatggcgggcaaaacttggacgagttgaaggagctgggcaaagagcttgcaataaaatgtggtggcctgcctcttgctttgattgttttggggggatacctgtcaaggaatcttgatgttggcgagtggaagaggttgttaacaaacagtatggattggcatgatttgatcacctccgatagggtcattggtgccatactggatcttagttactatgacatgccgagtcatctgagatcatgcttcatgtacaccacggccttccctgaagactctcctattgatgtgcgagttctggcaatgctatggattgctgagggtttcatcccgctggtccgaggccagacccgcgaaaaagtagccttaaagtatgtggctgagctagtgcagcggtgcatgatccaagcggagggatggacgaactctgggatgatcaaggtggtcaaggtgcatgacatcctgcgcgagtgggggtttggacgagctcagagagaagggtttatgaaagattgccattctgcggaggatatcgaggtggcctactcgggggaggagatgatgaaagcttaccgagtggtgctccacagctcactgtcactggaaaggggagttggaaccaccacgagaaagcttcgcactctattagacttcaacaaccacacatcagtacaggtgccaaaatcgttccagggtttacgcgtgcttcacctgaactgttctggcgaggtttctctgccaaaggatattcaccagatgaggtatttgagatatcttggcttgggaggcaactgctcctatgatctcccttccaacattggaggcctcttaagcctcgaaacactgtactgcacagcaagtatagaccacatcccagcatcattgtggcggaacaggacactgaggcaagtgcatatcccctatgctagaagcttatcatcaccacagatcggttcacagtcatcaaaggttcttgttatactagtagattgtgggagcagtacccatatggacgatgctaagcggattgtggagaaaactagaaggcaagtgctgaggaacaagaacctggatctctcgttctgcttgggggtggagtatgggaaatatggcatggaagtcatagggagatgcaatacgggggtccagttccccatcgacctcctcaattttgatgagacgcatgattactgggaactgaagatttgctgcgccaatctactcagcaatgatcacaagatcctggagcttgggaggataaaaaacctcaaggtgctagagataggcgagcagtcatatactggcaaggtgatggttttcccgtcaggcagcttcatgacacttgaacgactggtgctctacgatcttgcagtggagaaatggaaaattgagtgtggatccatgatatgtctcagggtgttgacgctttgcaagtgccccaaactggtccacctgcctgaagagttgttaaggcttccgaaactacgcagtctggctcttatcgcaatgcct

SEQ ID NO: 154887 - DNA, 234 bp, Zea Mays
atgaaaacacacgatctcacatgtctgtttctggataatgcccttgctgcccgaccaacatgcggggttgatgcgtactttctcttgtgcacaaatgttgtcttgctagaacactgcctgtgcaaatgtgaaatggttcccccggtaaagaatgattccatgcaaaacgcaaatcgacttcctctctttctcaaactttctgtggaagtaagatatcaatcaacaggcaggtag

SEQ ID NO: 154888 - DNA, 2232 bp, Zea Mays
tgatgccccgagatcgatcgatcgatctttcaagttttttttcaggcagcaacagcaacaagtaaaacaaaacgaaatttaaatcgttggatcatggatggagccaagctctgaaagccaactaaatcaataagccggaattgtgtatgagcagagagtggggtgtgcgattatctattttcaaatcgtcttcctcctccggacctgacgaccgacgctactgtatgcggtcgcgcggccatgtcatgtgggcagtggccgccgctgctgccggtattctatttggtttggttggtgtgtgtgtgtatatattccccttgcccatgcggtggttcccgcatccacttcgcccgcccgcccgctgcctgactgccattattgcctcccggtcttcgctgtccatccgaccgtccgtggtttctccctccggtccccgctacccgccccgccccgccgagaagcttcgggctagctagcaagctagctagctacctaccaacctacccgtgctttggttcggttggttggcgccatagccattgccgaggagcgagggagcagccgggcgggcagtcaggaggcggtgagtaagcatgctgggagcgagccccaggggcaggaaggccgccgcgccgccggtgaagctggggtcggcgaaggaggcgccggcggccggtggaggagggagcggcggcaaggtgccggcggaggaggtgtgggaggtgcggcccggcgggatgctggtgcagaagaggggcggcggcgacgacgagccgtcgcccaacgtgaagcccgtgcccaccatccgggtcaaggtcaagcacgccggcgtcacgcacgagatctacatcagttccgaggcctccttcggggagctgaagaagctggtggccgccaagacggggctgcaccccgacgaccagaaggtgctgtacaaggacagggagcgtgactccaaggtgttcctggacacggctggcgtcagagaccgctccaaggtggtggtgctggaggaccccgaggcccgcgcgcgccgactcatcggggagcgccgcagcggccacctccagaaggccgccagggccgtcgccgcggtcaccgccgaggtcgacaagctggcacccaaggtggcggcgctggacgcgtcggtgcgcaggggggagaaggtcgcggagaaggacgtggtgcaggtgacggagctgctaatgaacgagctgctcaggctcgacgccgtggtcgcggacggcgacgtcaaggcgcagaggcggatgcaggtgaagcgcgtccagaagtacgtggagacgctggacgcggtggcggccaagaacgccgccctcgtcggcaagtccggcgagaaggccgcggccaagccggcgccggcgccggcgccggccccggccccgccgccgcggcagcagggacaggggcagacgcggtgggagatgttcgacctgctgtcgtcgctgccgtccacgtcctcggcctcgtcaacgacgaccgtgagctccacggcgtcctccggcgcgccgccgccgagccgcccggactggatgctcttctgacgagggagggacggcggccccgcaccggccggccaccggcgcgaaagcgaaaggcgagtgcttgatgcggtgcgatgcttgtgtgccaaaaattgcaccccaaatctggtagctcgtcgagtgtcctgatgaggccatgattgggcaggcgggggggctatctagctttggccacacagctgcattgcgttggccgttgggctgcatggtaccgtaccagccaattcgagttcatcaatcatgtggtgtgagagtatttttcttcttcacctctcctttttctttctttccttttgagcttttttttccctcctcctcctcctcctcctcttcttcttgttcatggaaggtttgggattcttttggagtgcatactatactattcagatagagaaacagaaagatggagttggttagggcaagtgaaacgtcttcagatagggaaataaataaaactagtcggtgtccaaactctgaagaaacgaacaaagaggtgcatggattgttagcttatcacactgttgtttgagagtgatgagagatgtatcgatcaagaggccacttggtcggtagtctgtcactccttgttgctgccgagtttcttcctcctcctcatcatcctgtataatgtaatcaagcaataatacaaaataaaaaagcgttttgaatt

SEQ ID NO: 154889 - DNA, 2239 bp, Zea Mays
tgatgccccgagatcgatcgatcgatctttcaagttttttttcaggcagcaacagcaacaagtaaaacaaaacgaaatttaaatcgttggatcatggatggagccaagctctgaaagccaactaaatcaataagccggaattgtgtatgagcagagagtggggtgtgcgattatctattttcaaatcgtcttcctcctccggacctgacgaccgacgctactgtatgcggtcgcgcggccatgtcatgtgggcagtggccgccgctgctgccggtattctatttggtttggttggtgtgtgtgtgtatatattccccttgcccatgcggtggttcccgcatccacttcgcccgcccgcccgctgcctgactgccattattgcctcccggtcttcgctgtccatccgaccgtccgtggtttctccctccggtccccgctacccgccccgccccgccgagaagcttcgggctagctagcaagctagctagctacctaccaacctacccgtgctttggttcggttggttggcgccatagccattgccgaggagcgagggagcagccgggcgggcagtcaggaggcggtgagtaagcatgctgggagcgagccccaggggcaggaaggccgccgcgccgccggtgaagctggggtcggcgaaggaggcgccggcggccggtggaggagggagcggcggcaaggtgccggcggaggaggtgtgggaggtgcggcccggcgggatgctggtgcagaagaggggcggcggcgacgacgagccgtcgcccaacgtgaagcccgtgcccaccatccgggtcaaggtcaagcacgccggcgtcacgcacgagatctacatcagttccgaggcctccttcggggagctgaagaagctggtggccgccaagacggggctgcaccccgacgaccagaaggtgctgtacaaggacagggagcgtgactccaaggtgttcctggacacggctggcgtcagagaccgctccaaggtggtggtgctggaggaccccgaggcccgcgcgcgccgactcatcggggagcgccgcagcggccacctccagaaggccgccagggccgtcgccgcggtcaccgccgaggtcgacaagctggcacccaagctcggcaggtggcggcgctggacgcgtcggtgcgcaggggggagaaggtcgcggagaaggacgtggtgcaggtgacggagctgctaatgaacgagctgctcaggctcgacgccgtggtcgcggacggcgacgtcaaggcgcagaggcggatgcaggtgaagcgcgtccagaagtacgtggagacgctggacgcggtggcggccaagaacgccgccctcgtcggcaagtccggcgagaaggccgcggccaagccggcgccggcgccggcgccggccccggccccgccgccgcggcagcagggacaggggcagacgcggtgggagatgttcgacctgctgtcgtcgctgccgtccacgtcctcggcctcgtcaacgacgaccgtgagctccacggcgtcctccggcgcgccgccgccgagccgcccggactggatgctcttctgacgagggagggacggcggccccgcaccggccggccaccggcgcgaaagcgaaaggcgagtgcttgatgcggtgcgatgcttgtgtgccaaaaattgcaccccaaatctggtagctcgtcgagtgtcctgatgaggccatgattgggcaggcgggggggctatctagctttggccacacagctgcattgcgttggccgttgggctgcatggtaccgtaccagccaattcgagttcatcaatcatgtggtgtgagagtatttttcttcttcacctctcctttttctttctttccttttgagcttttttttccctcctcctcctcctcctcctcttcttcttgttcatggaaggtttgggattcttttggagtgcatactatactattcagatagagaaacagaaagatggagttggttagggcaagtgaaacgtcttcagatagggaaataaataaaactagtcggtgtccaaactctgaagaaacgaacaaagaggtgcatggattgttagcttatcacactgttgtttgagagtgatgagagatgtatcgatcaagaggccacttggtcggtagtctgtcactccttgttgctgccgagtttcttcctcctcctcatcatcctgtataatgtaatcaagcaataatacaaaataaaaaagcgttttgaat

SEQ ID NO: 154890 - DNA, 2529 bp, Zea Mays
ccccattaacaaagcacccatcccttcaacaaacctcgagtcgagagagagaagagagcagacaacaagagacaccaacgaacagaggcaaaccggctcacgcctgtctcggtgcggtggccggctaatcatggccaccgtggggcagtccggggccctgagaagggtcaccgtgcactacgccagctcgcccacgcgcggcgcggtggtagaggtgagcctcgacgacctcgacgacgagctgctccagtttgtgctcgccgatcttcttcccggccaggagggtttacaccagtcgatcttggaaggagcacacggcagcaaccaggagaactatatgagaggcgcaggatccagtgcgccgtcacaggaataccatgcacagagcagcaccgctgctgcggcagcagctgcttcgtccaggaggaatccaggcacggatgacgcccagatcgcctcggacttcgagtacgccacgaagctgcagcaggagatggagggcctcagcgtcgacgacgacggcgacggtatcagctgcgtgccgtctccgtctgactctgacgacgggcacgaccatcaaaacgaagaggacgaggaggaggaggatggtaatggtggtggtgatgatgatgatgatccagacaacatgacttatgagcaaagacaggcacttgtagagtctgtggggtctgaggacagaggcttatccgacgagctcatctcctacctgcagccatggaagtacaaggcatcagggtttttctcccggaaaacaaaccatgacgactgccctatctgcctgtcaactttcaggaaccgagagactatgataacgttgccgtgcatgcatcactaccacgcagcttgcgtcaccaaatggctcagggtcaacaagacatgccctgtatgcaaatatgaactgttcggaccttgctagcatccgacaatgggctgataagacaaggtgatggggcgtcacactcacacccagctggttgcatcatctacttttttttgcaccaagaaaaaagaaaatgaaaaacaatccaaaaagagaagggaaaaaagttaggaagtgtagatcttgatcacacaagaaaaagaagaaaaaaaactgaaatttatgtcttttttatctttcctttggcttgtggaaatgtacgtaagtcacggtcttatatttgtttagaagcttgtttttttttcttctcttgccatgactatgtgtatctgttgtcgtgtgatgcattatgcaaaccagaatctcctagtggaatcgctagaaaccgtgcaaaacaccagacggtgccagataacaggagattataactgacacccactatagcatgatggaaaacgatgtacatgacaaagaggctgtttgtgaccttgcgatgatcacatcatttgattcagcaacatgccatacacacgctaactatcagccaaatccaatccaacccactatctcaactcacacacatctggagcgacgccagtgtatgatatgatcatcatcggaaaactgtcaatacataaagctctacagaaagagaagggtggcggcggcaaaagcacttgccagcaccaatcaggcttaggcttatatctcattgcttggctttaccacagtagcgtactaccacccgtgtcctgcaccgaacagcccgctctccaccagttcgttagcgatcatgtcgtcgaggtcctccagttgatggaaggagtcatcgaccttcgagctcacggcattgccagcagcagctggactgctgctcaccgacttgaagctgctgtttctggccgaagccatgctggctgtgctattgttgatgacattgctagggccagtaccagcagcaccctttaccgtgccgttatggttagagctactgttattgacatgctgcccctgctccccagtagcagcaatgacgttgggggtagcaactcctggcgcgagacccccgccgctcgcattcggcggtggtgcatccagaggcggttgctgcgctttcgagcggttgttactgttcttaacttcctgcagaagctggttgaggacatgctgctggtactgcgggttgacaccaaagccatggaaactgttttgctgctgctgctgaaacgacgacgacggtgggtggtgctggaattgaacttggttaggtcccaggaaggacctggccgcttccagctgcatgccgttgtgcattgctgtaggacctttgaagacactcgacgcctcctgctgcagcgaaatcgtactggcacctgagcttctgagcatgttctggtaggtgtttagaggtgcggcaatcggtagattgttgttgccaatggctccggcaccaggagtctggttgttcgcagaagtgcttgtctcttgtttgacccccatcaatttggtgttgctctggttgttggcaaggttagcggcagccatggcctgtctcgaatcatgcatattctcaaactttgccgtggttttagaataactgttcaggctctctgcatatgaacagagaa

SEQ ID NO: 154891 - DNA, 3030 bp, Zea Mays
ccccattaacaaagcacccatcccttcaacaaacctcgagtcgagagagagaagagagcagacaacaagagacaccaacgaacagaggcaaaccggctcacgcctgtctcggtgcggtggccggctaatcatggccaccgtggggcagtccggggccctgagaagggtcaccgtgcactacgccagctcgcccacgcgcggcgcggtggtagaggtgagcctcgacgacctcgacgacgagctgctccagtttgtgctcgccgatcttcttcccggccaggtacgtgccccttcctcgccttcagcacgagcatgcatgcgtacacatgtatggcgtctacccgccatgccagccttgtatttgtgtacatacatacatctttgcttcttccacgaacacgcagcggatcatttccttttgcttccttcttccactatcttagaaagtaggatctccagtctccactgaagagaaagctagcttccacgatcgcaggagggtttacaccagtcgatcttggaaggagcacacggcagcaaccaggagaactatatgagaggcgcaggatccagtgcgccgtcacaggaataccatgcacagagcagcaccgctgctgcggcagcagctgcttcgtccaggaggaatccaggcacggatgacgcccagatcgcctcggacttcgagtacgccacgaagctgcagcaggagatggagggcctcagcgtcgacgacgacggcgacggtatggtctgcttctgcctctgctctgcctatggacgatggtccagcagattcagatgcgtttcgttttgcatgatgtgactggcactcgtcgggttcttattgtgcccgtcgcatactcgcatcgcgtctcataattgtggttggtccttgtgttgtcgctggcgcgccgcgcgccatgattgttcaggtatcagctgcgtgccgtctccgtctgactctgacgacgggcacgaccatcaaaacgaagaggacgaggaggaggttggcagctcggcatctttctatctttctgaatcagttagttgagatgtgaaaagctagggaactgaagtctgaaggttctgataattgtggcaggaggatggtaatggtggtggtgatgatgatgatgatccagacaacatgacttatgagcaaagacaggcacttgtagagtctgtggggtctgaggacagaggcttatccgacgagctcatctcctacctgcagccatggaagtacaaggcatcagggtttttctcccggaaaacaaaccatgacgactgccctatctgcctgtcaactttcaggaaccgagagactatgataacgttgccgtgcatgcatcactaccacgcagcttgcgtcaccaaatggctcagggtcaacaagacatgccctgtatgcaaatatgaactgttcggaccttgctagcatccgacaatgggctgataagacaaggtgatggggcgtcacactcacacccagctggttgcatcatctacttttttttgcaccaagaaaaaagaaaatgaaaaacaatccaaaaagagaagggaaaaaagttaggaagtgtagatcttgatcacacaagaaaaagaagaaaaaaaactgaaatttatgtcttttttatctttcctttggcttgtggaaatgtacgtaagtcacggtcttatatttgtttagaagcttgtttttttttcttctcttgccatgactatgtgtatctgttgtcgtgtgatgcattatgcaaaccagaatctcctagtggaatcgctagaaaccgtgcaaaacaccagacggtgccagataacaggagattataactgacacccactatagcatgatggaaaacgatgtacatgacaaagaggctgtttgtgaccttgcgatgatcacatcatttgattcagcaacatgccatacacacgctaactatcagccaaatccaatccaacccactatctcaactcacacacatctggagcgacgccagtgtatgatatgatcatcatcggaaaactgtcaatacataaagctctacagaaagagaagggtggcggcggcaaaagcacttgccagcaccaatcaggcttaggcttatatctcattgcttggctttaccacagtagcgtactaccacccgtgtcctgcaccgaacagcccgctctccaccagttcgttagcgatcatgtcgtcgaggtcctccagttgatggaaggagtcatcgaccttcgagctcacggcattgccagcagcagctggactgctgctcaccgacttgaagctgctgtttctggccgaagccatgctggctgtgctattgttgatgacattgctagggccagtaccagcagcaccctttaccgtgccgttatggttagagctactgttattgacatgctgcccctgctccccagtagcagcaatgacgttgggggtagcaactcctggcgcgagacccccgccgctcgcattcggcggtggtgcatccagaggcggttgctgcgctttcgagcggttgttactgttcttaacttcctgcagaagctggttgaggacatgctgctggtactgcgggttgacaccaaagccatggaaactgttttgctgctgctgctgaaacgacgacgacggtgggtggtgctggaattgaacttggttaggtcccaggaaggacctggccgcttccagctgcatgccgttgtgcattgctgtaggacctttgaagacactcgacgcctcctgctgcagcgaaatcgtactggcacctgagcttctgagcatgttctggtaggtgtttagaggtgcggcaatcggtagattgttgttgccaatggctccggcaccaggagtctggttgttcgcagaagtgcttgtctcttgtttgacccccatcaatttggtgttgctctggttgttggcaaggttagcggcagccatggcctgtctcgaatcatgcatattctcaaactttgccgtggttttagaataactgttcaggctctctgcatatgaacagagaa

SEQ ID NO: 154892 - DNA, 1609 bp, Zea Mays
ccccattaacaaagcacccatcccttcaacaaacctcgagtcgagagagagaagagagcagacaacaagagacaccaacgaacagaggcaaaccggctcacgcctgtctcggtgcggtggccggctaatcatggccaccgtggggcagtccggggccctgagaagggtcaccgtgcactacgccagctcgcccacgcgcggcgcggtggtagaggtgagcctcgacgacctcgacgacgagctgctccagtttgtgctcgccgatcttcttcccggccaggagggtttacaccagtcgatcttggaaggagcacacggcagcaaccaggagaactatatgagaggcgcaggatccagtgcgccgtcacaggaataccatgcacagagcagcaccgctgctgcggcagcagctgcttcgtccaggaggaatccaggcacggatgacgcccagatcgcctcggacttcgagtacgccacgaagctgcagcaggagatggagggcctcagcgtcgacgacgacggcgacggtatggtctgcttctgcctctgctctgcctatggacgatggtccagcagattcagatgcgtttcgttttgcatgatgtgactggcactcgtcgggttcttattgtgcccgtcgcatactcgcatcgcgtctcataattgtggttggtccttgtgttgtcgctggcgcgccgcgcgccatgattgttcaggtatcagctgcgtgccgtctccgtctgactctgacgacgggcacgaccatcaaaacgaagaggacgaggaggaggaggatggtaatggtggtggtgatgatgatgatgatccagacaacatgacttatgagcaaagacaggcacttgtagagtctgtggggtctgaggacagaggcttatccgacgagctcatctcctacctgcagccatggaagtacaaggcatcagggtttttctcccggaaaacaaaccatgacgactgccctatctgcctgtcaactttcaggaaccgagagactatgataacgttgccgtgcatgcatcactaccacgcagcttgcgtcaccaaatggctcagggtcaacaagacatgccctgtatgcaaatatgaactgttcggaccttgctagcatccgacaatgggctgataagacaaggtgatggggcgtcacactcacacccagctggttgcatcatctacttttttttgcaccaagaaaaaagaaaatgaaaaacaatccaaaaagagaagggaaaaaagttaggaagtgtagatcttgatcacacaagaaaaagaagaaaaaaaactgaaatttatgtcttttttatctttcctttggcttgtggaaatgtacgtaagtcacggtcttatatttgtttagaagcttgtttttttttcttctcttgccatgactatgtgtatctgttgtcgtgtgatgcattatgcaaaccagaatctcctagtggaatcgctagaaaccgtgcaaaacaccagacggtgccagataacaggagattataactgacacccactatagcatgatggaaaacgatgtacatgacaaagaggctgtttgtgaccttgcgatgatcacatcatttgattcagcaac

SEQ ID NO: 154893 - DNA, 621 bp, Zea Mays
catgtaaagcttgtgaacaaaatggaactatgcatattgttagtctgcacctttacaccacctgggctggaaacgccactgatttcctgtcccttcttcgatgatgcagcaaagacaggcacttgtagagtctgtggggtctgaggacagaggcttatccgacgagctcatctcctacctgcagccatggaagtacaaggcatcagggtttttctcccggaaaacaaaccatgacgagtaagtagtagtaggtgtatgcctgcccggttttttttcccagtttacattattacaagcttgatctttaactttaagtacagcatgtgaaatatacaaatataatcggaccataaatatcgattcatatgcgcaatcacaacatttttttccttctaatgttgacgacagatagtgaaatttccatggcatcactgatgatgtttctttggatgcagctgccctatctgcctgtcaactttcaggaaccgagagactatgataacgttgccgtgcatgcatcactaccacgcagcttgcgtcaccaaatggctcagggtcaacaaggtaaatctgcagagataacaaattgttcctgctaccgttgctacagtggattgggat

SEQ ID NO: 154894 - DNA, 483 bp, Zea Mays
tacctgggtggtgagcacgacgaggagggagacgaagaaggtgatgtgcttgccgtagaagacgcggacggcggtgatgacgtggatggcgtagacggtgccggcgccggagttggcgaagatggtgacgagcacgtgctccttgacgctgaaggggcccgggttgagcgagaactcccagcgggtgccgcggagcacggcgcgcgcggggagcgccgccgccatcaggcggcccagcggcaccaccgcgatctgcgccgagatggccgtgatggtcagcggctccttgcggtaccagaagaactggttcaggaacgacagcagcgcgcacgacgccgtgcccagcacccacatccggaacgtcagcaccggcgtcgacgggtcgtcgcccaccggcaccgtcagcgccacctgctcgatcggcgagttctctggatcgtctccctccgacggcgacggcgacgacgtcgtcgccgcttccac

SEQ ID NO: 154895 - DNA, 1844 bp, Zea Mays
ggttcccactctcgtctccagaagaagcgccgcgatgggttccccgccgctgacgccgtaccgccgatgggccactccactgcactccagcagaagcttgaggccaccacacagttcaggaagctgcgctccatagtgggacaagaggcgagagggcacccgtccagatcattgccccaccagttgaggccgacgttctccaagcccaagcacaggtagatgagcacggccatgaacgccaggccagcgtcgagcgcgccagagagcaggtagttgtggcgctcccaccagtgacgccggtacctgtagaccacgtaccccgacaggaacccggcaatgatccacgtggtgtagttgacggcggtggccggcggcatcatgccggtggagccgatgagcacgggcatgttgacgagcaggatccagctctggctcgggaacacccggtgcgcgagccacacgaggaggggcgcgacggcgccgcccaggaagaaccagttgaccgccgagtaggtgccgaggtcgccgaagatcctgcgcgggccgatgaggccccagatgacggacgcgtcgtagaacacgtggtccatggggcacgtccaggggctgtcggcggggagcagctccgtgctgcagatgttggggacgctgtccatgagccaccacgccgtcccgatgtacacgagcgccgcgatcagcgtccccaccacctgcgccatgaacatggtcctcggcgggatcttcatgtagtggcccagcttgaagtcttgcaggaaggccagcgcctgcgtcatgctgatgtagccgtacaccttgaagcacatgttggcgacgggacggcccgggtacagtgctaatataagagatcgtcggggtgggtacctggttcgtcgtcgctgtgatgatccctatcgggagggtgaagaagaaggcgatggcgcaggcgagcaggacgccccaccagggcagctggagctgctcgatgtagtactcgcaggcgaatatggtgacggcgacgttggcgacgaggatgcagatgaaccaccactcggggacctgcctgtacctcctcatcagcctcgtgtgcacgtccaccttcttctcttggaacgctgacctgctcagctgccagatctcgctcccgtggaagaggaagacgtgcacaaccgtggcggtgagggacgcgaagccgaccccgtaggtgacggcgaagaaggtgctgaggtagagcgggccgttgcgctcgtatgcctcggtgtcgaaccggaagttggagtccacgatgctggagatgttgtacgtctgcccggcggcggtgaagagcccgtcggagaagatggggaagctgcgcgccccgtacaggccgagccagtagtacgcggcgggcgtgatgacgtacatgatgaggacgaagccggcggccacgttggcggtggcgaaccaggggctggcgagcgggcttccgaggtaggaggagatggtggaccagtcgagccccaccgcgcccacgcccagcccgctcagccccgaccccagctgctgcgccaccacggagcgcgggaacgcccagcagagccacgacagggaggtgagcatctggaacaggtagcccgggaagacgtagtaggcgaagctgcagacgaatgccaccaggaagaactggttccgcgtcatgcctcccttcacgcgccgctccttctcgtggagcgccctggtgatccagcacacacgtgcggagcggaggccagtgtgtttgtgtcaacttccttgtcaccactggagtttttagtggcaaaacaaaacaaataatgtacatccgtatgaatctgtaagaatcttgaata

SEQ ID NO: 154896 - DNA, 1872 bp, Zea Mays
ggttcccactctcgtctccagaagaagcgccgcgatgggttccccgccgctgacgccgtaccgccgatgggccactccactgcactccagcagaagcttgaggccaccacacagttcaggaagctgcgctccataggtgagagcgaagtcccccaattgaagagtgggacaagaggcgagagggcacccgtccagatcattgccccaccagttgaggccgacgttctccaagcccaagcacaggtagatgagcacggccatgaacgccaggccagcgtcgagcgcgccagagagcaggtagttgtggcgctcccaccagtgacgccggtacctgtagaccacgtaccccgacaggaacccggcaatgatccacgtggtgtagttgacggcggtggccggcggcatcatgccggtggagccgatgagcacgggcatgttgacgagcaggatccagctctggctcgggaacacccggtgcgcgagccacacgaggaggggcgcgacggcgccgcccaggaagaaccagttgaccgccgagtaggtgccgaggtcgccgaagatcctgcgcgggccgatgaggccccagatgacggacgcgtcgtagaacacgtggtccatggggcacgtccaggggctgtcggcggggagcagctccgtgctgcagatgttggggacgctgtccatgagccaccacgccgtcccgatgtacacgagcgccgcgatcagcgtccccaccacctgcgccatgaacatggtcctcggcgggatcttcatgtagtggcccagcttgaagtcttgcaggaaggccagcgcctgcgtcatgctgatgtagccgtacaccttgaagcacatgttggcgacgggacggcccgggtacagtgctaatataagagatcgtcggggtgggtacctggttcgtcgtcgctgtgatgatccctatcgggagggtgaagaagaaggcgatggcgcaggcgagcaggacgccccaccagggcagctggagctgctcgatgtagtactcgcaggcgaatatggtgacggcgacgttggcgacgaggatgcagatgaaccaccactcggggacctgcctgtacctcctcatcagcctcgtgtgcacgtccaccttcttctcttggaacgctgacctgctcagctgccagatctcgctcccgtggaagaggaagacgtgcacaaccgtggcggtgagggacgcgaagccgaccccgtaggtgacggcgaagaaggtgctgaggtagagcgggccgttgcgctcgtatgcctcggtgtcgaaccggaagttggagtccacgatgctggagatgttgtacgtctgcccggcggcggtgaagagcccgtcggagaagatggggaagctgcgcgccccgtacaggccgagccagtagtacgcggcgggcgtgatgacgtacatgatgaggacgaagccggcggccacgttggcggtggcgaaccaggggctggcgagcgggcttccgaggtaggaggagatggtggaccagtcgagccccaccgcgcccacgcccagcccgctcagccccgaccccagctgctgcgccaccacggagcgcgggaacgcccagcagagccacgacagggaggtgagcatctggaacaggtagcccgggaagacgtagtaggcgaagctgcagacgaatgccaccaggaagaactggttccgcgtcatgcctcccttcacgcgccgctccttctcgtggagcgccctggtgatccagcacacacgtgcggagcggaggccagtgtgtttgtgtcaacttccttgtcaccactggagtttttagtggcaaaacaaaacaaataatgtacatccgtatgaatctgtaagaatcttgaata

SEQ ID NO: 154897 - DNA, 746 bp, Zea Mays
ggtctaaacgtggtttttttaacaaaaatggtctaaaataaaaacatttcggtctcatctccgtccacatccgtcctccagcactccagctgcatcgacgaggaccgccgtagcgatttgcgaagcaagggacgggagaggaacccgaggaaggcgaaaatgatctaccgcaactggtcgctgctctcgtccacagtcgtcatttggggcggcgtcgccaccgccggcctcgccggtatcttcctcttgggcggcaaggagaaattcaatggttatctgtgccgcgaaggcgagaggcttaggcagcaggacagagccgcgatgggccgaagctaagcgttagcttctttggtatctcaagggagcaatagcccttcgaaatttcacaagattcctgcgtccctaccagaacaagtccctatctagggactaggatggaatccatccttctgcaggctttcactttcctgataataacagtaacaataaattgacaatggtttgtgttcttctgcaacctttttggctccctggtttcgcaagggttccgtgctttgtttggcgtcatcacttgcatgtcttgtataaaaaggttgctgttgcatttggcgtacgggactaaaaaaaatatctgggtcctgtctttgacacgtggccgacgattttgccacatattgtacctacccatgatgttcagtgttgcttacgcgcgaaatgtgcagcagcaaggagtcagtgttgctaca

SEQ ID NO: 154898 - DNA, 401 bp, Zea Mays
gatcaagaggaggacgctgcgaacaagagccatcaaagaagttctattcacagctctggaaatgatccaatggatgtggatgtaggaaacacttcaagtgaccaacatgttccggcagagaggattgaagcatttgaagtaattcttggtaagcatgtgttggcaaaccatgtagatcaaatgtcaactgatgaagacgagcaatcaattaacagggagtcaattgcaccttacactaggagccaaatagttttattttggagggactgcaagatacaaacagggtaatgatgcgagatggtattattcgaatcatatagctaccattctaccaagacgttacctacggatccctggccatgctgtgtcatgattgatgtctgatgaatctagctaaagct

SEQ ID NO: 154899 - DNA, 1288 bp, Zea Mays
acttgactcttcaaccaaacactacctaaaaaataaggccccgttcaattgttccggattggagccccggactaatttctaaccggattatttttttaatttatatagattttgatgagctgaaatgaatcatggcttattctggtagaaccgaacgagccctaagctggatctaaaacatgtcctaaatttgctctaaaaagtaagctggatcaaacaggaacctcgtccatcacgcagcttttaaacatactccgtttccgaatccgttccaccattgcctattgccccaccctccccgctagggttttgccagcatggccgccgccgccgcccggaggctcctctcccgccgcgcctcctcgtcctccctctccgcgctcctccgtcgcggcgctgtcccggagcagtcgctggtgttgcgcccggctgttgtcgcggcggcctcccgcctcggcttccagcgcgggatggcgcggcggcctggcggggacggctacgtctcgacgcggtctggcgcgggcggggaccgcgcgcccatggccacggagatggcgccgctgttccccgggtgcgactacgagcattggctcatcgtgatggacaagcccggcggggagggcgccagcaagcagcagatgattgactgctacatccagaccctcgccaaggtccttggaagcgaggaggaggcgaagaagaagatctacaacgtctcgtgcgagcgctacttcgggtttgggtgcgagatcgatgaggagacatctaacaagctcgaggggctccctggtgttctctttgtgctcccggattcgtatgttgatgctgaatacaaggactacggagctgaactcttcgtcaacggtgagattgttcagaggactcccgagaggcagaggagggtggagcccgtgccgcagagggcagcagacaggccgaggtacaatgacagaacccgctacgcacgcaggagggagaaccagcgatgaactgtgcgataaaatcataaaaaagaccacagcaacaagtcccaggtggtttcagctctggaattcaaggatcacctagtatcacctgtattaaattggcaatctcactttacctgcagtctagagtatcgtttctatgtgctcagcttggacgtattgtattctgtaattacagctacttggagatttggaaggacctggcttgcaacgtagtataatctctagtcttttttctttgtggcaatatataattgctatgaataccagattgagatggttgcatactgttcgcagctcaa

SEQ ID NO: 154900 - DNA, 170 bp, Zea Mays
cagcggaagactacgccgacattgattcttcagacgatgaagaaacggagtatgacctgaccactagactgggaacccaagtggaggcggcacccatattagatcgagtgggtaacacattgcgacggtcggtagaggacattgatcgccaacttttgactacgggcgac

SEQ ID NO: 154901 - DNA, 4016 bp, Zea Mays
gaggcaagcacgcgcgtgacgaccacccctgaacccgtcagcgacaccgtcaaagatctgaaagcaagttgcagtttggcactccggcgacgccatgaaggggggtttaaagaaatgcgggcccctctgttctgaggtcaggcgacgggtgcggtcgccatcgccggggggcgatgccgcgtccgcgtgcgcgccggcggcagaatccgcccttgcgcctggacaggagctattgggcctacggctgctgcaaagattggcgagacacaggcagccagggatgtatctggacggactgacgacggagatctcggttgattgtcctggtcaaacactctttgtttctgtaaatggaagttggataggaaacacaaaggtcagtgtcagtgaaaaccatatgcaaattcgtgtgaatccatcaccatgccccttcttcaggccctttttggtggttgatccctgatcggaggggattggattcattggggaaaaaacaaggtttgtttggtgatcagagaattgaagtgggaaaattctcttgctattcaattatctggtaagaagatttcttcacatggatcccctccaattttctggtcattcagttggtttagagaaaaggtagagaaggtacagtttttgccgtgttaactagccagtaaattcgtgtttgactgctgcagctagaggagcatgacgaaacacaacctttttttccagatgttttgttttttgattggatgggaaaaaaattcgtttgtgagatttgcagtttcgcaagaaattcgaaaaggaaccgttgtcaggatcagcagaagcttccaaagcaacactttttttcctgtaaaaactatgtcaacaattaaacatgacgagaggagccagtttaccttaccagtaatacagagacatgatttggcgagaggtccatgttagggaagggaggctccaaaccggcgcttttcagccttgcgtcagtgttttatatatatgattcaaatatgtcgctgtaatgccgagtaaatctatgggcacttattagactggccatccacttcctccaattgctgcatcatgttagatgctgtcagtgtcaaaacacctaggaccaagctgctgcaaattaatccttggactaggaattctgagacgtgttgttgaattcaagcagtgtactgcttttctgttcatacatacacctaatataggccgcttgtgcgtgttcattggcgcgaaagtggccaaattcttcactggccgatttttccactgatgagacaaaatgaggagaacggaatctttgcctccgatgaagggaaagatacctgccatcactttgtttagtcccagctagctagtgccacactcaactagtacatgtcttctgtgcttgaactcttctgccaggcactatttttgtaaggttatttggtgctttaggtgggattctattttatattatctcatatgtttcattgcttctgttgcttgaatttcaagcgattgtccttagtagccctgctactgcaacactactaaagacagcttcttgtgactcccgttatcaatctggtcaatcgttgcaccaggagaggggagggtgagctgagaggggtttcatggagatggagggcagaggcctgtctgatttgttcaggaacaccagcgaggagatcttcctcaaggcagtgatggagaactcgatgggagtagcagcagcgccaagcatggagatgctggggttcaagaacacgtcgcgaagtctcagagaagacagcgaggagctgttcaacaactggcttatgaatggagagatccctggatttgggtcagtgaacaatcaccctcgacaaccatctaggttgtcatcagaagccgcaggccttccgaatcaacagcatgacattgctcaacaaagttttctcactgacaacttggttccacagaatttaacaattccttctgtcgaatatccaaataaccacaaccagcaatcactcaaaaatgcagcagagaagggaatgcaagccagtgacctacttctagcaaaagcctggttccacagcactcaaccaatgactagaagtcgttcgtcagagttaaggtggcagcacaagatactgttacctcagtggtgagcatgctcaaggacacacttgagcgcaagaagcttggtagccatgctaacaaagacacctcagcaggcaattcttttggattctatgacactcagcagtttcaacaaaacattcttggaggaacagatttctttcccatagtgacaactgcccaagttcaggattccctgatgcttcccaaggttgacaggcccatggaaccaaacaatggtaacttcgttgctcctgcaaaccaggtttggttcagtgcagcttctcgagagccttcacacagtggatcgtctactgctatgactactcattcagctggatttgaaatgtgtgatgagctacctcctgcagcgcaagcgatgagtgtttgtgagagcaccagaaaaaatgctgcaaatggaacaaccgactgcaaatcaaaaggcaaagagtatagagagagggtacaaaaggataatttgaaagatgggaggaagaaagcagccctaactcgaataggatccatttcatctgaacaagcagctgataatggagatcctacaaagaagcgcagggttgagcgctcacgcaaaatggcagaagcaaaggaaagaagttccacaccagtaataccatctgatatgcaagccgtacttaaacgctgtgaaaccctagagaaggaggtccgatcactaaaacttaacctgtctttcatgaacaggaaagattcagaacagaccaagcagatcgaggagcttcagaagcaaaacgaggatttggccgaagagaaggagcggctggtggaagagatcgaaaggattgtctctgaccccaacacatgaccgcccaatcatttctgacatttttttatatactaatagaattagacttgaaatggtcctagatacaaatacacatacacaatccagcagggggcagcaagaattaagtgctggcctaaatgtaccattctttccttgttttcacaagtgtaacgtatacgaatatcaacaagcaaagggatcagggattacagtttatttcctgcagcatgttggcctcatgggtatcaatcagaacatgcgtgtgatatgaatgtggagtatgtgtgttatgtgtatctagttgcaaccaataaaaacagaacatgacatgcgggtaatcgttatttcagtagtagatttgaacaaaactcagcagtcttaattagattgaaaatcgcaaagcgaagacacctacggtttttccctaaagaccatcttaaaaaaaggaaaagaagagactggaaaaaaaaacaatctccttggtccttgctgactccatcggtcactccaatgcgatgcgagcccatcaaccttttcgctcaccagcagccgctgctgcggccgcaatggccactcgttccagttctttggcgtcggccagccacggccgccgcctcaacgccgccgtatcttcaacgtcaccggcggcatccgacgaggtgccatcgaaggtgccgtcgaacggcgcctcgcagaaggccatcgtggccacgagcctatccaccggccgcttcttcgtcttcgcggctgcggccagcctcgccggggcctcggggacgttcgttgcgcaggcgcggcctccgacagcggcacctggcgacagagcccaggcgccgtcgaacggcgcctcgcagaaggccatcatggccgcgaccctctccatcggccacttggcggccagcaacgccaacctcgacggcgcagccttgggaacgttggatgaggatgggctgttcccggcggcaagcgacgacgcagccgaggtgcggtcgaacggtgcctcgctgaaggccaccatggcaatgaggctctccatctccatcgccgctacctcgagtctgttcgattggttttggtcggggat

SEQ ID NO: 154902 - DNA, 3170 bp, Zea Mays
gaggcaagcacgcgcgtgacgaccacccctgaacccgtcagcgacaccgtcaaagatctgaaagcaagttgcagtttggcactccggcgacgccatgaaggggggtttaaagaaatgcgggcccctctgttctgaggtcaggcgacgggtgcggtcgccatcgccggggggcgatgccgcgtccgcgtgcgcgccggcggcagaatccgcccttgcgcctggacaggagctattgggcctacggctgctgcaaagattggcgagacacaggcagccagggatgtatctggacggactgacgacggagatctcggttgattgtcctggtcaaacactctttgtttctgtaaatggaagttggataggaaacacaaaggtcagtgtcagtgaaaaccatatgcaaattcgtgtgaatccatcaccatgccccttcttcaggccctttttggtggttgatccctgatcggaggggattggattcattggggaaaaaacaaggtttgtttggtgatcagagaattgaagtgggaaaattctcttgctattcaattatctggagaggggagggtgagctgagaggggtttcatggagatggagggcagaggcctgtctgatttgttcaggaacaccagcgaggagatcttcctcaaggcagtgatggagaactcgatgggagtagcagcagcgccaagcatggagatgctggggttcaagaacacgtcgcgaagtctcagagaagacagcgaggagctgttcaacaactggcttatgaatggagagatccctggatttgggtcagtgaacaatcaccctcgacaaccatctaggttgtcatcagaagccgcaggccttccgaatcaacagcatgacattgctcaacaaagttttctcactgacaacttggttccacagaatttaacaattccttctgtcgaatatccaaataaccacaaccagcaatcactcaaaaatgcagcagagaagggaatgcaagccagtgacctacttctagcaaaagcctggttccacagcactcaaccaatgactagaagtcgttcgtcagagttaaggaggaggtatgctgcgatgcaaactaatatggcaccaataacaataggaagcattgaaacacctaaccaattaaaacaagattttacaaacacaacaaacatcacaccaatgagcaacacacttgttcatacaccaaagtttgtatctccttcaagttcatcaacatcccctctggataatccacatgtggcagcacaagatactgttacctcagtggtgagcatgctcaaggacacacttgagcgcaagaagcttggtagccatgctaacaaagacacctcagcaggcaattcttttggattctatgacactcagcagtttcaacaaaacattcttggaggaacagatttctttcccatagtgacaactgcccaagttcaggattccctgatgcttcccaaggttgacaggcccatggaaccaaacaatggtaacttcgttgctcctgcaaaccaggtttggttcagtgcagcttctcgagagccttcacacagtggatcgtctactgctatgactactcattcagctggatttgaaatgtgtgatgagctacctcctgcagcgcaagcgatgagtgtttgtgagagcaccagaaaaaatgctgcaaatggaacaaccgactgcaaatcaaaaggcaaagagtatagagagagggtacaaaaggataatttgaaagatgggaggaagaaagcagccctaactcgaataggatccatttcatctgaacaagcagctgataatggagatcctacaaagaagcgcagggttgagcgctcacgcaaaatggcagaagcaaaggaaagaagttccacaccagtaataccatctgatatgcaagccgtacttaaacgctgtgaaaccctagagaaggaggtccgatcactaaaacttaacctgtctttcatgaacaggaaagattcagaacagaccaagcagatcgaggagcttcagaagcaaaacgaggatttggccgaagagaaggagcggctggtggaagagatcgaaaggattgtctctgaccccaacacatgaccgcccaatcatttctgacatttttttatatactaatagaattagacttgaaatggtcctagatacaaatacacatacacaatccagcagggggcagcaagaattaagtgctggcctaaatgtaccattctttccttgttttcacaagtgtaacgtatacgaatatcaacaagcaaagggatcagggattacagtttatttcctgcagcatgttggcctcatgggtatcaatcagaacatgcgtgtgatatgaatgtggagtatgtgtgttatgtgtatctagttgcaaccaataaaaacagaacatgacatgcgggtaatcgttatttcagtagtagatttgaacaaaactcagcagtcttaattagattgaaaatcgcaaagcgaagacacctacggtttttccctaaagaccatcttaaaaaaaggaaaagaagagactggaaaaaaaaacaatctccttggtccttgctgactccatcggtcactccaatgcgatgcgagcccatcaaccttttcgctcaccagcagccgctgctgcggccgcaatggccactcgttccagttctttggcgtcggccagccacggccgccgcctcaacgccgccgtatcttcaacgtcaccggcggcatccgacgaggtgccatcgaaggtgccgtcgaacggcgcctcgcagaaggccatcgtggccacgagcctatccaccggccgcttcttcgtcttcgcggctgcggccagcctcgccggggcctcggggacgttcgttgcgcaggcgcggcctccgacagcggcacctggcgacagagcccaggcgccgtcgaacggcgcctcgcagaaggccatcatggccgcgaccctctccatcggccacttggcggccagcaacgccaacctcgacggcgcagccttgggaacgttggatgaggatgggctgttcccggcggcaagcgacgacgcagccgaggtgcggtcgaacggtgcctcgctgaaggccaccatggcaatgaggctctccatctccatcgccgctacctcgagtctgttcgattggttttggtcggggat

SEQ ID NO: 154903 - DNA, 468 bp, Zea Mays
aagcattattttatgcttctactgcagaggtctgacagtagtgtggccgagctggcaaagactgttgtagaaaagaagcaagttccagatattatagtaaacaacgctggtacaataaacaagaataacaagacatggaatgttccagcggaagattttgatatggtggtcgatacaaatatcaagggaacagcaaatgtgcttcgccattttgtaccacttatgatagagaagagacatgggattataatcaatctatcctctggttggggaagatctgctaccgcagaggttgctccatattgtgcttcgaagtgggcgattgagggcttgacacgctcgttggctaaagagctacctcctggattggcagccattgctcttagccctgttgttgtgaatactgacatgcttaattcatgctttggaagctctgtcgcattatatcaaacaactgaaacatggtaa

SEQ ID NO: 154904 - DNA, 231 bp, Zea Mays
aggagctattgtgacaccccagtgtcacctagggtttctcttaaaaagccacaccaagaacccttattttatgtgaaccaaagtaagcatgagcatcaaaatgacttaagtgataaagaattcaccaagtatatgtttaaaagtgtcatgatcaaaacaattgagtccttgaaaagataagaatgtgcaaccctaattaagaactctaagtgaaccccatgaacaaaattc

SEQ ID NO: 154905 - DNA, 424 bp, Zea Mays
cggcggttagctatagatcactcactcacatacattccaatatgaataatacgagtgatagagccttgttggtacttatgttgcttctatctttattattcgttgcgcaatgcggtcgtcctcatgtgtacatggatgatgatgttgttggaaccgcaaggggccgccgagctgcttttagcctcaccgagaatggatattgtgacacggagcaccaaaacagtaaagtggtctactgctgctcgcatccacagccaaagcattgctatggcacttttctgcagtgtcgggccaattgctacgttcataaacgcaagtgatcatgtggccatatctgataatgtggttctaaaaacatcatcattgttagcttaaacaatgtactttacaatggttggtaatataataatatggggaagtcgtt

SEQ ID NO: 154906 - DNA, 400 bp, Zea Mays
gtccaatatgaatatgagtaatatgtgtggagctacaatacttgtattgtttctctttgtattccttgcacaatgtcgtcctcatgagcttgatgtcgttggaacttcttatggtatcaccaaaagaaaagatgtattttgtcaggcgggtcacatagataataaattggtctactactgcatgcatcagaagccaaaaccaatatgctatgacactttgcaggagtgtcttgccaaatgcctatagccaatgatagatgcacaatctgtgcaaaccttaaggccatttgatcgatggtattaaacttaaaccatcattgataacctaaataatgtaggcctcatcgattggcaacaataggagcttgttttgtttgtatgccactatctatcattggac

SEQ ID NO: 154907 - DNA, 3155 bp, Zea Mays
cgcttcccttcccgcgcccatggcaatggctgccgctcctcacagtcatcacactccagtgggggccgcagcggccacgtccgccgccgtatccatgccctgctgctcctccgcttcctgttacgacgacaaggacggcgacccgtcctcctcctggtcgctgtcctcgccgcggcgccggcagccgtaccggcgcctcctccgcgacgaggcgcagcggctccggcgcgcgcggcggagccagggcccgggcgccgacacgccgcggtgggtgcggcgcaccacggatcagatggcccggtacatcgaggacgaccgcgcggggcacgtgtacgggcggcacgtggtcgccgccgtccgcgcggtgcgggccacggcgtcgcgcccgtccgcggacatgcgccaggccatggcgtcgtttgttaccaggctcaccttccgcgagatgtgcgtcgtgctccgcgagcagcgcggctggcgtcaggcgcgcgacttcttcgcttggatgaagctccagctgtgctacgaaccaagcgtcgtcgcctacaccgttctgctgcggttgtatggcagggtcgggaaggtgaagcttgccgaagagacgtttcttgagatgctccaggttggctgcgagcctgacgccgtggcgtgcgggaccctcctgtgcgcgtacgctaggtgggggcggcacgaggacatgatgctgttctactcggcggtgcgcgggcggggcctagtccctccgatctctgtctacaactacatgatctcgtctctgcagaagcagaagctgcacggcaaggtcatccatgtgtggaagcagatgctggaagctggcgcgccgcctaaccaattcacctacacagtcgtcatcggctcccttgtgaaggaagatctcctggaggaggccgtcgatttgttcggtgagatgcggcggcgtaggttcgttccggaagaggcgacttacagcctgttgatcagtgcgagctccagacatggcaaaggagaacaggcgttgcggctcttcgaagagatgaagggccagggaatcgcccccagcaactacacctgtgcgtctctcttggcactgcactgcaagaacgaagactacccaaaggctcttgctctcttctctgacatggaaagcagcaaggtcattcctgacgaggtcatctacgggattcttatcaggatatacgggaaactcgggctttacgaggaggcacgtcagacgtttggcgagatcgagaaggcaggtcttctgaacgacgagcagacttacgtggcaatggctcaggtccacctgaacgctggagactgtgacagagcactggaggtgttagaatctatgaagacgagaggcgtgaagccttcgcgcttctcttacagcgctcttctcagatgtcacgtcgcaaaggaagacgtagtcgccgcagaagacaccttcagagctctctcccagtcccagcacggcctccctgacgcgttctgctgtaacgacatgctcaggctgtacatgaggctgggacgtctagacaaggccagggcactggtttcggtgctgctgagggaagatggtttccagcttgacgagaacctctctacgacagtgatggagttttactgcaaaagcggtatggttgaggacgcagagaagttactcgaagatattcagaggaacaggaaacccgtgaaggttccaacgctgcttttgcttgtagagatgtacgctagaaacagacccagtgtggttctggaagaacgcagctcgtcgagggcactcggcagttcagcagctagcgtggccttgaactccctgttggacatgcctgggggcttgtccagtgtgtccctactgatcagcagattggctagggaagggagcacagatgaggcgagattcatttacgatcagctgactgaactgggaaccaagcctgacgattcggcggtcgctactctgatcgtccagtatggccaggcaaagcagttagagcgagcacaagaactattcgattcagcgtcagcgtcgttcccagatggggcgcttgtctgcaacgccatggtcgacgcgttctgtaaatgtggcagagctgaggacgcgtaccatcttttcatggagatggctgatcaaggcagttacagaaatgctgtgacagctagcattcttgtcactcacctgactaagcatgggaaatttcaagaggttgagaacatcatgcatggctgtttccgagatgaagtccagctcgacactgccttgtacaacacatttatcaagtcgatgcttgaatcagtttccaagcaggtaaactgcattcggccgtcagcatatacgatcgcatggtatcctctggcgtttctcagtccatgcagacgttcaatacaatgataagtgtttatggcaaaggaggaaagctggacaaggccgttgagatgtttgctgctgcgcaggagctgggcctgccgatcgacgagaagatgtacacgaacatgcttagcttatatgggaaagccggcaggcatcaagaggcgtctttgatgttcaaaagaatgaaggaagatggcatcagacctggaaagatcagcttcaactccatgatcaatgcctacgccacttcaggactgttcagcgaggcgaaaagcgtgttccaggagatgcaggactgcgggcacgcccccgactccttctcctacctcgcgctgatcagagcgtacacggaggctaagctgtacaccgaagcagaagaagccatccggacgatgacgctgagcagcagcaacacgaccccttcctgcccgcacttcagccacctgattctcgcgttcttgaaggaaggccgggtcggtgaagcccggaggatctacggccagatgatggaggtaggcgtggctcctgacctggcctgctgtagggccatgatgagggtgtacgtggaccgcggtctcgtcgacgatggcatctcgctctatgagacgacgtgtgggtcgttgaaacctgatagcttcgtcttgagcgctgcgtttcatctgtatgagcgtgcgggcagggagtgtgaagcccagggtgtcctggagtccatcagtgcgagtggtacctccttcctgaggaacatgaagattggatttggatcgtctttaagaagttagaactt

SEQ ID NO: 154908 - DNA, 3144 bp, Zea Mays
cgcttcccttcccgcgcccatggcaatggctgccgctcctcacagtcatcacactccagtgggggccgcagcggccacgtccgccgccgtatccatgccctgctgctcctccgcttcctgttacgacgacaaggacggcgacccgtcctcctcctggtcgctgtcctcgccgcggcgccggcagccgtaccggcgcctcctccgcgacgaggcgcagcggctccggcgcgcgcggcggagccagggcccgggcgccgacacgccgcggtgggtgcggcgcaccacggatcagatggcccggtacatcgaggacgaccgcgcggggcacgtgtacgggcggcacgtggtcgccgccgtccgcgcggtgcgggccacggcgtcgcgcccgtccgcggacatgcgccaggccatggcgtcgtttgttaccaggctcaccttccgcgagatgtgcgtcgtgctccgcgagcagcgcggctggcgtcaggcgcgcgacttcttcgcttggatgaagctccagctgtgctacgaaccaagcgtcgtcgcctacaccgttctgctgcggttgtatggcagggtcgggaaggtgaagcttgccgaagagacgtttcttgagatgctccaggttggctgcgagcctgacgccgtggcgtgcgggaccctcctgtgcgcgtacgctaggtgggggcggcacgaggacatgatgctgttctactcggcggtgcgcgggcggggcctagtccctccgatctctgtctacaactacatgatctcgtctctgcagaagcagaagctgcacggcaaggtcatccatgtgtggaagcagatgctggaagctggcgcgccgcctaaccaattcacctacacagtcgtcatcggctcccttgtgaaggaagatctcctggaggaggccgtcgatttgttcggtgagatgcggcggcgtaggttcgttccggaagaggcgacttacagcctgttgatcagtgcgagctccagacatggcaaaggagaacaggcgttgcggctcttcgaagagatgaagggccagggaatcgcccccagcaactacacctgtgcgtctctcttggcactgcactgcaagaacgaagactacccaaaggctcttgctctcttctctgacatggaaagcagcaaggtcattcctgacgaggtcatctacgggattcttatcaggatatacgggaaactcgggctttacgaggaggcacgtcagacgtttggcgagatcgagaaggcaggtcttctgaacgacgagcagacttacgtggcaatggctcaggtccacctgaacgctggagactgtgacagagcactggaggtgttagaatctatgaagacgagaggcgtgaagccttcgcgcttctcttacagcgctcttctcagatgtcacgtcgcaaaggaagacgtagtcgccgcagaagacaccttcagagctctctcccagtcccagcacggcctccctgacgcgttctgctgtaacgacatgctcaggctgtacatgaggctgggacgtctagacaaggccagggcactggtttcggtgctgctgagggaagatggtttccagcttgacgagaacctctctacgacagtgatggagttttactgcaaaagcggtatggttgaggacgcagagaagttactcgaagatattcagaggaacaggaaacccgtgaaggttccaacgctgcttttgcttgtagagatgtacgctagaaacagacccagtgtggttctggaagaacgcagctcgtcgagggcactcggcagttcagcagctagcgtggccttgaactccctgttggacatgcctgggggcttgtccagtgtgtccctactgatcagcagattggctagggaagggagcacagatgaggcgagattcatttacgatcagctgactgaactgggaaccaagcctgacgattcggcggtcgctactctgatcgtccagtatggccaggcaaagcagttagagcgagcacaagaactattcgattcagcgtcagcgtcgttcccagatggggcgcttgtctgcaacgccatggtcgacgcgttctgtaaatgtggcagagctgaggacgcgtaccatcttttcatggagatggctgatcaaggcagttacagaaatgctgtgacagctagcattcttgtcactcacctgactaagcatgggaaatttcaagaggttgagaacatcatgcatggctgtttccgagatgaagtccagctcgacactgccttgtacaacacatttatcaagtcgatgcttgaatcaggtaaactgcattcggccgtcagcatatacgatcgcatggtatcctctggcgtttctcagtccatgcagacgttcaatacaatgataagtgtttatggcaaaggaggaaagctggacaaggccgttgagatgtttgctgctgcgcaggagctgggcctgccgatcgacgagaagatgtacacgaacatgcttagcttatatgggaaagccggcaggcatcaagaggcgtctttgatgttcaaaagaatgaaggaagatggcatcagacctggaaagatcagcttcaactccatgatcaatgcctacgccacttcaggactgttcagcgaggcgaaaagcgtgttccaggagatgcaggactgcgggcacgcccccgactccttctcctacctcgcgctgatcagagcgtacacggaggctaagctgtacaccgaagcagaagaagccatccggacgatgacgctgagcagcagcaacacgaccccttcctgcccgcacttcagccacctgattctcgcgttcttgaaggaaggccgggtcggtgaagcccggaggatctacggccagatgatggaggtaggcgtggctcctgacctggcctgctgtagggccatgatgagggtgtacgtggaccgcggtctcgtcgacgatggcatctcgctctatgagacgacgtgtgggtcgttgaaacctgatagcttcgtcttgagcgctgcgtttcatctgtatgagcgtgcgggcagggagtgtgaagcccagggtgtcctggagtccatcagtgcgagtggtacctccttcctgaggaacatgaagattggatttggatcgtctttaagaagttagaactt

SEQ ID NO: 154909 - DNA, 293 bp, Zea Mays
aaataacaatttttctttatctgatatctaaacttcttttctttatttttggaacaattggatctataccattaaaagatccaaactttagatatataccatagaccccacatgtcattgactcatgtggacccacatgtaagtgagatagtaatggtatggatccaaagtggtgatcttttaatggtatggatccaaatttccctttattttttgtgtaggtggaaaaggtccttgtctaacagagcctcctcttttgtaagattttctttaccttctctaatattataaag

SEQ ID NO: 154910 - DNA, 108 bp, Zea Mays
ctaaatcggatgtgcttcagacctttgccgcaccacggcagcaagaaggtgatgagcatccatggatccacctagacagtccactccttcgcctcatcctccgcgttg

SEQ ID NO: 154911 - DNA, 760 bp, Zea Mays
ggaagagaaaaaccccgtccccctcggccgccgaagcgaaacagcctctggccgctgcccgaccccgacgccagctgcccagttcttcgccggcgacgagcactccaccagacgagaggggattccaagatgccgagggccaccagcgacgcgaagctcctgatccagtccctcggcaaggcgtacgctgccacaccaacaaatctcaagattattgacctctacgtgggttttgcggttgccactgcccttattcaggttgcttacatgggattggttgggtcgtttcccttcaactccttcctctcaggagttctttcatgcataggaactgcagttcttgctgtttgcctccgcattcaagtgaacaaagacaacaaagaattcaaggaccttcccccagaaagggcctttgctgattttgtcctatgcaatctggtgctccacctggtgatcatgaatttcctcggataagcaactgctgcaccatgttggttaaaggttttgtagccccaggttgtggtcgctgattgttgcctttaaatgtttggaactgttgtgatcgtgatgtcgaatatccatatgatctgttgaaggattacttgtgtaagctgagtattcccggagggaactattagtcgaatggacagtttgcccagcgctgagaatgtgacctagcatgttctttatttgaagaagatataattcatttttcactaaggtatgctgcaaataagcaattcctgggaattgtcgagac

SEQ ID NO: 154912 - DNA, 1139 bp, Zea Mays
caaggcctcacccttcccctcctctcctctccacctcatccgtatctccctccctcttctcggcggccgtggcggcgccggaggactatgcgcggcctccaccgctgcccgcaccagctcctcctggtctctccaccgccgcggtccgcccccgcgtgccgccagtcggccaccgcctcatcgcggggcctcaggagctccctcgccgtcttctccgcacccggggctcgggtagcggcggcggcgcgcgagcagaagtggggccacgtggagggtgatgaagacggtggagaggagggcctaggggaggcgctccacaggacgcgggagctcgtggagtgcgccatgttcgcggccgtcgctgggctggcctacttcctcagcaattccctcgccattgagaattatttcagttgctttttcccattgccgatagtcatttcctcattaagatggggactagaagccagcaggaaaaccgtggtggctactgttttactgctattcacattatctggccctgtaaaagcgtcaacttatctgctaatgcatggagtagttggtctcatcatgggtactgtttggagattggagaccaactggattgtctccatcatcctctgctccattgtccgtgccctgggagcttgtggttacgtgctagtgtcatcgtttctgataagagaaaatattctcgcgctgataacggttaacattcatgcttcgttgacatacatcctgacggcagctggcgtgaacacaattccttccatgggcacaatatatctactctttgggacactgcttctacttaattgtgggttcttcgtcttcctcctgcatgtgatgtatacggtattcctggcgaagcttgggataaagccgtcgctgaggtcaccaagatggctggacagagtgatgtgaaaattttaggagtagggcatcgtacgtagtgactgttcttcctgttctgctgttttagccttgctgtttgtcgcccctacctatactgggacctgtaaccatggggtgcatctgtgcatgcaaacgcgacaagcaaaattcgggattatcaatcaatcatctgtgctactcgtgctctgttgatgatcttcttgttaaggcaaatgcgagaggaa

SEQ ID NO: 154913 - DNA, 1067 bp, Zea Mays
caaggcctcacccttcccctcctctcctctccacctcatccgtatctccctccctcttctcggcggccgtggcggcgccggaggactatgcgcggcctccaccgctgcccgcaccagctcctcctggtctctccaccgccgcggtccgcccccgcgtgccgccagtcggccaccgcctcatcgcggggcctcaggagctccctcgccgtcttctccgcacccggggctcgggtagcggcggcggcgcgcgagcagaagtggggccacgtggagggtgatgaagacggtggagaggagggcctaggggaggcgctccacaggacgcgggagctcgtggagtgcgccatgttcgcggccgtcgctgggctggcctacttcctcagcaattccctcgccattgagaattatttcagttgctttttcccattgccgatagtcatttcctcattaagatggggactagaagccagcaggaaaaccgtggtggctactgttttactgctattcacattatctggccctgtaaaagcgtcaacttatctgctaatgcatggagtagttggtctcatcatgggtactgtttggagattggagaccaactggattgtctccatcatcctctgctccattataacggttaacattcatgcttcgttgacatacatcctgacggcagctggcgtgaacacaattccttccatgggcacaatatatctactctttgggacactgcttctacttaattgtgggttcttcgtcttcctcctgcatgtgatgtatacggtattcctggcgaagcttgggataaagccgtcgctgaggtcaccaagatggctggacagagtgatgtgaaaattttaggagtagggcatcgtacgtagtgactgttcttcctgttctgctgttttagccttgctgtttgtcgcccctacctatactgggacctgtaaccatggggtgcatctgtgcatgcaaacgcgacaagcaaaattcgggattatcaatcaatcatctgtgctactcgtgctctgttgatgatcttcttgttaaggcaaatgcgagaggaa

SEQ ID NO: 154914 - DNA, 1308 bp, Zea Mays
caaggcctcacccttcccctcctctcctctccacctcatccgtatctccctccctcttctcggcggccgtggcggcgccggaggactatgcgcggcctccaccgctgcccgcaccagctcctcctggtctctccaccgccgcggtccgcccccgcgtgccgccagtcggccaccgcctcatcgcggggcctcaggagctccctcgccgtcttctccgcacccggggctcgggtagcggcggcggcgcgcgagcagaagtggggccacgtggagggtgatgaagacggtggagaggagggcctaggggaggcgctccacaggacgcgggagctcgtggagtgcgccatgttcgcggccgtcgctgggctggcctacttcctcagcaattccctcgccattgagaattatttcagttgctttttcccattgccgatagtcatttcctcattaagatggggactagaagccagcaggaaaaccgtggtaagtccaattaaatcgcttcgcttttttgttttgttttgccaaacttatacagctgttccttgaaatgcctcaccaggtggctactgttttactgctattcacattatctggccctgtaaaagcgtcaacttatctgctaatgcatggagtagttggtctcatcatgggtactgtttggagattggagaccaactggattgtctccatcatcctctgctccattgtccgtgccctgggagcttgtggttacgtgctagtgtcatcgtttctgataagagaaaatattctcgcgctggtacctgcactcccttattcaggtttaagagtagactgagtaagactaagagtgagctggttctgttcagtaacctgtattccatttcagataacggttaacattcatgcttcgttgacatacatcctgacggcagctggcgtgaacacaattccttccatgggcacaatatatctactctttgggacactgcttctacttaattgtgggttcttcgtcttcctcctgcatgtgatgtatacggtattcctggcgaagcttgggataaagccgtcgctgaggtcaccaagatggctggacagagtgatgtgaaaattttaggagtagggcatcgtacgtagtgactgttcttcctgttctgctgttttagccttgctgtttgtcgcccctacctatactgggacctgtaaccatggggtgcatctgtgcatgcaaacgcgacaagcaaaattcgggattatcaatcaatcatctgtgctactcgtgctctgttgatgatcttcttgttaaggcaaatgcgagaggaa

SEQ ID NO: 154915 - DNA, 1435 bp, Zea Mays
caaggcctcacccttcccctcctctcctctccacctcatccgtatctccctccctcttctcggcggccgtggcggcgccggaggactatgcgcggcctccaccgctgcccgcaccagctcctcctggtctctccaccgccgcggtccgcccccgcgtgccgccagtcggccaccgcctcatcgcggggcctcaggagctccctcgccgtcttctccgcacccggggctcgggtagcggcggcggcgcgcgagcagaagtggggccacgtggagggtgatgaagacggtggagaggagggcctaggggaggcgctccacaggacgcgggagctcgtggagtgcgccatgttcgcggccgtcgctgggctggcctacttcctcagcaattccctcgccattgagaattatttcagttgctttttcccattgccgatagtcatttcctcattaagatggggactagaagccagcaggaaaaccgtggtggctactgttttactgctattcacattatctggccctgtaaaagcgtcaacttatctgctaatgcatggagtagttggtctcatcatgggtactgtttggagattggagaccaactggattgtctccatcatcctctgctccattgtccgtgccctgggagcttgtggttacgtgctagtgtcatcgtttctgataagagaaaatattctcgcgctgataacggttaacattcatgcttcgttgacatacatcctgacggcagctggcgtgaacacaattccttccatgggcacaatatatctactctttgggacactggtaattcctgatctcataagggcatgtacaacctagacactgttacacggtactccaagtataagacacaactaaaacacaacatattacagtggacatgtctaaaatatgtgtcttaccatattcattgtaccaatcagaacatttaataaattaaagtgaccaatcagctagtctcatgtctcgaacatagagctaagacactgtgtcttcgtcaagatacatgtcttgagtttttttacattcatcccctagacacactcgaaaacacaactcaagacatccattgtacatgacctaagcagggtttaccggatgtgctgttccgagcttttaactcttcctttcctagtgcagcttctacttaattgtgggttcttcgtcttcctcctgcatgtgatgtatacggtattcctggcgaagcttgggataaagccgtcgctgaggtcaccaagatggctggacagagtgatgtgaaaattttaggagtagggcatcgtacgtagtgactgttcttcctgttctgctgttttagccttgctgtttgtcgcccctacctatactgggacctgtaaccatggggtgcatctgtgcatgcaaacgcgacaagcaaaattcgggattatcaatc

SEQ ID NO: 154916 - DNA, 4558 bp, Zea Mays
cgcgagctcgcttgctgcttcctgtggacttgttcgtcttccaactcctgcttcctgtctgtccccaactcggagcggcgacgccgagctcaccaaccctcccgtccggccaccccgtccccacccacggctactactactagtacccggcgctcccccttcctcgttccattcatttgccaccgccgtcccctcctctcctctgccccttcgcttctctctgtccttcctaccgcttctattttagttcattcaactcaggttccattcgtcgttcaaagaagagcaaggagcttcacagatccggccgccgccgctacctcactctacttcctgctgtggcccctggcttcctcccctccctccctgcttctcccccatctgaatctgcgtgcgcgccgctgcttcttgctttgaatcctgtcccggggttccgccctgatttctcggtctttgtcggatttgctttccgttcgcaattcgcaaggaggaccaaaaaaaaaaaaagttgccatcttttttctgtccttccgcagcgaaatctgccggttttgattggtatacacacacttgcttcagtcgatagatgcccctccattgcatccgtctctgacgcttccgcttccgcttccgcttccgtcttgcagatcagccaccgccactgaccgatccgtacctgcatcctccagtacccgggccgcccgccatggcctccaccggcggcggcggcggcctccgccacagcaacagcagccgcctctcgcgcatgtccttctccggcggcggaagcgacgacgcccgcgcgcaggcggccgccgccccgggcggcgaccgccccatggtcaccttcgcccgccgcacccgctcgggacgctacgtcagctactcccgcgacgacctcgacagcgagctcggcgccgccggcgtcgacatgtcccccgaccgcgacgagcagttcgccagctaccacgtccacatcccggccacgcccgacaaccagcccatggacccggccatctccgcccgcgtggaggagcagtacgtctccaactccctcttcacgggcggcttcaacagtgtcacgcgcgcgcacctcatggacaaggtcatcgactcggaggccagccacccgcagatggcgggggccaggggctcctcctgcgccgtcaacggctgcgacgccaacgtcatgagcgacgagcgcggcgacgacatcctcccctgtgagtgcgacttcaagatctgcgccgagtgcttcgccgacgccgtcaagaacgccggtgccatctgccccgggtgcaaggagccatacaagaacacggagcttgacgacgtcgttggcgctgccgctgatgccacagccgggggcaggcctacgctctcgctgcccccgccgcctggcgccgctgcttccaggatggagaggaggctctccatcatgcgctcccagaaggccatgaccaggagccagaccggagactgggaccacaaccgctggctcttcgagaccaaggggacgtatgggtatggcaatgctatctggcccaaggagaatgaggtggacgctgcaggcggcttgggtggaggtggagctgatggacagccggccgagttcaccaccaagccatggaggccgctcactcggaagctttccatccctgctggagtactcagcccatacaggcttctcattcttatccgcatggccgtccttggtctgttccttacttggagaattaagcacaagaatgaggatgccatttggctctggggcatgtctgttgtctgcgaactctggtttggtttttcatggctgctcgaccagctgccaaagctgtgccctgtgaaccgggccaccgaccttgccgtcctgaaagacaagtttgagaccccaacgccgtccaaccctactggacggtcggatttaccagggcttgatatatttgtgtctactgctgatccggagaaagaacctccactggtcacagcaaacactatcctgtccatccttgctgctgactaccctgtggagaagctttcttgctatgtttctgatgatggaggggctctcctgacttttgaagccatggctgaagctgctagctttgctaatatgtgggttcctttctgtcgcaagcacaacattgagcctcgcaatcctgacagctacttcaatcttaagaaggacccatacaagaacaaggttcgccaggattttgtcaaggacaggaggagggtcaagagggagtatgacgagttcaaggtcaggatcaatggtctgcctgactcgatacgccgacgctctgatgcgtaccatgccagagaggaaatcaaggctatgaagaggcagcgtgaggccgctcttgatgatgcagtggagcctgttaagatccctaaagctacatggatggctgatggcactcactggcctggtacttggattcaaccttctgctgagcatacccgtggtgatcatgctggaattattcaggtgatgctgaaacctcccagtgacgatcccttgtacggcagcaccggtgatgaaggcagacctcttgatttcaccgaggtcgacatccgtttgccaatgctggtgtatgtgtcccgagagaagcggcctggttatgatcacaacaagaaggctggagcgatgaatgctctggtccgttcatctgctgtcatgtcaaatggccccttcatcctcaacctcgactgtgatcactatgtctacaactcgcaagctttccgcgaagggatgtgcttcatgatggaccgtggtggcgaccgcattggttatgtccagttcccgcagcggtttgagggcatcgatccatcagatcgctatgccaaccacaacaccgtcttcttcgacgtcaacatgcgcgcgctggatggtctcatgggaccagtctatgttggcactggctgccttttccgccgtgttgccctatatggatttgaccctccgcgctccaaggagcacggtggctgctgcagctgttgcttcccccagagacgcaagatcaaagcttcagccgctgcaccggaggagacccgggctctaaggatggcagacttcgacgaggatgaaatgaacatgtcgtcgttccccaagaagtttggtaactcgagcttcctcatcgactccattccgattgctgagttccaagggcgcccgcttgctgatcaccctggtgtcaagaacggccgccctcccggtgctctcactgtcccccgtgaccttctggatgcatccacagtcgctgaggccgtcagtgtcatctcatgctggtacgaagacaagaccgagtggggccaccgtgttggttggatctatggctcggtgacggaggatgtggtcactgggtaccggatgcacaaccggggttggaagtcggtgtactgtgtcaccaagcgtgacgccttccgcggcaccgcgcccatcaacctgaccgaccgtctccaccaggtgctccggtgggctactggatcagtggagatcttcttctcccgcaacaacgcgctgctggcgagccgcagaatgaagttcttgcagaggatcgcgtacctgaacgtgggtatctacccgttcacgtccatcttcctgatcgtctactgcttcctgccggcgctgtcgctgttctcggggcagttcatcgtgaagacgctgaacgtgacgttcctgacgtacctgctggtgatcacgctgacgctgtgcctgctggcggtgctggagatcaagtggtcggggatcagcctggaggagtggtggcggaacgagcagttctggctgatcggcggcacgagcgcgcacctggcggccgtgctgcagggcctgctgaaggtggtggcgggcatcgagatctccttcactctgacgtccaagtcgggcggcgacgacgtggacgacgagttcgcggacctgtacatcgtcaagtggacgtcgctgatgatcccgcccatcgtgatcatgatggtgaacctgatcggcatcgcggtcgggttcagccgcaccatctacagcgagatcccgcagtggagcaagctgctgggcggcgtcttcttcagcttctgggtgctggcgcacctgtacccgttcgccaagggcctgatggggcggaggggccgcacgccgaccatcgtcttcgtctgggcgggcctcctctccatcaccatctcgctgctgtgggtggccatcaacccgccgtcccagaaccagcagattggtgggtcgttcacattcccctgaaagctctctgggccaatggcggattcatgcatgcttcgtcgcagtgggatccttgcgttgctctgcatcagttcctggttgcagcggttcactatctgaggacgaagctgctggggggaatgtgggatcctgactgtcgaactggctacttttttgttgtcgaagctgataatactcttatgatgagctatagtagtagttcttttgttcttttgtttttgctatatataaaatacatgttctggtcccataatttggttatgttggacaattaaacgtggagccccaaatttccagtcttttgttgga

SEQ ID NO: 154917 - DNA, 1434 bp, Zea Mays
cacacacaccccaccacacagatgagatgacagacccatccaacctgcccctgcccctgcccctgcctttgcctttgaaaacctccactgcctgattggtcctttgaaaacctcccacgcacattcttggcagctactctactcaatggcgctgtcctcctccggccacccggcgacgacccgcctgctcttctcgcttctgctcgtgggctcggcggcgggcttgccggagcgggcggccatcgacagggtcaaccggcgaggcccttccctcggcctcgtcatgtcctacgtcgacgaggccaccgcgctgcaggcctccggctacttccagccttggcgtgccctccctttcgttgacctctacggacggcggtatcacatcggcagcattcggggcgtgaacgtgatatacgcactgacagggcaacgcaggctgaacgccgccgtcacagtacagacgctcatcgacgtcttcagcgtgtccggcattgttcactacggcacggcagggagctgcaacgactccatctccttcggcgacgtcagtgtccccaggctcgtcgcctacacgggtgcctggacatggaagaagttcagatcaccgagagagtcatcggcggaattgagcttcggcgaatacaacgtcccagacggaggaggaggggagaatctgctcggatccctcaagtacagaaacgaggagctttactcggccggcaagcccatggaagaggtcttctggctgcctgtgcattcggcatggttcagaactgcagaacagctcacggtggaacttgaaagatgcaacgacactttctgcttacccacagctccacggattgtctacgggctgaaggggtcgtcggctgacatgttcctcgacaacgcggaatacaggaagttccttttccaagagtttggggtgtctacaatggacgaggagagcgcagcggtggtgatgacagcaacgtcgcctggcatacctgtgatcgtgttccgaggagtgtctgacttggctggaggggagccgacatggtcgtccacaagcctgatgaacctggcgtccattaatgcattaaaagtggcggtagagttcatcgctgcagttggcaagcatagttcaaccgcatcagtaaaaagatgatcgccatcctcgtccgttgctgctccaaaataggcctgcggcagtaactggaagttacttatgttcagaatgatgtcaaaccttgtggcttcaagtcataatataatacgtcctctctaataaagcggtaggaagattgacgtacatatccacattactttgctctcagttgcgttgcgtcgatcccctgctttggggatgtgtacccattctcgaggctataaaatggacctctaaatgtatggaacaacacatcaaacattctaagagtacattataacttcgag

SEQ ID NO: 154918 - DNA, 1505 bp, Zea Mays
tgcctgattggtcctttgaaaacctcccacgcacattcttggcagctactctactcaatggcgctgtcctcctccggccacccggcgacgacccgcctgctcttctcgcttctgctcgtgggctcggcggcgggcttgccggagcgggcggccatcgacagggtcaaccggcgaggcccttccctcggcctcgtcatgtcctacgtcgacgaggccaccgcgctgcaggcctccggctacttccagccttggcgtgccctccctttcgttgacctctacggacggcggtatcacatcggcagcattcggggcgtgaacgtgatatacgcactgacagggcaacgcaggctgaacgccgccgtcacagtacagacgctcatcgacgtcttcagcgtgtccggcattgttcactacggcacggcagggagctgcaacgactccatctccttcggcgacgtcagtgtccccaggctcgtcgcctacacgggtgcctggacatggaaggtagtataaataagaaaacctccaagtaataatcagttcaggccagcgcatgatctctggagctctggctaccgcagaagttcagatcaccgagagagtcatcggcggaattgagcttcggcgaatacaacgtcccagacggaggaggaggggagaatctgctcggatccctcaagtacagaaacgaggagctttactcggccggcaagcccatggaagaggtcttctggctgcctgtgcattcggcatggttcagaactgcagaacagctcacggtggtgactagatagactaccggcatcatcagtaacataatactaagtaactgcgtaacagagatactacatgtatgtctgtgcagtaacagtgacattattttctgcaggtggaacttgaaagatgcaacgacactttctgcttacccacagctccacggattgtctacgggctgaaggggtcgtcggctgacatgttcctcgacaacgcggaatacaggaagttccttttccaagagtttggggtgtctacaatggacgaggagagcgcagcggtggtgatggtcagctcagctcccttactcatacagtcatacttgcactacgtacatcccgaccatgtatgttacttactacttactagtaagataaatttagcgctcaactctgatgatcagacagcaacgtcgcctggcatacctgtgatcgtgttccgaggagtgtctgacttggctggaggggagccgacatggtcgtccacaagcctgatgaacctggcgtccattaatgcattaaaagtggcggtagagttcatcgctgcagttggcaagcatagttcaaccgcatcagtaaaaagatgatcgccatcctcgtccgttgctgctccaaaataggcctgcggcagtaactggaagttacttatgttcagaatgatgtcaaaccttgtggcttcaagtcataatataatacgtcctctctaataaagcggtaggaagattgacgtac

SEQ ID NO: 154919 - DNA, 1516 bp, Zea Mays
cacacacaccccaccacacagatgagatgacagacccatccaacctgcccctgcccctgcccctgcctttgcctttgaaaacctccactgcctgattggtcctttgaaaacctcccacgcacattcttggcagctactctactcaatggcgctgtcctcctccggccacccggcgacgacccgcctgctcttctcgcttctgctcgtgggctcggcggcgggcttgccggagcgggcggccatcgacagggtcaaccggcgaggcccttccctcggcctcgtcatgtcctacgtcgacgaggccaccgcgctgcaggcctccggctacttccagccttggcgtgccctccctttcgttgacctctacggacggcggtatcacatcggcagcattcggggcgtgaacgtgatatacgcactgacagggcaacgcaggctgaacgccgccgtcacagtacagacgctcatcgacgtcttcagcgtgtccggcattgttcactacggcacggcagggagctgcaacgactccatctccttcggcgacgtcagtgtccccaggctcgtcgcctacacgggtgcctggacatggaagaagttcagatcaccgagagagtcatcggcggaattgagcttcggcgaatacaacgtcccagacggaggaggaggggagaatctgctcggatccctcaagtacagaaacgaggagctttactcggccggcaagcccatggaagaggtcttctggctgcctgtgcattcggcatggttcagaactgcagaacagctcacggtggtgactagatagactaccggcatcatcagtaacataatactaagtaactgcgtaacagagatactacatgtatgtctgtgcagtaacagtgacattattttctgcaggtggaacttgaaagatgcaacgacactttctgcttacccacagctccacggattgtctacgggctgaaggggtcgtcggctgacatgttcctcgacaacgcggaatacaggaagttccttttccaagagtttggggtgtctacaatggacgaggagagcgcagcggtggtgatggtcagctcagctcccttactcatacagtcatacttgcactacgtacatcccgaccatgtatgttacttactacttactagtaagataaatttagcgctcaactctgatgatcagacagcaacgtcgcctggcatacctgtgatcgtgttccgaggagtgtctgacttggctggaggggagccgacatggtcgtccacaagcctgatgaacctggcgtccattaatgcattaaaagtggcggtagagttcatcgctgcagttggcaagcatagttcaaccgcatcagtaaaaagatgatcgccatcctcgtccgttgctgctccaaaataggcctgcggcagtaactggaagttacttatgttcagaatgatgtcaaaccttgtggcttcaagtcataatataatacgtcctctctaataaagcggtaggaagattgacgtac

SEQ ID NO: 154920 - DNA, 3806 bp, Zea Mays
atggcgaagcgcccgcgccacgccggaaacggccccggacgatctcagctggtgcctttcgagtggaagctccaccgcctcatactcaacggcggcttggccggtcccggcgcctccgccgaagacgtcgccgacgccctccgcgtccaccacccggagttccgccgccagaagcaaggccccttcgtcgcctccgtccgccgcgctctcacctccatccccatcccctccccatcctcctctgactcctccgacgacggctcctccgcctcccgccgccgcggccaccacgacgcccacgccaccacctcctcctccacctccgtctctgacgccgctgcccgaccgtcgccaccagcccccgcctacgacgtcaccaagtccatgctccgctcccagtacgccgcgcagacgcccaagcggagccagcagctggagatcgaggtcgcggcggagaaaccgcgccgcctcatcacggccgacggcggcggcggaggcgatgccaagccggaggccgccccggcttctgaagggttcggcagaggggacaaggggcccaggttcgccgacctcggcgggatggaggcggtgatcgaggaactcatgatggaggtggtcgtgcccatgtgccatccggagataccgcatcgccttggcgttaggcctgtcgcggggctgctgctgcacgggccgcccggctgcggaaagaccacccttgcccatgccattgctaatgagactggcgtgcccgttctataagatctccgcaccggaagtcgtatctggggtgtctggagcatctgaggaaaacatcaggggcttgtttcagaaggcctatcggactgccccctcgattgtatttattgatgagatagatgcgattgcatccaagagggagaatctacaacgagagatggaacggcggatagttactcaattaatgacatgcatggatcaattccaccagaatattggatcgggaagtagcaatttggaagctgaatcatctgaaaagaaacctggttatgttattgtcattggagccacaaataggcctgatgctgtggaccaagctctgcgaaggccaggcaggtttgaccgagagatatcacttggtgttccagatgagaatgcacggaaacaaatactgaagatgcttactcagcatctccgacttgaaggcgaatttgacttgttcaagatagctagggcaacaccagggtttgttggtgctgacttgaaagcattagtggataaagcaggaaatctagcaatgaagagaataattgatgaaagaagggctcggtgttgcattgagcaggacggtagtagcaagcatgactggtggagacaaccttgggatgaaagtgaggtggacgaactacatattaccatgaatgactttgagcaaaaatggttcagccatctttgagaagagaagggttttcttctgtccctggtgtcacatgggatgatgttggaggtcttgattcattaagaaaagagttcgaccgctgcattatccgttgtatcaagcaccccgaagactatgaggtatttggagtgaatatgcaagctggcttcctgctgtttggacctcctggttgcgggaaaacactaatagcaaaagcagtggcacatgaggcaggggctaactttattcacatcaaggggcctgagctattgaacaagtatgttggggagagtgaatcggaagttaggaaaatattcactcgtgcacggactaactccccatgcatcctgttttttgatgaggttgatgctttgacaacaaaaagagggaaagagggaggatgggttgttgaacgtctcttaaatcagttacttatagaacttgatggtgctgatcaaagacaaggtgtctatgtgataggagctacaaacaggattgatgtgatagatgatgctgttttacgtcccggtagatttggaaagaaacattatgtacctttacctggtgcagacgagagagtttcaatattaaaggcacatgctcgtagcaagcccatctcgactgatgttgatttggatgcacttggtcgtcgtgctgagtgcaacaatctcactggtgccgacctagcatcactggtcaatgaagcagccatggcagcactggaagagagactggaattccgtgacaaggggacatcctcactgagttcgtctagcttgattgagatgccgcacttcgaacgtgctctatcgaagatcaagccatcagtatctgaacagcaaatcaagaattatgaggcgttgtcaatgagatactcgtcaaactgatccatcaccagctgtccacatgttagtgtgtatatgaggacaaccttgtgaaaaaaatgtggtgtctgtaccatgtttgcaaggagtgtgcaccgtcaccagcttttacccatttctgaagcacattataatctcatgtgagagcctgtggtagagtagtttagatacaaatagaaatctgcatgttatcgcgatcagttttgtttccattttcatttgtctgtaacagactggcctacaggcaattttgtatgcatctcatcaagatacatcatacatacacgaatgagttgttattgaatcatgcgtggaagtggaatattgcaagaaattgtttttggctactagcacttgtgttcctcagctacagttgtgtgagttttccattggtctcagcagcagcagcttgaggcctggtggtgtccagtttgtccaaagccgcccatagcttggggtcttcgtagtccctgatgacgagcgttgcgccgacggcgagaagcttgtcctctctgctttcctcggcgatggcaaccaccggcatccctgccgcaatgccggcctgcacgccagtggtggagtcctcgaacacgagcgcgtggtccggcgagacgccgagcaggtcgagcgccctgaggtacgggtcagggtagggcttggatcggccgcactcctcggcggtgacgacgagggaaaaaaagtcggagaggccgaggatggagatcatgagctcggcgttggccctgggtgcgttggtgacggcggcgcgcctgagcccgcggccggcggcccagcggcagagcggcgtgaggccggcgatctcccggagcccctcggcggcgtacctggcgaagagcgcctccttctcggcgaagaaggcgtcgaggcggcgctggtcccagtccgggaacaggaagcggccgatctgctcgttgctccggccggccatgttcgccatgccgaactcgggcgtgatgggcacgccgttgttgtagcccaccttgaggagcatctccgaggtggcccggtggtggaacgggtcggagatggccatggtgccgtcgatgtcgaagaggacggcctccagtggggccactctgccgatcccactgctgcaaagcaaccacacacacacacacagggaaagaagataaaactttaaactgggacggccatggttgcggagaacttgctcggattgaaatgaaatcttgacagttttggtcggattgaaacgaaatcttgacagtttctgtctctctgggaatgggggaatagaactgagtgaaatcatgcagaaaatactctggatgattacctttccatggccagttgctgctggatgccaaaactgaggcttcttttggtcttgtggtcactgctcgagtgctgatgctgcctgcacattttataaggagaagactgaagaggcagggagagttggtgaggattccgtggttcagttggcgcggttggtggtagtctctcacattctcatgttccacacc

SEQ ID NO: 154921 - DNA, 3889 bp, Zea Mays
cgccccctccgcctctgtctcctctctcctctctcctctctcctctccgtcgtcctgacaccgcaccacggcgcccatggcgaagcgcccgcgccacgccggaaacggccccggacgatctcagctggtgcctttcgagtggaagctccaccgcctcatactcaacggcggcttggccggtcccggcgcctccgccgaagacgtcgccgacgccctccgcgtccaccacccggagttccgccgccagaagcaaggccccttcgtcgcctccgtccgccgcgctctcacctccatccccatcccctccccatcctcctctgactcctccgacgacggctcctccgcctcccgccgccgcggccaccacgacgcccacgccaccacctcctcctccacctccgtctctgacgccgctgcccgaccgtcgccaccagcccccgcctacgacgtcaccaagtccatgctccgctcccagtacgccgcgcagacgcccaagcggagccagcagctggagatcgaggtcgcggcggagaaaccgcgccgcctcatcacggccgacggcggcggcggaggcgatgccaagccggaggccgccccggcttctgaagggttcggcagaggggacaaggggcccaggttcgccgacctcggcgggatggaggcggtgatcgaggaactcatgatggaggtggtcgtgcccatgtgccatccggagataccgcatcgccttggcgttaggcctgtcgcggggctgctgctgcacgggccgcccggctgcggaaagaccacccttgcccatgccattgctaatgagactggcgtgcccgttctataagatctccgcaccggaagtcgtatctggggtgtctggagcatctgaggaaaacatcaggggcttgtttcagaaggcctatcggactgccccctcgattgtatttattgatgagatagatgcgattgcatccaagagggagaatctacaacgagagatggaacggcggatagttactcaattaatgacatgcatggatcaattccaccagaatattggatcgggaagtagcaatttggaagctgaatcatctgaaaagaaacctggttatgttattgtcattggagccacaaataggcctgatgctgtggaccaagctctgcgaaggccaggcaggtttgaccgagagatatcacttggtgttccagatgagaatgcacggaaacaaatactgaagatgcttactcagcatctccgacttgaaggcgaatttgacttgttcaagatagctagggcaacaccagggtttgttggtgctgacttgaaagcattagtggataaagcaggaaatctagcaatgaagagaataattgatgaaagaagggctcggtgttgcattgagcaggacggtagtagcaagcatgactggtggagacaaccttgggatgaaagtgaggtggacgaactacatattaccatgaatgactttgaggaagcagcaaaaatggttcagccatctttgagaagagaagggttttcttctgtccctggtgtcacatgggatgatgttggaggtcttgattcattaagaaaagagttcgaccgctgcattatccgttgtatcaagcaccccgaagactatgaggtatttggagtgaatatgcaagctggcttcctgctgtttggacctcctggttgcgggaaaacactaatagcaaaagcagtggcacatgaggcaggggctaactttattcacatcaaggggcctgagctattgaacaagtatgttggggagagtgaatcggaagttaggaaaatattcactcgtgcacggactaactccccatgcatcctgttttttgatgaggttgatgctttgacaacaaaaagagggaaagagggaggatgggttgttgaacgtctcttaaatcagttacttatagaacttgatggtgctgatcaaagacaaggtgtctatgtgataggagctacaaacaggattgatgtgatagatgatgctgttttacgtcccggtagatttggaaagaaacattatgtacctttacctggtgcagacgagagagtttcaatattaaaggcacatgctcgtagcaagcccatctcgactgatgttgatttggatgcacttggtcgtcgtgctgagtgcaacaatctcactggtgccgacctagcatcactggtcaatgaagcagccatggcagcactggaagagagactggaattccgtgacaaggggacatcctcactgagttcgtctagcttgattgagatgccgcacttcgaacgtgctctatcgaagatcaagccatcagtatctgaacagcaaatcaagaattatgaggcgttgtcaatgagatactcgtcaaactgatccatcaccagctgtccacatgttagtgtgtatatgaggacaaccttgtgaaaaaaatgtggtgtctgtaccatgtttgcaaggagtgtgcaccgtcaccagcttttacccatttctgaagcacattataatctcatgtgagagcctgtggtagagtagtttagatacaaatagaaatctgcatgttatcgcgatcagttttgtttccattttcatttgtctgtaacagactggcctacaggcaattttgtatgcatctcatcaagatacatcatacatacacgaatgagttgttattgaatcatgcgtggaagtggaatattgcaagaaattgtttttggctactagcacttgtgttcctcagctacagttgtgtgagttttccattggtctcagcagcagcagcttgaggcctggtggtgtccagtttgtccaaagccgcccatagcttggggtcttcgtagtccctgatgacgagcgttgcgccgacggcgagaagcttgtcctctctgctttcctcggcgatggcaaccaccggcatccctgccgcaatgccggcctgcacgccagtggtggagtcctcgaacacgagcgcgtggtccggcgagacgccgagcaggtcgagcgccctgaggtacgggtcagggtagggcttggatcggccgcactcctcggcggtgacgacgagggaaaaaaagtcggagaggccgaggatggagatcatgagctcggcgttggccctgggtgcgttggtgacggcggcgcgcctgagcccgcggccggcggcccagcggcagagcggcgtgaggccggcgatctcccggagcccctcggcggcgtacctggcgaagagcgcctccttctcggcgaagaaggcgtcgaggcggcgctggtcccagtccgggaacaggaagcggccgatctgctcgttgctccggccggccatgttcgccatgccgaactcgggcgtgatgggcacgccgttgttgtagcccaccttgaggagcatctccgaggtggcccggtggtggaacgggtcggagatggccatggtgccgtcgatgtcgaagaggacggcctccagtggggccactctgccgatcccactgctgcaaagcaaccacacacacacacacagggaaagaagataaaactttaaactgggacggccatggttgcggagaacttgctcggattgaaatgaaatcttgacagttttggtcggattgaaacgaaatcttgacagtttctgtctctctgggaatgggggaatagaactgagtgaaatcatgcagaaaatactctggatgattacctttccatggccagttgctgctggatgccaaaactgaggcttcttttggtcttgtggtcactgctcgagtgctgatgctgcctgcacattttataaggagaagactgaagaggcagggagagttggtgaggattccgtggttcagttggcgcggttggtggtagtctctcacattctcatgttccacacc

SEQ ID NO: 154922 - DNA, 1515 bp, Zea Mays
atcacacaaattaaagccgccaagagtcccagcagatcgatcgaacagctagctagctagctatatagcgagagggctccatccatatccatccatctgctactgctagcagctgctggctgttgctgcttgcattgagatgtggatgatcagcgcagggcgcatggagcagtgggcgccgacggcggcaatggtggccaccaacgtcgtgatcgccgtcatgacggcgctgatcaagcaggcactgagcctgggcatgaacaggctggtcctcatcactttccgccagatggtggccacactgttccttggacccatcgcctacttcaaggaaaggaggatgagaccgaagttcacttccgagatcttcgtgtacatgtttctcagtggaattcttgggccggtgctgcttcagtacacactgtttgtcggattggattacacgacggcaacattcgctgcaacgttcggaaatatgcttccagtggttactttcctgatatcacttgctttcaggttcgaagcactggaggtgaagagcaagtcggggagcgccaagatctcagggacgctcatctccctcggcggcgcaatgatgctcaccttctacaagggttcagcactgacacaaaccaccaccgccgccacgtcgtctccagcatccagcggcggcggccacatcaggcaacaagccggagagcacggcacggtccggtgggtgctgggctccgtctccatgctggccaacgtcgtcggcttcgcgctgtggctgctcctgcagcggaagttcacccgcaagtacccggccgtgtactcggccacggcgttcatgtcgctattcagcttcgtccaggccggggcgctggccctgtcgatccagaggaccagccttgccgtgtgggccctcagggggaccgtggagatcgccacggtggtgtactgtggtgtagtggcgtctggcattgggtacctgctgctcacctactgcgtggagaagagaggccccgtgttcactgccgccttcagcccgctcgcccagatcttcgtcgccggcatcgatctcttcatcctccacgagcctctctacctcggaagcgtgctggggtcagtgctggttattctcgggctctaccttgtactgtggggcaagagagaggaagctgctgctgctgctgcttcggcaaagccagtgcaggccgaggtagaacagcaagagaaagtgtgatttttttccctttattgttcatcaaagtacagtgtgccagagcaggaacgaacataattaactagaagcagaagcctgtgtgagtgtgtgacagagcgagtgcatatgatcttcgagctcttactgctgcttgtattctagtgctgctaggttatatatcccctaaatctatgtatactactgaccaatataacgcaagaaaatgtatgctgatcgatcgatcgaaatgctgtgaaattctctctcaagtcgctgtgaaaattctagtgctgagaaagaggttgagccaa

SEQ ID NO: 154923 - DNA, 1354 bp, Zea Mays
ctacaaatagtccattgccggagcattgttatggcaaattcaggtgaagcgaagcgaagcgaagcagctagcaatgtcggggatggcggcgcgcatcggcgagtggaagccggtgatggcgatgctcatcttcgacctcatctccgccgtgacgacggccctgatcaagaaggcgctgcaggaggggctggaccgcctggtgcttatcacgctgcggcagctcgtggccaccgtcttcctcgcgccgatcgcctacttcagagagcggagcacgaggcctaagctgacactggagatcctagtctacctcttcttcagcgcagcgtttggcgccgctctctcccagtacaccttcttctacgggctgcagtacaccaccgcgacgttcgccataactttcaccaacgtggctcctgtgctcactttcctcattgcagtcttgctaagggtggagtcactgagcatgaagaacaaggcaggagcagcgaagatcgccgggacgctgacgtcgttcgccggcgtcatgctcctcaccctctacaagggcgtctcactgacgcaccaccaagctggagaagcgagcccggaggatcacagcctcggagcagcagcagcatcgccgtctgacaggaagagctggacgctgggcaccctggcattgctcgccaactgcctgtgcttctccttctggctcctgctgcagtccaggctgaccaagaagtacccggcgctctactccagcacggcctacatgttcctcatcagctcgatgcagggaggggccctcacggcggccattcagaggcgagcgtcggtgtggcttctcacaaggccgatagagatcgtcacggtcttatatacaggaatcatggggtccggagtgggctacgtgctgatgacgtggtgcgtggagaagcgagggccggtgttcacgtcagccttcatccctgtcatccagatcatggtcgccatggtcgacttcttctttctccatgagaatctctatctcgggagtgttctgggatccatactcttgatcctgggcctctatattctgctgtggggaaagaagagggatgcctcatcatcagcggctgccaaggaagaggaagatggagagaaagaagatgaggaggaggaggacaaagagaagcaagtcagatcatgaggaccagaccactctcatatatatatggattaggaccaaattaaagatacagttcttcggaatgtgtgatgatctatacttgacagatatatatatatatatatatatatatatatatatatatatatatatagtatttgtttaatatataactctgctagtatatatagtatttgttctgaattc

SEQ ID NO: 154924 - DNA, 216 bp, Zea Mays
tgttgcccactgcccggtcatcacgctcatgtcgtcgcccgtctgtgcgaccataccctccacgtgatcatcgttcgccatctcgccaatccaaccctccaggattctagggcgctgggcgccactgttttattctccaggcacgcacggtcgagcaatcaggattcatattattttgcggccgtcgttcttatttctcaacttgcaaagtgctaa

SEQ ID NO: 154925 - DNA, 864 bp, Zea Mays
atgccgcgggacatctccgatcatgttccttgcttggtctcctttaagtccaaaattcctaaacctacgatttttcggtttgagaatttctggcttgaattggatggtttcatgaacctttttcaaactacttggaatgggatccctagcattcccgacaaggccaagaatctgactgccaagttcaaatatgttaggaaggttctgaaagaatggcagagatcactgccaaaaattgatataacggtgaagaacattaagttgctaattgagcttattgacaacatggaagagcaccgggatctttctgttgaggaatggaatttcagggaaattctgcaacaaaaggtggctgatttgcttaatattcaaaaaatttattggaagcagcgtgcggctattcggtgggttactgatggagacatttgctctcgcttctttcacgcccatgccaccattaagcacaggaaaaattcaatcccttctttgactgatgacaatgggaccatgttctttgagcatgaacataagtctaatcttctctgggaggctttcaagtgcagactggggtcgtccgacttttcagatatcgggtttgacctttcagaacttttagctaccaatgagcaattacagggatcaatttcgttctgggatgatcagtggagtcagggcatcccgaggcatattttcccagagcttttttcctttgccaaaaactcaaaaatgactatcaaagaggccaaggatcaagagcagtttcatggtctttttcatttacctgtctctgagcaagcgtttggtcaatttctggtgctcaaggggtcctgggagcaaatcgttcttaatgatgctcatgactga

SEQ ID NO: 154926 - DNA, 1928 bp, Zea Mays
gctatggtattggtatggtagctagctagggttctgtaaccaatctcacccatcttttctttccttcgtcggagaaggggagaaaagcgtacctgaaacgattccctgcattccattccgctgcatacttgcattgcatctcatccctcctgctcctgcgtcctcctcctctatttctctcctgctgcttgctactacctcatcgatccattccatccatcgccgaggggggagggccgccgcccgcccgggtcgcatcgcatcgcctggtcggccggggactcggggcaggcgagcgacactagctataaaagacctcccgccgcctgcgactgggccgtgtgcaagcaaattaaagcgcaaggccgatccgagggtggactgtggagggccggccatggtgatgatgatgcggtcgtgcctcggcggtggcctgctgccggtggcggtcatgctctgcctcaacgtggtggcggcggtcatggtatcgctcgtcaaggtggccatggacggcggcatgaaaccgctcgtgatcgtcaccctgcagcagctcaccgccgccgtcttcctcgcgccaatcgcattcttcaaggagaggaagtcgaggccaaagctgacgctggagatcttcgcctacatcttcgtcagtgcggcgctcggggcagctcttcgtcagtacatgatcttcgtggccctgcgctacaccacggccaccttcgtgaccgccttctccaacatcgcccccgtgctcaccttcctcctggccgtcgccacgcggtccgaagcgctggacctcaagagcaggacggggttggcgaagctgctgggcacgctggtgtcgctggccggcgccatggtgctcaccctctacaagggcgtggcgctcacccacgcggcggcagcctcgcaggaccagcagcagcactcccacggccggttgccgccgagcgccgccgacagccgcggcaagtggacgctgggcaccgtggccatcctgggcaactgcgtctgcctctcctgctggttcctgctccacggccgcctcgccaagaagtacccgcacgtctactcctgcaacgcgctcatgtccttgctcagcttcctccaggtcgccgtcgtcggcctctgcacccagcgcagcatctccccctggatcgtcaccagcaagttcaacatcctcaccgtcctatacgccggcatcgtcggctgcggcgtctcgttcgtgctggtgacatggtgcatcgagaagagaggagccgtgttcgtggccgccttcataccggtggtgcagatcatcgtctccgtcatcgacttctccatcctgcacgagcagctctacctcggaaggtacgcacggacacggtaccatgccatcactgaatggcaatcgacctgatcgaaagtgaagtcacctgctctgctctgctctgcttccccctttgtgctgtgcagcgtgctgggatcagtgctagtgataggtggcctttaccttctgctgtggggcaagaggcaggaggccctgcactgtcctcctcctcctcctccaaaggttgccgaagaagaccctgctgacaaagagcagcagcaagtgcagcacaactgaagacggacagcatcctctgactgttggtcgtttggttgtaacagtgccagcaataagatccctctgcctccttttcttttcttttggtgtctcaggggggtgggcaatgttccttccttctcagatcgatcaccaacaaagtgtttagattctaatccaaaacagtagaatggtcttaaatacagtactcctgcttactgatgatagcaacaccactaccaactaggcctctggagaaatacagagtagagtgtgtgtgcgcgcaatactggagagcagaatattcctgcaaatatagtacgcagttgctgtccgcctttttctt

SEQ ID NO: 154927 - DNA, 2088 bp, Zea Mays
ggtattggtatggtagctagctagggttctgtaaccaatctcacccatcttttctttccttcgtcggagaaggggagaaaagcgtacctgaaacgattccctgcattccattccgctgcatacttgcattgcatctcatccctcctgctcctgcgtcctcctcctctatttctctcctgctgcttgctactacctcatcgatccattccatccatcgccgaggggggagggccgccgcccgcccgggtcgcatcgcatcgcctggtcggccggggactcggggcaggcgagcgacactagctataaaagacctcccgccgcctgcgactgggccgtgtgcaagcaaattaaagcgcaaggccgatccgagggtggactgtggagggccggccatggtgatgatgatgcggtcgtgcctcggcggtggcctgctgccggtggcggtcatgctctgcctcaacgtggtggcggcggtcatggtatcgctcgtcaaggtggccatggacggcggcatgaaaccgctcgtgatcgtcaccctgcagcagctcaccgccgccgtcttcctcgcgccaatcgcattcttcaaggagaggaagtcgaggccaaagctgacgctggagatcttcgcctacatcttcgtcagtgcggcgctcgggtatcttccattcattccactccacgccatggctgaatctgacacgaagctagcttaccacattgacgtaccagcctgcgccatatattgcagggcagctcttcgtcagtacatgatcttcgtggccctgcgctacaccacggccaccttcgtgaccgccttctccaacatcgcccccgtgctcaccttcctcctggccgtcgccacgcggtccgaagcgctggacctcaagagcaggacggggttggcgaagctgctgggcacgctggtgtcgctggccggcgccatggtgctcaccctctacaagggcgtggcgctcacccacgcggcggcagcctcgcaggaccagcagcagcactcccacggccggttgccgccgagcgccgccgacagccgcggcaagtggacgctgggcaccgtggccatcctgggcaactgcgtctgcctctcctgctggttcctgctccacggccgcctcgccaagaagtacccgcacgtctactcctgcaacgcgctcatgtccttgctcagcttcctccaggtcgccgtcgtcggcctctgcacccagcgcagcatctccccctggatcgtcaccagcaagttcaacatcctcaccgtcctatacgccgtacctgccagctgctcgctcgctgctccttcattcgttgccaacttgccctttctctcatctctgaaatggtcctggatcagggcatcgtcggctgcggcgtctcgttcgtgctggtgacatggtgcatcgagaagagaggagccgtgttcgtggccgccttcataccggtggtgcagatcatcgtctccgtcatcgacttctccatcctgcacgagcagctctacctcggaaggtacgcacggacacggtaccatgccatcactgaatggcaatcgacctgatcgaaagtgaagtcacctgctctgctctgctctgcttccccctttgtgctgtgcagcgtgctgggatcagtgctagtgataggtggcctttaccttctgctgtggggcaagaggcaggaggccctgcactgtcctcctcctcctcctccaaaggttgccgaagaagaccctgctgacaaagagcagcagcaagtgcagcacaactgaagacggacagcatcctctgactgttggtcgtttggttgtaacagtgccagcaataagatccctctgcctccttttcttttcttttggtgtctcaggggggtgggcaatgttccttccttctcagatcgatcaccaacaaagtgtttagattctaatccaaaacagtagaatggtcttaaatacagtactcctgcttactgatgatagcaacaccactaccaactaggcctctggagaaatacagagtagagtgtgtgtgcgcgcaatactggagagcagaatattcctgcaaatatagtacgcagttgctgtcc

SEQ ID NO: 154928 - DNA, 1748 bp, Zea Mays
ctttccttcgtcggagaaggggagaaaagcgtacctgaaacgattccctgcattccattccgctgcatacttgcattgcatctcatccctcctgctcctgcgtcctcctcctctatttctctcctgctgcttgctactacctcatcgatccattccatccatcgccgaggggggagggccgccgcccgcccgggtcgcatcgcatcgcctggtcggccggggactcggggcaggcgagcgacactagctataaaagacctcccgccgcctgcgactgggccgtgtgcaagcaaattaaagcgcaaggccgatccgagggtggactgtggagggccggccatggtgatgatgatgcggtcgtgcctcggcggtggcctgctgccggtggcggtcatgctctgcctcaacgtggtggcggcggtcatggtatcgctcgtcaaggtggccatggacggcggcatgaaaccgctcgtgatcgtcaccctgcagcagctcaccgccgccgtcttcctcgcgccaatcgcattcttcaaggagaggaagtcgaggccaaagctgacgctggagatcttcgcctacatcttcgtcagtgcggcgctcggctcttcgtcagtacatgatcttcgtggccctgcgctacaccacggccaccttcgtgaccgccttctccaacatcgcccccgtgctcaccttcctcctggccgtcgccacgcggtccgaagcgctggacctcaagagcaggacggggttggcgaagctgctgggcacgctggtgtcgctggccggcgccatggtgctcaccctctacaagggcgtggcgctcacccacgcggcggcagcctcgcaggaccagcagcagcactcccacggccggttgccgccgagcgccgccgacagccgcggcaagtggacgctgggcaccgtggccatcctgggcaactgcgtctgcctctcctgctggttcctgctccacggccgcctcgccaagaagtacccgcacgtctactcctgcaacgcgctcatgtccttgctcagcttcctccaggtcgccgtcgtcggcctctgcacccagcgcagcatctccccctggatcgtcaccagcaagttcaacatcctcaccgtcctatacgccggcatcgtcggctgcggcgtctcgttcgtgctggtgacatggtgcatcgagaagagaggagccgtgttcgtggccgccttcataccggtggtgcagatcatcgtctccgtcatcgacttctccatcctgcacgagcagctctacctcggaagcgtgctgggatcagtgctagtgataggtggcctttaccttctgctgtggggcaagaggcaggaggccctgcactgtcctcctcctcctcctccaaaggttgccgaagaagaccctgctgacaaagagcagcagcaagtgcagcacaactgaagacggacagcatcctctgactgttggtcgtttggttgtaacagtgccagcaataagatccctctgcctccttttcttttcttttggtgtctcaggggggtgggcaatgttccttccttctcagatcgatcaccaacaaagtgtttagattctaatccaaaacagtagaatggtcttaaatacagtactcctgcttactgatgatagcaacaccactaccaactaggcctctggagaaatacagagtagagtgtgtgtgcgcgcaatactggagagcagaatattcctgcaaatatagtacgcagttgctgtc

SEQ ID NO: 154929 - DNA, 1810 bp, Zea Mays
ctatggtattggtatggtagctagctagggttctgtaaccaatctcacccatcttttctttccttcgtcggagaaggggagaaaagcgtacctgaaacgattccctgcattccattccgctgcatacttgcattgcatctcatccctcctgctcctgcgtcctcctcctctatttctctcctgctgcttgctactacctcatcgatccattccatccatcgccgaggggggagggccgccgcccgcccgggtcgcatcgcatcgcctggtcggccggggactcggggcaggcgagcgacactagctataaaagacctcccgccgcctgcgactgggccgtgtgcaagcaaattaaagcgcaaggccgatccgagggtggactgtggagggccggccatggtgatgatgatgcggtcgtgcctcggcggtggcctgctgccggtggcggtcatgctctgcctcaacgtggtggcggcggtcatggtatcgctcgtcaaggtggccatggacggcggcatgaaaccgctcgtgatcgtcaccctgcagcagctcaccgccgccgtcttcctcgcgccaatcgcattcttcaaggagaggaagtcgaggccaaagctgacgctggagatcttcgcctacatcttcgtcagtgcggcgctcggggcagctcttcgtcagtacatgatcttcgtggccctgcgctacaccacggccaccttcgtgaccgccttctccaacatcgcccccgtgctcaccttcctcctggccgtcgccacgcggtccgaagcgctggacctcaagagcaggacggggttggcgaagctgctgggcacgctggtgtcgctggccggcgccatggtgctcaccctctacaagggcgtggcgctcacccacgcggcggcagcctcgcaggaccagcagcagcactcccacggccggttgccgccgagcgccgccgacagccgcggcaagtggacgctgggcaccgtggccatcctgggcaactgcgtctgcctctcctgctggttcctgctccacggccgcctcgccaagaagtacccgcacgtctactcctgcaacgcgctcatgtccttgctcagcttcctccaggtcgccgtcgtcggcctctgcacccagcgcagcatctccccctggatcgtcaccagcaagttcaacatcctcaccgtcctatacgccggcatcgtcggctgcggcgtctcgttcgtgctggtgacatggtgcatcgagaagagaggagccgtgttcgtggccgccttcataccggtggtgcagatcatcgtctccgtcatcgacttctccatcctgcacgagcagctctacctcggaagcgtgctgggatcagtgctagtgataggtggcctttaccttctgctgtggggcaagaggcaggaggccctgcactgtcctcctcctcctcctccaaaggttgccgaagaagaccctgctgacaaagagcagcagcaagtgcagcacaactgaagacggacagcatcctctgactgttggtcgtttggttgtaacagtgccagcaataagatccctctgcctccttttcttttcttttggtgtctcaggggggtgggcaatgttccttccttctcagatcgatcaccaacaaagtgtttagattctaatccaaaacagtagaatggtcttaaatacagtactcctgcttactgatgatagcaacaccactaccaactaggcctctggagaaatacagagtagagtgtgtgtgcgcgcaatactggagagcagaatattcctgcaaatatagtacgcagttgctgtc

SEQ ID NO: 154930 - DNA, 1640 bp, Zea Mays
gcacaagtgccctgcacggtgcgccccaacagaaaggattttgtttcgggtgaggtggggggcggcatggcgccacccgccgctcaggctcagctcctcctctccaaccacccctcgccgttgctgtcgccgccgcaacgtcgtcgcctcctcggtggaccgccgcctcgctcacacacctgcgccatccggcaccaccacggccacgacaagtgcgcctcctcctcctccactcgccttcgccacgccctccgcccgcccgccgccaccgccgtggccatcgcgcccggcgaccactggggaaactgggccttcctcctctccgccgccgcgttcggcacatgggcggaggagaacacgtcgtggggcgccgcgctcagcggggcgctggtcagcatcatggccggcctggctgccacggccgtcggcctcgtcacccccggggcgcccgcgcacgacgccgtcatggagtacctgctgccggccgccgtcccgctgctgctcctcggcgccgacctccgccgcgtcgtccgcaccaccggcgacctcctcaaggcattcctgctcggatctgttgcaactgtaatcggcacgacggtggcctatctgctgatccccatgagatcgctgggccaagatagctggaagatcgcagctgcactcatgggcagctacattggcggagcggtgaactacgtcgccatctcggaagctctaggcctcacgccgtccgtccttgccgccggcgtcgcagcggacaacctcatctcggcgctctacttcatggcgctcttctcactggcgtcaaacatcccagcagagcccaagacggcgacggcgagtccgcagaaggacggcgagcggctgtcggtgctgaacggtggcgcggcggtcgctttgtccttcatcatctgcaaggccgggtcggccatggccgcgcggctggggctccagggcggcacgctgccctgcgtcacggcgctggccgtgttcctggccacggcgttcccggcgccgctcagcaggctggcgcctgccggcgagaccctggcgctcatcctcatgcagctcttcttcgccgtcgtcggtgccaacggcaacgtcgtggacgccgtcacccgggcgcccagcgtcttcgccttcgcgctcgtgcaggtgtccgtccacatggccgtggtgctcgccgccggcagggttattgggatcgacaggaagccgctgctcatcgcctccaacgccaacataggcggccccaccaccgcagccgccatggccacggccaaaggctggacctcgctcgtcgtgcccgggatcctcgtcggcatcttcgggatctccattgccacgtttcttggcatcggatatggcatgttcgtgctcagaaggatccgcggctgaacaatttcttcttgattccgagatgtgaccttaagtggctgtcgcgcgctagctagaccatagaacaatgcttgctttatagagctgctgaattaaagaggtttcgctagagttcagcttgtgggggttttgaaaagatatttaaacttagtcctgactgctaacgataagttaaaacattcgatgtgaatttgaaatttgaaaggaaccgtaaaatacaacgtatcagtccattcggattc

SEQ ID NO: 154931 - DNA, 1632 bp, Zea Mays
gattgcctggacccagccgttgatcgtccgacaggtggtcccggcccgtcatcagctccggcagaagggtgggagtacggcaaaaggcctgcctctctgcgactgatctccggcggcgaggcgccgcaccggggtatgggccaggatgtggtcgcgcacgtctacgacgtcgccaccgccggctccgacaccaccgtgctccacatcaaccgcttctttaaggacgccatcggcctcggcggcatcttccacaccgccatccaggtctacggtgatgaagaatggtcctttggctactgtgaacgtggcactggggtttttagctgtcccccatgcaaaaatcccatgtacacttatcgcgagtccatagtgctggggaagaccaactgctgtatcctcaaggtaaatcagatactaagggagctgagctgggagtggcctggacattcatatgaactcctgtcaagaaactgcaatcacttctgcaataccttctgcgaaaagcttgaagtatcgaagcttccaggttgggtcaatcgctttgcaaatgcgggtgacgctgctctagaggtcgctgaaaccacagcaggaaagctgaaacaagcgaaaaaggaaatcgtgaccgcatgcaaagcagcctcaacatttttgaccggcacatcgtcaagcgcctcttcaaatgcggaggatacgggtggctcaacctcgacaggaaattccctcttcgagggggcatggatccgaagtatcatcggtatgacaatgaagccgtcgaagagcctagtctgtgtagatagttcagatagcgacagctccgggagcgaatcagaatcagatggcgatcggcccaacagcgatgacaacgctgagcgacaagctaaaggcgtgaagcaggagcgaggcacgaaaaaaaagaataacggaccacattgccattcatgaagctcactcacaccaatactgcagagagaggaaagacttctacatgctgccgggagcagacctacagcaggaactaactttacaattatgttcatttctggttgagagctgggagcggcgaaagggccctgaggagtgcggaggcgatggagcgcaccacaatgcgtgcaatcttgagcttgatttgcccgcgccgtgggagcgggcgagccgtcctttgcctttcagccctgtaaactctggtgagacgggttgtgctcgctttctctgccatccttgtcaaacgaaggagatgtttcttctgtagcgagtagaagctgacggtggaggagatgttagagagcctggttgcacttatgcttagtttcatgctactgtggtctatttatagacgtcgaggagtttatctgaacataagacatgacagctagattcttgtttctgtgtagtatcaacagaatgctgttcgttataataatcctgcagtgtctgtaggtatgagaaacctcagctggtgtgtgtgtgtgtgtgtgtgtgtttgagtaatcatgattggtctgttcgtccgtgtggccgaatcttcagatctttgacttggtgatgtccatacgcgtctcttcggagcagatacgtatgcatcctatgaagaacaaatgattggcttgaatggtagtgtggcatttggcgcct

SEQ ID NO: 154932 - DNA, 209 bp, Zea Mays
tttttttcttttatcttttttacaatgaataattaattgaaagtactattactacaacaagtgactataaaaattagcatacaaagatatatatactatcgtttagatgatatcattatttctagctaataagttcataaatcatataataatatcatcacatattaagagcttttttatatttcgggccgggtggccgagcagcccac

SEQ ID NO: 154933 - DNA, 388 bp, Zea Mays
agaacaggagggaggttaccgccatggcgaggagcctacgtcccgtggtggacctccgcgtcaccaagaatctcgagccggccgaagaccctgcgccatcgcctatcgtctggccgaacgctttggcgccctcgtcctcctcgacacctcctccatcgcgtccagccatccatcgttccgcgcccagctctcctcctcccactcactctgcggcgcggagatcgtgtcccggtgctccagaccgagaggaacctgggcgtcgtcgttcggccggatggatgtcgccaggaggttggagggagccgctgacagggaactccgactcgccatcgatccgctgagcgccgggccaccgctgccgtgggatttcatcgcgccgctataacac

SEQ ID NO: 154934 - DNA, 1007 bp, Zea Mays
cgttaccagtgaaagcaggccagattgattgtatatattgagcaaattttaatgacatcaaacctcaaagcagtatgactagtagaatagtgtccatgtccatgcgcaaatttgatacatgaatgatatttcttcacatgttcagcaagcatgcaagctattctgtcttagttctcccctcccttattactagataaccttactcttggatgcagctttgctctctcacctgaaatgtgcatgtagttttcttgctgttttctccccccagtctcctatgatcccctgtatcctaccatcttgcttgcaggttgagtttgcccacgatggaacatgccatgggttcgctgtttggatcgactgggtacttgacaaggaaaattccatagtgataagcaccgggccagagagcagatactggaagcaaggggtgcagctgcttagcacgcctgtacaagtgaacccagcgaattcggtgatgcacgtggaggcgaatttcgatgctgacattggggagctcacgtttaaatccaccacgctctcatgatgccaactgtaatgtgtggacaaccaagcctcatgcgtgtgttgttcttaaaagttagcatttgtcgctgcgttttgttcgtcggagctcctgatgtgagtcaagcactcaagctcatgattacgtgtgtgttctgtcatgctagcacaagcaactgcctcctcggtggagctgttttttcatggtcttgtttgttagcccctcacgtcgtgaggaagatgctctagctgctgtcaagaatcccctaccaaaacagagcctgccagagcatgtctctggccagtctccctcgaccctctttccttattccgtgtgtatatcattttcccaggtcccctctccgcctcttcctcgtcatttttctcaggtccctcttagcacacaagttcaaggagagaatgcaggctccatccatgtcatgggtgctatttaagttaggtttggcctatttttaactaat

SEQ ID NO: 154935 - DNA, 2659 bp, Zea Mays
cgccgtccgccgatgccgagctgcctcctccctggcatcgcgccacgcccaccgccggccgctctccgcagcctcctcctccgccgcagcagaatggcctcctccgggccggcacgcgccttccagctccgcctcaacccactcaccggcgactccgagtggctcgtcgtcgacgaggcggaaacggaagcggaggtggctgcgcctgcgccgacccaccataagcagctccttgccgccacctcctacctcgacatgctcaacgacgcctcccgcaaccgcgcgtaccgcctcgccattgacgccacggtaacggaccccacctctcgcgtcctcgacatcggagctgggaccgggttgctgtccatgatggcggcgcgagctttggcagctgctggaggtgaaggtaggggaagcgtgtcagcatgcgagtcctaccttccaatgggcaaactaacacggagggtactcagagccaatgggatggaaaataaggtcaaagtatttcacaagcgatcagatgagctcggagttggagtcgagcttgattctcgacctgatatattggtaagtgaaattcttgattctgagctgctgggtgagggtctcatacctactctacagcatgcgcatgacatgctattggtgaaaaatccaaagacagttccatatcgagctactacttatggagtgttggttgagagcacgtccttgtggaagatgcatgatctgcacagcaatgaagcaaatgctgaagatggtgtgaggcttattcccagtggaacacaaattgttctttctgtgaagtcacagcaacatgcgatgcaatgtgatgcgctggcagatgaaataagattgctgtcagaacccttcaaagtttttgaatttgacttttcggaacgtccagatagtcatcgtgaaacaaagattgagataaaagcaacagctgatgggcatgctcatgctattgtttcatggtgggtgcttcagttggattcttctggatcagtcttttactcaactgctcctagatgggtgagacaatccagtggtgtcgatttaccacaatatgccaatggcacgaaggattggtgtgatcattggaagcagtgtgtttggtttatacaagggacaggggctcctgcaaagaaagatcaaactctttctttgagcgctagccataatcaaactagcatctcatatcagttgaatataaatgatgaaggaagtagaagccccaaaagtaatcatctaacactgttaccagaaagggtagcactttatggtgataaagtttggagatcagcgttgataagtgtaatcaggaattatacgagcgaaagatcctctccgatctgcattgtggctgatgacagcgtgttcctagctctcattgtttcttttctgttaccatcttcaaaagtcctcgctatgtttccatgtcttagagacagtggcctcaactatcttcaagctgttgcagatgcaaataatttatccatggaccggattaaagtgattggtaaaaaggcatcgtcccttactacaaatgacttaaatcatgaaaaggttaatatgttagtgggggaacccttttatcatggaagtgaagggatgctgccatggcaaaatctgcgtttctggaatgaaaggactctgcttgatccgttgctctctgaggatgcattcatcatgccttgtaagggaatattaaggttctgtgccatgtcacttccggacttgtggagaagccgtcgtagccttaaagatgttgagggttttgaccactcagttgttaatgatactttaggggcctgtggtgacctgcctggagagcaacaaggcccttgcctaccttattatgtgtggcaatgcggttataccaagaaattaagtgaagtttactctctcatggatttgaacttttctgagcctatccactcttgttttggtgaaacaaaggttgagtttgcccacgatggaacatgccatgggttcgctgtttggatcgactgggtacttgacaaggaaaattccatagtgataagcaccgggccagagagcagatactggaagcaaggggtgcagctgcttagcacgcctgtacaagtgaacccagcgaattcggtgatgcacgtggaggcgaatttcgatgctgacattggggagctcacgtttaaatccaccacgctctcatgatgccaactgtaatgtgtggacaaccaagcctcatgcgtgtgttgttcttaaaagttagcatttgtcgctgcgttttgttcgtcggagctcctgatgtgagtcaagcactcaagctcatgattacgtgtgtgttctgtcatgctagcacaagcaactgcctcctcggtggagctgttttttcatggtcttgtttgttagcccctcacgtcgtgaggaagatgctctagctgctgtcaagaatcccctaccaaaacagagcctgccagagcatgtctctggccagtctccctcgaccctctttccttattccgtgtgtatatcattttcccaggtcccctctccgcctcttcctcgtcatttttctcaggtccctcttagcacacaagttcaaggagagaatgcaggctccatccatgtcatgggtgctatttaagttaggtttggcctatttttaactaat

SEQ ID NO: 154936 - DNA, 2216 bp, Zea Mays
cgccgtccgccgatgccgagctgcctcctccctggcatcgcgccacgcccaccgccggccgctctccgcagcctcctcctccgccgcagcagaatggcctcctccgggccggcacgcgccttccagctccgcctcaacccactcaccggcgactccgagtggctcgtcgtcgacgaggcggaaacggaagcggaggtggctgcgcctgcgccgacccaccataagcagctccttgccgccacctcctacctcgacatgctcaacgacgcctcccgcaaccgcgcgtaccgcctcgccattgacgccacggtaacggaccccacctctcgcgtcctcgacatcggagctgggaccgggttgctgtccatgatggcggcgcgagctttggcagctgctggaggtgaaggtaggggaagcgtgtcagcatgcgagtcctaccttccaatgggcaaactaacacggagggtactcagagccaatgggatggaaaataaggtcaaagtatttcacaagcgatcagatgagctcggagttggagtcgagcttgattctcgacctgatatattggtaagtgaaattcttgattctgagctgctgggtgagggtctcatacctactctacagcatgcgcatgacatgctattggtgaaaaatccaaagacagttccatatcgagctactacttatggagtgttggttgagagcacgtccttgtggaagatgcatgatctgcacagcaatgaagcaaatgctgaagatggtgtgaggcttattcccagtggaacacaaattgttctttctgtgaagtcacagcaacatgcgatgcaatgtgatgcgctggcagatgaaataagattggtgggtgcttcagttggattcttctggatcagtcttttactcaactgctcctagatgggcacgaaggattggtgtgatcattggaagcagtgtgtttggtttatacaagggacaggggctcctgcaaagaaagatcaaactctttctttgagcgctagccataatcaaactagcatctcatatcagttgaatataaatgatgaaggaagtagaagccccaaaagtaatcatctaacactgttaccagaaagggtagcactttatggtgataaagtttggagatcagcgttgataagtgtaatcaggaattatacgagcgaaagatcctctccgatctgcattgtggctgatgacagcgtgttcctagctctcattgtttcttttctgttaccatcttcaaaagtcctcgctatgtttccatgtcttagagacagtggcctcaactatcttcaagctgttgcagatgcaaataatttatccatggaccggattaaagtgattggtaaaaaggcatcgtcccttactacaaatgacttaaatcatgaaaaggttaatatgttagtgggggaacccttttatcatggaagtgaagggatgctgccatggcaaaatctgcgtttctggaatgaaaggactctgcttgatccgttgctctctgaggatgcattcatcatgccttgtaagggaatattaaggttctgtgccatgtcacttccggacttgtggagaagccgtcgtagccttaaagatgttgagggttttgaccactcagttgttaatgatactttaggggcctgtggtgacctgcctggagagcaacaaggcccttgcctaccttattatgtgtggcaatgcggttataccaagaaattaagtgaagtttactctctcatggatttgaacttttctgagcctatccactcttgttttggtgaaacaaaggttgagtttgcccacgatggaacatgccatgggttcgctgtttggatcgactgggtacttgacaaggaaaattccatagtgataagcaccgggccagagagcagatactggaagcaaggggtgcagctgcttagcacgcctgtacaagtgaacccagcgaattcggtgatgcacgtggaggcgaatttcgatgctgacattggggagctcacgtttaaatccaccacgctctcatgatgccaactgtaatgtgtggacaaccaagcctcatgcgtgtgttgttcttaaaagttagcatttgtcgctgcgttttgttcgtcggagctcctgatgtgagtcaagcactcaagctcatgattacgtgtgtgttctgtcatgctagcacaagcaactgcctcctcggtggagctgttttt

SEQ ID NO: 154937 - DNA, 622 bp, Zea Mays
atgtgaaactcctttgtttttcattgtttctagttaaaaaaatatgttgttctgacactaggaatgaaaggactctgcttgatccgttgctctctgaggatgcattcatcatgccttgtaagggaatattaaggttctgtgccatgtcacttccggttagcctatcgaatatctacctttcctttatttctttgcttgggcataaagttattctttttgtgctgagaattacgatgatgcaggacttgtggagaagccgtcgtagccttaaagatgttgagggttttgaccactcagttgttaatgatactttaggggcctgtggtgacctgcctggagagcaacaaggcccttgcctaccttattatgtgtggcaatgcggttataccaagaaattaagtgaagtttactctctcatggatttgaacttttctgagcctatccactcttgttttggtgaaacaaaggtatcattttgattcttctggacaaagtatatcgctgttgacatttgtgtctctgctagtcacttcaaatatgcaagatattgagtactagcctaggtgaattctgacggaattgataaatattggaaaaagtctacataatgccctgaccttag

SEQ ID NO: 154938 - DNA, 102 bp, Zea Mays
atggcctcctccgggccggcccgcgccttccagctccgcctcaacccactcaccggcgactccgagtggctcgtcgtcgacgaggcggaaacggaagcggag

SEQ ID NO: 154939 - DNA, 1191 bp, Zea Mays
atgaggagcttcccggaccgtagcgagatcggaggtcaggatgtcataagtgttaaacaaagtcattcttcaacagtttcaactactaatcttaagttgcacctggagaatcttagcgattttttagtttctaatgggaagaaccactccccaatacttcggaaggcaaaggatgacaagagcacggtgtctgatgtttttgtcaggatagtgcatcattctaataacctgcatctttctagctactctgaaacatcaatcaaggatgtatggcctaacagttacttgttcgaagaggggaggagaagcatacttacccaaccactccaatattccaagcctgattggagactccatgatatgtgtcccataagtcttgataaacctgatattcacaaggtccaagtcaacaagagtgactacgacaatgtgaaagttgtcctctacctcaaagcgtccatagtagtgcaccacgattctgcccctatcgtcctcccccacccgccctaccatcagcgccaccaattgctcggtcgacaccgcgtcgccaccaatcaacgagatcccgccatcaacgccgatctggggatccgaggctgccatcaacgcgcaccttggtcatcctgcgctccttccccaagctattcccaaactgccccacgtctcatccctcgcgacctcgcaagcctctctgacccccaactcaacgagatcgggcgagcgatgcccgaccaccagatcgcagcgatggagccggatccgatcgccgttggggcatcctcctcgccagccagagcttcagaattataccgtgaatgtggaaggccacaacctgcatctgatgctctagcaaagggtgccagtgcattggaggagaaatctccagaagaagctatcaaaatgtatgatgaggcttgttcagtactagaagaagatgggaaggaacagatggcttttgacttgtaccatgccgcagcagctttgtatatcaagatggtgaaatattcagatgctggtgctttgtttttaagactcggttcagctgctgataagtgcaatgccatcaatagccaatgcaagcaagctcaaaatgctacaatgactgctcagagtaagttgtacattggtggattttgtataacaatatttgtgccatgtgctattttgcccccatcaaaccatgaagcgtaa

SEQ ID NO: 154940 - DNA, 2027 bp, Zea Mays
tccattagcaacagtgacgtgacggccttcttgtcttgtctccctcacatcgcaaatgcgacgtgcaagttgcaataccaacagcaacaccatcacctccgaatccgatccctcacacgcccacaccaccttggtggtgggtcttggttcatgctgcccactccggcactcctcttctcatgacaagcgcgctgccgcacatgtctgagctcccggacggcggcgccggcggaaatggccaagacgaagccgccgccttcgcctcgccggccaagcgcctccgtaggtcgccggcgctcgagcccacctccgtgctctacaaccgcagcccgagcccgcccacatcctcctccctggtctcctccgccgcgcccgagccgccccccatcagcgccgaggattgggaggccgtcctctccggcggcgacatggccgcgccaccagccgccgcgcggtctcaagacgcctctttcctccgctggatcatggacgccgacgcccaagtcgacgccttcgatcccttcctgccttgccaagagaccgccgtcgtcgagcccttcttgcagccgcagctcccgctccccgtggccgacgacctcgagccaggggcgacggttgacgagctcctcgaggcggtgcgccgcgccgacgccggggactccactggcgcgcgcgagatattggcgcggctcaatcaccggctcccctcaccgccggggcacccgcaccctcctatcctccgcgccgcggctcacctccgggacgcgctcctgcgcgtcctcgtcacgtccgcgcccgcacccgccgccgtctcgacgaccccgctcgacgtcgcgctcaaggtagccgcgcacagggccctggcggacgcgtcaccgaccgtccagttcgccaacttcacgtccacgcaggcgctcctcgacgcgctcggcaccgcgcgccgcgtgcacgtcgtcgacttggacgtcggcttcggcggccggtgggcgccgctcatgcaggagctcgcgctccagtggcgccgagcacccgtctcgccgctgccgccgccgtgcttgaaggtgacggccttggtctcgccagggtcatcagcgcaccccttggagctccacctcacgcaccagggcctgacgcgcttcgccgccgacctcggcatctcgttcgagttcaacgccgtcgcgttcgaccccttggacccgttgccccccacggggctgtccgtcgcgcccggcgatgccgtcgccgttcacctctccgtcggctccggggtcccgtcggcagctactctccgcgtcgtgaagcagctccgccctgccgtcgtggtgtgcgtcgaccacggatgccaccgcggcgacctgccgctgtcgcaccacgcgctgagcgtcgtgcgctccagcgcggcgttcctcgagtcgctggacgcggccggggcgccggcggacgcggtggcgaggctggaggagtacgtcgtgcgtcccagggtggagcgcctgttgctaggcgacaggatgcctccatggcggaccatgcttgactccgccggattcgcgccggtgcagctcagcaacgccgccgaggcacaggccgaatgcctcgtcaggcgcacgcccacgccgggcttccatgtggagaagcggcaggcggcgctcgcgttgcggtggcaggactcggagctggtgatggtgtcggcgtggcggtgctgaatcggggcactgggacagttcctgtaaagattgaacctttttctgttctcatgtgcagtaaaattagctagtaacttgttgtcaagctgtttattttacaattttagttgcgatgatgtagcaattgggagcatgtgaattttcatcatctgtgatatgacagttctgaggaacgattggaagccacagatctgcagctaatagccccatttgccatgcccatattcctgcagttagttgctaggtccattaattgttagcattagttgggcatgcatgtggtccataatctacatttcagatccattcagagctggtacaaac

SEQ ID NO: 154941 - DNA, 3393 bp, Zea Mays
tcccggcccttcctttccttctcgcgcgcgaccaaataactcctcactaaaaccctagggctcccggccgccactgcctacgccgtcgccatggagaccctcaagcgcaaggccgtggacagccccggagacgcctaccaggcctcttctctcaagccgccgctcgccgccgccgccgtggagcctcgcgctccgaccaccctcgcggccgccgaaccagtcgcttgcgtgcacgacgtctcctaccccgagggctacgacccatccgcctctacgtcccgcgccattgccggcggagctgatgcctctgagccagcaaagaagtttcctttccagctcgaccccttccaggccgaggccatacgctgcctcgacaatggtgaatccgtcatggtttcagctcatacgtcagcgggaaagacagtagtcgcgttgtatgcaatagcgatgtctttgcgcaaccaacagcgggtcatttatacatctccaatcaaggcactgagcaaccaaaagtacagggagttcaaagaagagttctctgatgttggtctcatgactggggatgtcacaattgagccgaatgcctcctgtctggtcatgaccacagaaatttggcggagcatgcaatacaagggatctgaggtcatgagggaagttgcctgggttatatttgatgaggtgcattacatgcgggatagagagagaggagtggtttgggaggagagtatagtgatggctcccaagaattcacgctttgtcttcctctcggcaactgtacctaatgccaaggagttcgctgattgggtagctaaggtacataagcaaccctgtcatatagtatacaccgactatagacctacacctcttcagcactatgtatttccttctggaggggacggattataccttgtagtggatgagaagggcaagttcagagaggacagttttcagaaagcattgaacgcccttgtccctgctagcgacagtgccaagaagaaggaaaatgggaagcggcagaaatttaccatggcaggtacatctagtgaggaaagtgacatattcaagatggtgaagatgataattcagcgccaatatgatcctgtaatactttttagctttagcaaaagggaatgcgaatttcttgctatgcagatggctaagatggacttgaatgaggatgatgagaaggcaaacatcgaaacaattttttggagtgctatggatatgctttctgatgatgacaaaaagcttcctcaggtttcaaacatgctccccttactgaaacgcggcattggcgtgcatcattctggtctgttgcctattttaaaggaagtcattgagatactctttcaggagggcctcatcaagtgtttgtttgccacagaaacattcagtattggtttgaacatgcctgcaaagactgttgtgtttaccaatgtgcgaaaatttgacggagaccgattcagatggttgtcgagtggagagtacatccaaatgagtggccgtgctggtcgtcgaggtattgatctgcgtggtatctgtatactgatggtagacgagaaaatggaaccttcaactgccaaaatgatgctgaaaggaagtgcagatagtttgaacagtgcctttcatctgagctacaatatgctgttaaatcaaatgcgatctgaggatggggatccagaaaagctcctccggcattcattttatcaatttcaggctgaccgttctcttcctgatcttgagaagcaaatcaaggaactggaatcagagagaaattccatggtaattgaggaagcggagagcttgaaggattattacgatctcttacagcagcacaggagtttaaagaaggatgtccatgatattgttctctctcccaaacatgtgctgcctttcttgcaacctggaaggcttgtccgcattgaatatagtacagatgagccagctaacttttccattgatgaaaatgtcacatggggaattataattaacttcgaaaaagtgaagtcacatggtgaagataagaggcctgaggattctgattacacggttgatgtccttaccagatgttctgtaactaaggacaacagtggtaagaaaacaatgaaggttgttcctctgaaagcgcgtggagaaccagttgtagtttcattgtcactttcacagattgatggactaagcagcatacggatgtacatacctaaggatcttatacctgtagaagttcgagaaaacaccttgaggaaagttgaagaagtccttttaaggtttgctaaagatggtgtgcctctattggatccagaagaagatatgaaagtacaatcgaaatcatttcggaaagctaccagacgaatagaagctcttgagagcttgtttgagaagcacgatatccgtaactctccacatatccagcaaaagctgaaagtctttcatgctaagcaagaactatcagccaaaataaagtccataaagaaaacaatgcggtcttccaccgctttagctttcaaggatgaactcaaggcccggaaacgtgttcttcgcaggctggggtatgttacgagtgatgatgttgtggaagttaagggcaaagtggcgtgtgagataagttcagctgatgagcttacattgacagagcttatgtttagtggtgctctgaaggatgctacagtagagcaggtggtggcactgctctcttgctttgtttggcaggagaagctccaggatgctccgaagccaagagaggagctcgatttgctcttctaccagctgcaggagacagcaagaagggttgctaaccttcagcttgaatgcaagatccagatcgatgtggaaagttttgtgaattctttccgacccgacataatggaagcggtgtattcatgggccagagggtcgaagttctaccaaatcatggagatgacccaagtgttcgaaggaagcctgatcagggccatcaggaggctggaggaggttctgcagcagctgattctggcatccaagtccattggggaaacggagttagaagcaaaactcgaggaggcggtcaacaagatcaagagggacatagtgtttgcagcatctttatacttgtagtgtcttggatgtctggttttatgtcaggggctaggtcaaaagctcatagggatttaaattaatcttaaattgctgttcatgttgagtgttgttggcatgatgaagctgtctgatttgctgttagcggtgacatggcagtgaaagttttgttaggtttcttcaccgtgtagggtctatttgacattcaagaattttgtaggaagcaatacaattctggcagacctcacattaacagccttagcatgtacgatagatagctatttatctcatctgtcaggaatagcccagagatactgcgtg

SEQ ID NO: 154942 - DNA, 608 bp, Zea Mays
gaaacttgatggcgaagcaagacatgtcagaccttgggttcagaactatggacgaagcaggtacgtctcctgacaggaacaacaaactggagaaccctcctaatcagccaaaggattaaaaaaatagttgtttggctttgatgtagcttttgtatgtttcttcatccgggagatctgtcaagatctcaaacaaataagggtataatgaaaggacgatgttagtttacatagtaaccaaatttgaaacttatctgttggctgttttgagttttgacgttcctaaggagcagttatatgatttatgctgtgattaagggctgatttgcacttcaatgtcctctaaatgtgtcacttcggtcgtgaggccagccacgtcataccactctggacggaatggagaacgcgcagcaggactggctgctactggcggcacgaaatctaaggctgctgaatgggagaaggcaaagcttggaagagttacagaggagtgagtacgatctgttttttttattattctgaaggtcactcgattcaagctatgctaatatggagttatggacttcaaatttagttatggacttcagtatttgcttcgtcgaaaggttacc

SEQ ID NO: 154943 - DNA, 1913 bp, Zea Mays
taccttgcatatttcatatctattttccctaataaactagcagttcatagtttttatctaatcaaaataggattttggtaacagtttctctttcataatgaattaatcttagtttgtctagtgttagccaattgtagtggtcaagttgcagtatgtctcaaaatacttataagtaggtagacctttttgctgaatgagctggttacctaacgggtatttcgaggccaactgatgccactcatctctttgatctataaaagtattagaaatgcattttaatgattgaatcaagttatttgttgcttgtttgtctttagcaaatcattattttgtatttttttgcatattgccaatattttaggataatttttcccaagtgcagattaggtctactatgtgagtgttcagttagatagtcctttgaatgtttctagaaccagttctaaagttgagataatgtgaggtagcatacaaaacaacgtattgttagagatgcatactgtcaacaaacattcattccaggggtcatcttgatggtcatataagaaacactaggagaaaatgacataaattagtattacactgtcatgtttttgtatataaagtaggccatacaacttcactagaagtctagtctagagacagcagtgggctatcagtgaatgctatgttgttttaaagaccaacccataatgctgcgattgttacggtaccagcccaaatggcatgcttcttcaggacgacagatgatattcatatatgctagaatataagctctgtttgcggtattttcctccagtgctcctgctgtgtttgctgcacttaacaggtatccaagatggatgagtcaatcgatgagatccaataggatttctaggaatctacgaaggagctggctgctcttcgtggaacactgaaaacggtgattgaagacagggacctgtcgtggcaggaggtgaagtagctgagaagaaacatcagcatcatgctagaacgaggttgtgtcgctgaagaagatcgaagccttggacaaagacatacttgtcaaggagggagagatcacgatattgcaggacaacatcgacaagccgttcaatatcatctgcagcccaagttcgatgcaggagttcggcatggggtgaagatggctgctattttgtaagtgagttggtggatgaaaattcaagttattgtagaagacaacacatttctttgcatattacatcctgctatgatgttctgaactatgatgggttcaacgggtgccatttttctcttagagctattgttgacatggaagaaatggtggcagcaccagcttagtatggacaacaactgaaatctcctacagaagttgtttctaatgtgctattgagctccattgtgttttggcctacgcaatcttgttctccagtctgcctccaagaaaagctctatagtcccatagtttctgctaaggttcaacaacttcaggatcaattataggctgagaagcaagaaaaaatggacttcgtgatgaagcggaaaccattgatagtatgaagaggttgatggaagaaaataacaaccttcttcgtcaactataaagcttcaattgaagaaaagtgcctccatcttaagtttggttgactactataggacatgcagccttgtggtagctatagtagtagtagatatttatagttgctctagatttgaagttataggattatttttaattatgtttaatgtttaataatttgagttgaagttataagatttgctttgaattttaagttaaaggatttgagatatatggtttggagttatatgattatttgatggatggaatatttgtgtacaacaaattcatgtgatattttggctatgatgtgtaatattctatgacgatatcaattcatatgatgtgttcc

SEQ ID NO: 154944 - DNA, 853 bp, Zea Mays
taagcagattcgatctcctcccatcacctccatcgcaacctctcgacggcagactaggtttcatccccatctcaaccggcggcagcctagggcttcatcccccacccccaaatccatgccgctcaggttggagatcaatgtgtgcctgctcgacctcactggatctcagtccccatgtcgtccttctacttctcgcgtcactttgattttgctctctagtttgattttgtttccattgtggtgattagtggaaattttctcaatggtcagagagggtcaagttggtggacttgcaccccacggaggcatggatgttgagcctgtactcgaggagtgcctgcatccgggattatcacacacagtcaatttgtaggagaggggacgccatacatcaaagatgactaaagaagaggaagatgaagaatacctcgaagaggaagaagatgcccttgctggtgcaggggggaacacatttagtttcacaaccttcatgctcttaacccctctgatcctggtgcgtggcagattagactccgatggggaagtcactagcgaggtggatcaagttcgtgctcttcaggaagaagtcgtcatccaggtccagctccaccaaggccaagaatttatcgataagaatgctgttacgatttcaagtgtggctctacatatgcatctccagctatggagtagggatttgttctagccactattgcccttatttttcaatgtgtagaaaggtgtgagtaacaaaggggaaactgctgccaggaaggagcccacgttctctgagagctctccagtgatctcagagcttgtgcttgttagcgcccataacaacgagatcatgcgggag

SEQ ID NO: 154945 - DNA, 216 bp, Zea Mays
tccggtcacttctcctctgctggacgctgcgcagcatttttcttggacatttctgctctgcccgcgcactagccatgcatgcgtgtcaggggcgcaaatttttcctgaccagtcgctgtgtcacccgcgcagcaagaaatttgaattttttttgggcatcttccctctgctgtttctggttctctgaccacactggtcagaaccagctgaactggc

SEQ ID NO: 154946 - DNA, 954 bp, Zea Mays
atggacaaagagaccaccggaggaggacgcatccctaggagccaccgagcgtccgaggccaagccaggagtccaagtctccactctccaggaccggccgcggcatccccactccggcactccccaggaccaccggagtccgactgcagcggcgcagcctgctcccaccacgtacgaggttcctatccttgcaggtgagagtctgatgtctgaccaaggtgcttcgaggccgagcaggagcagtcgtcaagttcccacaaagagcagtgctgtggttgcaggaggttcctcaagtgcagctacaccgacgagtggtgctgcaaatgaaatgccatcttcaagtgttcaagctccaccatcagaaggaccacggtcgtgtgctgacacggtcaagataactgtggccaacgagcttgcgacagaagcgatgatggtgcgggagctcgacacgctgtggcgagcagataaaattcgtgctcgcggcaaacaaagaaagagcgagctgcgcgtgcgcagagagctcgacacgaaagctcgacgtgcgcagggactacgacgaggaagtagtagacatggctacgcgcataggaaggtggaatccgagcgcagggcgagctcggcgagcggcacggagcaagacgcgacggcggattcgcgcgcgcagaaagctgaagacaaatcgagctggggccgacgaggaaaagctccgcgagctgtgcgcgagttgcacacgaccacggcgcgcaggaatgacacagtccatcggcaaactccggcgggcagcaacagagcaggacgcgccatggggaaaacaaaggacgctgagctcggcgcgcagcgagctggagctggagcagacaagctgcagaccacggcgctagcaccaaagcgcgatcgagccaggaccaaacacagggaagaagcagcagcgcacacgacggtcggccatggatga

SEQ ID NO: 154947 - DNA, 328 bp, Zea Mays
aaactgattctcgtgtggagccgaaagatcgggagtcgtttttgtgaagaaaggtgggatctaaaaaaacctgctccatcctcccttaaaacagctcttcaaccaaccaaatatggacctccccttaaagtttgatcgaaattacccataattgttattggacaaaaacataacgacccaatttatggattaaacatttcagaccatttatgcactattatgatgagaatattttatatgttattgtttcatattttttttccgtatatgcctcctacttattggtttgtaacaaagttgaactgcaaagggtaaaacagacaatcgc

SEQ ID NO: 154948 - DNA, 271 bp, Zea Mays
gcagagaggtgtgttggagaatacagttttggcttttgctgcaaagttggtagtagcttccatgccatctccatccatccattgcagtgcaggtgcaggcgtgagcttcagccgatgattagccacctcacgctgcctgcgattcttcctgtttttatttttattttgtttgtttgttcctgccctattcctgggtcctttttctgttgcatctattttacatactgtactaaattaggtgactagaggtactctccaagaaccaaaagag

SEQ ID NO: 154949 - DNA, 241 bp, Zea Mays
ctacttattaaggcggtaaggggtaggctgccattctgtgttctgccattcccattcccgcactgtctttctcattctcccctccccacaaagcccattcccattcccggctgccattccgtgttctgccagtgttctgtcattcccattaccccctccccgcactgtctttctcattccccctccccgcaaatcccattcccattcccacgtgcatcccacgcctagctaaaattaaatt

SEQ ID NO: 154950 - DNA, 2076 bp, Zea Mays
gtgtccattccactttgttccacaaggatctgttttttgttgccagattgtccaagtgcacctttcatgaagcttgattttggatgagggctatacagagggtttggtgaggaaggcatgtttctatcttgaattaaggccatgtcttgctgctgctgctgctggagcgtaggaccatttgaactaggtggaataccctcaggtatggatcgccgtaactgcacaggccacttcttcacttcattgccaccataagagtatattgccttctgccattctgcggacaaaacatattagatcatcgcgttagtctcgaaacagaaggtatctcagttcctgataaaaacaagtgagtaccttggatttcaagctcaaggaaacctccgatacgagttattatgacatctcgtggtctcatattgctagcctcaggtgaagacgacattatttgacagccttgctgtagaatttggatgaaaaggctttggagaactttagtgtcttggcggctactaataccaccaaaaggaaatattaagctgtccaataattctcctctagcatctgtccaaatgcacactagccatcgccagtcctcagtccaaccataacagcaatgaagacttgctgcactgtcactctcagatacgtcgagtagagggctcactccactatcagagttacttcctgaaattgagccatataccctgctgccagatgcatctgctccagattttgatggttccattaaagcattaagatcggcagacccagggtctgctagtatgaaaagtggctcaaaggcatatttcctatcatcctgagcacataaatcaggcagcttacttgggtccagaagtcctcccgaacgagcaggctgccatgagttatcccatgttgccgacctcatggatgcatcaaaatcggtttctcgagagagagttggcccagacattcgaggaactaaacattccttccaaagagtaggagcaggagatgtaacatgcatcattgtggactgagatctacccaaataagttggtgactggaacatatcgcttgtggagacagcccgtgggattcgtcgtgccttgttgtacactgtgaatgctatgtccttcaaaacagcaagctccttgtttggcttatccattctcagtacagtttcaatagtaacaatctgcaagacgagcttgggtatactgaacccggatagcataacgacatttgatgctgatgcttcatctacagaagcactgctgtttagggctttggcaacctgtgaatatagtaactttctttccctttccggggatgaaataacatacccaagagcaacagaacattctactagcgtctgtagaattgcacaaggttctggaaatgggcaaactacataaattacctgcatggataaagggctagtggtgttaaaatagggtgaataatttaccatgttgtgaatatcatttatatccactactgtgaatattaaatgttaagttacatgaatcagatcaacggcaaaggaacaaaaaggaaaaagatcttactgtgcaaggtccactactgctctctttctgatttgtagatatgtttgaagtcagctttatatccttaagtatccttgaaatagatgttacaaaacttttcacgctccaatgttttgaaaaagcttgaagacagtcacttgttgaactgatgggacctaagtggccacagcgaaccttcttcaactgctcaggacaatcaactagaacaagtcctgaaggcaaatattttccaggagatagttccatttgtcctccattgttttggggcgaatgagttcccagtttgcaaacttcataaactacaggaacacaaaattaatgatgacaaatgctattaaaaacactttgcatcataatgaactggaacaaaggtttggagattaagaacatgctgaagtacataaatctgctggagtggcaaaagtatttcttgcctacatcaatcgttctgtactgttgtaaaaaaaagggggggatacgtgaatcatgtttatggtgacatctggtttatgtttaaaatata

SEQ ID NO: 154951 - DNA, 233 bp, Zea Mays
agaacagaaacatttcaaaaaatcgttgaagcgtattcaaggccaacaaggatcatccgtggaaaagaaattgagtctgctttggaggttgacccacacgtatttgagaaagatgaagagaaagttttgtggagcgcctacttggaggttgctgataagatccatcctggtgttgatattaagacctttgtggatgcttctcttatcctgatacaacccctagaagatttctt

SEQ ID NO: 154952 - DNA, 323 bp, Zea Mays
ctatagcaaggacaaaataataaaggtgtgcctcctatcacaacccgtggcagccggtgcgatcaagccaacgacatgcgtagaaacagaggattacatatgatctcagataccaggaggcgaacttgctccttaccggagtactcttttctgaacaattttatcaatgcttctcctcttctgcatgatctagctcttctctttcccaaaggttagctccacacggaagtctaacacaaataaatgtatgtgataggctgcagactgcagtatgatcctagggcaattgtatggcacctcctcatctagttttgagtgaaagg

SEQ ID NO: 154953 - DNA, 277 bp, Zea Mays
ctctctctctcatgtggaagccagccaagatgtgtgtacgttagacatgtgtggtgggtttcagttgatacacgagggagtgagtaataaagagcaagcgagagatggaacaaagaactgaatttgtatcgtacaacaaagaacttaatttgctgttactgaccacgtgattggttgttaggatcagcagatcctagtcgaagcctagatgtaggctgggtttagcctgtatgcattgatgcaaatcaaaataaattctcttgtttggttgtttgtc

SEQ ID NO: 154954 - DNA, 3261 bp, Zea Mays
gaccccgggaagccgaagaagttagctgtgaggtctttaaagaggagttgttgcattgcagttgcaggttgcacagccgcggaagccagcacctcaaagccatggcggaagtggaccacctcgctgccgagagggccaccgcgcgcttcgacgtcgaggagatgaaggttgcgtgggccggctcacgccacgccgtccacgtcgccgaccgcatggcgcgcctcgtcgcatccgaccctgtcttccgcaaggataacaggaccatgctctccaggaaggagttgttcaaggacactctaagaaaagcagcgcatgcgtggaagcggattgtcgagctacgtcttacagaagaggaagcggatttgctgagacaatatgttgaccagcctggttatgttgatctgcattggggcatgttcgttccagctataaaaggccaaggaactgaggagcagcagcacaagtggttaccactggcttacaagttccaaataattgggtgctatgctcagacggaacttggtcatggctcaaacgttcagggccttgaaacaactgctacattcgatccgaagactgatgagtttgtcatccacagtccaactctcacgtccagcaaatggtggcctggtggcttggggaaagcttccacccatgcagtggtgtacgctcggttgataactgaaggaaaggactatggcatacatggtttcattgtgcaactgcgaagcttagaggatcactccccacttcctggtgttaccctcggtgatattggtggaaagttcggtagtggtgcatataacagtatggataatggtgttcttcgatttgaccatgtgcgcatcccaagggatcaaatgttgatgaggctttcacaagttacaagggaggggaaatatgttcactcaaatgttccaaagcagctgttgtatgggacaatggtttacgttcgccagtcaattgttgcagatgcttctaaggctttgtcccgtgctgtttgcattgctgtacgatacagcgcagtcagaaagcagtttggctctcaagatggtggccctgagactcaggtccttaattacaagactcaacagagcagactctttccattgctggcttcagcatatgcatttagatttgtgggtgattggctcaactggctatatacggatgtaactcagaaactggaagccaaggacttctcgaccctgcaggaagctcatgcatgcactgctggtttgaaagctgtgacaacatcagtaacagctgatgcaattgaagaatgccgaaagctctgtggtggacatggttacttgaacagcagtgggcttcctgagttgtttgcggtctatgttcccgcttgcacttacgaaggagacaacgtcgttttgcttttgcaggttgcaaggattctaatgaaaaccgtttctcagttggcatccgggaaacagcctgttggcacaatggcctacatgggcaaagtgcagtatttgatgcaatgcaaatctgctgtcagttcagctgaagattggcttaaccctgatgccatacaagaggcatttgaagcaagagcgctcagaatggcggtaaactgtgcccagaacataagccaagctgcaagccaagaggaagctgcaggtttctatgagcggtccccagatttgcttgaggctgcggtagctcacatccagctgattatcgtgaccaagttcattgagaaggtgcatcaggagattcctggacacggagtgaaggaacagctccaggccctctgcaacgtgtacgcgctgtacatcctccacaagcacctgggcgacttcttggcgactgggtgcatcacgcccaggcagggagcgctggcaaacgagcagctgggcaagctgtacgcgcaggtgcgtccgaacgctgtggcgctggtggatgcgttcaactacacggaccactacctggggtctgtgctggggcggtacgacggcgacgtgtaccctgcgctctacgaggaggcgtggaaggacccgctgaacgagacggtggtgccggaggggtaccacgagtacctccgcccactcatcaagcagcagcagctcaagctctcgaggctctgaagtctgaatcctctctctctctctctctctctctctctctctctgatgtggaagccagccaagatgtgtgtacgttagacatgtgtggtgggtttcagttgatacacgagggagtgagtaataaagagcgagcgagagatgaaacaaagaactgaatttgtatcgtacaacaaagaactttgccgtttggttcacatatttataacgtaatgggtaattgataacgttaaatcatgtttgttttagtccaaccgtaatcagataccacactaaaatttgataccagcttattcaaatttgttaccaccagtaatcgagcgtaaaccattaccatttatgttacatttcttgaaccaaacagcatcttaatttgttgttactgaccacgtgattggttgttaggaacagcagatcctggtcgaagcctagatgcaggctgggcttagcctgtatgcattgatgcaaaccaaaataaattctcttgtttggttgtttgtcctcaattagccaggttcagtacaacccttgtctggtttgctgttttaggtaagttacatggatttagctctaagttacacaactcaactacatttctaaaattacaatgttataaattacacaaatccaaatttatgcaattatatattacaataacttatcctttacatatcctttacaaaattataaaatacaattataatattgatactgaggcacaagaacactttacaaaattgtagtttacaagtatgcattagcagtttaccagcgtccattgcagccacccattctgttctcagttctcaaacaccaaaaacactttaaacaaaacagctcagttctcgattcaatttacaaaaacaccaaaaacacccgatcaagtgtacaatcaaaatacttgtaaacaaaatagctctctgtttagcaaatacttgtaaacaaaatagaccaaaaacaacttggttgtttgatggcaaagtaaatataaaaaattcatgaagagaaggtacaccacttccatttaaatgtgtcacgagcttcgaatcaggaagatatgcactcagcacgttaacacggacgagtttctgacatcaagaaactcgaatggctgcctcgagtggctaggtgaattattcaggaaatctccggtgcacat

SEQ ID NO: 154955 - DNA, 2449 bp, Zea Mays
cgaagaagttagctgtgaggtctttaaagaggagttgttgcattgcagttgcaggttgcacagccgcggaagccagcacctcaaagccatggcggaagtggaccacctcgctgccgagagggccaccgcgcgcttcgacgtcgaggagatgaaggttgcgtgggccggctcacgccacgccgtccacgtcgccgaccgcatggcgcgcctcgtcgcatccgaccctgtcttccgcaaggataacaggaccatgctctccaggaaggagttgttcaaggacactctaagaaaagcagcgcatgcgtggaagcggattgtcgagctacgtcttacagaagaggaagcggatttgctgagacaatatgttgaccagcctggttatgttgatctgcattggggcatgttcgttccagctataaaaggccaaggaactgaggagcagcagcacaagtggttaccactggcttacaagttccaaataattgggtgctatgctcagacggaacttggtcatggctcaaacgttcagggccttgaaacaactgctacattcgatccgaagactgatgagtttgtcatccacagtccaactctcacgtccagcaaatggtggcctggtggcttggggaaagcttccacccatgcagtggtgtacgctcggttgataactgaaggaaaggactatggcatacatggtttcattgtgcaactgcgaagcttagaggatcactccccacttcctggtgttaccctcggtgatattggtggaaagttcggtagtggtgcatataacagtatggataatggtgttcttcgatttgaccatgtgcgcatcccaagggatcaaatgttgatgaggctttcacaagttacaagggaggggaaatatgttcactcaaatgttccaaagcagctgttgtatgggacaatggtttacgttcgccagtcaattgttgcagatgcttctaaggctttgtcccgtgctgtttgcattgctgtacgatacagcgcagtcagaaagcagtttggctctcaagatggtggccctgagactcaggtccttaattacaagactcaacagagcagactctttccattgctggcttcagcatatgcatttagatttgtgggtgattggctcaactggctatatacggatgtaactcagaaactggaagccaaggacttctcgaccctgcaggaagctcatgcatgcactgctggtttgaaagctgtgacaacatcagtaacagctgtatgtaatccttgtgctgttctacttgttattaatagtttatactggctgtacctcactctttttggctctcttatacgattatgattgaagtggagttgagttaataccggtcattccaaagtactcgcatcgagtataaaagtggtttgtagaagttctgaactaccaatttggcagatattgttgtttatcacttccatctttcttgggtatttcagttgtagctcataattcaggtttcaaaggctgtcactagatacgtttttcccccctgtttaacttgactgtattcctgaagctccattccattttaaggatgcaattgaagaatgccgaaagctctgtggtggacatggttacttgaacagcagtgggcttcctgagttgtttgcggtctatgttcccgcttgcacttacgaaggagacaacgtcgttttgcttttgcaggttgcaaggattctaatgaaaaccgtttctcagttggcatccgggaaacagcctgttggcacaatggcctacatgggcaaagtgcagtatttgatgcaatgcaaatctgctgtcagttcagctgaagattggcttaaccctgatgccatacaagaggcatttgaagcaagagcgctcagaatggcggtaaactgtgcccagaacataagccaagctgcaagccaagaggaaggtttctatgagcggtccccagatttgcttgaggctgcggtagctcacatccagctgattatcgtgaccaagttcattgagaaggtgcatcaggagattcctggacacggagtgaaggaacagctccaggccctctgcaacgtgtacgcgctgtacatcctccacaagcacctgggcgacttcttggcgactgggtgcatcacgcccaggcagggagcgctggcaaacgagcagctgggcaagctgtacgcgcaggtgcgtccgaacgctgtggcgctggtggatgcgttcaactacacggaccactacctggggtctgtgctggggcggtacgacggcgacgtgtaccctgcgctctacgaggaggcgtggaaggacccgctgaacgagacggtggtgccggaggggtaccacgagtacctccgcccactcatcaagcagcagcagctcaagctctcgaggctctgaagtctgaatcctctctctctctctctctctctctctctctctctg

SEQ ID NO: 154956 - DNA, 697 bp, Zea Mays
tcacatcatctgtccttttgtaactgtttgtgcaacaatgagtttatcttaagttctgttttttggtaatatcggtttactgcacttaagtttttgataaaggatctttgatgtcacttgtaggaagaatttgacactcatgatccaaaggagaacactttgctacccccttacttgaggaaaaggtaaaaaataattgagatagttgcagcacgcggtatagtctttgctctatcacagtcaggagtatgggctacttttagtagaggtatggtattcttgccttcttacaatccctttctgcttgctctggttgtcctgagattatctttatatatttccacaaacaaatcagagaatatgctttctgaatggaagtccagatgaagttatccacaatttattttacaacaagaataatgattcactcattaatgtattagtatatggttctgaaaacttcagtgctctacgatacagaacaactcggacaaagtatgctttgtcaatgcaattgcttttttatcctatcatcttctttaaaacttccccaaccgttcaaggttcgtcgagggcaagacaatcatcggatgtttggtcctctctttttgagtctgagtccatgaaaatgcctggatttgtagagttcgatggtgtcaatggaaagttttgacttactctactcacgacatgtatg

SEQ ID NO: 154957 - DNA, 1309 bp, Zea Mays
ttaattacaaaatattttctcataacagtataacacacatttatacatgagttgttacggtattatatgtttccgttgcaacgtagggtcactcacctagtattgatatatgaatatacaaataagccgtagtggaaagtgtgatgttgggccaagcctgaaagcaaagagtgggccgggtggccaggaccaacgacttttccatagtcgtgctcgtcttcgtccacctcccgacccgactgagtagcaagcaattctccaaattagggtttctttccgcttgctttccagtttgcggcatcagtcggtggcgcctgcgatggagtctctgttcggccaatcgcagcggaggaggagggcgggcggcagcggcttcgaatcgctcaagcgtctgggtcacatctcacccgctgtgcagtcccacctcaaacatgcaagcccctcgtctccttctccaatcccggctctcttctcacgcttggctttagctgatcccgttcccgactgcaggtgtacctcaccctatgctccgcgctggccttctctgcactcggcgcgtacctccacatcctcctcaacgtcggaggcgccctcacgaccgtgggatgcgtggcctccatcgccttcctcatctccctgcccgcttcacgggaccaggagaggaaccgcttggcgctgctcatgtctgccgcgctccttcaaggcgcgtccgttggtccgctcgtcgaccttgttattgacttggattcgaggattctcgtcactgcgttcgtcgggaccgcagttgcttttgcatgcttctctggcgctgccatcatcgccaagcgcagggaatacctgtacctcggcggtctgctttcatctggcctctccattcttctctggctgcagtttgctacttcaatctttggccacaccagcgcgaccttcatgtttgagctctactttggcctcctggttttcctgggatatatggtgtttgacacccaggagatcatcgagagggcgcaccgtggggacatggactacatcaagcacgcgctgactctcttcaccgactttgttgcggttcttgttcgaatccttgtcatcatgatgaagaatgcacaggagaaatcccaagacgagaagaagaggaagaagcggtagctgctgaatgaattggatgacatatgttgttgtggtcactacttcatagtaccgtgtactcctatcctattgtactaataataataatagtaagacgaaagatgactgctgggaatgaatatttggttctgctatttttgtgttgattttctactgatga

SEQ ID NO: 154958 - DNA, 997 bp, Zea Mays
gacttttccatagtcgtgctcgtcttcgtccacctcccgacccgactgagtagcaagcaattctccaaattagggtttctttccgcttgctttccagtttgcggcatcagtcggtggcgcctgcgatggagtctctgttcggccaatcgcagcggaggaggagggcgggcggcagcggcttcgaatcgctcaagcgtctgggtcacatctcacccgctgtgtacctcaccctatgctccgcgctggccttctctgcactcggcgcgtacctccacatcctcctcaacgtcggaggcgccctcacgaccgtgggatgcgtggcctccatcgccttcctcatctccctgcccgcttcacgggaccaggagaggaaccgcttggcgctgctcatgtctgccgcgctccttcaaggcgcgtccgttggtccgctcgtcgaccttgttattgacttggattcgaggattctcgtcactgcgttcgtcgggaccgcagttgcttttgcatgcttctctggcgctgccatcatcgccaagcgcagggaatacctgtacctcggcggtctgctttcatctggcctctccattcttctctggctgcagtttgctacttcaatctttggccacaccagcgcgaccttcatgtttgagctgcagctctactttggcctcctggttttcctgggatatatggtgtttgacacccaggagatcatcgagagggcgcaccgtggggacatggactacatcaagcacgcgctgactctcttcaccgactttgttgcggttcttgttcgaatccttgtcatcatgatgaagaatgcacaggagaaatcccaagacgagaagaagaggaagaagcggtagctgctgaatgaattggatgacatatgttgttgtggtcactacttcatagtaccgtgtactcctatcctattgtactaataataataatagtaagacgaaagatgactgctgggaatgaatatttggttctgcta

SEQ ID NO: 154959 - DNA, 1015 bp, Zea Mays
aacgacttttccatagtcgtgctcgtcttcgtccacctcccgacccgactgagtagcaagcaattctccaaattagggtttctttccgcttgctttccagtttgcggcatcagtcggtggcgcctgcgatggagtctctgttcggccaatcgcagcggaggaggagggcgggcggcagcggcttcgaatcgctcaagcgtctgggtcacatctcacccgctgtgcagtcccacctcaaacatgtgtacctcaccctatgctccgcgctggccttctctgcactcggcgcgtacctccacatcctcctcaacgtcggaggcgccctcacgaccgtgggatgcgtggcctccatcgccttcctcatctccctgcccgcttcacgggaccaggagaggaaccgcttggcgctgctcatgtctgccgcgctccttcaaggcgcgtccgttggtccgctcgtcgaccttgttattgacttggattcgaggattctcgtcactgcgttcgtcgggaccgcagttgcttttgcatgcttctctggcgctgccatcatcgccaagcgcagggaatacctgtacctcggcggtctgctttcatctggcctctccattcttctctggctgcagtttgctacttcaatctttggccacaccagcgcgaccttcatgtttgagctctactttggcctcctggttttcctgggatatatggtgtttgacacccaggagatcatcgagagggcgcaccgtggggacatggactacatcaagcacgcgctgactctcttcaccgactttgttgcggttcttgttcgaatccttgtcatcatgatgaagaatgcacaggagaaatcccaagacgagaagaagaggaagaagcggtagctgctgaatgaattggatgacatatgttgttgtggtcactacttcatagtaccgtgtactcctatcctattgtactaataataataatagtaagacgaaagatgactgctgggaatgaatatttggttctgcta

SEQ ID NO: 154960 - DNA, 498 bp, Zea Mays
atggagcagcggccgatgcggggcccgcccggcacccagaggcggtcgcatctgtggtggagcagtggccgatgcggggcccgcctggcacccagaggcgttcgtgtctgctcgcacccccgcggcctgtctgggtacgcgcgagtcgcagctcgtgtaccgcgcgaccgtaacagagggcgccggtgtatggcgtccccaacggcgcgcctcgacgcagacgcgacggcggatctagggccactgatgcaccgatggatgagagacgagcgcgtggaggtcccggtagatggggagctgatggtagacctcgatggcgtggagatccaggatgagagaccgtgggtctgggaccaaagcgtggtgggccaggggaaggcggtggcagagcgagaggaggaaggaggttctgcgcacctaaaatcggagaggaaacgcccgttgggtggagcgaacgcagattccatcggttcaggtagacaacgccaatctctgtaa

SEQ ID NO: 154961 - DNA, 1633 bp, Zea Mays
gaagggaaaacgggggtgcatttgttgggatttttccaactcaattccatccaatccaagagcaagtttcaccggattgattccccaccgcacccgaccacaaatcccaccaagcaaaccctaatccgtcggccatgtcgtcctcccccgcggcgctgcgcttctactgccaccagtgcgaccgcaccgtctccctcgcccctcccgcatccccggacgccgacgtcttctgcccccgctgcggcggcggattcgtcgaggagcttcctcccaaccctagccccgcgcctccggccgccgccttctttgccccgccctccttcgacatccgccaccccagcgacctctccgctttcttcggccccgcctcccccgagccgctcgccccaggcctcttcgatccctccaacttccttcacgaccacttcggcggcctcctctccggcggcgccaccatccagatcgtcctcgagggtgggcccccgcccccaggcctcaactttgccgactacttcgtcggctcctccggcctcgagcagctcatccagcagctcgccgagaacgaccccaaccgctacggcaccccgcccgccgccaaggccgccgtcgcctcgctccctgacgtcgctgtctcggccgacatgatgcaggccgacggcggcgctcagtgtgccgtctgcatggacgacttccacctcggcgccgccgccaagcagctcccctgcaagcacgtcttccacaaggactgcatcgtcccatggctcgacctccacagctcctgcccggtctgccgcttcgagctgcccaccgacgaccctgactacaatcacacccatcagcagcacggtgattcgtctgcccctgctcccccttcccccgctcccgcggtctcctcccccagggtggccgagaggaggtttaggatttcgctgccctggcctctcagggccgcttttggcgctgctcaggcagagagcagcaatcccaccgatgatgacgtgcctccgtctggcagcgatgcagctggtggccctcagtctcagactggatatgatgatctcgactgaggcctcaatagccgatcttggaaacaaataggctatacaccaaagatgagagatgataccgtcgtgtaccaaattaataaatgtgcatcagaagtatggagtcctttaggaacctctgctgactgttgatggaatatggttggtttgttgacactgtcagtgcattgtttctgaagggatatgggcctgttaatttaaaatttgtattcactaatggttgggggaggaacggtggagaaactgagtcatgtatagttgttccttttgcaattgctgcatggtttttttcctgttccataagtcatttggcctttggatacttgatttcaaatgattcctgggttgtgtgggagtgaaatgtaggcaaattactagagatggcaatgggtaaatacccaccgggtattactactccatacccacgacaaaaaaataatcccgccgggtcattcatatacactggtgggtcacgtgggtatgggtcacccatcgggtcacccgtacccacaaaaattaaatatctatcaaaatagtatattatacaaatatcaagtatatccatctaa

SEQ ID NO: 154962 - DNA, 1742 bp, Zea Mays
atagtctactgcttgggaagggaaaacgggggtgcatttgttgggatttttccaactcaattccatccaatccaagagcaagtttcaccggattgattccccaccgcacccgaccacaaatcccaccaagcaaaccctaatccgtcggccatgtcgtcctcccccgcggcgctgcgcttctactgccaccagtgcgaccgcaccgtctccctcgcccctcccgcatccccggacgccgacgtcttctgcccccgctgcggcggcggattcgtcgaggagcttcctcccaaccctagccccgcgcctccggccgccgccttctttgccccgccctccttcgacatccgccaccccagcgacctctccgctttcttcggccccgcctcccccgagccgctcgccccaggcctcttcgatccctccaacttccttcacgaccacttcggcggcctcctctccggcggcgccaccatccagatcgtcctcgagggtgggcccccgcccccaggcctcaactttgccgactacttcgtcggctcctccggcctcgagcagctcatccagcagctcgccgagaacgaccccaaccgctacggcaccccgcccgccgccaaggccgccgtcgcctcgctccctgacgtcgctgtctcggccgacatgatgcaggccgacggcggcgctcagtgtgccgtctgcatggacgacttccacctcggcgccgccgccaagcagctcccctgcaagcacgtcttccacaaggactgcatcgtcccatggctcgacctccacagctcctgcccggtctgccgcttcgagctgcccaccgacgaccctgactacaatcacacccatcagcagcacggtgattcgtctgcccctgctcccccttcccccgctcccgcggtctcctcccccagggtggccgagaggaggtttaggatttcgctgccctggcctctcagggccgcttttggcgctgctcaggcagagagcagcaatcccaccgatgatgacgtgcctccgtctggcagcgatgcagctggtggccctcagtctcagactggatatgatgatctcgactgaggcctcaatagccgatcttggaaacaaataggtatgaacaacaaattgcagttattactactagggttcatcgcttgctgttatctgtttggcgtcacctacctatagttcaggaatcaggtagcaccatgcatttactatcgcatttgattacggttactgtattgactgccaaagaaaaagaaaaaggctctattgtgccatcattgttctacaaaagcgtattacaagagtgaatgaccatccttgttctatgtttacctgatattaacatggtatgcacttggcgtggatgataaccaagattcatctagggcaatcaatgggatgtaacttgcatgttgtaactgcgactatcactggaccgatctgttcttctcttgggttatcagtgtgtacggaagtgctattgatttagatgtctactatgggccttttgtttatctttcttggtttggtttgaaggtatagagctgtcaaaagggtctgcatttgtttaaccgtgtttgatttagttgtggtaacctgcaagctgcagtaggttgaccactaattatgttttgctcttgtaattctgtaggctatacaccaaagatgagagatgataccgtcgtgtaccaaattaataaatgtgcatcagaagtatggagtcctttagg

SEQ ID NO: 154963 - DNA, 771 bp, Zea Mays
atgtacttgttgatggcaaggtcaggactgacaagacctaccctgctgggttcatggatgtcatttccatccctaagacaaacaagaactacaggctgcttccgtcttcacccaatcagggatgaggatgccaagttcaagctctgcaacgggaggtctgttcagtttgacatcgcccttcgtggtcatgtttgttacaaaggagcagtttgttactgctccgcagcaagatttgttactgctccgcaacaagatttgcttgtaagttcaaaacatggagcaggcaataagtctgagaaggataattccacattattagataaagctggtaatgctcctgttgtcaaagaacaatcaattgatgcccatgcaagcaaaagtagagctcaaaatggaaagaccatgcctaataatggtggatctctggctaacatgtggggccgtgcatcagctaaacctaagcctccaagtaccactaattctacagatgtagaaagtgttgcagctactcttgatgcacaaatatgtgcaaaggaagaagcagatggagatagcagcgatgatgaacagggaataaagtacaagagggaatccaccaatgcaaataacagaaagtgaagagcagtatttgattttttggatgatgaggaagttgataatattataagcattgcatcccctgaggtaccaaaacaacataccccagaccctgttattgaaactgttgaagacactgaagtaaatcaaaagaacttggaaaataaagatgat

SEQ ID NO: 154964 - DNA, 341 bp, Zea Mays
ctgtcttaccgcgccgctgctgtcatcatcgtcatttatatctgaatatgtcaaccattattggaccagttctttgaccatgccattggtatcaacgttccaaggtcccgcttcctaccagttaaggcgacatcagatttgcagctagtacagatttgtatgctatgctgaataaaattgagtatgtgatgtgctctctatgcatctaaatgaaaacttctatttttgctttgcagtctgatctatataccttggttgatggcttcgttacacgtaattcagctagaacaaatccatcaaatccctcaattgaacttggtcctgagttcaagaaggttaga

SEQ ID NO: 154965 - DNA, 513 bp, Zea Mays
cgggcccacctggcagtgagacaagccgcggctggccgcttggtcccaccacccagtgaagccaagcgaggcataggtcccaatgggctggcgcggaacagggaaaaaaaaagagaatgggccgagaagggatttcggtagtgggcctgttcaggaaggtgattcgacccaggtcagttcaggtgagttctcttttttccctttttgttttcttgtgttcatttctatttcttgttttcatttcaaatttgaaatttcaaactcgaatttgagttgtggtttccacttcaagtatgcacgacccaaaaattcataatgggtgcatagaaaggtatcattttattgttaacttattattttataactttaagtaaatgcctataatcatgccataaagaagaattcattttaggagaatatcatttgtgaatgtgtgatcgaattaaaggttaaaatcaataacaatgaacctatgttgttttacttatttttagagaagtaacacatattccc

SEQ ID NO: 154966 - DNA, 108 bp, Zea Mays
tacaaagtaacatcaacagctacggtaacaggttcatggttggttaaatgctatattcccatgacacaaaaaaaattcagagctgatattcacataagaatggaataa

SEQ ID NO: 154967 - DNA, 297 bp, Zea Mays
atgccggttcgacgagaaaattcacgaacacaagctaggagaggacgctggcgctgctgctgttctgacgaagtaggatcaacccagatggaaaggaagcgggcagggcctgagcatggtgcagttcacggctgctcaccaacttggcgaagtccaaaccaaggcgagtccgacgagttcagttggggatgcatcgggattgaagaggtgctgggcaccagggcgagcgcgctggggtcgggcgacctcgatctgagagcgagggagaagctcagtgacggcgaagtctggaggtga

SEQ ID NO: 154968 - DNA, 127 bp, Zea Mays
gttagtaaacacgtgactaggcaaactatttacaagtatttcacctcctttctcactagctataaattaatccatctcaagtactaacgtcaacactctactccaatgcaacttttgcacaaggatc

SEQ ID NO: 154969 - DNA, 2077 bp, Zea Mays
gttcagaccacaggtaaatttatcagatttcgaatcgaatcaaactgtttcgcaagtaccgtcgacccttttgttatcgctaaaaacctcgatccaaaaatatctgtgattttctattataaaaagagagaaagaaataaaaaagagagaaaaatatcatcgctctttcctatcctctgcagccattctccctgatttttttccaccgcccatgggcctagatatcttttttctcagctctatcctctgccgtgcgtgcctggcctgctcgtgtaaaaatctcgccgccgcctccagtctcctttttctctgcagcgccgcggcttccctccccctgagctccctcagccatgacgcgtcttcctccctgcgcatgtccttctgctcggtcccaagctccttgtgcgcgcgctactcttccttcccatgttactgcacgctctaccttccctcccatggcgtccatctccctatgctcgccccttcccctgcttctcctccatggagcacccgcccatggcagccgcgtcctcgagctcggcttcgagctccatctccctacgcggcactccctccagctccttcctctccctctcggttctctgttggcccggtgctctgctcttcccatccacggtgtcgctgctacctctgctcggagtctcctgcgcgcagctcgccaggctctccctctcccatgcgagcgcctctgctccctccaccctgctcgcatggccgcgccggctccctctagtcggccgcgcgcccagccgatgtcccctgcgcgcgtgcctgcgcgtagctcgcgtcctgctcgcccctctgctcgccgagtccttctctagtccgcgccataaaattcgctcggccacggtctcgtcaaattgtgaagcttccttgccgtgcgctctggcatcggctaccgccgattccaccataaagttcacgagcgctccttgctcagtttgtttcgtagtgggcaatttctccacgtttcaattcgtgctgcttgcccttgtgcgctcgctcctcatgcatcgggtttcggcatgttcgcgtttaccgtcgagtcatcgaacctgtcatcccctgctcgacccacacctcgccagctcgctccagactcgatcttatcgtcgttccgtgtgtcatcaagaaatcacaagaatcgggcgaagacgaagttagccgcgtgaagttcgtgtggcacctgccaagcgctcgacaaattgtttgaatcagaaaatcattaccgatctcgcggattcgtgtcagctgttggaacagctgttggaacggtaagctgatttgctatttttattaactgatctgatgaatggattgattgaattagttgtccgtaaagagtgttttattcttagcatgggtgcgttgtcgaggtattagatgtatgtcgtgatgcctcgcttcatgcatcaattgagtctgcacatacgtatgaagtggtcgtgtcacgcgaaactcaaagtttaaaatgattattgtgtgaggagtggttaattgaataattagtctagtgtctcgctcatatagctgataaatacggtcgtggttatattaaatgattattaaaatgcatcgcaggtagtatgtagtgggtgcatatgtcgaataggtttaaattggctctttgatgagaagtgaggagaattaatagcatgaagaattgatttagtaatccaaacgattatccgataaggctgtcattgttgatttggtacgtgaattaaccacgtaatgcggagaaccagaactgagtcgaccacaagatggtgctgatgaacgaaactgaagatggacagacaaaacaagtatcagaacaaaggatggtcgtcaagtgatcgacgtctaacaaacactaacgtagtgtttatcccaggcaagcccccgtgcttgcaacccattccttgtgtttttaaataatttttacacactttaagtctagcgaaatgtgcattaggtttctaggcgttgcttggaaaccctttgatgcattgcctaccttgatatccatacctttatagatacttctaatgaagtatcaaaatatgattta

SEQ ID NO: 154970 - DNA, 1217 bp, Zea Mays
attattaaaatgcatcgcaggtagtatgtagtgggtgcatatgtcgaataggtttaaattggctctttgctgagaagtgaggagaattaatagcgtgaagaattgatttattaatccaaacgattatccgataaggctgtcatcgttgatttggtacgtgaattaaccacgtgatgcggagaaccagaattgagttgaccacaagatggtgctgatgaacggaattgaagatggacagacgaaacaagtatcagaacaaaggatggtcgtcaagtgatcgacgtctaacaaacactaacgtactgtttatcccaggcaagccccggtgcatgcaaccccttccttgtgtttttaaataatttttacatactttaagtctagcgaaaatgtgcattaggtttataggagttgcttggaaaccctttgatgcattgcctaccttgatatccatacctttatagatacttctgatgaagtatcaaaatatgatttacaaaaaatgcttatccctgcttagaccttgtagatagaggttgtcttttgcattaaggcctagctcaggggttatcttaaggaaggatgacttctacctgcaagaatattttcattgggagcgtggtgggatcttactgcaaagttccctataatgctcttttcatcctaaggaactgttgggggccttcgtcctccgaaggtcctcaaaaacatgatttgacaatgttttccaagtggattatgtgaacaggtaccttcggactcagaattacgaacatgaagtgcggtcaggacgaagcctgaaccagacgaaggacgggctgattaccaagctccacgaaggatggtgcacagccgaagctgtgcgcagggaagcttcgtcgcgatagcagagaggggaaccgacttaaagatgaaaagactacgtggaccttgtcagatttccataagtcattgacaaatgtaatggacataaatgtaattttacgtgggctgcgtcccgcgtctataaatagatgaacagtactcccgtactgttcacgctgacttggcatttgcttttgcgtcacgcttgtactttttatcttctctcaggaccgaaggtacatttgtaatttgaaatcatttctatttttccatgttaataaaatagaaatgattctatgatgatgcttatattatatttcatgctttatatgaatccttcgtcattacttgttatg

SEQ ID NO: 154971 - DNA, 2114 bp, Zea Mays
ttcagaccgcaggtaactttatcagatttcgaatcgaattaaactgtgtcacaagaactgtcgacccttttgttatcgctaaaaatctcgatccaaaaatatctgtgattttccattataaaaaaaaagagaaagaaataaaaaagagagaaaaatatcatcgctctttcctatcagctgcagccgttctccctgattttttccaccgcccatgggcctggatattttttttctcagctctatcctttgccgtgcgtgcctggccagctcgtggaaaaatctcgccgccgcctccattctcctttttctcgcagcgccgcggcttccctccccctgagctccctcagccatgacgcgtcttcctccctgcacacgtccttctgctcgatcccaagcttcctgtgcgcgcgctactcttccttcccatgttactgcgcgctctaccttccctcccatggcgtccatctccctatgcttgccccttcccctgcttctcctccgtggagctccatctccttgcgcggcactccctccagctccttcctctccctctcggttctctgttggccggtgctctactcctcccatccacgacgtgggttctgctccctctgctcggagtctcctacgcgcagctcgccaggctctccctctctcatggcgagcgcctgtgctccctccaccctgctcgcatggccgcgccggctccctccagtcggccgcgcgcccagccaaagtcccctgcgcgcagctcgcgccctgctcgcccctcttctcgccgagtactttccccataaaatttgctcgaccacggtctcgtcaaaccgtgaagcttcctcgccgtgtgctctggcatcggctgtcgccaattttgccataaagttcacgagcactccttgctcagtttgtttcgcagtgggctatttctccacatttcaattccgtgctgcttgccccgtgtgcgctcgctccagactcgatctcgtcgtcattccgtgtgtcatcaagaaatcccaagaatcgggcggattcgtgtcagttgttggaacggtacgtgaattaaccacgtgatgcggagaaccagaattgagttgaccacaagatggtgctgatgaacggaattgaagatggacagacgaaacaagtatcagaacaaaggatggtcgtcaagtgatcgacgtctaacaaacactaacgtactgtttatcccaggcaagccccggtgcatgcaaccccttccttgtgtttttaaataatttttacatactttaagtctagcgaaaatgtgcattaggtttataggagttgcttggaaaccctttgatgcattgcctaccttgatatccatacctttatagatacttctgatgaagtatcaaaatatgatttacaaaaaatgcttatccctgcttagaccttgtagatagaggttgtcttttgcattaaggcctagctcaggggttatcttaaggaaggatgacttctacctgcaagaatattttcattgggagcgtggtgggatcttactgcaaagttccctataatgctcttttcatcctaaggaactgttgggggccttcgtcctccgaaggtcctcaaaaacatgatttgacaatgttttccaagtggattatgtgaacaggtaccttcggactcagaattacgaacatgaagtgcggtcaggacgaagcctgaaccagacgaaggacgggctgattaccaagctccacgaaggatggtgcacagccgaagctgtgcgcagggaagcttcgtcgcgatagcagagaggggaaccgacttaaagatgaaaagactacgtggaccttgtcagatttccataagtcattgacaaatgtaatggacataaatgtaattttacgtgggctgcgtcccgcgtctataaatagatgaacagtactcccgtactgttcacgctgacttggcatttgcttttgcgtcacgcttgtactttttatcttctctcaggaccgaaggtacatttgtaatttgaaatcatttctatttttccatgttaataaaatagaaatgattctatgatgatgcttatattatatttcatgctttatatgaatccttcgtcattacttgttatg

SEQ ID NO: 154972 - DNA, 1569 bp, Zea Mays
attattaaaatgcatcgcaggtagtatgtagtgggtgcatatgtcgaataggtttaaattggctctttgctgagaagtgaggagaattaatagcgtgaagaattgatttattaatccaaacgattatccgataaggctgtcatcgttgatttggtaggatattttggtaatcaaacctgaaatgtttgattaattgttaacatgtaaaatatatgaggtgtgaaataaaattaaataattctttgtgagcgatggggtataatttataaagagggggataagtttagaatttaattaattagctgataagttgtgtttaggctaagtgtattaaaggtgtatagtttgttgctcgtaatgtttgcgttaggttcgtttaatctagagaagcgtaaatattgcgcttagtcgtacgtcgataactagtgttttcgtatgaaaatagtacgacacttcatcactaagtgtttaattcttgccggtgtagcactatttagatctatgctattcctgtctatatgcattcatgtgcataatgcatttcattcaggtacgtgaattaaccacgtgatgcggagaaccagaattgagttgaccacaagatggtgctgatgaacggaattgaagatggacagacgaaacaagtatcagaacaaaggatggtcgtcaagtgatcgacgtctaacaaacactaacgtactgtttatcccaggcaagccccggtgcatgcaaccccttccttgtgtttttaaataatttttacatactttaagtctagcgaaaatgtgcattaggtttataggagttgcttggaaaccctttgatgcattgcctaccttgatatccatacctttatagatacttctgatgaagtatcaaaatatgatttacaaaaaatgcttatccctgcttagaccttgtagatagaggttgtcttttgcattaaggcctagctcaggggttatcttaaggaaggatgacttctacctgcaagaatattttcattgggagcgtggtgggatcttactgcaaagttccctataatgctcttttcatcctaaggaactgttgggggccttcgtcctccgaaggtcctcaaaaacatgatttgacaatgttttccaagtggattatgtgaacaggtaccttcggactcagaattacgaacatgaagtgcggtcaggacgaagcctgaaccagacgaaggacgggctgattaccaagctccacgaaggatggtgcacagccgaagctgtgcgcagggaagcttcgtcgcgatagcagagaggggaaccgacttaaagatgaaaagactacgtggaccttgtcagatttccataagtcattgacaaatgtaatggacataaatgtaattttacgtgggctgcgtcccgcgtctataaatagatgaacagtactcccgtactgttcacgctgacttggcatttgcttttgcgtcacgcttgtactttttatcttctctcaggaccgaaggtacatttgtaatttgaaatcatttctatttttccatgttaataaaatagaaatgattctatgatgatgcttata

SEQ ID NO: 154973 - DNA, 493 bp, Zea Mays
attattaaaatgcatcgcaggtagtatgtagtgggtgcatatgtcgaataggtttaaattggctctttgctgagaagtgaggagaattaatagcgtgaagaattgatttattaatccaaacgattatccgataaggctgtcatcgttgatttggtacgtgaattaaccacgtgatgcggagaaccagaattgagttgaccacaagatggtgctgatgaacggaattgaagatggacagacgaaacaagtatcagaacaaaggatggtcgtcaagtgatcgacgtctaacaaacactaacgtactgtttatcccaggcaagccccggtgcatgcaaccccttccttgtgtttttaaataatttttacatactttaagtctagcgaaaatgtgcattaggtttataggagttgcttggaaaccctttgatgcattgcctaccttgatatccatacctttatagatacttctgatgaagtatcaaaatatgattta

SEQ ID NO: 154974 - DNA, 1249 bp, Zea Mays
ttcagaccgcaggtaactttatcagatttcgaatcgaattaaactgtgtcacaagaactgtcgacccttttgttatcgctaaaaatctcgatccaaaaatatctgtgattttccattataaaaaaaaagagaaagaaataaaaaagagagaaaaatatcatcgctctttcctatcagctgcagccgttctccctgattttttccaccgcccatgggcctggatattttttttctcagctctatcctttgccgtgcgtgcctggccagctcgtggaaaaatctcgccgccgcctccattctcctttttctcgcagcgccgcggcttccctccccctgagctccctcagccatgacgcgtcttcctccctgcacacgtccttctgctcgatcccaagcttcctgtgcgcgcgctactcttccttcccatgttactgcgcgctctaccttccctcccatggcgtccatctccctatgcttgccccttcccctgcttctcctccgtggagctccatctccttgcgcggcactccctccagctccttcctctccctctcggttctctgttggccggtgctctactcctcccatccacgacgtgggttctgctccctctgctcggagtctcctacgcgcagctcgccaggctctccctctctcatggcgagcgcctgtgctccctccaccctgctcgcatggccgcgccggctccctccagtcggccgcgcgcccagccaaagtcccctgcgcgcagctcgcgccctgctcgcccctcttctcgccgagtactttccccataaaatttgctcgaccacggtctcgtcaaaccgtgaagcttcctcgccgtgtgctctggcatcggctgtcgccaattttgccataaagttcacgagcactccttgctcagtttgtttcgcagtgggctatttctccacatttcaattccgtgctgcttgccccgtgtgcgctcgctccagactcgatctcgtcgtcattccgtgtgtcatcaagaaatcccaagaatcgggcggattcgtgtcagttgttggaacggtacgtgaattaaccacgtgatgcggagaaccagaattgagttgaccacaagatggtgctgatgaacggaattgaagatggacagacgaaacaagtatcagaacaaaggatggtcgtcaagtgatcgacgtctaacaaacactaacgtactgtttatcccaggcaagccccggtgcatgcaaccccttccttgtgtttt

SEQ ID NO: 154975 - DNA, 315 bp, Zea Mays
atgcgtcagggtcaagaaagagagggagtctgccgtcgtggtgtgtcgtctacgcaatcgttcagggttcaagggtcgttgaaggaggaccacgggagccggtgggtcgcgtacgagaaagccctcgggcgcgagggtcaccgaagccttgtgaatcgctcactagagttgcggatcgtcgccgagccacgccacgacggggacgacggcaccagcgccaccgctttggaggaatttgtcgccggtgtaggcgcccaccgtggatccgcttcacaacgtcgtcgagcatgcattgttgcagtatatggtgattga

SEQ ID NO: 154976 - DNA, 796 bp, Zea Mays
actgcatcatgtgagtttcagtcatacttatcatctactgaagtgaatccatcaaaaagtgagttgctcatctattggatgaaacaatgtgagtttggctgataaggattttgatttgctaagctggtgcaaggttaactcacatagatttccagtggtgtcgaggatggcaaagttcttaattgtgcccgctacctctgtgtcttcagagtctacttttcgcactgggggtcgaactctagatgactatcgtagctctctaagcccttctatggtagaggcattgatatgctcctctagttggattcgaagtgcacatgatgggagtcatatgtattgtagtatgatattcttctacttttttattctagtgtgttttctatttttttatcaatgtaatgctctatttattttttggagcaagatgaagaagacgatattgaaaacaatgcatttccaaaaagtttggtggagagcaactagatcttgatatcttttggacaattggatggttgatcacatagcaagtcgcatggatgatggactcatcagtcatcactcatggacatgttcacatggatgagcacacaacaagtggcatttgattctggaattttggatggtggtagttgcatgccacttgtatttgtgtaactgtgggctgtcacctgttaggttgtgcggctgtggcatggttctttacttcttttgtttatctcttcactgtttagacttgagaatttgtagttgcattcgtattgcagactttattgtcttactgttggagatggtagtg

SEQ ID NO: 154977 - DNA, 348 bp, Zea Mays
atggattcattatcagctcgttcagctgtgcaagggaaagggaggagtgaaagagatgagactgattcagagagcaactcttttgaccataatgatgacatgtctgaggatgagatgacagtgctaggtgggaaagatgctgatgttgttacagttaatgaatctgatggcgatagagccaagaaaagtcgtcgaggggtgaagatgccagttaaggttgaggggggcagcaagagcaaatccaaggtttgggaggtctgtgataagattaatgtgcccaataagtcagataaggagaatccgctattgaaggcaaagtgcaaatattgtaacaagctttatagttga

SEQ ID NO: 154978 - DNA, 117 bp, Zea Mays
cgcgggcgggtatttattatactcgatccgaatccaacctgttgccatccctagctcttgtatccaccactagctattatggaaaacctcgttttagagcaagtgggaagaaagtcc

SEQ ID NO: 154979 - DNA, 1101 bp, Zea Mays
atggccctgccgctctacggctgcaggtcctgcgctgtgcatgatgccatcatcttctgccactgctgtgacgccaggctgtgcctgcactgcgacgccgccgtgcacggggctaccgaggcgggggcgctccacccgcgcgcccggctctgcgacgcgtgcggcgccgcgccggccgcgctgcgctgcgacggcaccgtgacgctgtgcgccgtgtgcgtcggccgcggtgctcccggcgtgacccgcacccgcgtggccacgtacaccggctgtccgggccctgctgagatggtgcgcctcatttccgtagacccaccgcagctggagcaggactttgaggcctggctcgcagacaagctcccgcgtttggtcgtggaggaggatgttgggctcccgccagactgggatgtcgccgtggaaactgcaaggcttgagaagatgctggcagaatgctgtgagcctgagactgaggtagaaatataccactgatctgttttttttcttcttctaaataaatataatgggttgacaatggcttaccgccggagaagataaatttgatgcaggaagctgaccagcagcgactgcagatgcagatgctgctgcaagatgcaagcgctatggccaagaagcgagaggggagagagagggccaaacaaagatatatcgagaagaggaagaatagaaggttctgcaagcagatcatgtatgcttctcgtaaggccagagcagacacgagatggcgagtgaaaggccgctttgccaagcaggcttccgctagcttctagtgatctccctgatctgctttcacagtcatttttgtgttgtcatctcgctcgcactttgctcaatccctcttcggcttcaacaacaaatttctcttgggtaatttattttccataattacatatattttccctgcttgtcagatgtaatatttttctttccttttattcaagaactaaatgcaattcaatacgtatgtggatcggactatatatcatcgataaacatgagttagtttccatgacactctgcacagctaaactaggcaggcttaacatgttaccggccatagcacaatggctatgtctcgga

SEQ ID NO: 154980 - DNA, 252 bp, Zea Mays
cgatggtcatgccgtgacgttttctgcccacagggaagtgcgatccgcggtggggcccataactccggtgagaaatcgcggtgacgccaagggtcttccccatcaacgacgccacgacgagcacccatacgcgcaggcgattctccctagccctctgccttggtcagaagtcgacgtgctcgcatatccatttgcggggtatctctctctctgtctctctttctcctttcaccgctcggcgtgggcgtgggt

SEQ ID NO: 154981 - DNA, 204 bp, Zea Mays
cgagtctagttgcatggctgttgcagcgatcctaaatttatggaggaaataaagcatttaaaaatagaaactgccacacatatctttcctaaatttatgcgcatgcaagggacgtgtttgactcatgcatgcatttgcctaattttttgatctcaataaccgcatgcatgcggctgccatgtttttaggatctgtcataaaaat

SEQ ID NO: 154982 - DNA, 572 bp, Zea Mays
actaattaaaactacaccgggctgaaatatggagccatctcaacttgttttactagctccaccattttttttggagtggacccaattccaaagagggccgaattatcatccggttcggaccggttttcacgcctccgaaggccgggcaggcaggcagcacccgcggagacgcggagcctccactcctcgtatcgcttcctcctctggatctagccgacgccgccctcatcctgtcacccaccgacgtcgccgtcgccgtcgccacctatatcacccaccgcctctgaagaagaagacgcggatccgagggtagttaactgctgaagaagaagatccggtacggagaagacgcggagcagtacttctccgatctggatgttggtaaggttcatcctgatttgaacggcaatctcactggtatgtccttccgtgtactcgaaccgatgaacagctagcatttcttggttttgaattgatacgtcctgcatactatactgataattatatatctgaatgccaagctagtcctgtaattatatctctctctctatatatactagataacgagttac

SEQ ID NO: 154983 - DNA, 707 bp, Zea Mays
actaattaaaactacaccgggctgaaatatggagccatctcaacttgttttactagctccaccattttttttggagtggacccaattccaaagagggccgaattatcatccggttcggaccggttttcacgcctccgaaggccgggcaggcaggcagcacccgcggagacgcggagcctccactcctcgtatcgcttcctcctctggatctagccgacgccgccctcatcctgtcacccaccgacgtcgccgtcgccgtcgccacctatatcacccaccgcctctgaagaagaagacgcggatccgagggtagttaactgctgaagaagaagatccggtacggagaagacgcggagcagtacttctccgatctggtgagcttccacccattttggattctgtccgtcgccggcgcgcggacctccctcctcctctcttggtccgccgcctgttcatcccgcccgcgcctcctggggcttcctatccacctccgctcgaacggcctccctcacctcgctgccggtcgcgggcaggcggcggctccaggtgctcatggcccggccggagtccacatcttaacgaaggaaattctggtgttatttaaactccaaaggaacaaatcaatgtgcatgtgcttggatttcggaatcgtctttccagtttcttacaatataatagtagttgctgttcgataattcaccaactga

SEQ ID NO: 154984 - DNA, 1691 bp, Zea Mays
cacaaacaacacctctccatcgcgagctgcgaaagacgagcagagggagggagggcaaagcgaagagaaacacaaccgcgccacccccgcacccacccacccacccacgcacccggagcgaaggggagaccggccgcaacagaaggcagagagagctagagccccgcgcgcggcaatgggcaacagcatcggcgggcggcgcaagggcgccaaggtgatgcagctggacgggacggcgttccgcgtgaagcctccggcgtccgcgggcgcggtgctgcgcgaccacccggggttccagctgctcgagtccgaggaggtgaagctgctgggcgtgcgcgcccggccgctggcgcacgacgcacagctacgcccgggcaggctctacttcctcgtggtgctgccccggccgtccgtcccgccgcgccgcgcctggtccggcgcgctccaggtgggcgcgcgggagcggctggagtcgctcatgctcacgcgccgctccacctccgacctctccctgccggcctccgcggccacggccacggccacggcgccgccgtccccgctctccgagtctgagggcgggcctgtccggctccggatgcgcttgcccaaggcgcaggtcgagaggctcatggccgagagccgcgacggcgccgaggccgccgcccggatcatgcagctctgcgccgccgctaataaccccgccagcggcgccgccacgcccgagagggggatcttgcggacgcccgagcggaggagcccgcggttcgtgcccactccggactggggcgtcggcgtcggcgccaccgccgcctcgtccccgcagacgcccgagcggagccccaggttcgcggcgatgacgcccgactgggggactgatgggttcatggtgccggcgggcgttgcgacggcgcccaggacgccggagaggtggcccgcgctgccccgcaccccggagtacgcgtcgcccgacgtcagggccagccggaaagagaagcgaacgcggttcgtggcgctgccggatgagataatcgcgtgacttcttcttcgtctctcccgcgcgcgcgcgcgccgggatgaaacgatcgaggcctgcggttgcttgatttggaggagcgtggcaagcaaaagcatgatgtgctggggtgacgatcagagagcccagaagatgtactagactgattgatggtccgcagcagggtcccagacgctctgtcccgtggttggtcgttttcctcggttgcgagcgagccggggaagagcgcctgctgtgctgccggccggcccacgacggtagcggcggcagctccctgtcttgcctccgacgacgacagggactcaagtgtgtcgtcttcttttttttcttcttcttctactgtggtctgtggtctatgtatcttctacatatttaaggctatcttgctcgtcctctctagatgttgtaggttgctgaagaagcttaggatataaatacttctacatgtatatgaaaacacttgcggaggccatgacagtagccaacagcttcgcgtgtcatcgtctgcgtcgtttaattttactctagcattcgtctcaatccacatgcatcaatatggattgaagtgaatactaagtattcaaacaatgcctcgtaattctgttcatgtaaatattccgtcgaatatgaataaggtttcgcatgtttttggtggctc

SEQ ID NO: 154985 - DNA, 1323 bp, Zea Mays
atggctgctgctctggccgccatggtcgtcctcgcgcttcgaacagtcgccggcgcagcctcgacgccggctgctgcggcggcgacgacgtccaggagtccggtcatctacattttcggggactccatgtcggacgtgggaaacaacaactacctcctcctctccctcgccaagtgcaactacccctggtacggcatcgattacaagaacggctaccccaccgggaggttcactaatggcaggaccatcggagacatcatggccgccaagtttggctccccgccgccggtgccgttcctctccctgtacatgaccgacgacgaggtcctcggcggcgtcaacttcgcgtccggcggcgctgggctcctcaacgagactggcatctactttgtccagtacctgtcgttcgacagccagatatcgtccttcgagcagatcaagaacgcgatgatcgccaagatcggcaagaaggccgccgaggagactatcaatggcgcgatcttccagatcgggctcggtaagaacgtagactcagacctctctccggctcgttcgacgcacgctagcaagccgcgaagcatcaatcagcttgacacggcgcgagcgctctgcttcgcaggaagcaacgactacgtcaacaacttcctgcggccattcatggcggacggcatcgtgtacacccacgacgagttcatcggcctcctcatggacaccatcgacaggcagctgacgagactgtacaagctcggcgcgcgccacatctggttcagcgggctggcgcctctcggctgcatcccgtcgcagcgcgtgctctcggacggcggcggcgagtgcctggacgacgtgaacacgtacgccatccagttcaacgccgcggccaaggacctactcgaggggctgaacgctaaactgcccggcgcgcgcatgtacctctccgactgctactccatcgtcatggagctcatcgaccaccccgagaaacacggtagaaataagaagcacgcacgctcgcgacgccatggcattaattccctgctcgatcacagcagcagcaggttcaagacgtcgcacacgtcgtgctgcgacgtggacacgacggtggggggtctctgcctgccgaccgcgcagctctgcgccgaccgcagggacttcgtgttctgggacgcgtaccacacctccgacgccgccaaccaggtcatcgccgaccgcctcttcgccgacatggtgggctccggcgccgtcgtcccgaggaacggcacgtccccaccccgagtggttagcgcgccggcgccggcgcacgcctcgcctgcacgcatgccgtga

SEQ ID NO: 154986 - DNA, 1149 bp, Zea Mays
gaagtcctcgtcgatgctgaagacgtggtcggcagcgccgccgccgttgaggctgttcatgacggatgccttctggtagtcacccacgcgcttctcgaagaagttggtcttccccatcagcgagatgagctccatccagtcgaagggattggtcacgttgtacatcttcttgcacccgagcgccatgagcaggcggtcggccacgaattcaatgtactggctcatgagatccccgttcatgccgacgagcgcgacagggagggcgtcgcagacgaactcgcgctcgatgtcgacagcgtctgcgacgatctcgcgtacgcgggcctcgtcgagcttgttgcggagaagctcgtagaggaggcaggcgaaatcacagtggaggccctcatcgcgggagatgagctcgttggagaaggtgaggcccggcatgagcccgcgcttcttgagccagaagatggcgcagaaggaccccgagaagaatatgccctcgacgcaggcgaaggcaacgatgcgctcagcgaagcgctccccgccgtcgatccagcgcatggcccagtcagccttgcgccggaccgcgggcacggtgtcgatggcgcggaacaggcggtccttctcgacgtggtcgcggatgtaggtctcgagcagcagcgaatacatctccgagtggatgttctcgatggcgatctggaagccgtagaaggcccgcgcctcggcgacctgcacgtcggtcatgaagcgggaagcgaggttctcgagcacgatgccgtcggaggcagcgaagaaggcgagcacgtgggagatgaagtgccgctcgtcgggggacagcgcctcgtcccagtgccgggcgtcggcagagaggtcaacctcctccgccgtccagaaggaggccaccgccttcttgtagaactcccagatctgcgggaaacggatcgggaacatggagaagcggtcggaggactccgccagcagcggctcctccgcgtcgcacgggggcaacagcgtcggcgcggcaggcatcgtcggaggattgtggggacggttgctagtggggaattgggcgaaagttgtgtgatttagggaggagagcagggaggcgggggatttataggaatggtgggaattagagtgcagattttgaattgggacgga

SEQ ID NO: 154987 - DNA, 243 bp, Zea Mays
atgattcttaagctatgcgcatgggagaggctggaccatgggtcccgatcgaagaggaaggggtcgtattctggacgagaaaatatctgtgcgcatgacggctctaggcaacagaagcgagtcctggagaagatgactcagctcattctgttcatgctcgtgaacaagggagaggaagctggcaagggggcccatgtgtcagcacggttgagcaaagacgctagcgcgtgcggaagcacatga

SEQ ID NO: 154988 - DNA, 971 bp, Zea Mays
ctccgcctcgccatctacctctccaccaccgtccacacacccacgcacacacagagacccttgcattggggccgatcgaactcgccggtgattccttcgtctactcgactcgttggtattcggcctcggcagaaagtttgcgcaaacatgcagcccaccaccaccacggagatttggcagtggcagtgtggcacgtgcagagctgactggaagatgatgcgccagctgaccacctgctgcccgcacgtcggccgctgctgtcagggtcagggtgctccgcctccgccgtctgcagggaaccctcctcactgccactgccatcaccatcaccatcaccaccaccgccatcgccatcaccaggagcagggtaccaccaccgccgccatcaccaccaccggccgggctttggcggcgggggccgagggttccaacgccgggtctgctgggcgtcacaccaccatcgctacactgaatcctgctgcccctcccgccgtcgcagaggtcttctgggacccggacccctacctgatggtgcagcagctcagggagttcgagaccctgaacgacgggctggtggcgctcagggtgcagctgcaggagtacgcggaggaaatcagcaagagcaaggacaccaacgccgggatggactggctcctcgctctcccggccagcgtcagggacgtcgtcatcatggccagggacgtcatcgagtctttctttgtcatctccactggcgccgcaccgccataagcagctttgcagctgtagtcatatatggatattattatatcattatacagtgtggaagagtcagttcgtcttttttctcatgtcatgtactcatgtgtgagaagtttatattactgtgcagttttcgtgcttgttttctggtattagatttgcgggttattatgtaagtctggtatataaaattataatcaatacattatgaggatcctccagctgcttaa

SEQ ID NO: 154989 - DNA, 1101 bp, Zea Mays
ctccgcctcgccatctacctctccaccaccgtccacacacccacgcacacacagagacccttgcattggggccgatcgaactcgccggtgattccttcgtctactcgactcgttggtattcggcctcggcagaaagtttgcgcaaacatgcagcccaccaccaccacggagatttggcagtggcagtgtggcacgtgcagagctgactggaagatgatgcgccagctgaccacctgctgcccgcacgtcggccgctgctgtcagggtcagggtgctccgcctccgccgtctgcagggaaccctcctcactgccactgccatcaccatcaccatcaccaccaccgccatcgccatcaccaggagcaggtcaatgtcctatctactccttccgtcccaaaacttctatgcttatcaccatcaccgccattccattagatcgacttgaccaagtgtcttgctccgccgcccttggacaagataacaaccttatcacagtacacttctatgctgcagggtaccaccaccgccgccatcaccaccaccggccgggctttggcggcgggggccgagggttccaacgccgggtctgctgggcgtcacaccaccatcgctacactgaatcctgctgcccctcccgccgtcgcagaggtcttctgggacccggacccctacctgatggtgcagcagctcagggagttcgagaccctgaacgacgggctggtggcgctcagggtgcagctgcaggagtacgcggaggaaatcagcaagagcaaggacaccaacgccgggatggactggctcctcgctctcccggccagcgtcagggacgtcgtcatcatggccagggacgtcatcgagtctttctttgtcatctccactggcgccgcaccgccataagcagctttgcagctgtagtcatatatggatattattatatcattatacagtgtggaagagtcagttcgtcttttttctcatgtcatgtactcatgtgtgagaagtttatattactgtgcagttttcgtgcttgttttctggtattagatttgcgggttattatgtaagtctggtatataaaattataatcaatacattatgagg

SEQ ID NO: 154990 - DNA, 1783 bp, Zea Mays
cccacacacattgcctcaggtactccatcacacacctgaaaaggataaaatgccaacaccaacaatgggtaccgaggatatagatgtcacacatagtgcctccaatgtcagcaagaagaggaaacataagcataaaaacataacaaaagcaaagaggagcaaaaaaattcacaacagaaaaacatagaagatgatggtcttgatcccctttggactcccccctttcatcaacgatctccaccaccagttccaaataataaacaatttgtgccagggcaggctttagcatctagtgcattgcttaagaggatgggtaaacagagccattgtttccacaaatggtattttgctatgaccacaccaatatctcgaaggcaaagtgccacacacttcatggtacgatacgaagaacatgattttcttgaaaaatctggggtctatgcagtagaattcagtgatgtatttcacatctacaatgatcttgcccttgacatatccttacatcggagttggatgctggcttttggtgcttatgtcgacaaaaaaggtcgccataacaataattttggtcgcacagttatatggaaacattttcagggtcgtgttggttttgcaacctgtccattattgcttgatgagatagcaaatgtccgagaatggttgctcgacttcttcatgaatgaggtggggacgtcgtttgagagggccgatgaggtcatcttcgaggaggaggaagatgatggacagacaacgaggacacgccccgaggacccctcacctatcactagcggcatggagagtggcagggaatcctcatcgttgtaccgacgtactggtggaaagtgtttatctgtagaatgcactgacaaggttggtgaaattgccaagagccatggcttgaagcttcatatcgatggagctcgcatcttcaatgcgtctgtggcacttggagttcctgtagatagactcgtgaaagctgctgattcagtttcagtatgcctatcaaaagggttaggcgcacccgtcggatcagtgattgtcggttcgaaggccttcattgacaaggccagaattctccggaagaccctaggcggtggaatgagacaggtgggagttctttgtgctgctgctcatgttgtcgttcgtgacactgtgggaaagcttgcggatgaccacaggaaggctaaagctttggcagagggactgaagaaaatcgagcagattacagtggacttagcttcggtcgagaccaatatgttcaagctctgcaaggtgaggtatgtttagtttggccagaaaggcatcccctacctgaacaccaatgacggtcgcaccatccgctaccccgacccgctcatcaaggccaacgacaccatcaagatcgatctggagaccaacaagatcatggacttcatcaagtttgacgtcggcaacatggtcatggtgaccggcgggaggaacatagggtgtgtaggagtgatcaagaatagggagaagcacaagggcagcttcgagaccatccacgtgatgcttggagctttttgctatgtctagttttctcctatttgttgtacaggaaaacatagaatggaattcaaatttggtggccgcaaaagtgtggagacttgaattcatataaagttaggcttaacattagtgcaaacagttgtattttagtttagatttagagtacacttatgtatgtgttgtttgacaatgcttatttatgatatattgaatggtacttatttatattatattaattataatgttgttcaatata

SEQ ID NO: 154991 - DNA, 3370 bp, Zea Mays
cccaaaacccactccgcctcctccgtgtacggtgtaccccatggcgcccgccgcggccgtcatcggcgctggagattccgatcgtctcgcgcgcgaggtggcgcgggtgctggacgagtgccgcgcatcccacgccgtgcaaccgcgtaagctgcgggagctcgcggccctccgctcctcttcaggaggcggcggccgcctcttcatcgcagccttccacgtcgctgtcacgccgctcttcgccctcgcccgccgatccgctgaatctgaccgcgtcgcccgcttcatctctgccttcgcgtccgcttccgcatcatcggccgacgatggtgggaacgggttcctcgaggagttccttcggttcctcgtcaccgcgtccaaggccgcgcaccgtcccgcgcgattccgcgcatgccaaatcatctctgagattataatgcggctgccagatgatgctgaggtgagcgatgagatttgggatgaagtaattgatggcatgaaggtccgggttcaagataagaatgctgcaattcgcacttatgctgtgcgagcattgtcccgttttgcagttgaaggagaggatggtggcattgttgacctattcctcgagaccctagacaatgagccgaatgctgaggttcggaagacaatagttttttctcttccaccatcaaataatacactagagagcgtagttgaatcaatgcttgacattagtgaatcagttagacgagcagcatattctgtgcttgcaactaaatttcccctgcagactcttagcattaagcaaaggactactgtccttcacaggggcctatctgataggtctgcttcagtaaacaacgagtgcctgaagatgctgaaggatgagtggcttgttaagtactgtggaggggatgtgatttcccttctcagatttcttgatgtcgagacatatgaatcagttggagaatctgtaatggcagtgcttctaaaagatggtgctttgcgagtgcaagatgggcacagtattaggcagtacttcactgcaaatggtgaaaaagcagaacgagattccaatattcaactcatggatgctgaggttgctctttactggaaaatcatgtgcaagcatttgcaagctgaagctcaggtcaaaggctcagaggctgcagcaactacaggtgcggaagcagcggtatatgcttctgaggctactgataaaaacgaccttctcgacagtgtccttcctagcacaattactgattatgttgatttggtaaaggcacacctttctgccggaccaaattatcacttcacatcaaggcaattattgctacttggtgaaatgcttgagttctctgatactatgaaccgaaagattgcaagttcttttctgcatgagcttctcgtcaggcctcttgaacatgaagttgatgatgatgggaaccagattgcaattggagacggtgtgagtcttggaggagacaaagactgggcgaaagcagtggcggagttggccaaaaaagtgcattcttctgttggtgaattcgaaatggtggtttccactgttgttgaagagctggctagaccttgcagggagagaacagctgacttcatgcagtggatgcactgtctcgccgtgacaggtcttctgcttcagaatacttcaaccttacggaatctccaggccacagcaattgagccttcagaactgcttcactctttgttgcttcccgcaaaacaaaatcatgttgatgtacaaagggctgctttaagatgcctttgtctccttggactgttagagaacagacctaatgcagagttggtgaagcagctacgcttatctttcatcaatgggcctgacttggttagtgccatagcatgcaaggccttgattgaccttgtaacttggcatgggccacaagaaatagatcgagccattggaattgaatcgccagatcctagctacgaaaaatctcagttcactcaagttgacctctctgatatgaatgatgatgatctaaacattggagttcttgatattttattttctggatttcataaagatcactgggaattcgatctagagggtgacaatcatgataatgtcccaaccattcttggtgaaggttttgcaaagattcttctcctcagtgggaattttgcaagtatacctgctgatttgcatactgttatcctcgctaaactcattaaattgtatttctcagaggaaactaaagagctcgaaagattgaaacaatgtatgtctgtcttctttcagcactatccagcactttcagataaacacaagagttgtatctgcaacgcatttgtacctgtcatgaaagccatgtggcctggtttatatggtaatgctgggggtagcactcatgttatttcaaagagacggaaacttgcggttcaagcttctcgtttcatggtgcaaatggtgcaaacccaattattttcaaccgaaagtatggaccaagcttcaaaaagttctgaaagtgcttcaggtttagcagatgcgtcaaacaattttgacatcagcgaggaagggcttgctatccgtatagcactagaggtagccagttgcccagataagaagaccgcagctgggaaagcatatgctttggccctgtgcaaggttgtggtccttctaagattccggcaatcagaacagaaggccatcaagtgcatgagaggccttgtgaatcatttggctgcttcagtggcttccgacaaggagctcgggaaggagctagctcaaatggctgcacggcttagatcgcttgatgcctgtccagacgaagaacttgcacaagatgacgcagatgccatattcaagaaactaggattcgatgatggcttcaagttggacaccaatcaagcagtgcctcctacaccagcaccacggtcagtccggcctccggctcctgccaggagaagagcgagacaggcaccgtcctctagcgatgacagtgacgaggaagcgggagaagctgacgtgcctgcaacatcggcaagcagggttccagccactcccagtatgactgctgctgcacgttctcagagagcaagcaagactgctgctctgagcaagatgtctgcaaaacctgctaccgcgtctgatgacagtgagctggacgggcagtctgacgtcacgagcgaggaggatgcatccgatgaggagtcgttatagccttataggttgctgttattgtctcgtgtaatcgtggactggagtttctgatgacgttgttgagcggaagaaccaagtaatctaactaaattaattacagcggtgacatattgtcactgcattatgtatttctttcgtgttactaagtatgatttaaagccttcatttgcgtttgagctgcagcaa

SEQ ID NO: 154992 - DNA, 3362 bp, Zea Mays
cccaaaacccactccgcctcctccgtgtacggtgtaccccatggcgcccgccgcggccgtcatcggcgctggagattccgatcgtctcgcgcgcgaggtggcgcgggtgctggacgagtgccgcgcatcccacgccgtgcaaccgcgtaagctgcgggagctcgcggccctccgctcctcttcaggaggcggcggccgcctcttcatcgcagccttccacgtcgctgtcacgccgctcttcgccctcgcccgccgatccgctgaatctgaccgcgtcgcccgcttcatctctgccttcgcgtccgcttccgcatcatcggccgacgatggtgggaacgggttcctcgaggagttccttcggttcctcgtcaccgcgtccaaggccgcgcaccgtcccgcgcgattccgcgcatgccaaatcatctctgagattataatgcggctgccagatgatgctgaggtgagcgatgagatttgggatgaagtaattgatggcatgaaggtccgggttcaagataagaatgctgcaattcgcacttatgctgtgcgagcattgtcccgttttgcagttgaaggagaggatggtggcattgttgacctattcctcgagaccctagacaatgagccgaatgctgaggttcggaagacaatagttttttctcttccaccatcaaataatacactagagagcgtagttgaatcaatgcttgacattagtgaatcagttagacgagcagcatattctgtgcttgcaactaaatttcccctgcagactcttagcattaagcaaaggactactgtccttcacaggggcctatctgataggtctgcttcagtaaacaacgagtgcctgaagatgctgaaggatgagtggcttgttaagtactgtggaggggatgtgatttcccttctcagatttcttgatgtcgagacatatgaatcagttggagaatctgtaatggcagtgcttctaaaagatggtgctttgcgagtgcaagatgggcacagtattaggcagtacttcactgcaaatggtgaaaaagcagaacgagattccaatattcaactcatggatgctgaggttgctctttactggaaaatcatgtgcaagcatttgcaagctgaagctcaggtcaaaggctcagaggctgcagcaactacaggtgcggaagcagcggtatatgcttctgaggctactgataaaaacgaccttctcgacagtgtccttcctagcacaattactgattatgttgatttggtaaaggcacacctttctgccggaccaaattatcacttcacatcaaggcaattattgctacttggtgaaatgcttgagttctctgatactatgaaccgaaagattgcaagttcttttctgcatgagcttctcgtcaggcctcttgaacatgaagttgatgatgatgggaaccagattgcaattggagacggtgtgagtcttggaggagacaaagactgggcgaaagcagtggcggagttggccaaaaaagtgcattcttctgttggtgaattcgaaatggtggtttccactgttgttgaagagctggctagaccttgcagggagagaacagctgacttcatgcagtggatgcactgtctcgccgtgacaggtcttctgcttcagaatacttcaaccttacggaatctccaggccacagcaattgagccttcagaactgcttcactctttgttgcttcccgcagcaaaacaaaatcatgttgatgtacaaagggctgctttaagatgcctttgtctccttggactgttagagaacagacctaatgcagagttggtgaagcagctacgcttatctttcatcaatgggcctgacttggttagtgccatagcatgcaaggccttgattgaccttgtaacttggcatgggccacaagaaatagatcgagccattggaattgaatcgccagatcctagctacgaaaaatctcagttcactcaagttgacctctctgatatgaatgatgatgatctaaacattggagttcttgatattttattttctggatttcataaagatcactgggaattcgatctagagggtgacaatcatgataatgtcccaaccattcttggtgaaggttttgcaaagattcttctcctcagtgggaattttgcaagtatacctgctgatttgcatactgttatcctcgctaaactcattaaattgtatttctcagaggaaactaaagagctcgaaagattgaaacaatgtatgtctgtcttctttcagcactatccagcactttcagataaacacaagagttgtatctgcaacgcatttgtacctgtcatgaaagccatgtggcctggtttatatggtaatgctgggggtagcactcatgttatttcaaagagacggaaacttgcggttcaagcttctcgtttcatggtgcaaatggtgcaaacccaattattttcaaccgaaagtatggaccaagcttcaaaaagttctgaaagtgcttcaggtttagcagatgcgtcaaacaattttgacatcagcgaggaagggcttgctatccgtatagcactagaggtagccagttgcccagataagaagaccgcagctgggaaagcatatgctttggccctgtgcaaggttgtggtccttctaagattccggcaatcagaacagaaggccatcaagtgcatgagaggccttgtgaatcatttggctgcttcagtggcttccgacaaggagctcgggaaggagctagctcaaatggctgcacggcttagatcgcttgatgcctgtccagacgaagaacttgcacaagatgacgcagatgccatattcaagaaactaggattcgatgatggcttcaagttggacaccaatcaagcagtgcctcctacaccagcaccacggtcagtccggcctccggctcctgccaggagaagagcgagacaggcaccgtcctctagcgatgacagtgacgaggaagcgggagaagctgacgtgcctgcaacatcggcaagcagggttccagccactcccagtatgactgctgctgcacgttctcagagagcaagcaagactgctgctctgagcaagatgtctgcaaaacctgctaccgcgtctgatgacagtgagctggacgggcagtctgacgtcacgagcgaggaggatgcatccgatgaggagtcgttatagccttataggttgctgttattgtctcgtgtaatcgtggactggagtttctgatgacgttgttgagcggaagaaccaagtaatctaactaaattaattacagcggtgacatattgtcactgcattatgtatttctttcgtgttactaagtatgatttaaagccttcatttgcgtttg

SEQ ID NO: 154993 - DNA, 1676 bp, Zea Mays
aatccaaatccggctcctcctcctcctcctcctggcactggcagcgaagatccaaagatagcacaatcgcatctcacacgccgagctatttctacttgagagaatcccccttctcccacaaggagcgagtaatttgaggcagagaccgacagagatggcagcagttatggtgtctcgccaaggccgggagctgcagcggtacagcgcgagcacgggcgggcgcgtggtggtgggctgcgtcccgtaccgcgtgcgcgggggcgacggcgaggtggaggtcctggtgatcagctcgcagaagaagggccccgcggggggcgtgctgatccccaagggcgggtgggagctggacgagtccatggacgaggcggcccggcgcgaggccgcggaggaggccggcgtgctcggcgagacgggccccgcgctgggccgctggtgctaccgcagccgcagctacgacgccacgtacgagggcttcgtgctcccgctgcgcgtcaccgcggagctggaccggtggcccgagatggccgcgcgccgcagggagtgggtctccgccgccgaggccatcgcgcgctgcccccacccgtggatgcgcgaggcgctgcagcggttctccgacaccgtcgcggtcgcggcggagacgatgcacctcgcctccgccctctagctctaggcccggccggccgtcgatcgcttccctcttcccgccgcggtctcgtcggaccgcgggcggcctcgcgcgttttttcggccgccgcgcacggacgcggcgcgtgcggggctgccgccgcctgctctgctcgctggattggacggaacacgccatcattcagtcagacaaatctggacgtcgtcgagctgtggcaccaggacgcggcctgtacattgttcttgggggggtctcgttttgaaatacaaacttgtaaatgtcacggagtttaacgagatccactgtggtactctactagtatacaatacacgaagaagaaatgaaccatggtagaaaatgactcacattgaccattctggcatcacgacttcatcgctgtttgttgtgcactgaatagtttctctcttttttttatccaagatacagtgctgaattgcatacgaacgggacgcactgtgcaaagcgcagcactgcagcacctagcttgtgcagctacgaaaccaacgacgtgctcaatggacgcaccatatctttatgtgatggctatgattctagcaaagatatttcgatacgttcctatcgtcggggagcgcgttaaattaaagctatgaccgtgcattgctaatagagatggcaatgattaccaaaacacgaaaacccgactggttttatccgaaccaaattaaggcgtctatgagataatttctctatccacgtggacaacaatctctgcctattggataaacggtacgagtatggatccgtatagtgagataatttctctatccacgtggacagaaatctctatctattgaatagacggtaagagtatagatcagtactacacatacttgtatatctataggtaaaatatatccgcatcataccaatattaccaacaataaagcacattttagcttatccttctcgagctattatttatttacctatcaagttttgtaatattatgctttgttatattttaaattaaacttttttgtgttta

SEQ ID NO: 154994 - DNA, 316 bp, Zea Mays
atttcctcctgagccagatctgtcatttcctcctgagccagatcgtgcgagccccttcggttactggtcgtccgcaggcggcaggcgaacccctctccctccctgcgatctcttagctgctcatggcaatggcagtcttaacttcctcgccgagccgcgcccgccctctccacacgagctccgctggcctacctcgtccctgcactcctgcactcgtcgtcgtcttgccgaaggagcttttgtcgccatccaccatgctgcgacacgccgagcgtcgtcattgttctcctcgtcgtccgagctctgcccgaggtga

SEQ ID NO: 154995 - DNA, 316 bp, Zea Mays
atttcctcctgagccagatctgtcatttcctcctgagccagatcgtgcgagccccttcggttactggtcgtccgcaggcggcaggcgaacccctctccctccctgcgatctcttagctactcatggcaatggcagtcttaacttcctcgccgagccgcgcccgccctctccacacgagctccgctggcctacctcgtccctgcactcctgcactcgtcgtcgtcttgccgaaggagcttttgtcgccatccaccatgctgcgacacgccgagcgtcgtcattgttctcctcgccgtccgagctctgcccgaggtga

SEQ ID NO: 154996 - DNA, 1392 bp, Zea Mays
atggccgtgtaccgccgggtcgtggacaacatcctcgccgtcgtggcggtgccggtcgccgcggccgcgctggtcgccgcggcgcggttcgggccgccggaggaactggccggccggctcggtgaggtgcgacccgcgcacctcttcctcgccgcgttcgtcccggccgcggctgccacggtgtacctcatgctgcggccgcgggcggtgtacctggtggactacgcctgcttccgcacggcgtccaactgccgcgtccccttctccaccttcctggagcacgcgaagcagctgctggagcgctcggggctcggggaggagacgtgcctgccccccgcgcaccactacatcccgccctacaagtactgcaccatcgacgcggcgcgcggcgaggtggacctcgtcgtcttctcgacgctcgacgacctgttcgccaagacgggcgtcagccccggcgccatcgacatcgtcgtcgccaactgcagcctcttctgccccacgccgtccttggtcgacatgatcataaacaggtacgggctgcgcagcgacgtccgcagcgtgcacctctccggcatggggtgcagcgccgggctcatctccgtggggctcgccaggaacctcctccaggtcgctccggaaggcacgcacgcgctggtcgtctccacggagaccatcacgcccaactactacgtcggcagcgagcgtgccatgctccttcccaactgcctcttccgcataggcggcgccgcggcgttgctgtccaactccccggccaaggccaggttccgcctcaagcacgtcgtgcgcacgctcaccggcgcgcaggacaacgcgtacacgtgcgtgttccagcaggaggacgacagcggcaacgtcgggatcaacctgaacaaggacctgatgaccatcgccgggaacgcgctcaaggccaacatcaccgccatgggacccctcgtcctcccggcctcggagcagctcctgttcgccctctccttcatcgcgcggaaggtgctcagcggcaagttcaagccgtacatccccgacttccgcaccgccttcgaccacttctgcatccacgcgggcggccgcgccgtcatcgacgagctgcagcgcagcctcaaactgtcggacgagcaggtagaggcgtccaggatggcgttgcaccggttcgggaacacgtccagcagctcgctgtggtacgagctagcgtacatcgaggccaaggggcggatgcggaggggtgaccgagtctggatgattggttttgggtccggtttcaagtgcaacagcgcggcgtgggagtgcatcgcgcccgcggcggacgcgcagggaccctgggcaacgtccatccacaggtacccggtggacattccagacgtgctcaagcactaa

SEQ ID NO: 154997 - DNA, 429 bp, Zea Mays
atggcggctcggggaagaggcagtgcaggcagtagcagcagggcgccgtctgtcgctggtaccgcgctcctgtgtgtagctgtagccgtgctcctgctggcggccaccccggccgcggtggcggggacgacgtacctcgtcggtgacgccgctgggtggacgctcaaggttgactacggccggtgggtggcgggcaagaccttccacgccggcgacatcctcgtgttcaagtacaacaccacgtggcacgacgtggcgtgggtgagcaagggcggctacaggaactgcatcgtgtcgcccaaggggcgcgcaccggtgtaccacacgggctacgacgcggtcacgctgcccaggggcacgcactacttcatctgcgccatgccgggccactgcagcgccggcatgaagctcgccgtcaccgtctactga

SEQ ID NO: 154998 - DNA, 1614 bp, Zea Mays
gctcggcagcctttgccctgcgcacccgctggcgccgcacatgccgggccataactgccctcacctcccaccgtcctaccgtgctacggtgccacccacccacaccaccgtctccagtcatccactgcctgccgctccccagtcccaaatatctcctcctccttgcctgcctcgtctgccatataagcacggcggggtggaaccggacgtccctcgctcccaaatatctctccccacctcccctgagcttctcccgacctttggtcaggcaaaggaggcggccaacaaggacgagcgatggtgaccaaggtcatctgcttcctggtgctcgcatccgtgctcctcgccgtcgcttttcccgtgtctgctctgcggcagcaggtgaagaagggcggcggcggtgaaggcggaggcggaggcagtgttagcggaagcggaggcggcaacctgaatccctgggagtgctcgcccaagtgcgggtcgcggtgctccaagacgcagtacaggaaggcctgcctcaccttatgcaacaagtgctgcgccaagtgcctctgcgtgccaccggggttctacggcaacaagggcgcctgcccctgctacaacaactggaaaaccaaggaaggagggcccaagtgcccctagaagatccaccgcagctcccgtccgccattgtccccccttctccgaatctggaacgtgttgttcatcttcgaccaccccctaggcttggcattttattactagtataatgctagtgtccgcccgttgcttaatctggaatgctaccagccagatctccatgctctcctgtgagccactcggcagagtgaggattactaggtagggtggcatgtcatgtgctccaccctccactggtacgagtcaatcaactaaagctacccccggattgatgaggaacatcccgcgcgattagtggggcatgtcattacattcatcagcttctatatataaactagataaactttttatcatgtcactggcccactaccactacgcctccaagatagaggcttttaactgtttgcctaccttacggaatcttcttaatcatgggttactaacacatgagttactcacatagcaaattatttaccacccgcctcctgaataatgacaaatagttaatttttcgggcattgattggtataaagcctttgttgttgtgcgcatcctagagcatagggttgtgtttacacctttttagggcgtcaatcactcaacacgaaccagcggcggtgctctctgcacaggggcggactgcacaggggccgacggtccacggctagaggctggacggtccgcggccttgcacgaggctaggattttctgcctgacggccggacggtccgcgcgtgtgcaggggcggcggaagatcgccggcggcgcctggatctcgctcccgggagagaccccgtcgaggaggagagatcctaagagttgtctaggctcgggcaggccgaccttgactcctctaatcgacgtagagtcgaagagaagcggagaatttggggatcgagaggctaaactagaactactcctaattgtactggaaataaatgcgaaatagaagtgttattgattcgattgatgatt

SEQ ID NO: 154999 - DNA, 104 bp, Zea Mays
tgacatttatcaagtgaaaaaatgcaagagatatgttctgagccttgcatccacctaaaaatttatatcaaagaaagccctaatattctaagagtcatagaaag

SEQ ID NO: 155000 - DNA, 336 bp, Zea Mays
atggtcggcctcacccttctgtgtgtagtgcgtgtcgagtctctggctggtgggaccctccccctctcgctgttcttcttccccaccggatccttcccatctgctgcgcggttggccaacggcgctgtgagattcttggcctcaggttccaccaaatcttgcagcctcgaccagggtataaatccccagcgctccgcaaccctgccccatcatctaatcgtgaactcgtgcctagaaagaaatcgtggggggtgggagacccgccgcgaccgctcttcgccggagtgccgattaaagctcaaggctaacccgacgaccttcgaggagtgcccttag

SEQ ID NO: 155001 - DNA, 190 bp, Zea Mays
ggtaggagcaagagacgtgtaccctgagaagcctgtaattgggctcgaatttcttggctgcatcgaggttgtcatagatgcagctaaacctatggacttcccgcctcaagtggacatgctgcctaaaaagtggatgcagaacttgaagacgataatgcagtttgggtccttcacctcgtacatgttagcc

SEQ ID NO: 155002 - DNA, 297 bp, Zea Mays
atggcagtttctatggagcgggtggactgcggttcaacatctgatgatattcagattttagatttttttgatgcagttgaacatctaatgataggaaaggaattcccagctgtgatcggtgttgcggctcctaaccttggtcagataagcctgtccaacaaccagcttacaagagcattgtctgcatctcttgggaacttctctagtcttcagaagctgcttcttgatcataatgcgttctatggtgccatacctcgggatattgaagcaaaccttccaaacagaactacattttaa

SEQ ID NO: 155003 - DNA, 113 bp, Zea Mays
gatattttttcctttctcccattggaagttagagagagaaaaaagaaaatgaataatcacccagattgtttggcttacatgactacatcaccaacgacccttgatccttactg

SEQ ID NO: 155004 - DNA, 2317 bp, Zea Mays
gcgcactgcactcttctctgcagtctgcacatctccgggaagccaaacccgagcgtcctgactcctgagttcctgaccaaacaatcccagtactgcgattcgctcgggatcgtctgcaggccccaccggccgatccatccccccgtaaggccgtaaaccgtaaccttccgccgatcgcttcaatggccgtggcctcggccgcgcggacggcaacaccggcgtcgccggcgcgactggggtcgctgtggtcgacgctggaggaccagcgcggggcggcggtgccgctgctctcctcggcctggaccctgccgacgacctcccagggcggcatcgccggggacggggagcagctgcccaaggagggcctgctccggcgggctggcggcgttgttgcccgctggtggggggcggcgtgcggcgcggtggcggagctgtgggccttcgcgcgggccgatccgcggaagcccgtgttcgcggggaaggttgcgctcgcgctcgccctcatctcgctgctcgtcttcctccgggagccgcgcgacatcgtcagccactccgtctgggcaatcctcaccgtcgtcgtcgtcttcgagttcagcatcggtgcaaccttaagcaaagggtttaatcggggattggggacactaaccgcaggagcttttgctctagtagttgcagaattgtccaaacacctgggaaaactggaggaagttattcttataacaagcatccttattgttgcctttttcacaacattgacaaagctacatccgaagatgaagccgtatgagtatggattccgtgtgttcttgttgacattctgttacgttatggtctctgggtacaacactgggaaattcactgatacagctacaagcagatttatattgattgctattggtgctgctgtcagtcttggaatcaatgtaggcatctacccaatctgggcgggagaggatttgcataacttgatagcaaagaatttcactggtgttgcaaaatccttggaaggttgtgttgatggatatctgagatgcatggaatatgaaaggattccttcaaaaatacttgtgtatcaagcatctgatgatcctgtatatagtgggtacagggcagctgttgaggcatcagcacaggaagaaaccctgcttggctttgctatatgggagccaccccatgggccttacaaaacaatgaactatccttggaggagcttcaccaaagttagtggagcattgaggcactgttcctttgcagtaatggcattacatggttgcattctttcagaaattcaggcaccaccagaaagcagaagagtattttctgcagagattcaaagagtgggacaggaaggagctaaagtattgcgcgagctcggaagcagagttaagacaatgaccaagctgagttcttcaggtattctgttcgaagtgcacatggcagctgaagagctgcaaaaaaagattgatgagaagtcatatcttctggtgaacactgaacgatgggatgctagcaagcaagctcaaggaatcaaagaagttgtaaatggtacccgtgctgtggaaacggaaaacaagaacaaagaaaacaaggatgatggcaccagtgctgtcgaaaaagaaaacaaatccaaagaaaacaacaatggagggctggaacctaccatagttgatcaaactttagtgcatcagtcaaagagctttcttgcaaattcatttctgagcagatatgattcagcgtcaacaattgacggttttaagccagcactttcttggcctgctcgtaaatcattccatccaaacataccacttgaagatgaggattcccaaacatatgaaagcgcgagtgccttgtccttggctacatttgcatcactcctgattgagtttgttgccagactacagaatgttgttaacgcatttgaagagttgagtgagaaggctaactttaaggatcctgtggtggagcctactgcagttagcacaagtaatgttaggtttctcgataaactgtgcaaatttgtaggtttctagagttgacacggatcctgtgaaggctaactctaaggatcctgttttggcatccagtttccctttttaaaattaatttgggggtacggaatgtacactaaacttgtaaatgtgcaatcagatgattgcaagttgtattgctggagttcagtttacagctacagaaatcatcaatctggtaaatgttgatctctgcatctgctgtattgtgttttcagcgccctgactgattgcacgtatgtatatcctgtgaaaagccagcttttcatatatttttttgcactcaccag

SEQ ID NO: 155005 - DNA, 246 bp, Zea Mays
atggctggggagaacgccatgggagcagggaaactcggccagcgcgaggagcttgcaaggggacgcgcgccatgggagatccaggcgagcaagcacaggggcgccgagcagctggagctaggggaaaagtcgtgcagggtgccagccaccaaggaacaaggggaacgtcgatctccatggaagatggtcggccatgggcgagctcacctgctcgagctcggacccgagaactgccctacgcgctag

SEQ ID NO: 155006 - DNA, 1235 bp, Zea Mays
atacatacctatcaattcatctatcaaaccagtcaataaaaatagcagatcagctcaccgttctaatatttgacttgaacccgcgagatcggtaataattttccgatcgaggcaatttgtcgagcgcttggaaaatatcgcgctgctagcttcgtcttcacctgatacttgggatttcttgacgacttgcggaacgacgacgagatcgtgtttggagcgagctgaggaataaagaagaattactgcatttcttaacttattttttctctttctattttgcttttttttattttatatggtatccatcgctttgaaaccatcaaatttgatctccttccatatttcacaagctgcggctagttcagcactccatttgcaagctgctttgataatttcattaccttcacgagcaagatcgcgcccttcgttacgagcttgtacacaggcttctaaagccacacgattagctgctgcaccaggtgcatttccccaaggatgtcctaaagttcctccaccaaattgtaatacggaatcatctccaaagatttcggtcagagctggcatatgccaaacatgaatacccccagaagccaccggtataacacctggcatggataccgagtcctgagtgaaaaagataccgcgagaacgatctttttcaataaaatcatcgcgcaataaatcaacaaaacctaaagttatttcgcgttccccttctaacttacctactactgtaccggagtggatatgatctccccccgacatacgcaatgctttagctaatacacggaaatgcataccatgatttttctgtctatcaataactgcatgcattgctcggtgaatgtgaagaagtaggccgttgtcgcggcaataatgagacaaagtagtatttgcggtgaatcctcctgttaagtagtcatgcattacaataggaacccctaattcccttgcaaatacagctctcttaatcatttcttcgcatgtacctgcagtcgcattcaagtaatgccccttgatttcaccagtttcggcttgtgctttataaattgcttcggcacaaaagacaaaacggtctctccagcgcataaatggttaggggtgaaaacgggcagggtacccgaaacgggtaccggatacggatactgattcgggaccatttttcggatacggatacgggtattttttagattcgggacggatacgggtaatacccggatagtatagcttcggat

SEQ ID NO: 155007 - DNA, 547 bp, Zea Mays
atgcaccggggcttgcctggaataaacactacgttagtgtttgttagacaacgttcacttggcgatcatcttcatcatggttcttgatcaggtcatccatccttaggttcgtccatcagcaacaccttgcgaagaagcccacgcttaacagcatcttgtggtcgactcagctctggtcctccacatcacgtgatcaattaacgtacctaaatgatatgcataatgcacatgaatggatatacacaggaatagcacacgactaattattgctacaccgaagaggattaaatatttagtgacgaggcattacaacacttcaaacaacgctggatattaatataccactaagtacaacattaatgtttttcttaacttgactagatctgaaataaacattaggaattaacaacctatacatatgctttaccttctttggttaaagcctaacatcaatagattaacagacctagattcattagttttagacgtctaaatctaaaataagaaaagaagcatattaactaactttctaaaccgcccgatcggg

SEQ ID NO: 155008 - DNA, 220 bp, Zea Mays
atggcagcgcagatcgagctcgcggcgcggcatgacatccatggacgcgagctagatgtcggacatggagatgaaggctcaacggcgcacggcaaggtcaatgacgcgctgtggatatggaggagtctgcaggggttcatggtcggaccggcgactggccgacgaacttgatttggcagtgggcgatggctaggacgtgggggagccgggactacagtgc

SEQ ID NO: 155009 - DNA, 1926 bp, Zea Mays
tctctcttccctccttttccacccagcgacggcgagcgggaaatgccgggccccaaaagaggccgcatccttggtgctttctgaaccttctttactttgtccccaaatggcctcctcgccctcttcacgtttcccttcaccataagcacaggcaccactccccccctgcaagctcctccctctctcggctcttggttcttgcattactctgtcagcccagaggcagagcaagtaagcaaatggttgctatggcggcgccagggcgagtggcgctcctggccgccgcactcctgttcggcgccttcttcccatccgcgttcgccacgtcctcgtaccccgcaaggcttgcgggcaggctcctgtccaccacggcgtcggcggtggccaagcagctgtggtcgctcaaatcggccgccaccaagacggcgacggcgtccgtggcggggcggtccatggtgcggtacgagggcgggtacgcggtggacacggtgttcgacggcagcaagctggggatcgagccgcacgccgcccagatcaaccgcgccggcgacctcctcctgctcgactccatcaacagcaacatctacagggtccagctgccgttgtcaccatatagcagaccaaagctccttgctggttctccagaaggtttatctggccatgttgatggaagactgcgagaagcgaggatgaaccatcctaaggggttcactgtggatgataggggcaacatttatgttgcagatgctatgaacatggcaataagaaagatcagtgacacaggggttacaaccattgctggggggaaatcaattagaggagggtacatagatgagcccagtgtcagtgatgatgcaaaattctcaaccgattttgaagtccaatacatcagcagtacctgctctctcttggtcattgatagaggaaaccaagcaattcgagaaattccactgaacgatgatgactgtgcatatcagtatgaagctggttttccactagggtttgcattgctttgtgctgctggtttctttggttatatgcttgcattgctccaacaccggcttttaggaatgccgtcaacaatcaataaacctcaagcgcctccaagacccagcattgcaagtatccctccataccagaaacctttaaacccttatgttcgtcaaccattcatcccaagagaagaaactgcaagacaggaacctgaagaggggttcttcacctcagctggaaaacttgttggaggggcaaaatcatctgtggctgaggtatttggtttcaagaagaagagcctgagcaacccataccatcagcagcaacgaagagctaacccttggccggtgcaagaaagctatgccatcccacacgacgaaccacctccggcgctggacacgagagcaccagcccctcagaagaactacagctccgagaagatccactacgtccgccatgggcacccgtatttcaacagctgggacggtcaccgtctccctcagcagcagccggaccagcagctgtatcaccagcagcagcagcagcacctgcagcagcacaggcagtgctctgcaggcccccagacgttttacgagcagagttgtgaggctacaaacgaggtcgtctttggtgcggtccaggaggtggacagcaagcggcgaatggtcgagatcaaggctgtcaactacggagacacattctatgaacagtacgggatgcggtaccgcaacaatttcatcggctacaacaacactaacaactattgaacagcctgtctatttctttgacttccctgtctctcttttcctttctttttttccatcttagttacgagttatttgctttatagtatttatttaaagtggcttttctataatagtattaatagattaggtttctctataatagtatttacaagtgagcaacttctct

SEQ ID NO: 155010 - DNA, 116 bp, Zea Mays
tttaaatcatatttttttgtttccatactgtgacggaacctcccaagtaattaggcccacctatagttgtccttgtctaacagacatcagacaccctgtagatgttcctaagtcac

SEQ ID NO: 155011 - DNA, 330 bp, Zea Mays
atgtggctatcagcttcagaaaagcaagatggaagcaacacagggagaagagactaccatctactggaacacagtggggcaacgactggcgccgccatgacgtgggcggtgggcagcgggcgtgggctggtggctggagcgaggcgttcgggcgcaggcgctaaccggctggccgattgcgaccggctgccaggcgaaggcgggggcgcttgctgtggtggcacggctggcaagggctacatggtgaagcaaggcgaccggacgggggcgctggctggatggggcgatgacaacgaagaggatggatgcggttgttgccgctgggaatga

SEQ ID NO: 155012 - DNA, 95 bp, Zea Mays
tgatcatcacatatacttatcaacatattatcatagatattattcaataacaaccaaatcttggagctaccagaccaacattgctacttctaacc

SEQ ID NO: 155013 - DNA, 239 bp, Zea Mays
aaaaaaaaaaaaaaaaaaaaaaaaaaaaaaaaaaaaaaaaaaaaaaaaaaaaaaaaaaaaaatgggtagtcaacctattttttttatatttatttctccgggattttttttatttgaaaaaaaatatatagagtttttccggggtaaaaggggagggaggaggggggacccctacaaaaaaaacaaaaaaaagaaaggaaaaaaaaaaaaaaataaaaaaaaatcccacaaaaaaaaaa

SEQ ID NO: 155014 - DNA, 1323 bp, Zea Mays
atgcaagcaaagatcgagcagaaacggcagcggctgctgggcatcgcgcccgatctgccgctgcacaagctccagctcgtcgtcgccccgaccgcggcctcgcttccggcgctcgccgtggtcgccctcctcctcctcctcgccacggcgcgacgcccgtgctccttcctcgacgcgtaccgctccggcgtcgtctccctgccttccccgtccagaacctcgccgccccacctcgggcgctctgcggccgccgccagggtgccgagcgggtgcgacatcttccgcccgggccagtgggtccccgacgacgacgcgccgtactacaccaacctcacctgcccgctcatccaggagcaccagaactgcatgaagtacggccgccccgaccgcggattccttcgctggcggtggcgccccgatggctgcgacctgccccgcttcgacgccgccgccttcctggacgccgtccgggacacgtcgctggcgttcgtcggggactcgctcgccaggaaccacatgcagtccctcatgtgcctcctgtccaaggtggcgtaccccaaagacgtctcgacgacgacgaacccagagttccggacgatgcgctacgaggcgtacaacttcaccatggccatcttctggtcgccgttcctggtccgggggcaccagccggacccgcggcgccacatgtgggacatctacctggacgagccggacgcggcgtggcgcgacgccgtctcgggcttcgaccgcgtggtcctgtcggcggcgacctggttcacccggccggccatgttctacgaggccggcggggggcgcgtccgcgtcgtggggtgccactactgcctggtcccgggcgtccccgaccggacgctgcgctactcgctgcgcatggcgctccgctccgcgctccgcgtgctcacggggccccggttcaacgggacggtgatcctgcggacgctgtcgccgacgtcgcacttcgagggcggggagtgggaccgcggcggggactgccggcggacgcggccgttcgcggccaacgagacgcgggtggcggggctggacctcgacctccacgcggtgcaggtggaggagttctccagggccagggccgaggcggaggcgtctggcggggggacgaggctggcgctcatggacaccacggcggccatggtgcttcggccggacggccacccgagccggtacgggcactggccgcacgagaacgtgacgctgtacaacgactgcgtgcactggtgcctccccggccccatcgacgcctggaacgacatgctgctccagatgctcctcgcggacccatcttga

SEQ ID NO: 155015 - DNA, 2330 bp, Zea Mays
tttttttctgcttttgttttccttaatttttagcaagcttaattcaaaaaaacttcacagataagtaaaggggtcagtgaacagtatctatgcaatgcggcccatgcgattgcctcagatgtgtaagacctatattcttgtcttgtaatttcctttttaaatgcacaaggaaagtgttgtacttatctttgaactatttatatcgcaggccacccccggttaaagttggtgcttgtagggcactggcccaacttttaccagaatctaatcagaatctgattcagccaaacattatgggcatactttcatctcttgttgaccttctgcggcaggcatctgatgaaaccctgcatcttgttctagaaaccctgcaatcagcaatcaaatctggtggagaacaatcaactttaattgagcctgtcatttcccccatcatactggatgtttgggcacagcacattgctgacccgttcatcagcattgatgctgtcgaagtgttagaggctatcaagaatgctcctggatgcttacagccacttgtgtctcgaatccttccaacaattggatccattttagtgaaacccaaggtccagccggatggactggttgcaggttcactggaccttttgacgatggtactcaaaaatgctccagttgctgtggttaaagcagtcttcgacacatgctttgtttctactgttcaaattgttcttgaaagtgatgaccatggagagatgcagaatgcgacagaatgcttggcagcattcatatcaggtggccggcaggagttgcttgtctggggtggtgaacaaggacaaacactcaagatgctacttgatgcagcttcaaggcttttagatccagcgttagaaagttcagtatcactatttgttggaagctttgttttgcaactcattttacaaatacctctacacctgtctcctcacataccggaccttattgctgctattatgagacgtatgcaaacgagcagcattgcaggattgaaaagctcccttattgttataatagccagattagtacatatgagtgcaccaaatgttgatgggttcatcaatctattgctttctatccctgcacaggggtatgacaattcacttgtttatattatgtcagaatggtcacaactacaaggtgaaattcagggagcctaccagataaaggttacaacgactgcattagctcttctcatatcaactcgtcatcctgagctatccaaggttgaagttcaagggcatcttattaagactagtgcaggtataacgacacgttcaaaagctcgagtgactcctgatcaatggaccaagattcctctcccagttaagatcttctcattgctggcagatactttaactgaaattcaggaacaaattggtgctggtgatgacgatgactccgaagaggataatgactgggaagaagttcagaatggtgatgctagtatatcagatgatatcatacactcagcatcggttccttcaatgactaatccatcagttgaacatttaaatgcaatggccaaggtttttgatgaggatgatgatgatagttatgacgatgatctgacaaaaaacgaccctcttaatgaggtgaagttagcggacttcctaacaaacatctttgctaacttgtgggagaataatcgaccaatatttgagtatctttgccagggcctgtcggattcacagagatcagctgttgaaaaggttttgaggaggtgaagcgttaacttgggatcctgtcttccacctttcgggatataatatatcttcatattagttatcgagtcctgtttgcattgctgtggactggttttcttgctcattatatgttcattggtgtaaactgatacatctctgaagccggtgttatgaggttttgttagtgtaggtttctttatgttctttgtatttaaaatctacaagatgtgagtatttgttgtaccgggtgtggtgatgttgggtattcatgtctgaagaattcccggcttgacttgttcttacgttgaattcctccggagggaccttgattccttggctttattcatcaatttcatgcatgcctatttggaggaacgccacctttggtgtttggcaggagcggttaagctcagggagttgggtcccggggttggagttccttagggctctactagtgtgtgcggtggtcaagtgttttctccttccttggtcaagtgtttgcctcggttcaacccctcactcttggtttggagtacgggtgtagtttttcttttgtaagaaccttcctttttattctatcttaatttaaagatgcagttcttctgtgta

SEQ ID NO: 155016 - DNA, 109 bp, Zea Mays
cttcaaacacaaagttataattaaaacaaatctagcttcgaattcaaatttgagctctcatagatatagggacgaaagagtggcacaataacgataaataaataaataa

SEQ ID NO: 155017 - DNA, 298 bp, Zea Mays
tttttctttagaattcaaacccgttacacgacttcgtcaacgagtttttcgcttctggaggtagtggtcacaactccaacgaccctgatatgtgatggtgttagctttgtgccgaattgtgcattgtaatggactatttgtggacttttgtttgtatggactatttgtggattttatgtttgtatggactatttgtggactttatgtttgtatggactccaattttatgttgtggactatttgtgaattgtgtatttaatgtttctgtattgtggatattgtatggactgtcatttta

SEQ ID NO: 155018 - DNA, 825 bp, Zea Mays
tgtttaagtgactgaaaattctgtatagacctgatatgtgcatgcaattacaaaccaaaactcaaatgctaagatatttgttcatttatctttcaaaacaaacacaatatcactcattaccatcggtttcctagaactacttgtacttgaccttaccactatatatggtcaacgcatgttacaattattatactgtatgatacatataatgtctcactaaagttccttcagaaccatggaacggtaccatagctaccatcagacgacagagccgcagctgagaacatctgatccacttcgacatccatatcagacgatcttttcgcgaagcgtcccttgatcctcggccgtgcttctgcgtacgtcttcctcgttgcataccgtatggtcttctcaaacttcctgctcttcttcttctccctgtacctcagcaccctggcctccctgtccatggaggccaagtgaagcggcatctggagcggaggacccgacgagaacaggctgatggccccagcaggcgtcagcaggatgccggagcttggcatgtctgtcgttgccatgttgtctggtactatacccacctccattgacgatgagaaagagatctgagatggaatcggcaaatggtcactgaaatatgcgaatcgtaagggggttgcaggtgtcatagaccctgcaatgatatattttcaaatagcatggcatatggcagacgcgtacgtagtgtaattagtagtaatagatgaactcacgctgttgctgatggaatctgtgtaagcactgaccccgggagtcatggaggcagcctgctccgtcccaataact

SEQ ID NO: 155019 - DNA, 3735 bp, Zea Mays
atgtcggttgttgacggtgtactcgaggatattattcctgaggactttctgcttaaattatctgagatcagagttattgacgtccgtatagatcacccgaacgaagtatcttctactagtctgctagccgggccagaggtaaacctgtcagtctgccatggtacttcagctcctgagggtccttcaggccccaagggtgctctagcccccaaggttgcttcaatgggtgttcatgttgggtcgccgatgcctcagactgatgatgttgtagtaacaagttctgttgtgcccattggtccagccgaccaaaccaccttggagcgaagtgaggcgcaggccaggaaggcatcactcgccgagtctgttctagcagccatctccgagctgatgccttcagcggcagccgccgtcgatgctgagcacgagagcttcatggatgtcggcagccacctccaccatggagccctgcccacagtgtcagtggaggcgcagaaggtgcagggttccccagccaacgcgctgcacgtgatggagtatctggctgccaatgttgacctcgccaaggacctcgtcacaaggtgcagcgccatcgcgcagcagctcatggacgacgacctcctgggcataaccgaggacttggacaaggtcatcaagaacataagcaatgagctcaacaagatgccagcagcgacgttcgagagcagcaggtttgcggaaccagcggtcagtggacaccttcaggttgtcaggaaccagcatgatctgttcgagcagcaatcctttgatggctactcggagggagatatgccaatggtcgtggcaatcgagaggccacccaagagaagaacgctgcacaacagtgacatgccgaggctggtggacttcctgcagggaatgtaccaggagtcacatgagatcggtggtcagtcatttggttcactccctgaagtcgcggaatatgtggagccattgtatgattctttcttctgccctctcacaaacaaggttatggttgatccagtgacaacggagagtggcatcacttatgacaggaaagctatagaggattactttgacaagtttacagatggctctgaacctgtgatatgtcctgttacaaagatggccatgcagagcaagacactgaggagtaatcttccgttgaagagcacaattgcagagtggattacaaggaatgaagcgacacgggtcaggatcgcacgcaccgcgctctctatggcgaccacagaggctatggtgcttgaggccatacatgagctgaaggtgctggctaggctgaggagaaagaacagggatcagatgcacaagattggcatcaccaagttcctagcacggcttctggaccacaaggatgcacttattcgctgtgactccctcgacctcctctgcttgttggttgaggatgatacaggaaaggaaatcatagcgaaaaccagagccgtctcaaggacaataaagctgctatccagcagtagtactgatgagaggcatgcatctatatctttcttgctagagctttcgaagtcagagttgctgttggagaacattggatcaactgctgggagcatactgatcctcaccacgatgaagtttaatagctcatctgatcctattgctgccgagaaggctggagaagtcctcgagaacctggagaaatgccccaagaatatcaagtacatggctgaaagtggctacttggatcctctgcaaaggcacctagttgaaggaccagaagatgtgcagatggagatggtgagctacctcggcgagctggtccagaagcaggagatgaccatcaatatagcagggagtgcatcagagatcctcatcaaaatggtgtgcagtggtaatacggcaattcgaaaggcgaccctcgatgtcctggttcagatctcgtcccaccaccccaacgccaagacgcttgtggatgctggtgccgtccctgtcatggtagaggagctcttcatacgaaagattgatgatgagcccatgggctctaagacagaggctgccgcggtgctcgccaacatcgtcgagtctggcttggatccagaggccatcaccgtgaacaaggaaggccacgtcatcacgtccaagtactcggtatacaacttcgctcacatgctcaagtgctccatgcctgacaccctcaacctaagcattgtgcgcgtgctgctcgcgctgaccgctctccccaagcctctcgccacggtggtctcggtcatgaaggagcaagacagtggacagacggtgattgagctgatgggctcgctgacagagtcgcttgtcatcgccgcaatgaggctgcttattgcgttgtccccgcagatggggcacaccattgccgagaagctgtgcaaggccccggggcagccagggaggcttgtcaagagcattggcctgcacgggcggatcatggagcggcacgccatgtcagctactctcctggcgaagctgccgtaccagcacatcgctctgaacctggcgctgatcaaccagggcgcgatggttaccgtgctagccaagatagaggagatgcagcgcggcgagacgcgggcaagccgccatgcgaaggcgtatatggagggcctcatgggtgtgctggtccggctaacgacgacgctgtatgacccggacgtgctcttggcggccatggatcacaacctcacgtcggtgctcacagatctcgtgcggtccgcaggcagcgacgaggtccagcggctcgccgcgattggtctcgagaacctcagcagccagtcgcccaacctttcccagcccccgaccgaggagcggcgcccgaagaagaagaacatcctccggcgcctgcgcgaggcgcacgcggggcgggtgcacgacaaccggaggccgccggcgcacagccgggtttgcccggtgcaccgtggggtgtgttccccgtccaccacgttctgcctggtggaggctggcgcggtggagggcctcttgtgcgtcctggagagcagcgagaacgggcgcgtggtggaggccgcgctcggtgcgctgtgcacgctcatggacgacgcggtggacgtgacgagcggcgtggccgtgctcgcggagcacgacgcggcgcggcacgtgcttcgcgcgctgcggcagcaccgtgacgacgggcggagagggggcggcggcgctgccgcaggcgagacggtcactcggaggtgtttctgggcggtggagaggttcctggctcacggcagcgagcggtgcgtgagggaggtcaccagcgatcgggcgctgccgagcctgctggtgggcgccttccacaagggcgacgccgccaccaagcaggtggccgagagcgtgctccggtgcctgcaccgcatgccggattactccgcgacctacgaatccgtcgaactgtaaccaacacatgacgcgcacgactgcgcatgtcttgcctctcttttatcaagcttcgtctcttggttatgtttgtaaaattggtttttgtgtgtaacatgggttgatgtattgtttggtgtagctaaaggaaaatagaaaaggaaaaactgaagatgcagttatgtatgcaagtataaccaaagtttatagcaagggaagatactagtcttttgattcttcttactatttttttgtgtgtgtgttcagtagttcttttttagggaccgtgttcaattcagtaggttttgacaagagtgcctcctaaaatcagtctccagataatttgttttg

SEQ ID NO: 155020 - DNA, 432 bp, Zea Mays
atggcagctaggttccaaagattgcgtgaagagggaaatattggtaaccctttaattttagaggatttccaatgggacaatgagtgggtggacaatcaaaatgaaacagttagagaaggggatgatcttgcatgggctcatgtggatgatgcaatcggtgcttccagttcacttcaaggtcgcaacttcccaagaagagccggatatgagtctgtttattcaatgtgttgtcaagctgctgctaaacaggaggagagagttatggaagaggaagagcaagacaacgagggcaatgaacaagatgatgaagagtacatgcctaatgatgatgaagtggatgactttggtgaatccccacatagcagtccaactaaacctggtgctggtggtgaagaaaatgcaatggataatcttgatttgggagatatttag

SEQ ID NO: 155021 - DNA, 939 bp, Zea Mays
atggctctagggaagaggtccacatggacctcacggaaacccgaagaacttgtgccaactgattacgagaaaataagggctatgaatatgatgaagaacaatcaattgtttcaacggctaggccttggacaattgaaatcactggtgactgctacagctgcaaacaacaaagaagactgtcctcagcaatcagagagtttatatgatggtgaaaacactgacaattctaatgaagaggaatcccaatgtactaacggtggttgtgccaacatctccaatgatggtgatcagatctcaacaaaagtaacaagaggaaataaaataattgtggcacctacggaggagcgaacaattagagtcactaggcaaagaattgctaaagatagttgtatgaagaataaacttaatcgtgaaaaagtacagtatcaacaatgcataggatcccaatcatatattgcaaaagcttatttactgaaagaagagaaatataaggatgctgaaccgagtgcaatagatcttttcaaggacatgcattgcagcaagaagaaaggtttttctgaaaatgtaaagaaagcaattgttgacatggaagcaagggtgacaacaccagttgaggatggacaacaacaaaagtctcctatagaagttgtttctgaagtgctatggggctccagtttatttctacagaatgttggtctgcaagataactccaagaaaagctccacaacaactgtttttgctaaggttcaagaacttcataatcaattggagtctgagaggctagaaaaagatgggcttcaagaagaagtagaaaccttaaaggctcaggcacaggcctcaaaggagaccatggacaatatgaagagatcgatggaagaaaataacagtctcctccgtcaactgttgagcttcaatcgaagccaaacgtccccatcttaa

SEQ ID NO: 155022 - DNA, 1281 bp, Zea Mays
ccccccctgcccatcacctcctctctcaatttttgcagccaccaaaccctagccgccccccctcaatcccctcctcccaaggtgccaatccttgccgctcggatcgtcgtctcgtggtgcgattctccaaccgttttggtggagggaagaagggaggaaggaaagggggagaacccaaggtggtggacttccggatcgttcttagggattttgcccaaacttcggtgaaggcaagtaaaactgtgatggttattccgtctgtcagatgaggagtcttatacttgtttatgttgtgctatcatgttcaaattcgtattttcttttgagtaccatcatttgaaaatgttcatgtttcatggatttcgtatgttgagtttgaggtttgattatgttactcaagtggttattatgtggaatggttggaagtaaatgcctagcacatttttatttgggaagaacttatgatgttgtcatgcataatgcactcatcatccattgcattgaagtttcgtcgcgatcttatggtccgaccgtaccggtacattgagcatcatatgttgcctgagaaggggtatggtgcagcttcatatccttagagatatggaggcagaagtcattattgcatttgtagccatgtgcattcatgggagaggtgttgaatctattatgtggatgtggataatttggacttgtgcatggtgattctacttggcgttgagcttttagttacttgtttacttgctgcaatttactgttcaaaagaaaagaaagaagtcctgaacacgtggttgtgtaagcacagttgatttacaatgtcctatttgttgttgttatgtttacttgctgagatgtgttatctcacatcttgcattgtttgatgcaggcacctaatttctgctttgggaatagagggatgtagcagcacggccactacacctttaataaaggaaccaccatttaataatgttgttaatcagagttggacaagtctagtgaattgctttgttcttggttgagcgtttattttggggtgggctgagtttcttatcccatttgttttgcttcagttgggtcataattaagttttaccacttttgcatttcagtttctactatgtgaattatatgtctttatatcttgtatgagcttcatgtttcccctccttgttatgctagttttcaaaggaggtgctgccggattttgctatatattctttctttattacttctcttgtgttgagtaagtttggtgggtggggtttgtggtattatccattgtatg

SEQ ID NO: 155023 - DNA, 507 bp, Zea Mays
atggaagatgtagagaaacgcctggccgagaagttccagcaagcactggattcctcagcgacaactttgatggaactatctaagaagatggacggcattggagtgctggcaagcaagttgggagaaatcgagagtcgacaaatggagagcgacaagatggtgcagtatctacaggcaaagatggacctctctatgaagtccttggctcaggtgtcgcaggagcagaccaagttggcgaatatggtgactaatgctgcaagaggaatggcgtcgacctcgaaatcccccgctggagacggattgatgggagctcatcccataggccctcagaagaaaagggaagaaagaaaaatacagaaacatttctaccgtctacctctgcttctctcctgtctccttcccgcttctgcttcctcgcgctgccttccttctattcttcttccttatttccgagatcgccagagccttctcgccacggacatcacagaattattcactaaggactag

SEQ ID NO: 155024 - DNA, 3492 bp, Zea Mays
atggttgctatattactatcttcatacctgaataagagaagggggtgtctgttatacagaaatgaaaaagaagttgactctggaagcccatctgatgttgagatattagaaaagccaacagattctaataagaggaaactactccacgtgcttgatgatagcgaagtagtgtatgaagatgaggaaggccctattactcaagcagacttgcaaaggtggtttgttgatgattgggataaaagagctcatgtaaaagtctctcccgatgggtgcaccaatgactttttaatggttggtctttccacaaaggacatgccagtgaccaaagccgattcaatagatgttttatgtgattatatcatggcaatagaagacaatacgacactagagtttaataccagctacctcgttctacaagctatggccatgtgggggaatgacagactactgaaatttgttagggaccgaaaaacgctgctgcagcagcactacctgaatgtagggactggaatttggacgacaccaggaacggttgaacaagcgtgggtgggagctgggaagcaggggcggccagtgggggcaccgggaggtggagccgttgtgccaaccgagagttggtggcgcggcgccggccgccgggcagggactggtggtgctgccttctcggagtgtggcagcggcggcggcggagcagtgccagatctgcgactccgacggcgcaatccaccattccctggccagtgggggcaccgggaggtggagccgttgttccagcaaccgagagttggtggcgcggcgccggccgccgggcagggattggtggtgctgccttctcggagtgcggcggcggcggagcagtgccagatctgcgaccccgacggcgcaatccaccattccctggcctccgcattgcatcaggatctaacaatcaacaagcaagcttgtccagtctcataagtaacagctacctggtgtagaagggttgctgctatctgcctgtcttcaccttatggtaatgtctagcaagttgtaaaagatgtctgtcactgtctgatgatctctgctgtgagtctcactcgtctgctgaacttgacgggtgcagaaggaaacaagagaggagcaagaaaggccggattctggcagcttcctctagtacattggctgcaatttctctttcagtttctaccatgcctcgcaacttggaatgcccagtgcagacccagatggcagtctcagccttggaccgaactcttagcagtgagtatcctactaaaagcaaaagcgagaccaaggttggtggatggaaacgtgtttttgtccaaaccgatgttggttgtgtcctggctattcaattgaattgtggtgacaatgcacatacggtcaaaagaaagctgcaggtggccctaaattttcccactgatgagagtgttctgaaaaatgatctcagcaccattagaaatgatttccctttgcttctcaccaagactttcatgcatcgaagttcctccacaccatgcttgtctcctagtggcaaggatctccaacagcaaaaagataggggctgtccaattgaactgttagtatgcccgagccgctgttctcgaacaaggcagctcgtgaaggatgttgctagggcaatcaagaaaggtgtggatccagtacctatcaaaagtgggcttggtggtgcttactatttcaggaacagcaaaggtgagaatgcagcaattgtgaagccaaatgatgaagagccttttgctcccaacaacccaaaaggttttatagggaaatcccttgggcagccaggcctcaaaagatcagttcgaattggcgagacctgttttagagaggttgcggcgtaccttctggactatgataactctgctaatgttcctccgacgttacttgttaagatttctcatcctgtgtttcatatgaatgaagacatcaattttgctaacaaaaatattgctgatggtagcattcaagctgttagcaagactgcatcatttcagcagtttattcctcacgattttgatgccagtgatcatggcacctcaagctttcctgtttctgctgtccataggatcggtattcttgacatcaggatcttcaacactgatagacatgctggcaatcttctggtaaggaagcaaaccggagcaggaaaatttgggaatcatactgaacttattcctattgatcatggtctctgccttccagagtgtttagaggatccttattttgaatggatccactggcctcaggcatcagtcccattctctgaggatgagctcgagtacatagcaaatcttgatccagtaaaagatgctgacatgctgcggatggagttgcctatgatccgtgaagcatgcctgagagtactaatactctcaaccatatttctgaaagaagccacagcatttggtatgtgccttgcagagattggggagatgatgagcagggaatttactgggatggaagatcagccaagtgagctagagtttgtctgcatggaggcaaggaggctggcagcagagcaagaagacagttccacagaacttgactctggtgaggaggatttaactcagtttgaacttgacaatgaatatcatgaaatgctaaaagaaccatcgacccgccagtttgagtttaagacaagaaactccagaaaccaactgtccaaattagatgaagccaatgaagaagaggaagaagaggaagatgatactgaggaggtagaaagtgatgctggaaaattagcatgtcctaggcctgttaataagtggcttgctaacatttcaaagctgtcgacctcactgaagggtgtcaatctaacaaacaaaacccagcgtcaactgtatgctggtcctaagtttgtggatcctgtgaagagcaacagcaatgacagcggctctcagcattgtaactggggaagtgcaaacgacatgctcccttcaagtgtgagcttcgtcaagctggctgacatgaaacctgagacgtggtgcctgttcctcgagaagttccatgagctccttcctgagacattccgctcacgcaagtgcattgtcaaagagcaaagggcgaagcagaggcttggcacttcttgccagttttgagttggcacaggagtagagaggtgagcacctgctcggccgttgctgtggctttcatgcaggtgttgagctctgcagttatcgaataaagccatttttcacaggattgtgatttgcaacaggatttgagtgagtgggggcctgaacctgatgtccatgctgatatgatggcctcgctttgtaaatacattttccccctttttcttagctaggctctgctagacatgagttgcttgaaagaagttgggattcaatgtctgcctgtttctggccgcccgactcttccactcatgatatgcactcaaaagtttcattcgaatgaacattcagcagaaagtttctcgtgtcgtaactaacattgtggcagataaacgctaaa

SEQ ID NO: 155025 - DNA, 888 bp, Zea Mays
gctctattttcatttgaactactatacaccactttaggatgggagtcgtttcattgaaacatgagtttttttaatcatcaagattttggattaagtgttagtacttagtagaaatgtgatattagtataaggctaattaccagtttgttgcaatcaatgccacctatggttggtgtttctttagttgctgatgcaactgaggagctcgagcacgacacgattaactcgggaattttatgtaacgttgatgcaaggacactgacttttatcatcagaaagacttcctactgttgttggcattagcataaatcatatgaaggaagtagattcacatgcacccgtgaagcagaagctacaattatttccaataaatgaagctactcttaagccatttgagaaggttgatttattagacagccctattgccagactacctgacatagagaccacaacacttggagccacatatgttgctagcttagatgcaggagtttggaccaaggaacagttatttgcaggttagcacaaggagaacgcgacagtctttggcccaaaactggatgaagcgcacaagaagaagagggctgattcatggtacaagacggtttcaaatcattcgatttggctgacctttctctgtaaatgtttcttgtccgcgctgctctatctgtttttagaagatgcaaatgaataaattggtctttgctggtattattcttaactactttttatttactgtctttacaaaagcgagtacaagaatatcctcaaattttcgtcaggaagtgtttttctagaatatttatgtgtgcagtgtgcttccatagacttgaatggtttgcatagactatcccatcaacatagacaattggagaagctcaatttccg

SEQ ID NO: 155026 - DNA, 315 bp, Zea Mays
gccaacaatgagattatggctggttcatatgttcattaaaacatgcatatttttattatttttattagtgatcttacaaatgtggattagaatggttggacatcaagttttcctcaacgagggagctgaattacaaaatggcaatatatgcatacttattatggattgtttagagcacttacatagatgtttgttaggaatgtttccgacctatgttgcaacggcggaggaggtgaaacattattttggtacaagctcgacaccgacaccgacaccgacaaggctctataatagcaaatatcttttgctttctac

SEQ ID NO: 155027 - DNA, 486 bp, Zea Mays
cgctccgacgacgcgcccggccagcctgtgctcctctcccgcgtcttcaagtccgagcgcatcgagctctcggaggaccgcctcatcgcggccagcaccaagggcttccgcatggtgcgcgcgacccgcggcgttgtggcaggggcgtggtacttcgaggtcaaggtcgtgcacctcggccccaccggccacacccgccttggatgggccaccaacaaggctgacctccagatgcccgtcggcttcgacgcctatgggtttgggtaccgtgacgtcgatggcgccaaggtgactaaggcttggagggacaagtacgctgatgaagggtacggggaaggagatgtcctggggttctacatttctctgcctgatggggagcggtatgaaccgaagcagcctgacctgattcagtacaagggaatgccttttcacgtccaagtccccaaggaggagcagaagacgccggatcctgtccctggtgagtac

SEQ ID NO: 155028 - DNA, 849 bp, Zea Mays
tatatgatggatgaatgtaccatacgaatggccaagttcttttgagtagtaatgaacaaactgtttgtttttgttttcctcttcattcctgatcagatgtccaaggttccgaactgctctgtctgagcaacaggggggcaagaaacattaaaaagaagcgagaaacattataagaacacacacctgacttgggtcaggaattgcatgaatctaaaaggcaaaatgcacaagagattgctgagggattgcagtttcacaagtcatagaccaaatgacaacttatcatgatgatgtattattcgatagagatgtagggaaagaaaaatattgttactgtattgtatattattttttgggagcggatgggaaggaaaactcgttccttcctttgtactcattattcagattgtcaacctgttttaaatgttttacaaacagaaagtacacctaaagcactaaaacaactgaactccacactatagcaagatttgaaaaaatacagatgagacaaaaattccactggcaaggacatacctgaaggactgagaagatcacagagaggaaggtgattttgttgggcctaacaactaagttggatggatgaagttgtgcatgagatcttcatttttcccaatactaattagtgaactgtactttagtgtggaaactaagactgcatcagttacatggtagtttggttttcttcttgttttatgtctccttaatttttcagcttatgttttgtctctaaatttattttagattataaaaatgaatgtatgtctatcttaaagactgaagtggtactatcatggcttgctgcaattataatgatgatctgagttaaac

SEQ ID NO: 155029 - DNA, 1382 bp, Zea Mays
cacgattctggcatcgcgcgattcctcctccatcccgcgtaggccggcgagatccacggacggatgcccccgcccgcgattcccctccccgcgcccgcagccgccgctgccgtcctcgcgcccgtagccgaggacagccgccgcacccgttcttccctgcattcaagtcgtcgccccactgcagccgcatccaaggcgtcctccattccatccatggctccatccagggcatccctgccctcaccgattcttcccttcagccgcgcccacaactcccctttccatgtcctcgcgtcttccattacagccgcatccaaggcgtcacccccttccatccatggcagcccgcgcaagattcttccctgcagccgcgcccacaaatcacgcgaattccccttccatggcgtcgccccttccatccatggcagtcgcgcaccctctgcgcccttccatccatggacgcggctccctacgcgccgcgattcttcccatacgctccctccgtgctgtttgcggctgccaatcctctccctccgcgccgcgattcttcccatcctctcgcggctgccttcccccattagtgtaggcgtccactctccctccctccgcacaccacatctgcgcactccgcgtccacaaccgtcgtcggtgctctctctaagtgtggcaccactgcgtgctccaggcacatcatcggtgtgtcgctgccggtgacgaagaaggagccccgctcccaccggccggtgtgccgccactccgcatccgtgcccagcgctggtgttccacgttgcgaagggaatctcaaataacaaaatttgtcgattttaagtttcttcatcaaccagcgaggggtgcgaagaaggaagggatttgcgcttggttgacccggaccggatggcaggacaccgtcgggggttcgctacaacgcagcgacggcttccgcagcttctcaagccaagggggtctttgcatatcattaaagtttggggtgacctactaaacaaaaatgcactccgcaggacgttggctaaggaggattatggcataataattgagactatgtttaggcggttcagaagacaaggtaccagcgagaggaaatcatatggctgcaccaagccaccaaaaaaattagttactgtagtgaagaactttcattcatctgggcactaaatgtatattagattggcagctgttattctgtaacatattatcacgttttttcttttccctaagattgcagtagcaactatagtcatgtgaaatcaaatctgagtttagagaaaaaaaaattctaaacttctgttctctatcatgtgtgaagataacttcctcatgatatctcatatatcttttcaaatggttagccagctatttcaagt

SEQ ID NO: 155030 - DNA, 1990 bp, Zea Mays
cacgcaccaccaccatcactggccaaaccaccagcaccacctcaccgaggcgggcgcaggcagcgaggctggcaggcattcgcaaggcaaaccgaggcaccgacgcccaaaaataaactaggcgtccccacaaatcgctccaccttccttccctctcccctccccttctcgctccgcttgcgctagccccgagatccacgccgcctcctctccggcgcccccgccctcgcctacggcggctcacgctgcctcctggccatctctgcgcggccgcgaccgaccgccggttttgctaaccggtccagggagcactgggcaggaggaggaggaggtgggttccgtagaggcgcggtgccagcctgagcaagagggcgggcgggcggccgggcgccggtgacgttctcagcttcctgcaagctcgccgagttgccgggcggcgtcctgggcggggttgttggtggcgcagggaagcggggaggaggctcgccttgctcgtagctgcattggccgcgtgcgccgaggaggcggccgatttaatcccaggaggagcctccccagcttgtttcgcacgctcccggcgccctaggtgcttctcgctccgcttccgcttggtccatggtccatggggtggaaggtggcgtcagggtgtaaggcggccggcgacaagctcaggctcccaacctcctccgccgccgcgcggtcgcggatgaagctctggttggtgcgcgccaccaccacggtgctgctctggacctgtgtcgtgcagctcacggccgtcggggacacctggggcccgcgggtgctcaagggctggccctcctgcctcacgccgcgcgaggaggaggcggccgccgcgcgcccgcgccctctcgtcgtcgacagggccgcgctgccgcccaaaagaatatataggaataatggttacttgatggtttcgtgcaatggtgggcttaaccaaatgcgagctgcaatatgtgacatggttgtaattgcaagatatttgaatgtcactttagttgtgccagagttggataagacttcattttggaatgatccaagtgagttccaagatatatttgatgtggagcactttataacctcgttacgaggtgaagttcgcatcctgagagaattacccccaaggatgaagagaagagttgaacttggaatgtttcactccatgcctccaattagttggtctgatatctcctactatcaaaatcagattcttcctttgattcgtaaatacaaggttgtccatctgaatagaactgatgctaggctagcaaacaatggtttaccgatggagactcagaaactgcgatgccgagtaaattatgcctctcttaaatttaccccacaaattgaagagctgggcaagagagtaattagaattcttcgccaaaatggacctttcttggtacttcatttacgttatgaaatggatatgttggctttctctggctgtactcaaggttgcagtactgaagaggcagaagaactcacaagaatgaggtatgcttatccatggtggaaagaaaaagtgattgactcagacttgaaaagaaaagatggcctttgcccattgacgcctgaggagactgctcttgtcctcagagcacttgacattgatagaagtatgcaaatatacattgctgctggggaaatatatggtggaaagcgcaggatggctgctctaacttcagcatacccgaatgtggtgaggaaggagacacttttggaaccttctgatctgatgttcttccagaaccattcatcacaaatggcagcactggattacttagtatccttagaaagtgatatatttgttccaacatatgatgggaatatggctaaagttgttgagggtcatcggagattcatgggctacaagaagacagtcttgttagatcgaaaactcattgttgagctagtggaccggtacacaaatggttctctgcaatgggatgagttctctgcattgatcaag

SEQ ID NO: 155031 - DNA, 543 bp, Zea Mays
atgacgtgcgcgcagattattgggactcgacgagctggacagagcaaagagccgaccccacgtggcatcgacaacaacacgaaccagcaaagctttcccgccgcaaacagaacgcccggacggtgtcacgacaaactccaaaacattgacagtgaagacctgagaacaagcaggctgggcgccagagatcagggacgcgcaggggaggggatccggcgcagggagctgccgacggtcggcccgacagcgagcagggacaccagggcgccgcaacggccaggcaccatggcagggagatggggaaggtcgagctccggccgggaaggtgcggccatgggtgagttgggcgtcgagcacaaggagatgggcagagacgcgcgtccatgggaaggagacccgagcagggcaagcacatggccatggagacaagggaggagcacggcgaactcgaagccgcgcgccggccagggagcagcaaccgaccatggaagagggagctggggggaccgcggtgcgagcagggaaggagcggctgggggatga

SEQ ID NO: 155032 - DNA, 675 bp, Zea Mays
atggcgtgcttggccatggaaacacgttgggcgcgagcgaatagaggggcgcgcgcgaaagcaagcacacggagggagagagacagcgcgcgacgagggggatccgagctgggcgagctcagccatgggcgccggggctggaggaaggagcactggcggccatggacaaaggcttgcggccggcgagcgcaggaggacgggcgccataggagggagaagcaactgagcgctgagcgcccgcagagaagacgcgcggcaccagggagcgagcagctaagggagctcggcagggcgctactggggaagtcggcgtgccgtggcgaacagaggagcaccatgagcggcggaggacgactccccagcgtgcggatcggtcggctccgaccgcgacacccagtggcagcgacgcagtggagcccgtccaaggagcagcgtccagcgagctcgcggtaccaggatcccgccggtgaggagccgagctggagcaccggcgaccagcagagaagaagacgagctgggagaggggaggaatcactgggtgaacgcacgcgcagggagaaatcaagcgcggcaggattttcttctcgagccgaacagtggctcggacctgcgcacagagatatagacgctagaaaaatctgcgtaggggcggcgggatttttgctccaggggtga

SEQ ID NO: 155033 - DNA, 978 bp, Zea Mays
cacaccaatattttgcagcggaaatcttattaccaaattttacaagttacaaaaattttacttcatacatgatcggagtgattactacagtgattcaaagaaagaaactttgaactgttataaattatgtatagttttgaaatatatgctagctcaagtgaccatcctcaataagaagataaagacggggtatacttatataagaaggtcgagcccaccggcacttaacaccatcaacagcaacacaaaactataacctgaaaaacaacagggaataaaaccctgagtatggaattactcagcaagacttacccgactaaagaaaagactctcaaggatatgctggatttgggaatcaaggagagcctttagcaagaatcaacttaggtacttttgcagaaatagcttactaaagtgagtccttactttcaatattttaacgccagattaaatattaatagactctgtttgcatctggtctaatttcaccatctcatcaatacaacatcatttttattcatgaggttcacatcctgacttaggttgtagggcagtgaccaagtcttcataaccgcgaaggtacggcgatccgaatcgattatactcagctgaggatctcctatcatacggagacactaattatcgacgtacaattaagcgcaataattacgcttctcggacctatcgcaaacatcacgaaacaacaaattatacacattaatcacgattagcctaaacacaacttatcaattaattaattaaattctaaacttatccctctttgtataaattacactacatcgctcacaaagaattattttaattctattttactcctcacatgtttttcatgtcaacaattactcaaacacttctttatcgtaaatatatacacatctatagaagtaattaaaatatttcctcattacacaagcctattaatattctactcggtacgctaattccgctaattggccg

SEQ ID NO: 155034 - DNA, 1868 bp, Zea Mays
cagttatatcaaaagaaatctgctcgtcgtggagctcccacgcgcgcagctccctcctgccctctgtccatccatggccgcacgctgctcggctctcacgccgttgatttggagcgccagtgcgagcccttctctggtcctcatctcctcagccgctcggcctctgcttctcccatggtcgtcgcgccctctgctcctcctagcccgtcgagtccctccccatccgtgagctcgccctgctccccggcctccctcatcttcctcaggtccagccgttacatcattggtcacgctcgggttttcctctcttcgcctcggcgtccttgtccaagcgccttgcctctcctatctctgtcttgcacttcgtcgcctcaacgcgctcgcatcccttggggccgttttgcctccgcgagacgccagcagcgagctgagtttggtttcgccgggttgctcggattttgggtccgatccggtcttaggcgttcgccatggcgtctggctcctcccctctgttgtctccctcctcaggcaccagccgtgtcgacctccctgctcgctgttctcaagctcgctccggccgtgagtgccgtcgagcccgtcgaaccccgtcctcccttgctcgaccttgtcctcgcccttctggtggccactgtcagcatggtgcttgactgtgctccactatcgtcgctgctgcgtgcctcattgtgtgctcgtcgggggtgctgtctgttgcgcctctgcacccgcccttatcgctagtgccaactccggccgtcgcaacatctactccatcccggcaccctgcactagtgctcgacaaaaataccaaacaagtcatcatgccattgtcttcgtcgaatggaaatcgttgtgctgacacatcgatgtcgttgatcgccatcctcgtccacgccaagtccgtgtaactcgtcgccacaccctgtagccgcttccacgatgttgcgtggggacttttttgcgtcacatgtgcttccactcgtcatgctaaatccatctgcttccatttatgtcgacagcaagccgtgaagatgctcttgtgctagccacgcgccacctgctcgaccaaactgaatccccggagtatctggtcaagaattgagattgtgtgcatcgctcgccaggtgtgtgtggtcaaagacgtcaaccgaaaaccatcgtcgttcctctgactatcgcgtcaaattggtcatggtaagccaatttgttattggtgttagttggattgatgaatggtctaacttggtatattaatcgtgatgatactgtggtgagccgaatggctatttcagttattggttcgatgatagggtttgttagatatactaattatatcggtcttcttgccttaagcttatgggtgtcgtggttgtaggtattgttgggggccttcgtcctccgaaggtcctcaaaaacgtaatttaacagtgtttgccaagcatggtttataaacaggtaccttcggattcagcattaaatgcatatacgatgaagaggacatgatcgtgacgaaggttgctgctactttgaagctatgcacaaaggaactttgactcaatcacgggaaaatgaaccgacttaaaggggaaaaggctatctagtcctcatagatttttctataagccaatagtaaatgtaaagggcatgactgtaatttctcataggctgtgtcctgtgcctataaataggtgaacagtacccacgtactgttcatgctgacttgtgcttgcttttgcatcacgcttgtacttttctgccttctatcaagtcgaaggtacttttgtaatttaatattgtatctgcttttccatgattatatatgataagaatatgttgataatgttatatga

SEQ ID NO: 155035 - DNA, 1295 bp, Zea Mays
gggacatgtatagtagttcactatatgtgtatgtgtgctcaaccaaattgaaatgtcttgtccgatcaatgtcgaggaagcacagcgaagtcgagccatcaccgtggccgactgtgctccgggcgacgcgaccccggcagtgaccgagatcagcgcgacggggaagcgcggcatcccggtgctcgttgcgccgctccacagccagcgagaatgtgagggaagcggagggcgccgcgccagtgcggaggagatgatgagcatggggttccagggcttcctcctcctggaggagaaggacgacgacgatccggtggcgcagcgcaagaagtggttcaaggagatgcgcgggtggctgatggtgctggccaccgtggcggcgtcggtgacctaccaggccggcctgaacccgcccggcgggttctggcaggacggcgaccgcgccggcaacccggtgctccgggacaggcactggtcgcggtacatgatcttctactacttgaacgccaccgcgttcgtgacgtcgctggtgatcatggtgctgctgatgaacgagcggttctaccacacggagaccaaggtggtggcgctcatgctcaccaccttcatcgacctcatcagcctcatcggcgcctacatcgccggcaccacgcgcttcttctcctcctgcatctacatcatcgtcatcgtctgcgttgcctttgccggggtcatctacttcggagaggtgatggctgaaatatgcaagttcaccgtgagaaagatgccctgcatgctccgacttacgcagaacaagtggttcccaatgccggcggaggtggtgaagggtctgcagcaggaggaggagcgcattagccagaagaggacgacggcggggaacggtcagcgcggtggctgctgcgcctgctgtgcgccacgcgcggagggctgatcctgcgccggcaccacgccttcaggaggggcgctgaacagtgatctgattaaaccccggctacacacacacagtgcaccatcattttcagaacctgttgataataaaagactgcctactatgccacaccatgtttgtccttttacacttctctcatcgatcatgtatgatctatctccattctccacatagagttgaggaggcttgtgcttttgggggttcagttgatttaacacctggattggattcatgaggcccttttcttcaaaaatacaagtctgtttcagagcgattctgcttgaaacatctctgttgtccgtctgttctccagtttcactagagaatcgagctgtttcttcattcaaaa

SEQ ID NO: 155036 - DNA, 494 bp, Zea Mays
gagggaaaacttgaaaaccaaaatcatggacttcatcaagtttgacgtcggcaacgtggtcatggtgaccggcgggaggaacaccgggcgtgtaggagtgatcaagaacagggagaagcacaagggcagcttcgagaccatccacgtcgaggactccatgggccaccagttcgccacccgcatgggcaacgtgttcaccatcggcaagggcaacaagccgtgggtgagcctgcccaagggcaatggtatcaagctcagcatcatcgaggagcagaggaggcgcgatttcattgcccaggctactgccaacgcataagttctctgaacgtgctgcttgaagctttttgctatgtctagttttctcctatttgttgtacaggaaaagataggaaaagatagaatgtaattcaaatttggtggccgcaaaaagtgtggagacttgaattcatataaaattaggcttaacattagtgcaaacagttgtattttagttt

SEQ ID NO: 155037 - DNA, 1037 bp, Zea Mays
tcggatacagtagatcgcacgagcaaaaagtgtcacactactcccacccagcaatcatctcatccaaatccaattccagttccacatccacttccaaactaaacaccatgtccatgtctgtagagatccccatggatcgccctgctgcctccgctccacccccgggtgccgtgtgcgacgtggtcgacgaggacgaggcggcgccgccaccgggcaatgctaggcccacgcgcgtcctcatctcgcccatcgtgcccctccccgctgacggcgcttcggccgacgctgcgctgccgccggcgtacaccggcgtgctgtacctgcaccgccacaagtggcccgccgtggaggacgaccccggcaagaagcgggagaagtggctcaaggagatgcgcggctggctcatggtgctcgccgtgctggccgcgtccgtcacgtaccaggcggggctgaacccgcccggcggcttctggcagcaggacgacgcggagggcaacgtggccggcacgcccgtgctccagtccaagttccccaagcggtacaccgttttcttctacttcaactccacggcgttcgtgacgtcggtggtcatcatcgtcctcctcatgaacgagtccttctaccactcggaggccaaggtggaggcgctggagatcatcgtggtgctagacatggcggggctcatgggcgcctacatcgccggctgcacccgcgaggtctcctcctccatctacatcatcgtcctcaccctcgtcgtcttcctctacgtcgtctacacggcgcagttcttgcccaagctctggggcctagtcgttgacgtgcccttcctccacaaggcggcccagggcggcgcgctgcccgtgccgcaagacatcctggacggggccaggccgtcggctggcatcggccggaccaagtcggcgccgccgcgttagctaggcggacgaactgtgcctggcgcacttttcctagacgtatatatgtaccagactcactgccagactatatatgattttcatgctagtacgtagcaagct

SEQ ID NO: 155038 - DNA, 845 bp, Zea Mays
tttctactggaagttctttaatacttgggttttggaccgatctggtgtaatcttctttcgaaattaccgcgcttttccttgactagagtgcttgtgaacggggagccgggagatctcatatcccatcagcgtggactccgacaagggggctcgttgtctcccatgttattcattttggtgatggacgttttaaactctatggtttctagagcttcagagcaggggttacttcagtggttgatggagagaggaaatgggcagaggttgtctctatacgccgatgaggtggttttattcatttagcccaggaatgctgacttaatgttgatcaaagaaatcctaaggatctttggggaggcgtccaggctggtcatggatattgggaagagttctttcactcctatcagatgtgaggagcaggatttggctgtggtgcagcagattattgccttgcaatgtggtgcagttccccctcaactatcttggtttaccgttgtggattaggaagcttaacaagtctgatttctttcctttgattgacaagatcacgaatcggcttcccgggtggaaggcagcgcttatacatccggcaggtcaggctaccttgattcaggctgtcctcaatcctcattgctatcctgatatatcatctcatttctctccagtgtccgaaatgggtgattaaagctatagacaacatgtggggtttcttgtggaagggaaggaaagacgtgaaaggcaggcattgtctagtgggctggcagcgcgtttgcaggccacgtgagcttgggggtctggggattcataatttggagatgttgggatggtctttgcatatgaggtgg

SEQ ID NO: 155039 - DNA, 6166 bp, Zea Mays
gaacaacccgatctcaacccactctgctttgccattccgctcacgagctctccgcctctctctctctctctctctcgctcttttccgccaccccgtcacgccaaatttcgaaacagcgcgagagcagcaaaagccgagggagcccttctttctcagattagaacctaacgagtgcgcttggaggcggaggctgcgagcttgctgcgcgaatttgggcggtcgatccggcgcggcggccgggtatggcggccgcggagcagctgaaggagctgggggagaagctgcaggcggtggcgccggctcctgcggacgaactcgccaagctcctcgagaaagctgtggaatgcttacgtggaatagagcaatcaccggggtcctcagtgatggaagctattcaaccaagtcttaaggctgttaccagagaagaattgctgaagcatgaggatgacaatgtcaaagttctcttggcaacatgtttctgtgaaattacaagaataactgcacctgatgctccctacaacgatgacattttaagggatatattctatctgattgtgggtacatttggcggactcagtgatgttaatagtcaatcctttggcaggagagttgctattcttgaaacagttgctagataccgagcatgtgttgtgatgttagatcttgaatgtgatgatcttattacaaacatgtttcaaacatttttaggagttgtcagcgacagtcatgaagaaaacattgtaaagtcaatgcaggcaataatgatccttattatagatgagagtgaagatgtacaggagagtcttctacgtgtactgctgtcagcattggggcagaaaaaaactggtgctgcaatgtctgctcgtaaacttgctcgcagtgtcattgagcattccgctacaaagcttgaaccttacataaagaagtttctaacgtcatcatgggctgggaatggcagttcttctaatgatcaaattgatcaccagggagttgtatttgatttatatcagtgtgctccgaaggttcttaaggcgatcgtgccgtatattactggggagctactggcagatgaagtagataacaggtctaagtcagttgaattacttggggaaattttttccttacctggagcctctattgtggaatgtttcaagactcttttcacagaattcctcaagagactgactgatagagttgttgaaatccgtatttctgtggttgagtatttgaagagatgtctaatatcaaatccttccagagctgaagctcctgaaatcatcaaggcactttgtgacagattgttggattatgaagaaaatgtgcggaagggagtggtggctgcactttgtgatgtagctacccattctccttatgctattccaattgatacaattaaagtagtagcagagcgtgtccgcgataaatcgcaggctgtgaagtgctataccatggagaggttggcagatatttacaagctgtactgccagagggattctgatagctcaacaaattctgatgattttgagtggatacctggaaaaatattaagatgtctttatgacaaagagtttaggccagagtcaatcgactctattttgagtggttcattgttctcaccagagtaccaaatgaagggaagagtgaaacattggattacagctgcgacatacttcgataaagttgagatgaaagcccttgaacaaattctcctgcacaagcaaagactgcaacaagaaatgctgaaatacatatcgcttcgggaaccaagccaggaagatgcccctgatctgcaaaaaagaatctttggatgtttccggaacatctctcgcttatttagtgactccgcgaagtgcgaggagaacttgaacatgcttcatcagctaaaagatgccgatttctggaaaatattcactagcctgcttaattgttcaactacatttgagaaggcttggtctcttcgggcagagttgcttaagatacttggtgaaaaccatgtgctttataattttgttggcacattaacaatgagatgttcatatttacttgtaaacaaggagtatgcaaaagagatccttgcagaagcttctgcacagaagacttctgggaatacaaaactcatctcatcgtgcatgaatcttctaacggcaatatctagtttctttccatctcttttggctggacttgaagaagacattgttgaactcctgaaagaggataatgaagtgcttaaagagggtattgcacatgtgttatcaaaggctggtgtcaatattcgtgaacagttagcctcaacaagttcccttgatcttctattagagcgtttatgcttagagggtacgcggaggcaggctaaatactctgttcatgcacttgctgccattacaaaagatgatggtcttatgtcactatctgttctttacaagaggcttgtggatttgttggaagagaagaaagtgaatataccatctatcttgcaatctttgggttgtatagcccaaatagcgatgccgatttttgaaacacggaaagaagagatattaagtttcataattaaaaaaattcttgactgcaatgatgatatggttcaaaattcttctaataaatctgaatggggtgatagtacacataattgtttgctgaagatttatggcatcaaaactttggtgaagagctatataccttgcaaggatgctcatgcacagccaggaatagagaagttaattgatattctgaagaatattcttacctatggtgatatatctccaaatatggtctcaagtgctgctgataaggcccatttgaggcttgcagcagcaaaagctgttctccgcttatcaaaacaatgggaccataaagtgcctgttgatgtattttatttgactttgaggatttcacaggacgattttcctcaggtgaggaaattatttctttgtaaagtacttcaatatatcaaggaaagggccttggatgcaaaatatgcttgcgccttcatgtttggtgttaacgattatcatggcccacagttagaagagttcaagtacaatctgactgaagtggttcagatatgccaacaagttaagatgcgccaactttcagtccaagcagatatgaatttgttgacggcttacccagaatatataatttcctttttggttcatgcccttgctcatgatccttcatccccggacattgaagaacatgaaaatgtcaaagcatttggtccaacttactggcgactttacctgattctttcaatcctcctgggggaagaaggtttgcaacatagtgttccaggcatgaaaaaggatagcttcactacaataatatctatattcaaaagtatcaaatcttcacaggatgtggttgatggaaataagaacaagactctgtgggctatatgtgatcttggtactcttattgcaaagaggctatgccaagaccaaacgagtttatcagaagctcaaaccgttccattgcctccccaactttatgcaccgcttcaggataaccaaaatgaaaattctgtggagagttatgggcagatttggccgggatgtgagaaagtactggctcattttgaggctgtaatgactgcaaacatggataaggttgaatctcccaaacataagatgcttattgatatgactgatgaatttggaaatgaagttcctcttgggaaaattgtcaaacttcttaaattgcgaggagaaaagaaggcggagaaaaagcagaaggcaccatctagtagttcagtaaatgccgagaacgatgatgatgtcctgggtttagtaagagaaattaacttgagcaaccaagaagatttggaggaattgcaaaagggcaagcctaagaagcgccagacagatacaaaaaatagtaacaagaagccacttgatttttcttcacctaaacgcaaaagatcaatttctaagagtagaccacattcagcaaaaggtagtaaaaacagtgatgaccgtctaatacatactcctaacacagagaggaccagtatctccttggaaactaaattgaaggagaaaaacagagatgattcaatcgatacggaactgttagtatctcccagcattagaacccctgtatctaaaggaaataagggtgctaagagatctcatattgatattttgagcagtgttccaaagaagtctgctgatgcagagagtactaagagaactgttgagccgagaagtctaaatgggtcactcaaaagtcaaaagtcaaaaccgatttctgggttagtacagtgctcaacacaggactcaagcggtaccgacttggtaggacaccgaataaaagtttggtggcctttggataagcgattttatgaaggtactgttcaatcatacgattcatccaagaaaaaacatacggtgctatatgatgacggagatgttgaagtgcttatattggctaaagagaagtggatattgattgaaagtaatgattcatcagtgaagaagcaaaagaaggatcttgggacaaaccaaggaagagcatgggagggaactagcagcaacaagtctccgcctagccaaccaaagtcaaaaaagaggtccttgcctccaaagaagaaagggcaacccaatgataagcgaagaaagactgcagaaagaaacaattctgtagaagaggagggtattggagctggtgacaatgattcagattcatccagtcctcttgcgcactcagatgttgacaaagatgtaaactctgttggccacatggaggaagtaatagttagcttagctgagaaagagaagaccaggaaggactccaaaggcatggaaatgaaagagaagggagggaaggactccaaagacgtgaaaataaaagagaaggctgggaaggagtccaaagacgtggaaatgaaagagaagatagggaaggagtccaaagatgtaaaaatcaaagaaaaggcagggaaagaatccaaagatgcggaagtgaaagagaagacagggaaggactccaaagacgtggaaacgaaagacaaggcagagaaagactccaaggacgtggaaatggaagaggaggcagggaagcactccaaagacgtgaatatgaaagagaaggcagggaaggagtccaaagatgtggaaatgaaagagaagacagggaaggaatccaaatatgcaaaaatgaaagagaaggcagggaaagaatccaaagatctggaagtgaaagagaaggcagggaaggactccaaagacgtggaattgaaacatgaggcagggaaggactccaaagacgtgaaaatgaaagagaaggcagggaaggagtccaaagactcggaaatgaaagagaagatagggaaggagtccaaagatgtaaaaatgaaagataagtcagtgaaagaatccaaagatgtggaaatgaaagagaagcccgggaaggactcaaaagatgtaaaaacgaaagagaaggcagggaaagagtccaaagacctggaagtgaaaggggaggcagggaaagaatccaaacatggcgaagcgaagaagccagggaaggactcaaaagatgtaaaaacgaaagagaatgcggcaggcaaagagtcgaaagacgcggaagtgaaagaaaaggcagtcaaggacccaaaagatgtggaaatggaagggatggcaggaaaggagcccaaagatgtggaaaagctggatggccatactttgagcaacgaggaatcagacaacgatactcttagcgtgtggaaaaaacgtacagcaaaagcaacatagtcttgctttctcagctgaccattcatagtaggatttgcagatttcacaggcaggcaaacgttcggagatgtggatatctcattgattgaccctttgcaatttgacagttgtactgtagaaaatgtttgtttggatagcaacacgttagtatacaacagtggaataggatttgtttgtaatgttattagatgcgggcacctgttgcccattaagctatggcatggtatccctggtttcttgtatatcttggagagcgtcagctcttttgcaggacatagtgctatgccgtcgaactcttgtagaaatgttgtaggcaataaaccagtgacacttgtcgaactacctgtgggcatccatttttcgtttgccatattactttggatctagaatctgacgctggaggtttagtatttgta

SEQ ID NO: 155040 - DNA, 1881 bp, Zea Mays
attaaagttctgcttcagtgcttccagtcttccaccacccacccccacaaagaagccgccccccgagttgacggccatggcgtcagcggcgaacaccatgccaggcaagtctgttgtcctcctctcgctcgtcacgcttctcgtcgtcctcatctccgccgcggagagctacgacggccggtatgccgtctcgcactcggccatggcgcgccgctcccgcctggggacccggcacgcgcatcaccgccggacaacggtgccgcaccggtacgtgctcgcggagaagagcagcgcgcccagcggcggcggccccaagaaccacagttcgccggcgaaggccaacgccagctcgccggcgccggcgcctccggccgccgagcagactggccggcaccaccgcagccacaagaaccgggtgcgcaactggatcatcggcttcgtggtggggtccctcgccggcgtcatctccgggatggtgctgtcggtgctgttcaggctggcgctcaactgcatccgcgggcggtaccggacgcggtccggcgtgatgatcttcaccccgaagctgatcaggcggccggagcacctcgcgttcctggagaaggaggacgggctggcgtcgctggccgtgatcgggcgcggcgggtgcggggaggtgtacaaggcgcagctgcccgtggagcgggagggggagcagccgcgcttcatcgccatcaagaaggtcaagaagcacggcggcgacgcgcccagcaacaacctgagcgatgaggagagccggcagctggacaagaggtcccggcagatccagtcggagatccggacggtggggtacatccggcaccgcaacctgctgtcgctggcggcgcacgtgccgcgcccggactgccactacctggtgtacgagtacatgaagaacggcagcctgcaccaggcgctgaaagccgagaacgccgaggccgaggacggcagcagcggcagcggcaccggcgccggcgggctgtcgtggcccgcgcggctccgcgtggcggtgggcgtggcggcgggtctggagtacctccacgtctcccaccagccgcagatcatccaccgcgacctcaagcccgccaacatcctgctggacgacgacctggaggcccgcatcgcggacttcgggctggccaaggcgatgccggactcgcacacgcacgtcaccgcgtccaacgtggccggcacgctgggctacatcgcgccggagtactaccagacggtcaagttcacggccaagtgcgacgtgtacagcttcggggtcatcctggcggtgctggccacggggaaggagccgtccgaccagttcttcacgcagacggaggaggtggtcggcctcgtcaagtggctgcgccgcgtcatggaggccggggagcacgcgcaggccatagaccccgccatcgccggcgccggctacgacgagcagatcctgctgctgctgcgcatcgccttgttctgcaccaaggacgaccccaaggagcggcccactgccaaggacgtccgctgcatgctgtcgcagatcaagacctagccagctaaatcaatcaccactagctataaactaattacgagctccttctgtgcttgtggagtcggccgcgcacgcgctcgaataggacgtgcatgatacatcatcgcatctcctgcctttccctttgcttgcgagatgcgcgagctttggcatggtctatggcttatcctgaaatatcagtatgattcatgtgttcctttgtacagtatctttgcttgaaagattcgaaccatcttcttgtacaagggtccaaatccaataatgctacctactacttggtacagctccctcctctgtgctaaaatattagattgttggtttttttctgt

SEQ ID NO: 155041 - DNA, 261 bp, Zea Mays
atgtggcgggactccgcggacgaaactgtgggcagcgccgtcaggagggagatctcgcaaccgtggccggcggaaagcgcgacggcgaggcgggtgaacgggaccaggtggcccatgccagcactcgggaagaggacgatgcgcggggagcctcgtgagccgtggctggacctggaggccgatgatggtgccggcgaggacatggtcgatcacctgggttgtgtggccgaaggggtggagctgatacgttggtgtggctag

SEQ ID NO: 155042 - DNA, 326 bp, Zea Mays
cactaccattgactcagtagggaggcgaaagaaaaccgagcgccgccgcggggaatactggacctctacctcgaccggaccaccgaggacctgctcgcgccgtggccttagcttacagccgtggagtcctgccgttatgcggagccgttctctccgtcgtcgggagtcgggtgaatgccagggagcctcggtggaattccttcaatccagtgttcctcaccgagccgctgcaccatggttgagggtctcctcgacatgaaccctgcgtgaggacacgtgtcatctgaaaagcaagttggtacctggattctcaagtgccaggcaag

SEQ ID NO: 155043 - DNA, 1452 bp, Zea Mays
cactttaccctagaccgcctacctgcccagccgccgctctccttgttttgcctcgtttgcttccctcgtccgccgccggccgctctgctttggtggtccgccggctcctcgcgctaccgcgtcctagtgccgctgtgccgccccgcccttgccttctcggccacgcgccgcgcgcccgtcgtcctcgcgccaccacgcgccaccctcgccccctcggcctcgcacgcgcccgtcctcctcggcctcgcgccaccaggcatcgccctcgccccttggctgcgcccctcgcccctcggccgcgttgctcctgccctcgcccctccgccgcgcgccctcgcccctcggccgcgctgctcctgctaagtaccaaggagcaggcaagagggttgtgctagggcgtgggggctgaaatatgtggatggattttaggggcggatctgctggtgttttttctgtggaactcctcaatattggacatgaatttcatcgatttaagctcatttgatgttagggttacagtttcatggtaaaaacatcatttattttagcggaatggagtagaaatgagagttttatcgtgaaatggatatgcagagctggagtccttcaattcggtagctgtttcgttcagatgtttagtccgtcacaaaatcaatagccattggcttgagaaatttgctatcagtggacaacctgtttaacagtacttctctgcaatagtaatagatatttctgaaacaatctgtatgtttgtgcagaacatgctgtttggtgttaattaagttgttatattcatgaaccccattcttttgtgcaatcatatgcttattgtactttctctcagaagttagcttgtgatattctatttttgctgttgctgaaaaaagtattacttgtatgtcacattgtgattgctattaaacttatttagtttaggtcagacccttttctaatctacaatttccctgtgctaagttgcctgcacctctcggtccaacacacagattagattagcgtcgaggacgtccgctgttgctccctgtggctgctgttttgcagcataacaaatatagctacacacagctcaatgcttgtcaggatcaatggcagatagggagcatcgaatagtatttgtcacggtggggacgacatgctttgatgctcttgtcatggcggtagattctccagaagtgaagaagactttattgcaaaaaggttatagtaatcttcttattcagatgggccgaggaacatatgttccattgaaggtctcaggagatgctacccttcaagttgatcatttcacattttcaccaagcattgctgacaatatgagaacaacttccctagttatcaaccatgcaggtgtgttatagtctttccaaaatggatgaaaacattggaatattttccatggcattatattttccctcgctaaatcttgaaattgct

SEQ ID NO: 155044 - DNA, 1406 bp, Zea Mays
gaaccggatagggatatattagagtgatatttatctatacatatcagaaatctgtttttgtatccagatttgattacgatcggatattaaatgttcagattcagataaggactatacatataggattttgaattttcaggatggacagataacgggaaatatccgttacgttttcatccctcatgtcaccagatctgtaaaccatttggtgttatcctgtagtcagcgtatctggtttggacaaattagacgttgcgtttttgtgttttattatatgattattataggattcttgtctcatgcttttcagcagtccaagctgaagcaacctgcaaatagcaatgcggtatctgccgactctgggatgtcgaaccctggagtgaaaggtgattccagtgtttgtacccctttgaggcaggctaggtctagtctgtctctttcctttgctggtttgactggtgagagtagtgcgggagaccaccaagattgtgtggtatcatcattgcttcttatgggtgagcctccttggcagcctcctggccccgagggctcaattgctggaggtagtagagacagtgcactcacacgatacaaggagaagaaaatgagaagaaagttcgacaagaaaatcaggtacgcttctcgtaaggctagagcagatgtgcgaaagagggtaaagggtcggtttgttaaggctggtgaagcatatgactatgatcctctctgccaaacgaggagttactgaagcatatgatctttatccagttttaaattagcaaactgcaaccaaggctcgttgcagctagaacaaaagcactggcaatccaagctattgggccaaactgtgccttcgaaaagaaaaaaaaaggagaaagctgtcggcatgataaaatatagagaaatatttggatgttgcagaagtttttgagtgaggatcctcctttttcctcctgtacagtggttggaagcggtttgagtctctccatcttttgtgaattagcctgaatccagctaaacagacttgttgcattttgatctccattctgcatttctgctgactgccatcagtctacgtacacgggctggcggctgcggtgtttttggaggtgttcgtccagattagacaagatggctagatgtgatctgtgaaatatccttctattataataatgtaaaatttgctgggacctggatgtttctgctattatcaatgtgcaaataccaggtcgtagccaaactggtcgtcagtttgttctttttaagttggtgatggaacccatccaactggacagtggacaccaactttctgtgctcattctgtccaaaccaacctccaaactgactcgatgttagtactatttgtattatgtgactcctgagcaagtgagcttgtgctcaaacctcaa

SEQ ID NO: 155045 - DNA, 1675 bp, Zea Mays
agacttcctctttcttccccttctcagcctttccctctcttctctgctctttgcatctctctcttgttcctcccttcctctctctaaaaaagggttctgatccctttctagaagctcctgggtttctgttgccgacccgagctccccaggggcgctcaggaggcgccgagccggcgaccgctccggcggatctgaggagccgccgcggtcgctttgcctccggttccttgtaaactattgattgggaaacactctgaagaagagtttgttggctgcataacatctcctgaagctggtttgaagtttgctgataggaaagatcatgggcgctctctgtgatttctgtggggagcataggtctatggtttactgccgatcagatgcagcatccttgtgtttatcatgtgaccgtaatgtgcattcagctaatgctctttctcggcgtcatacaaggacacttttatgtgaccggtgtgcttcacagcctgctatggtccgctgtctagcagaaaatgcctcgctttgccaaaattgtgattggaatggccacattgcaggatcctcatctgccggacacaaaaggcagactataaattgctattcaggatgtccatcgtctgcagaactttctagaatatggtccttcgtttcagatattcctaatgtagcacctgagccaaactgtgagcaaggaataagcatgatgagcatcagcgacagtggtgtcagtaatcaagataatgctgcaggggacagtattttgttagatatagctagtgcaacacttgtaagtgatattggtacttgtgacaagcttttggtaggttcctcttcaggagctggagtgaacctacttccactggctactggtcaaacagaaacagctggatctgtggattccacaccagataaggttccctatacgccagataaagatatgttcagtaaggacagcatatatgaagatttttgtgtggatgacgctgaccttgctttcgaaaattatgaagaactctttggtacctctcatattcaaacagaacaactctttgatgatgctggaatagacatttactttgaaatgaaggaagcacctgctgggaattccactgagtccaagctgaagcaacctgcaaatagcaatgcggtatctgccgactctgggatgtcgaaccctggagtgaaaggtgattccagtgtttgtacccctttgaggcaggctaggtctagtctgtctctttcctttgctggtttgactggtgagagtagtgcgggagaccaccaagattgtgtggtatcatcattgcttcttatgggtgagcctccttggcagcctcctggccccgagggctcaattgctggaggtagtagagacagtgcactcacacgatacaaggagaagaaaatgagaagaaagttcgacaagaaaatcaggtacgcttctcgtaaggctagagcagatgtgcgaaagagggtaaagggtcggtttgttaaggctggtgaagcatatgactatgatcctctctgccaaacgaggagttactgaagcatatgatctttatccagttttaaattagcaaactgcaaccaaggctcgttgcagctagaacaaaagcactggcaatccaagctattgggccaaactgtgccttcgaaaagaaaaaaaaaggagaaa

SEQ ID NO: 155046 - DNA, 1565 bp, Zea Mays
agacttcctctttcttccccttctcagcctttccctctcttctctgctctttgcatctctctcttgttcctcccttcctctctctaaaaaagggttctgatccctttctagaagctcctgggtttctgttgccgacccgagctccccaggggcgctcaggaggcgccgagccggcgaccgctccggcggatctgaggagccgccgcggtcgctttgcctccgttgcgatactgcacaggttccttgtaaactattgattgggaaacactctgaagaagagtttgttggctgcataacatctcctgaagctggtttgaagtttgctgataggaaagatcatgggcgctctctgtgatttctgtggggagcataggtctatggtttactgccgatcagatgcagcatccttgtgtttatcatgtgaccgtaatgtgcattcagctaatgctctttctcggcgtcatacaaggacacttttatgtgaccggtgtgcttcacagcctgctatggtccgctgtctagcagaaaatgcctcgctttgccaaaattgtgattggaatggccacattgcaggatcctcatctgccggacacaaaaggcagactataaattgctattcaggatgtccatcgtctgcagaactttctagaatatggtccttcgtttcagatattcctaatgtagcacctgagccaaactgtgagcaaggaataagcatgatgagcatcagcgacagtggtgtcagtaatcaagataatgctgcaggggacagtattttgttagatatagctagtgcaacacttgtaagtgatattggtacttgtgacaagcttttggtaggttcctcttcaggagctggagtgaacctacttccactggctactggtcaaacagaaacagctggatctgtggattccacaccagataaggttccctatacgccagataaagatatgttcagtaaggacagcatatatgaagatttttgtgtggatgacgctgaccttgctttcgaaaattatgaagaactctttggtacctctcatattcaaacagaacaactctttgatgatgctggaatagacatttactttgaaatgaaggaagcacctgctgggaattccactgagcagtccaagctgaagcaacctgcaaatagcaatgcggtatctgccgactctgggatgtcgaaccctggagtgaaaggtgattccagtgtttgtacccctttgaggcaggctaggtctagtctgtctctttcctttgctggtttgactggtgagagtagtgcgggagaccaccaagattgtgtggtatcatcattgcttcttatgggtgagcctccttggcagcctcctggccccgagggctcaattgctggaggtagtagagacagtgcactcacacgatacaaggagaagaaaatgagaagaaagttcgacaagaaaatcaggtacgcttctcgtaaggctagagcagatgtgcgaaagagggtaaagggtcggtttgttaaggctggtgaagcatatgactatgatcctctctgccaaacgaggagttactga

SEQ ID NO: 155047 - DNA, 1072 bp, Zea Mays
ctggtgaccgcgcccctcacatggacgcgccccctgctcgtgatctccccaggaccgagtgcccctccccaactctcctacaccctcaagtcgagtgggctctctccatggatgaagcttaggcaccgatgctctccttctctagttcgtcatgtcagcttggtgccctctctcccatggccaagcctgaggtccctacctcgacctccacatcggcctccatggcgctcttctccctgggcacccagacgtgtgcgcccccttccctgctcttgccgcggcgagctccttccctccaagcaccagtcctgaacgccaggccacaggccatagctcctgcgcgcttgtccgcagccaggttcgtgtagccaccgtggagctcgatcagccttcttccccaccgtgctacgctagatccgagctcccatggtgcaggcgccccttcccccatcagatccatggcgccatgtctcccagttggcctcctctgcccagcgccaccccttcctttccctaggcgcataaagctctcccccacgcagtccagctccaggccagacccaattcgcccaacccctgctcgcccagagcttcttcgccccaaatccggccatccccgccttgccgtggagttcctcgagcagccccacctggccaccatcctccccagccgaaccctttctccatggccgccaatcgtcctactcctttcgtctggtgtgcttgacgcctggtgcttcgacctcgatggcttcccctgcgagcgacacctctgctcggctccctctcctggcagcgagctcctctgtaggcaccgacccacagcagcagggagcctccaatggcatttgtttccccaaggctcgccccgtcaacagccatcgacctcgtgcagcagccgcgacgccagttcgcacagccacgtggatctcccttgtgtcgtgccctcggcatgctcgatgtaatgccaaagcagcagcagcagcgacgccctccgttgcgtcgtgctcgctagatcgggcctcacgtcgtcgatctgcgcagcgtctgcgcgtcgtcgtcgaaacccgcg

SEQ ID NO: 155048 - DNA, 354 bp, Zea Mays
atgggaactgagcgcgcggcgctgggtgaggacgctcggtccgagcaggagccttggttaggtgctgccggatggacgccatgggagggagctccgcgagctggagggagcagaggaggcgccgagcttgaggacggcggtgacgagatccgagcgtggcgagaagggagatggagcagggagggaaaagctctgcgcgaaggggaactcgacagcagggcacgcggcgaggaggctccagggagcttggggaagaccacggcgcgctgggaaatgggaggaggaaagaggagcggccgaggtggaagaaaggcagggcgcctgcgactggaagccgagaacgaaggagcttaa

SEQ ID NO: 155049 - DNA, 1307 bp, Zea Mays
acccaatacaatttttatgactacttttatggagagagttcatcacactcacttactagaacctcacgtgttgctcagccgttgcactaatggtagggtctcagatacctcaaccaatattattaattatgatggtgccgtaagagaaaacagtcagctataaacattttaagcaaaacttgggccgtcaaaaaggcctagatatggttttcggatacttgaaagcccatcttactctccttccggtcgcgggtcgccgcagtaaacccctaggaagaaaccccaccgcttctggccgccgccggctcaccggtgacggcatccaaatccatggcctcccgccaggcgctccacatcttcacgccctcccggcgggcgatgcacatcctcacgtcgtcccgcggcatcgcctcgaccccgcacctctcgtccttcggctggtttgataagatcaagtccaccatcactggcaagaagcccgaggaggcctccgaggcatcctccttcaccctcatccagttcgcagacacgatggagaaagcgaggaagctggggacgttcaagaacttcgttgccgggcgggccagcgaggccaccgtcgtgaacgtcttcgagaagcactccgctgtgctgcgctacctcggtgccatcgaccccaccggcgagaacctccgaaacactgacaaaattaacgcgaccaagcactgcaactgcacaattgctgacgtggagcacattctggccaagtacacatgggctaaagaggctcagaagaagattgcaaagctcaaggaagaagggaagccattaccgaagtcatttaacgaggtccaaaatctaatgggttctacaccagtggatgtcggcagaagtaatctggcaaagagtggtcagataagtaggaatgctttctgcccatgtggttctaagaaacgatataaaaggtgctgtggagcttcatgagatgaacaactctaccaggtgcagcgtttgtaagctcttttctttgccaaactctaccaagctctttcgcggacaacacctgaatttgaagcttgcaatttgtaaagcactatgagcgagccctatgtttcagaaggctttctcttaaactctgatttcttgattggagttgttgtttaacattgattcagttcaatcatgcatgaatctaggtaatatatatccacctagctcgttttctgcaacaagatttgttatagattcatttttactcagcattttatgttctactcggcagcttcattttttatggatgtgtttgaataaagccttctgttattcta

SEQ ID NO: 155050 - DNA, 1036 bp, Zea Mays
atggccgctggagccagtgactatttgacggtggagtaccactccagagagctcccctctttccctccaacgatgagggagcccaccggcggcagcgacgtcctcgtacaccacggtgggcacggtttgtacatgaacttcacttttttcattgctggagatgatgagaatgagctcatcttagcaagtgtcctgcatgttgtctattttttgttattattatggggtgtaacaatcttgacttgtgctaggtttaggttgtcagctatattctacattgtgccatttcaaatgtttacccctcctgctcctgtgtcagtctcagttcctagctctgcatctcaaggcaacaacattttcaagaccaggattgaaggtgcaaacaacgttgatgcagttggaatagtatgggatgttatcaagcatattctcttttgtaggttgcaatgagcagaaggcttggtattgaagagcctcggctaattaaaatagtcagaacaacaatccatacacatactgaattgcttaggctctagatgtgcaaggatcgttttgagcatttattcaagattgattctctgaaagaggttgatccaacattgggcagtcaccatatgtccaaggtccttacagatgaatgtgcaaatggatcatctcaaacgataacatgttcaagtggcaaggtgctagagaaggtagtagcccttaagtcatccaaagttgcctgtgatgaaaatgctatagtgaagattatggcaaatacgttactaatataagatgatgtttagtgccttgccgttaggacaagtgttaatttctctttatcattgggctttgtttttggcaaggcgagcaagagcaaggatcctcttgccttcacaggaaatggacaggctccccaccagcaagtatcctctttgccccttttgtaatgatgacactaaacatgtcctatatcattgtgattgttggatttgcattgtaatgtggcaacatattctttgtgtacatgggggaaaattctcattgatactga

SEQ ID NO: 155051 - DNA, 447 bp, Zea Mays
atggcggcagcagcggcagcagcatccaaggcatgcgcgcccggcatgcgcgacgagcaggtcaagggcttgctcctcgggctcccgccgaatgcccgagcggaggatatcgagtacgtgctgggcgacgtgcaacgcacgctgtcccgtctcgactccaagcgcatcgttctgcaggacgagatagccgcggcgtcccgtggcaagcgccgtgcgtcacggagggcgccggcggccgctcctgttccggccgcggcaaacgggtccggcgcgttgtacaccaggaacggcgccggcgctgtccggaggaggctgcggacggctgccggtgacgtcaagaaggagaagaagcggctggaggccgcttggggcgacctggaggaggcgcttgtggacgccagggagaggcttgccctgcagcctggacctggagaacgaaccgcatag

SEQ ID NO: 155052 - DNA, 1028 bp, Zea Mays
gctgaaatgtcaactattgggccaaaggttatagagaactcatatttgatggctaaacataaaagcgacttagaaggattcaagttagatgtatacgaaagtggtgaggactcgcaagaagttcaatccactgccagaaggttagatttgagtctcaattattttcaagggaagggatcatgctgataattcactccatgggtacaaggttttcaaaaatccgagcattagtgatgtcctgtgcacaacaacagcagaggctcttgcaatggggaaattcgtgatttgcgcagaacatccatcaaatgagtttttcatgtcatttccgaactgtttgacatacaagacttcataggagtttgttgcgagagtgaaagaggcaatggatagagaaccctaaccgctaacccctgagcaaagatacaacctttcgtgggaggcagtgactgagagattcatggagtactcagaccttgacaaggatctgaacaatgaggctgctcagcctgaacaaggtaggaaaagaaagaataaaagaacctcacatcctaatttgtccgacatcatggatggcggtctagcgttggcccatcgatgcttaactggcaatgaggttctcaggctggcaaccgaagccattcctggtacccgggactactataagcagcattgtgtggatattagtctcttgcctccttaagtagcaccctgtatatggctggtgatatggctggtgatgactgatgagcacccaaagctaatcgtaggtatatgtgtacataatacaccatgtcgctcttatgtcgactaatgtttggagtattgtaattgtagcacgcatgacaaactttggccattgttttgtactctgtaataaggttctttctccttaaatttggtgttttattgcagaaatttgtagtacatggatatcaaaagttcataactccagcagactgtcagcacaatatttatctgcttttgccactgaattagagaaacatagtcttaaaaagttaagagacgaa

SEQ ID NO: 155053 - DNA, 1225 bp, Zea Mays
agctgaaagctgaaggcagaagcagagataatggacgacgtacatgtctggttcgtctcgctggcctgccttggtggtttgtacatcgccgccatctgctggcggcccctcgcctatctcgcgttgtgcctgcgcgggccgaaggacctccaccgctacggctcatgggccatggtgactggcccgacctccgggctcggccggtccatggccatggagctcgcgcgacggggcctcaacctcgtcctcctcgacctcgacgccaacaacctccaggagacctccgaggccatcaagtccgtccaccccgtgaagataaggactgtggttctagacctctccctcgtcgccacaccagaaggcgacaaggcgatccgccgtctgcgggaggcgatcgaggggctggacgtggggatactggtgaacaacgcggcggtgaacacgcctggcgcggtgtacctgcacgaggcggacatcgaacgctttgtgcggatgatacgggtgaacctgtgggggctcaccgaggtcacggccgcggtgctgcccagcatgctagcgcggcggaggggtgccatcgttaacgttggatcgggctccacggtggccgtcccgtccttccctctgtacaccgtctacagctccaccaaaaagtatgtggctcatctctccagaagcctttacgtcgaatacaagagcaaaggaatcgacgtccaataccaggtcccgttctatgtgcacacgcgcatgctgtcgagcgccgtgaaggccaagctccggccgtggttcgtggcgacggcggaggactacaccagcacggcggcgcggtggatcgggaacggcccggtgtgtgttcccggcgccgcccagaacctccagtggtgcctcaccggcttcgtgccggactgggtccacgactggtaccggatccgcctgcacatgcagcacagagccgtcctccgcggcggtcgagccgcgatcgccagcgcccattcacgcgccgagaaggccgtgacacctgacgatgacgacgccaattcagttgcgccaaagatcagtgcctagccatttggctagccagctgtgctgtgctagccctatctctctgcatgcagctgtcagtcaatacaacagtcatatagtactcatgcaagtgatcaatgatcgatgccatacatataatcattatattaaaagtacgcgtgccctttcgtgtgtataattgttt

SEQ ID NO: 155054 - DNA, 1222 bp, Zea Mays
ggcttgcggcccgtagggacaaggcccacgaggctacagtttaggcagagggttcttcggttcttccttcgccatcttctcagttccctccccacaccgttgcggcgcggcaccacctgaacccgaccaccgcccacaccatgttgtcccgattgccggcgacggtgagccttcttcgccggtcgctccgagaaccgcgcggcttcagctcctctgtgctggcttcatctaaggaaacggccgacggaaagctggtggcgtcggtgcttttcgagcgcctccccgttgtcatccccaagatccaccccgttgtctacgctttccaagaattctcatttcggtggaggcagcagtacagacggcaataccccgaggaggtcctcggcaaggccgacgcgaggggtaagggtgattatcatattgattatgtgcctgctccaagaattaccgaggctgacaaaacaaatgaccggaagtctttacaacgagctcttgataataaactttatctcctgctgtatggcaatgcttatggggctcctgatggaaagcctgtatggcattttccagaaaaagtatacgaaaatgaagaaactatgcgactgtgtgcagaggctgcattaaaatctgttcttgggggacttgaccatacatactttgttggcaatgctccaatggctcatatggcagttgaacaaacagattcaagtgtttcatcattcaagcgtttctttttcaagtcacaagtggttggcacaacgaaataccatgttggaaaatgcaatgacttcgcgtgggtgaccaaggatgagctgctggagtattttcctgagaacaaggatttcttcaacaagatgatcatccacattagataagatagctctgtaatcaggctatgggctatctgaacaattagcattttgtttcttgactggcgtacaagtgcagtgccactgttctgtcgtcacgagcagcattgccgaggaaccaccagggcggcgggcaattgacacatgcccattttgcctcttttttcttgggctggttatgttgtgtttggcagtgacatttctgtagcatgttgtcctctcttacctgctgtatgttcacgtattatcagtttgttgtacaccatggggaagaataataattagcagggcgacatttgattccttgctttgttatccttctcacttgctgacttctgccaagatgtttgtgg

SEQ ID NO: 155055 - DNA, 228 bp, Zea Mays
atggagtggcccactagattaaagatcgctctaggtgctgccaagggtttagctcatcttcatgaaaactgtcatccaaagatcatccaccacgacattaaggcaactaacattcttcttgacttcaaatttgaagctaaggttgctgactttggacttgcaaagttcactactgataataacacccatgtttcgacaagagtaatgggcacctttaggtatgtataa

SEQ ID NO: 155056 - DNA, 921 bp, Zea Mays
atgagcgtctgcggcgtgcagcagtgggcgagggacgcggaggcggcgttggaccacgagctgcaagcgatgcacagctccgtgtcggaggccatctcctccgacgcggcggcgctgctctacccctactccgacgtgcccggcttcatggccaccatgtccctcgccatcagcaagctcgcctccctcgaagccttcgtcagacaagcggacgcgcttaggctgcagacgctgcaccggctgccgcagatcctgacggcgcggcagtcagcgcggtgcttcctcgccatcgccgactactcccaccgcctccgcgcgcgcagcgaactctggcacacccggcaaggacatgagccagcggcgacctgcaaaatatttgtttgtcaccatctaggcaatttagcagtttcagttattattccttccggttcgacctcaggcgcgccgtggccgagcccttcgtcttcctcagcggctggttcgacatcggcaagcgcggcgccgggaagccggcggcggccaacgccgcgcgcgcagctcaacctcaccgtcctgggcgagcctgacccgaggttcgtcttcgagttcgacggcgagaccgagtgcagcccgcaggtgctccaggttaaggggagcatgaagcagcccatgttcacgtgcaagttctcctgccgcagcaacagcgacctgcgctcgcggttagtggcagtggcaccaagttccttcccccctgatgccggcatcttcagcgccaggttgccgaccagcacccgcacgaaagggcacgggtccatggcctcgtggctagcagaccgcaatgcctgcgacgccgacccttcctccttggtccgacgcgaagcaatgcggacgggatcggagacggagaggggtgggagggagaacctgctagagacggtgtag

SEQ ID NO: 155057 - DNA, 360 bp, Zea Mays
atggcgttgcggcatgaaggtgaggccgagggcgagtggccagaccaccagcaagctgcgcgagctaaggggcgcggcgaccatcagagaacctcgacaacgatggaagggacacagatggcgatgtcgcggatgtggacacgattgccacatcccacgcgaggacaaaagaaactagagcgactacagcgcagcgacttcgacgctaagcatcagagctcggtgaacgtaaccatggacgcgtgctgccgcttaggatcgggctgggcgagttcgacggccacgggcaagcgcagaggcgagccagagagctcagcgcgtaggaagtcgacgtgctgcacacaagatcgagctgcataa

SEQ ID NO: 155058 - DNA, 386 bp, Zea Mays
gggcgtgagctgcggtaagcgcctccccgtccatggacacggaggccataacagagtccctctcgccgctgccatggtcgtggaaagaggtggaggaacgtcgcgtggcctatggcgatggggacctgttccccaacgggattgggtcagagaggcaggacatcaacgagcccatcgtgccgagccgggtagattcggagcaggaaaatcctcgccttgctgccccgatgctgctgtcgcgattcaggggagctcgacgaggagtcaaggaggaggagaaaggagaagcagggggagcaagcagcgggcgcggctaccatgggcgatggggctcggagaggcggccatggatggtcatagggagctggcacgtgcagggaggctga

SEQ ID NO: 155059 - DNA, 684 bp, Zea Mays
cgacatgaagctgctgatgccaccatatccacatggcgccagcggttgagcggtagcaccaaggcacctgccccgctggtcgacaaaaccctgtgctgcgcctgcgacatcatcaagctgctgccgaccggcactgtcatggccttccatgcgctggcgccgtccttcagcaaccacggtgtatgcggcactgccagccggtaccttaccctcgtgctcatcgctgcttgcgccgcctcctgcctgctgctctccttcaccgacagcctggtcggacacgacggccggctctactatggcgtcgccatgccgcggggcttctacccgttcaacttcgacgacgggacatgcgacgagcggacgtgcaagttcaacgacatgccgaggatgaagatcaaggcgctggacttcgtgcacgcgctcgtctccgcggtactgttcatcgtcgtggccctcggcaacgccggcatacagagctgcctgttcccggacatcggatcagacgtcagggaagtgctcatgaacctgccggtgggcctagggttcctgtccagcatggtgttcatgatcttccagacaacctggaagagcatcggctacacggacctgatgcctcgccaacaagaacatgggaaacgaagcaataataatgccgtgtataaacaaaaagaaagatccggttga

SEQ ID NO: 155060 - DNA, 203 bp, Zea Mays
gtttgaaaatgcataaatcacgatggtctcagagggcacttgttttgttcacattatatcaaaatataaagtacaacgatattttgccaatattgttgcaatcatacacgattttttttgacatgacaaaaaacgaggagctagccttgttttcggtacttcaaacacttggaaccattagcctttagctaggtcgtggtccg

SEQ ID NO: 155061 - DNA, 433 bp, Zea Mays
aaagacaaaacagacagaaacagaaggcgggggcctcccatttggttcccctccctccccgttcccaggcttccagtgggcagggcagccactggttccactcgcccgttcagctataagttagtcaagacagggccttgcactcagactcatcagttcaattcaatccaatccaatcccaccctgccccgccccttccaagaacttcaatcgtccaacaaaagcaggagtcgcatcccagatccccccgcatcagagacaggcagggagggaaccgagatccgtccgtccgagtcgatggagtcaacggtggagcagataagctcgtcggtgcagtcctgggtgaaggaccacgagctcgcagccatcggaggcgtgttggctgcggcggtgggcgcttcggtggcgtacagctggaggaaggcgccgcagc

SEQ ID NO: 155062 - DNA, 435 bp, Zea Mays
atggcgcgggcatcgccggtcatggctgcgctcgaggaagggttcgaacggatcgacgtggcgaggggaaggttacggcaaactcaatttaagcaatcgactactgaggacagggatttggaggtagcggggagcttccgtcgtccatccatggcgttagtgtgctgcagtagaggaacgagggagcgaggcgagcggaatgtggaggcgagtccaaggaagctcggaggggtgcacggcgtgcttttaaaagcgaggcacgagcgggcattggccggggattggctgtccatggcggtggccactgccacacgcctggctgcttgctgctcacgctgtctccctgcagcaaccgttgaacacgcattggatggcttttttggcgttttctgtttggattcggacccagatcactgtagaagatatgtttcttga

SEQ ID NO: 155063 - DNA, 111 bp, Zea Mays
gttaatcagggagggtcaagtctaggggattattatattctagcctttgtaatactcaaaatggtatacaaagaatatagagaggtctcctcattttatgtgccttatttg

SEQ ID NO: 155064 - DNA, 1770 bp, Zea Mays
actcgacaccgcacggcctcaagcagaggaagctttccgcccgggaacgccatggggtcgcttcctctccttgctgcctgctgctccctcctgctcacggtcgcagctcctgcccgggacagcactaccagcgtctgcgcttcgcaaatcggcgatttcccgcaccggaacagttcgggcctccacctgacgctgcaccacccgcagagcccctgctcgccggcgccgctcccgtccgacctccccttctccacagtcctcacccacgacgatgcgcgcgtcgcccacctcgcgtcgcgactcgccgccagtgatccgccgtcccgccgtccgacatcactccgcaagcagaagaaggccgccggtggtgcttccggcggccaccacctcgacgacgactccctggcctccgtgcctctctcgcccggaacgtcagtgggcgtggggaactacgttacccagctcggcctcggcacgccgtccacctcctacgccatggtagtcgacacgggctcctcgctcacctggctgcagtgctcgccttgcgtcgtgtcgtgccaccgccaggtggggccgctcttcgaccccagggcctccagcacctacacctctgtgcgctgctcggcgtcgcagtgcgacgagctccaggccgccacgctcaacccgtccgcctgctccgcctcaaacgtctgcatctaccaggccagctacggcgacagctccttctccgtcggctacctcagcacggacaccgtctccttcggctccaccagctacccgagcttctactacggctgcggccaggacaatgaggggctcttcggccgctcggcggggctcatcggcctcgcgcgcaacaagctctcgctgctctaccagctcgcgcccagcctcggctactccttctcctattgcctcccgacggctgcgtcaacggggtatctctccatcgggccctacaacacggggcactactactcgtacacgcccatggcctcgagctctctcgacgcctcgctctacttcatcaccctgtccgggatgtcggtcggcgggagcccactcgcggtctcgccgtcggagtacagcagcctgcccacgatcatagactcgggcacggtgatcacgcgcctgccgacggctgtgcacacggcgctcagcaaggcggtggcccaggccatggcaggggcgcagcgcgcaccggccttctccatcctggacacgtgcttcgagggccaggcgtcgcagctgcgcgtgcccaccgtggtcatggcgttcgcgggcggcgcctccatgaagctgacgacgcggaacgtgctcatagacgtcgacgactccacgacgtgcctggcgtttgcgcccaccgacagcacggccatcatcggcaacacgcagcagcagacgttcagcgtcatctacgacgtcgcgcaatccaggatcggcttctcggcaggcggatgcagctgaatagctgatgggtgaaaactgattattgagctctatggagtgggcagctcaagcttggtaatagaaaatgcgtacaaaacacaagtaaattcgctgaagtttatgaaatggtaatgttacaagctattgtattgttgattttacactcctggcaaattgtacatccttttacaggtaaattggagtgtctagatttttacatgtgtacggtcaaaaacagaaatctattttggatgatttggtctattatttatattgttaccctgcctttatcattatgataataacaagtgatatattgcc

SEQ ID NO: 155065 - DNA, 246 bp, Zea Mays
actcgacaccgcacggcctcaagcagaggaagctttccgcccgggaacgccatggggtcgcttcctctccttgctgcctgctgctccctcctgctcacggtcgcagctcctgcccgggacagcactaccagcgtctgcgcttcgcaaatcggcggtacacatatatttctgtcgttattacagcttaatgttgtttgttttgttttaactctctgctcacggttgcgcttgcacttgcatgcttga

SEQ ID NO: 155066 - DNA, 956 bp, Zea Mays
atagagtgccctcaaccatataacttttcccgaccaccgccgttcctctcttctccaaatccaaattggtaaatttcccaaatccggtgcccccacaccggcatcctcacctcgtcagcgccgccggccttccttccattctccatccccgctcagtcggataggcgccggttggggaaaattctgttcggactgttcatcttgtcggcatgtctcattatcacagcgccgattttgaagagatggaggatgagtacgacatgaacgagccagtcgatgacatggagggggaggatgagtaccaagagctcgtgattagggactctgatgcggaggatgaagacgatgcggaccaattgcataagctctccgacacttcagcagcagatgcaagaagtgggaaagatattcaaggaataccctgggagacgatagaagtcacaagagaaacgtacaggcaggcccgactagagcagtacaagaactacgagaacatacctaattctggagtagcagcaatgatggcatgcaaatcaaccgagaaaggaagaacatattatgaattcagacgaaatactagatctgtgaaatccactatctctcactttcagctgagaaatttagtatgggcaacatcgaagcatgatgtctacctgttattgcattactctgtacttcactggtcggccttaaatggtgtggatacagaaattatggatgtacatggacatgttgcaccgagtgagaagcacccaggaagcttattagaaggttttttgcatactcaaattagtaccatggcagtgaaggataatttgttagtagctggtggttttcaaggagagctaatatgcaaacacctagatcgagaaggaataagcttttgctgcaggacaacatatgatgataatgcaattaccaatgcattggagatattcaatacatctaggcaagtg

SEQ ID NO: 155067 - DNA, 905 bp, Zea Mays
attcacaaaagcatcacaattataatatcattcacaactagatcatttacagatagctagctagatcattcacaaaagctccagagatgatcagtcacaaaagcaccacagcgacatcacttcagcttgaaacagttcaaaagcccacaactacatcactaatgttttatatcactctagctattgttcaaaatcccacaactacatcactctagctgctccagagctgatcagtcacaaaagcaccaaagctacactaacgcttcaaacagttcaaaagccttcagacaaccactccagcttcttgtatcctcctgttttaatgtacaagatttctttgtccagaacaccctagaaaaaagtacatcaaattagtatattgttgctacatttgcaaataaaaatacagttttgatgccttatctacttccactaggcggtgttgcagccttatgcaccaacttcagctggtgcaatcaaggttaatcatcattaagttgacggctcatataaatctaaacataaacaagataagatatagactattactttcttgtacggccatgcaactgatatcatgtaagcatcagccatatactgatcgcattttgattagggaaacatattggtcacctaaaatggggcaataaccctctttcttgctccacacctttgtgtcactatatgtgtggagaaaccaattcacacttatgtgcacgaagatttgtaagtcaaatcatgaatatagagtccaaatcagaccgcagctaccaagaatttttttaataaatacatgaccaagtaaagaagagtcaaaattgattggcccagcctttcagggtattacagtgtacaatgtttcagtattttagactgcactactgtaatatcacaggaactacaaa

SEQ ID NO: 155068 - DNA, 1522 bp, Zea Mays
aagagctccattttttggaacgcgttcgtatgtcaatgcctaagttcattatgcatgctcttagtaggtcaagagaagattacacagagaagggattgcagttagcgcacatggacgcctacgcaggaccaggctgttacagcgaagtgagcaactcacaccacgtcgatcgccactatcctcatagcagccagtgcgtctataaatacaaagagttgaaagggcatgtccattccacccgagattacttaacaagaacattcttgctctacccacatcacataattgacgctctgagccctgcttttgtttaacaccgatagatccatcgtccatcagcagcatggcattcaggtcttgtctagtacggctgctgctccctatggcagcactgcttctgctcgctgccagctcgcccgcggcggctcagctggtggccggctactacagcaagacatgcccggacgccgaggccatcgtccgcaacgagacggagaagatcatcgccgccgcgcccagcctcgccggcccacttctcaggctccatttccacgactgcttcgtcaggggttgcgacgcctcggtcctgctcgacgaccccaacgggggtaacaaggccgagaaggacgccaagccgaacaggagcctgcggggcttcggctccgtggagagagtgaaggccaagctggaagccgcatgccccagcacggtttcctgcgccgacgtcctggccctgatggcccgcgacgccgtggtgctcgccaagggcccatcctggccagtggccctggggaggcgagacggcagggtgtcgagcgccacggaagcggccgacagcctgcctcctgccttcggcgacgtcccgctgctcgccaagatcttcgccgccaacggcctcgacctcaaggacctggccgtgctctccggcgcacacaccctcggcacggcgcactgcccgtcgtacgccggccggctctacaacttcagcagcgcatacggcggcgcggacccgtccctcgacagcgagtacgccgaccggctgaggacgcgctgcgggagcgtcgacgacacggccacgctctccgagatggaccccggcagctacaagaccttcgacacgagctactaccgccacgtagccaagcggaggggcctcttccagtccgacgccgcgctgctcgccgacgccaccaccagggagtacgtcctgcgcatggccaccggcaggttcgacggcgtgttcttccaggacttcggcgagtccatgatcaagatgggcaacgctggcgtgctcaccggtgctgctcagggggagatcaggaagaaatgctacatcgtcaactaactagctagttattatatatacaagctagctatactaccaaagcttttaatttgtttgtttgacgcaacggaattgtagcttgctgtattaattaatcaatcagttctctacatatgttatttgcatgcttatgtatagcctattattaatggacgatagactataatatataaacaa

SEQ ID NO: 155069 - DNA, 99 bp, Zea Mays
cggctaactatagtttatgtaggtctccttcagcaacagaagggtctccaactggcacaactgcaataccaacaaaaccatgcattatttagaagaaaa

SEQ ID NO: 155070 - DNA, 927 bp, Zea Mays
ctcttggtgcttttaaatatgttaattctgactcgctccttgcataactatagagtattcagctactatggtggtgtacaaaagattacttctctactaaaagctgttgttgctcagctcaaaaacttgaactgtttgctggctgcagaagaccaatctgcagatgaagcagtgaaaaattctagggtgatgctaaatatacttgtatgcataatcaccataatttcaaacttcatgaagttggacataactgttggaaggattccccatattactgataccacaaagcataccccatcatgcaactatttggctgaagtcacgtctagctctcctgatagaaccatttctgatacacttcgacattggcagcagaaagcaactgttcttgtgatggaagccagatgtgtcaactggttagtagaagcccagcacgccagtatatgtagatccattggtgaatatgggaattttctcagctatcatggttattggcacattgcccttttgttgtggttccttttttctaaagtgtgtacctagatttgtattggattaccgaatctatttattggctcatcgcccttttgtttgcagaaaataataaacggtgccaaggtcagcaattggacatgtctttatttttgtgaagatttatcaaggaagatattaaggagttttgctttaagctggctgaaatttctcgtattactatattggactttgccaatttgaagctcccaatattcattgcacgtccagatcgagttgaagatggtatacgtaagtgctatcaggaagcaaaaaataagccgagggatcaaaagattgatttactgcttgctatactactagatcgaaatgacagtttatatgaaaatattaaaaggacctgtgagacagatattggtcttgtgtcgcagtgtt

SEQ ID NO: 155071 - DNA, 1311 bp, Zea Mays
atgtccattgaacaaaagaatgagaaaaataggaagcgacgtgaagcacgtcaacgaaataaaggactacccataaagtccgagtcatctagagaagacattaatacgaatcagacacgtgaggcggtcaacgttgaaataagtcgagatgtgcatcttggttcagttaactgtagaaccattcatatcacaaattttgccttttgtaccaccgtttatttggctaatgctaggatgattatggtaggtcctattaaaaacactccatcggctggtaattctatcgaacgaaagaggcaaagggatagagaaaggcgtgcaacaatgtcggttgaacaaaggaatgagtacaataacaagcgttgtcaaatgcgtcaacgaaataagggacaaaatgtgatgccagctatttcaggagatggcgacaaaaaagtaaatgtggatccagatgatgatagcgactggctgcatcggaacgagacattccagtcaaatgactatgtcgcaacgacagaccttctgccaccaggcagtgtgcatgaatctgttggtacaattggggaatcgggtatcggcgtgagggagtataggcttgaacgccttaggttgtataatcagacaccaaagcggaaagaggcaaagatagagtacatgagaaaacatagagtgctacatgctgacactttgaatgttgtgtccatcgccatggaagacccaacatatacccctgaggttgtgcaccctgcaacggaaccttcaacagttaccgcctgtgactgggtcatccctgaattcgttaggacacctttcctaccagctcaaacacagaccgaggatgtcggttcatttgatatgtctactgaagcaataaaacgtaaacatcatgtgtcgcgtggggaaagacaagctatcttagcccgtcgaaaccagcaatttcaagcatccattgcaaggaacgtgactactttgaatggggatactattagtgacgccaacaacaatggtaattactatccaaatggatcttgcacgacggcgatagcatatagtcagactaatcgtgtgtttccatcagcacaatgtagtgttccatgccaagctgctaccttgccaacaaatggaagtgaaggcataaccgaacaagcaagtggggtggagcatacacaagagaagccaagggtcatttccaatgatgatgatgatgaggttgtcatattcggagaagatgatgacaacgacgagagatacatattcgatggccaatgtacttatgtcaattttattatgattatgataccaaggcttatataa

SEQ ID NO: 155072 - DNA, 663 bp, Zea Mays
atgcctccgcctcggcttcccctccgtgcaaccgcccgacccgccaggaccccgcctctccttcccctccgcgctcaagcaaccaatccgaggaaatgcacccacaaatttggaagccgcggcaatggcgcccgatttggctatggtgtgcacgatttggaaaccgcacaatctacgttgccaatttggaaagcacgatctcggtactgcaatcacaacaactatcccccaaatgtcgcgcccatcgacgaccaggacccccagatttggcaatgcaccattccccccaacaatcgtgctcgatctggcaattgtgtgcatcatcttcgtcgccgatttggaaagcgcacgatctacgacgctgatttggaaagtgccttgccaaacgattccagcacaaatcccccaaatcgtgcacccaccatcgttaaaaaggtcacaattgtcatcctgctccaaccttcctacaatgacggaaatcccgcgctcacactcctccagcagttcatgtgtttctggtacctgtctcttggatatattgagttcacttttgagaatttctttgcaaaatgctctaaaaaatcattgttttcaatgattccatttaaatttccttgcaaggatatagaagtttcaatcattatgggtctgaaaacatgaaac

SEQ ID NO: 155073 - DNA, 1503 bp, Zea Mays
gaatcataagcatcactagtcgttaatcaatcccacgccatggcttctgctctacaattatccctgctagtactatgcagctacggctgtactattgctcttgcagtagctacaggtcatcaggaacgcaaatttacagtagtgccgacagcattcctacagtcctcatcagaagaagcatcatgttctactccaagagggacaccgcacgcaaaccgcgtgtctgtgccgctagcgcaccggaacgggccgtgctcaccagttcggggcaaaggagagctgcctcgcgctgaaatgcttcgccgagatcgcgagcgcacggagtacatcatcaggagggcctcaaggagcaggcggctgcaggacaacaacgacgcggtgagcgtgccgacgcagctgggctcgtcctacgactcgcaggagtacgtcgccaccgtgggcctgggcacgccggccgtcccgcagacgctcatcctggacaccggcagctcgctgacatgggtgcagtgcaagccgtgcaactccagccagtgctacccgcagaggctccctctcttcgacccgaacacctcatcctcctactcccccgtcccctgcgactcgcaggagtgcagggccctggccgccggcatcgacggcgacggctgcaccagcgacggcgactggggctgcgcctacgagatccactacggcagcggcgccaccccggccggggagtacagcaccgacgcgctgacgctcggccccggagccatcgtcaagcgcttccacttcggctgcgggcaccaccagcagcgcggcaagttcgacatggccgacggcgtgctgggcctcggccgcctgccgcagtcgcttgcgtggcaggcgtccgcgcgccgcggcggcggcgtgttctcgcactgcctcccgccgacgggggtctccacggggttcctcgccctcggcgcgccccacgacacgtcggccttcgtgttcaccccgttgctcaccatggacgaccagccgtggttctaccagctgatgcccactgccatcagcgttgcagggcagctgctcgacatcccgccggccgtgttccgggagggcgtgatcacggactcgggcacggtgttatcggcgcttcaggagacggcgtacacggcgctgcggaccgcgttccggagcgccatggccgagtacccgctcgcgccgccggtcgggcacctcgacacgtgcttcaacttcacggggtacgacaatgtcaccgtgccgaccgtgtcgctgacattcagaggcggcgccactgtccacctcgacgcctcttccggggttctcatggatggctgcctcgcgttctggtcttcaggggacgaatacactggtctcatcggcagcgtgagtcagcgaacaatcgaggttctatacgacatgccaggtcgaaaggttgggttccggacgggtgcttgctaagactagccgcagcggtggacgctgcacctctcctccccttgcatgcggcgcgta

SEQ ID NO: 155074 - DNA, 350 bp, Zea Mays
cttgtactatctgtatgacactagagattagtgtgccagattgttaaaagctaaataatctactgctaccatttaaaagtaactgctggattaattttataggtggattgtgctgaaattgcaatatggagataaatttgttaaatctatgtatcagatggccctggctgatctttattaggcttgttattcatgttcttctattttcccaggattcatctgccctagctcaattgggatggccagatatgtggataccaatcttatacaccttatcatggccagatataatctattgctctaaggtcatgtggccccgtctagatatttgcaagcatgacatcttcaca

SEQ ID NO: 155075 - DNA, 740 bp, Zea Mays
aaatttgggtccttgtggtaattaatccaagaagaattggggtaggaatgctatagcaaagtgaaagaccatgtcaaggagagcaaatgtcatgagttggcttgctaaaaaggagttgaaaaactctctgttggattaaacatgtgcagtttcagacttctaaaattggaatgtttcagtgttttttgctatgttttggtgcaccatagcttgtgttttgtatgattttgaccttggactactgtagcaaactggtagtgctatggtttgggagcaggcttggctaactaagttggtctggtgctatagaaaatgatgagtttaagggacttgtacaggagggttcaggtggacaataaggtgtaattaggagtacttaatgttatcctctttgtaactgcataagcataaacatccatgatcatgtcatttcatgtagaactcccagcagaaggattgaagattcaagctgaagtggcgactgaggaggaatctactctagtgcttgtagagggatctagatctcttcactgcaacaaaggcaagccccgatgcatgcaaccccgtccttgtatttttaaaagacttttatacattttaagtctagtgaaatgtgcattaagtttctaggagttgcatggaaactatttgatgcattgactaccttgatatccattcctgttatagatacttctttggaagtatcaaatattgtttacaaaaattgcttagtcctgcct

SEQ ID NO: 155076 - DNA, 739 bp, Zea Mays
ctgcagccactcccagtccctctcctcccttgatttcgcccagcctccatctctctttccagccatggatgccgcccctccctggcaccctcatctccacgggagctcgccctagctccagcttcaaccatggacggcgacctctcctgcctacagcagggcgccgggatgctgcttcctatacatcgtgcgacttcctggtgcttgctctcgtcctaggccatggagcagcagcagtcacgacactccttcgtgtcgcgcccttgacgtgatcgatgaaataccgcagcgagctccaactcgatctgcacagcccctgcgcgacgtcacaaactccgctcgttgtcgtgcttcgtgcatcgtgtgttcgacgaaaatcccaagtccatggatagcacatgcacaactcaaatccgatcggccaggttgtttgatgtgtattttactcatttgatttagttgatgatgtgtttgtatgtgtggggtgatgagaaaaataaagaagatgcgtcgttcggtagtaaggattaagttaaaatgtagtttatggtgtgaagagtgcgtcgataaatatgtatgccattgagtggttaaatgttgtgttgatcggctagaggtcctatacaagtgtcgtcgctgtccaaaattttatttggaagcaagtagtgtcgatgcttcgatttcggttgaagtcggagaataattcgaggaggtatatatgcgagtactttaagttctt

SEQ ID NO: 155077 - DNA, 1884 bp, Zea Mays
gtcgcatcagtcaccaacactaatcacactttactagccacaccaacgtaccagctccaccccttcggccacacaacccaggtgttcgaccatgtcctcgccggcaccatcatcgccctccaggtccagccacggctcacgaagctccccgcgcatcgtcctcttcccgagcgctggcatgggccacctggtcccgttcacccgcctcgcggtcgcgctttccgccggccacggttgcgacatctccctcgtgacggcgctgcccacagtttcgtccgcggagtcccgccacatcgccgcgctctacgctgcgttccccgccatccggcagctggacctccgctttgcccctttcgacgcgtcgtccgaattccctggcgccgatccattctacctccgctacgaggccctgcgccgctgcgcgccctcgctcctcggcccgctcctcgctggcgcaggcgcgtccgctctcgtcgtggacatggcgctggcctccgtggccatacccgtagccagggagctccacgtcccgtgcttcgtcttcttcaccgcgtcggccacgatgctctcattcaaagcctactttcccacctaccttgacgacgtcggtgccggacatggcgttggcgacgttgacgtgcccggcgtgtaccgcatcccaagttcgtccgtcccacaggcgctgcatgatcccgataacatcttcacccggcagttcgtcgcgaatggccgagcgctcgcgacagccgacggcctcctggtcaacgccttccacgccatggagccggaggccgtcgaggcactacagggtcgcttcgtgctctccgttctgccgcccgtgttcgccgtggggccgcttatgccggtgaacgacctccgggagacaggggaggcagcgcaaaaacaggggaactatagggcgtggctggacgagcagccgccgcggcctgtggtgtatgtcagctttggtagccgcaaggctctccccaaggaccagatcaaggagctcgccgccggactggaagcgtgtggccaccgcttcttgtgggttgtgaagggcgctgtcgtggacagggatgacgctggggagctcagcgaactgcttggcgaggccttcctgcggcgcgtgcaaggccgtggcctggtgaccaagtcgtgggtcgagcaagaggaggtgctcaggcacccggccgtggcgctgttcgtcagccactgcggatggaactcggtgacggaggcagtgagcagcggcgtgccagtgctggcgtggccgaggttcgcggaccagcgagtgaacgccagcgtggtggtccgttgcgggctcggtgtgtgggctgagcagtggagctgggagggggaagaggcgctggtgagagcggaggagatcgcagcgctggtgatggaggctatgggagacgacgcgatggcagtgaaaacggcgaacgtccgcgaggctgcgtcgagagccgtggtggacggcggcacgagctacctatgcctggcggcgttcgtgcatcgttgcattgcaccgcgtgaagttatataaaaaatacttatataacttcacgttcgtgtcgatccgcttcataaacttttaaaatgtgcctattaagaacataatctatgtttagaactttagatctttcttaggtccaaacgagttacatatcagtacgttgacccttctcccttgtgtaagatttgtttttttaagtgacaactctcttgctgaatgtttcatgatccccgtttaaggccagaaatgctatgctcgagggacaaattggcctctccacctgcaaaagcgccggatgaccgcatataagaaacagaaaataaaaaaccacactgtacaagatttcaccgtatgaaatagagtcaagt

SEQ ID NO: 155078 - DNA, 607 bp, Zea Mays
tttcccctaggccgccgcccccccctgtccacctcctcctccctccattgttgcagccaacaaaaccctagccgcccccccccccaatcccctcctccctaggtgctactccgtgccgctcggatcatcgtcttttggtgcgaatctccaatcattttggtggaaggaagaagggaggaaggaaaaggggagaacccaaggtggtggacttccggatcgttcttagggattttgccctaacttcggtaaaggcacctgatctttgctttgggagaagggatgtagcagcacggccaccacacttttaaataaaggaataactgattattaatgatgttaaacaggaagggtcaagtctagggaattattacattctaatctttcatggtagttgaactgtttagtttggtgggctgagatgactatcttttgtctggtcatgaatgttcttttctaccgttgcatttcgattatactatgtcaattatctttcttttatatcctgtataaactatatgctttccttgttatgctactttcaagggaggtgctgccggattttgcaatactttctttctctatgtgttgcataagttttgtagaaagg

SEQ ID NO: 155079 - DNA, 3258 bp, Zea Mays
gggttttaggcggttttgttgggggcattaggaggtgggtttgatacctgcctgggggatctgtttctgattcggttctggagtaaggatttgatccagtgaaggaaaggttgctctggccactgatggccggtgacattacttgcggatccttgctgcaaaaattgcagttgatatgggatgaagttggcgagagtgatgaggatcgtgacaaggtcctttatcagctggatcaggaatgccttgatgtttacaagaggaaagttgaccaagcaactaactctagggatctcctgatccaggctctggatgactcaaagatagaacttgctaggcttctttctggtcttggagaaaaagctattgcaagaacccctgagaagacaacaggaacaatcaagcagcagctagctgctatagcgccaacacttgagcagttgactaaacagaaaaatgaaagaagaagagagtttgttaatgtacaatcacaaattgatcaaatatgtggtgaaatcgctggcaccatagaggtgggtgaacaggtgacaacaccccaagtcaatgaggatgatttgacacttgagaggcttgaagattttcggtctcaactccaggagcttgagaaagagaagagtaataggctggagaaggttcttgagtatgtaattatggtacatgatctttgtactgtcttggggatggattttctcagcacagtgactggagttcaccccactttagatgactctgttggcgacaactgtaagagcattagtgatgatacattatcaaaacttgacaagacggtagctacacttaatgaagataagaagttgcgtctaagcaagcttcaagaactcgctggtcagctctatgatctttgggatctcatggatgcccccaaggaagaaaggcgcatgtttgatcatgtgacctgcaacagatcagcatctgtggatgaagtcacagcacctggatctcttgctctagatttaattgaacaagctgaggttgaggttcaaaggttagaccagctgaagtacagcaagatgaaagaaatagctttcaagaagcaaaatgagctggaagatatctacgctggtgctcatattgtaatagacacagctgctgctcatgagaaaatattggcactgattgaggcaggtaacatagaaccatcagaactaattgcagatatggatgcccagatagcaaaagcaaaggaagaagcattgagtagaaaagatatccttgataaagtagaaagatggatgtctgcgtgtgaagaagaaagctggcttgaagattataaccgggatgacaacaggtataactctagccgaggtgcccacctgaatctgaagcgtgcagaaaaagctcgtatccttgttaacaagattccagcacttgttgaaactctagtggcaaagaccagggcatgggaggagaaccgtggtctgtcttttatgtatgatggtgtacctcttctagctatgttggatgagtatgttatgctcaggcaggaaagggaagaagagaagaaaagaacgcgggaacaaaagcgctacgttgagcagcaattgaacactgatcatgaagggccattcggatcgcgagtgagtccaaaccggcctgccagttcgaagaaggccattggcccaaagttgaatggcagcgtctcaaacggcactcctccaaacagaaggctctcaatcagtggccaacagaacggtggtggccatggcgtcaggtctggagggaaggatagcaagaaagacacggcgaagacagcatctcctgggaacagtgcagctgcaactgcacctgtgggtttgacagcaacagccaaagaagacgccgcctcccaaatttctgtcaccgatctggttccgagcacaccatgatctttaacctagcatcatatattagatataagtggacctttttctgttgttctattgttttctggtaatatattgtaatggcttcgtagagtaattatgatccccttcagctgctttggcacatcctggtgtaattcttgtttagttcccctaggcggtgctgtttcgacttgtcagacggtgtagtatagtcttactgagatgtattgtcattaatcagtgtgctggacgtataagctgttaaaaccttttctgttcccgtccttgagttttgcatctatgtgagcgtagcgtacttccaatattctctggaaactggattggcacagcgtacttccagtattatctggacactggattgcgcgtttcatttctgtagattcagttcactgattgcttccacaaggctgctatctaaagtattaaaaccattgggattctcagcccctagaggcgacatttcaatctacacacatgtgaattgaggtcaatactagattatctaaacagacgggaagcggcaacgtcacttgaaaaacagaactgtcaatgcgactggattggcctcgtgcaggtgagatttctgccattatgaaacgtgacacatttggcttccacaaaacagaggcacagatttacagaactgtcaatgcgactggattggcctcgtgcaggtgagatttctgccattatgaaacgtgacacatttggcttccacgaaacagaggcacagacgagtgcttcgatgatttagagatccacacaaaacgcacgcgccggtatggacttgagctctttcttaggtgcgttcgacagtgattaattctccgtcgtgaggattagtcggggcggccaccgctctcgtcttcagcgccgtcactgctcaggtcgcccccgtgagtgactcttgtagccttctctcccttcttgacccagcgcgctgctcgaaaccacagagctcggctaggtgttgagcaggggcagaggcagctgggacaatgcgagaggacagcgcgaccaccatcatggcaatcagctgctgctccgcgtcgtcgtgctggttggccgcacgcttcagggcggccagatggctggccgccgtgtcatggttgttgtccgagatagcgaccgcggcttcagacaatagttgcctcgacgcggccccggggtcggcggcgagcaggacgcggatgaagacgcaacggaggagtttgaaggtgaccagagctagacccggggacaaccagaggctgctgagacgggatccctcccagcaaggcggcgatatcaactaccacagtggtgccctgcctcacggcgcgcaggtacatcgcctgctgcgccgccacgtgct

SEQ ID NO: 155080 - DNA, 3455 bp, Zea Mays
gacacccgtggtaaatccttgggccgacctaggccgtccgatcacccgctcgtcgcatccaccggccccgccgccgcgcgcaccagcctctcgatgcccccaattaattcgggtcccgtggtgtggcggcagcggcagcggcagcagtactgcctccactgcagtcccaggttagcgctctcagcggtggcggccggcgaccggcgacatcctccggtatcgactcccgtagagtggagcgttgaaccacgctgcggacctgcattcaccagtccgccgtttccttcgccttctccgcgtggtccggttgctctggccactgatggccggtgacattacttgcggatccttgctgcaaaaattgcagttgatatgggatgaagttggcgagagtgatgaggatcgtgacaaggtcctttatcagctggatcaggaatgccttgatgtttacaagaggaaagttgaccaagcaactaactctagggatctcctgatccaggctctggatgactcaaagatagaacttgctaggcttctttctggtcttggagaaaaagctattgcaagaacccctgagaagacaacaggaacaatcaagcagcagctagctgctatagcgccaacacttgagcagttgactaaacagaaaaatgaaagaagaagagagtttgttaatgtacaatcacaaattgatcaaatatgtggtgaaatcgctggcaccatagaggtgggtgaacaggtgacaacaccccaagtcaatgaggatgatttgacacttgagaggcttgaagattttcggtctcaactccaggagcttgagaaagagaagagtaataggctggagaaggttcttgagtatgtaattatggtacatgatctttgtactgtcttggggatggattttctcagcacagtgactggagttcaccccactttagatgactctgttggcgacaactgtaagagcattagtgatgatacattatcaaaacttgacaagacggtagctacacttaatgaagataagaagttgcgtctaagcaagcttcaagaactcgctggtcagctctatgatctttgggatctcatggatgcccccaaggaagaaaggcgcatgtttgatcatgtgacctgcaacagatcagcatctgtggatgaagtcacagcacctggatctcttgctctagatttaattgaacaagctgaggttgaggttcaaaggttagaccagctgaagtacagcaagatgaaagaaatagctttcaagaagcaaaatgagctggaagatatctacgctggtgctcatattgtaatagacacagctgctgctcatgagaaaatattggcactgattgaggcaggtaacatagaaccatcagaactaattgcagatatggatgcccagatagcaaaagcaaaggaagaagcattgagtagaaaagatatccttgataaagtagaaagatggatgtctgcgtgtgaagaagaaagctggcttgaagattataaccgggatgacaacaggtataactctagccgaggtgcccacctgaatctgaagcgtgcagaaaaagctcgtatccttgttaacaagattccagcacttgttgaaactctagtggcaaagaccagggcatgggaggagaaccgtggtctgtcttttatgtatgatggtgtacctcttctagctatgttggatgagtatgttatgctcaggcaggaaagggaagaagagaagaaaagaacgcgggaacaaaagcgctacgttgagcagcaattgaacactgatcatgaagggccattcggatcgcgagtgagtccaaaccggcctgccagttcgaagaaggccattggcccaaagttgaatggcagcgtctcaaacggcactcctccaaacagaaggctctcaatcagtggccaacagaacggtggtggccatggcgtcaggtctggagggaaggatagcaagaaagacacggcgaagacagcatctcctgggaacagtgcagctgcaactgcacctgtgggtttgacagcaacagccaaagaagacgccgcctcccaaatttctgtcaccgatctggttccgagcacaccatgatctttaacctagcatcatatattagatataagtggacctttttctgttgttctattgttttctggtaatatattgtaatggcttcgtagagtaattatgatccccttcagctgctttggcacatcctggtgtaattcttgtttagttcccctaggcggtgctgtttcgacttgtcagacggtgtagtatagtcttactgagatgtattgtcattaatcagtgtgctggacgtataagctgttaaaaccttttctgttcccgtccttgagttttgcatctatgtgagcgtagcgtacttccaatattctctggaaactggattggcacagcgtacttccagtattatctggacactggattgcgcgtttcatttctgtagattcagttcactgattgcttccacaaggctgctatctaaagtattaaaaccattgggattctcagcccctagaggcgacatttcaatctacacacatgtgaattgaggtcaatactagattatctaaacagacgggaagcggcaacgtcacttgaaaaacagaactgtcaatgcgactggattggcctcgtgcaggtgagatttctgccattatgaaacgtgacacatttggcttccacaaaacagaggcacagatttacagaactgtcaatgcgactggattggcctcgtgcaggtgagatttctgccattatgaaacgtgacacatttggcttccacgaaacagaggcacagacgagtgcttcgatgatttagagatccacacaaaacgcacgcgccggtatggacttgagctctttcttaggtgcgttcgacagtgattaattctccgtcgtgaggattagtcggggcggccaccgctctcgtcttcagcgccgtcactgctcaggtcgcccccgtgagtgactcttgtagccttctctcccttcttgacccagcgcgctgctcgaaaccacagagctcggctaggtgttgagcaggggcagaggcagctgggacaatgcgagaggacagcgcgaccaccatcatggcaatcagctgctgctccgcgtcgtcgtgctggttggccgcacgcttcagggcggccagatggctggccgccgtgtcatggttgttgtccgagatagcgaccgcggcttcagacaatagttgcctcgacgcggccccggggtcggcggcgagcaggacgcggatgaagacgcaacggaggagtttgaaggtgaccagagctagacccggggacaaccagaggctgctgagacgggatccctcccagcaaggcggcgatatcaactaccacagtggtgccctgcctcacggcgcgcaggtacatcgcctgctgcgccgccacgtgct

SEQ ID NO: 155081 - DNA, 4308 bp, Zea Mays
atggagccgaacctcaagttggcgattgaggagcagtccaggatcttgcgcgacatctctgaccacctctcggcgcaggattcgcgctgggcagcgctagaatcggtcgtcgcccggcagacgtcttccatccagcagctggagactgcagcactccaggtcgctgctacctctgagcgcctggatgcggtcgaatcggcaacggcggcgttcgagacttggcgtccatcggtggaggcagcagtggatgacgtcaagtactctgtcgaccgcctctgcgacgacttcgccaagttctctgcatcagccctccgatctgcgccgccaggcttcagatctgagatgggcgtcttgggtccacgcccaccaaccacgtagcgcccgtctgctaccgtttgcgcggccgatggtcctatggggcatcgcaatgacttgaaacatcgggagactggctttgggcatatatttacccgaacccacctcccacacaatggtatgcccgatttcatgctccatagacccacccgtccatatggccctcctccagatgcattcggtagtcatgcacatggatcccagttctctccctacttgggccatttacctaaagtcaattttcctgggttcgatggtcaaaacccaaaactctggcaaaaacattgtgaagactactttgacatgtacgccgtgcacccttgtgtgtgggttaaagttgcaaccatgcacttcgctggggcggctgcacgttggttaaattcagttgagcataagcttgctagtttgtcttggctagagtttgggaacttgatccgtgagagatttgggaaagatcagcatgctagcctagtgcgtcaattatttcatatccggcagcaagggtcggtgggggaatatgtggaacgttttgctcagttggtcgatcagctcaatagttaccaggaaatgtcagacccactgtattacaccatgcgatttctagatggccttcgttttgatattaaatccactgttatgattcaatggccaaaagatttggatactgcctacgttcttgctcagttgcaggaggagatcgtcgatggttcccggaccaaggactataagaagctggaatctactgtcgcgagcaaatcttatgctcgtggccctatgcctctacctcctccacccaaggcggcgacaacttctacgaagactaccgaattcagaacatcagaggccaacaaggggactgcaacaagagaccgtttatcatcagtgtatgcattccgtaaagctcaggggttgtgctataaatgtgggtagccatttcagcgtggccaccaatgtcctaactcggtccagttgcatcttgttgaggaattgtgccatcaatttcagttaccttcggatgactctgaatcagtccttgaaccttcagaggaccttcgttgtttgttgttgtctcagtcctttttggagggagttccaatgtctaagtctatgcagtttgttggagatattgctggattctctgttctcattttactggattcaggcagctctgtgtcctttgtcagttcagtggttgcggatcagcttccaagttgtacctctccatgtcctccagtcctggtgcaagtagctaatggggctcggatgcgttgtgaccatgagttggtaaatgtcacgtggtctatccaggatcatcaatttatgtctacctttaaagtgttagagctgcaacactatgacatgattgttgggatggactggctatcggcttatagccctatgacagtacactgggcagataggtggttatctattccacatggtcgaacttttgtcaagctctatggagtccagacctcttccacacaaggagcttttatccaactctgtcgactggtggatttgtcagacaaagatcaattggtcattaaagatctgccagctgaattacaacatatcattgatcagtattcatccgtctttgacattcctaagggtttacctcctgttcatgattgcgaccaccagattccgttgctgcccggtgctcgaccggtgcaaatgcgaccatatcggtacggtcctgctcttaagacagagatagaggctcaagtggctgagatgttggcttcaggattgatccaacacagtaagagtccttttgcatcctccgtgatcctggtcaagaagaaggataacagttatcgcttttgtgtggattatcgacacttaaacgcattgacaacaaagtccaaatttcatgttcctatcattgatgagctattagatgaactttctggggcagcatggttctctaccttggatcttcgtgccggatttcatcagattcgtatggatccctcagatcagcataaaacagcattccagacccaccatgggcacttcgagtttcgagtgatggcctttggtctcacgggggccccagccacctttcaaggcgcaatgaatcggaccttgcaaccattattgtgtaaatgtgtgttagtcttttttgatgacatcttggtttacagtgatacatgggacaatcacttactgcatttggagcaggttctacagttgcttcgtaaggaccaatggcaagtgaaggtaactaaatgttcctttgctcagcaagagatcgcttacctgggtcacgtcatcagcaaggcgggggtcgctactgaccccgcaaaaattgtagctatctcttcctggcccccgccccacaacatcaaggatctgcgtgggttcctcggattggcgagctattatcgaaaatttgttaagaattttggggttatcgccaagccactcactcagttgcttaagaaaggtgcagtgtttgtttggacagatgagcaacaaatagtgtttgctctgctgaagacagcgttatccacggctcttgtcttggcaatacccaacttctccaagcatttcgccattgagacggatgcctctagtggtggcattggagttgtgctcattcaagatcaccacccattggcctatataagcaaacctctcagcattaagaacatgggattatccgcttatgaaaaggagtacctagcgatactgttggccgtcgatcattggcgcccctatcttccgcatcgaccttttgtaatttactcagaccaacggagcttgtcccacctcactgaacaacgtctgaagaccccgtggcaacaaaaagtttttactaaacttttggggctacaataccagattgtatacaagaaaggcgtagacaatggtgcggtagacgctctgtccagacgtccccatcatcttactcttgcggcgataccagtgagcacacctcaatggttgtctgatgttgtgaccggttatacccaggaccctaaagctatgaaactactcactgaactggcagctactgctactcctgatggaccttaccagttacaggatgggcttataaaatacaagggtcgcatttggctcggttccaatactgccttgcacaatcaggttatctcttctctgcatgatagcgcagtgggcggtcattcgggtttcccagttacctatcgccgtgtgaaacagctctttgcatggcctaccatgaagtcagcagtccatgattatgtacgttcctgtacagtttgtgctcagtctaagccggatcgggttcgctatcctggacttttacaacccctaccggttccctctcatgcgtggcaggtgctctcccttgattttattgaagggttgcctcgctctggtaaattcaattgcatcctcgtagtggtggacaaattttctaaattttccaatttcatggctttgtctcaccccttcacagcatcaaaggtggcccaggttttccttgattcagtttaccgtctacatgggttgccggaagccattatctcagatcgtgatagaatatttaccagcaccttttggcaaggtctcttcaagcttactggtacttctctgcgcatgagcacctcgtaccatccacaaactgacggtcaaacagaacgcgacaaccagtgcctcgaaacattcctgcgatgctttgtaagttcccacccgtgtcactggacccgttggctgcccctggctgaattctggtttaatacatctttccactcgtcgttgggcaagtcgtcgtttgaggtcttatacgggcgtttgcctcggacacttgggctctctactgatgctgccatttctagcacagatctccagcagtggctttcgcagcgggagcttatgacacaagctgttcgcagtcaccttctccgtgcccagcaaaggatgaaacaccaagcagat

SEQ ID NO: 155082 - DNA, 1042 bp, Zea Mays
atgcctaaaacctcactgattaaggccaagacaatcagtgaaattcactctgaggcagaaaagaatcttggattataccctagagcagcatctgtcattaggaatggtcgtagctcaccaggagggcccctttcacctggagggggatttccaatgaatcggctaggaactggaggtatgatgcctgggatgcctggttcaagaaacatacctggaatgcctgggttagataatgataactgggaagttccccgttctaaatcaatgcctagaggtgactcaattcgcaaccagggattgttgcttaataaaccatcaatagttcacaagacatcatctattaacacgaggcttcttcctcaaggcagtggtgcgacactaataggcaagagtgcacttttgggaactggtgtctcagcatctcgtcctctcagctttacgcctggacccacactagctcaaactacactaaaactaataagtgcagcacccgctgttgtccctgctcctgataaacaggctagtgctcccaaggggaactctgctgagcttcagaagaaaacaatagctcttcttgaggagtatttcggcatacgtattttagatgaagcacatcaatgtatcgtggagttgcagagtcctgaatactacctagaaattgttaaagaagctgtcaatcttgccctagataaaggcaccaattttgttgatcctattgttaggatactggagcatttgtacacaaagaaaattttcaagactcaagacctggaatccggttgattgttatacggtactctgctggatgacattggcattgaccttcctaaagctccagcacaatttggtgagatcattgctcgactgactttgttgggtgccttgagatttgaacctctggagggttattttaaagaaaatgaaggatacctacaaccggaaagcagtttctaatgctttcatgaaaaccttggaagcaaacccatctggtcaagactcgatctctctatgtcttggtttactctattactgtcgtgatgtg

SEQ ID NO: 155083 - DNA, 1680 bp, Zea Mays
tgaatgcccacccataatcgacggagttaatgtcgtgggaggagaagaggtcgtggtgcttggtggaggtaacaacatcggcggtcaggggcggagggcccagtatggtccagtattgcctgggcaataccttgggtcggcccactaagagaatagagattagggttcgtcccgcacagccgcacaggcgcgtcccgacgtcccgcactcctgccggcgctcattcctccaggcctccagcctccaaccgctcgcccgctcggctgcagaccgctcctggcggcgctccagccgctcggagcctcggcacgctcggcgctccagctgtccgctccggcgcttcgctgatctgcttgtctgattgtcttgtcccgcccggcggccggctgcaggctgcttgccgcttggtcccgccgaggcgtcgacccgcaccgcacggctgccgcctgccgctgcttcctgcttggccgcacgtctgcttgtctagttgtttgcttggctgcttgcttagtgcttctagttgtctgcttgcttcgtgcttctgtgtttctagttgtctgattgtgacttgtgagacttgtgagcatagaaaggtcaaaggtagtgcgtgagtatttgattgtgcgtgtctaatgtattagatttttcaaggtgcagattttccaatttctaaatagcagtcttggatacaaacaaaaacaaggcaaagaatatggcccaaaaagtatctctatattatgtgaacactccctgttggctgttgtaacatcttctaattctctaatacatgttatatgcttcgtaaaatgacagatttaaagagctattttagtcaagcttctagtggaagtagactaagcactcgcgctagtggagtttgcaatgaaccggaatacaagttggaattcaagagaataatagtgaagataccaatggtgaaaatgttaatggtcaagtcgaagataagaaaactagacaaatgcaattgtctagatcttctagaactagacacaactaaacattttattcgctatatggtatttggttgtaaatggattgtaatcaagatgactactaaataaggtggtggattttgggtgttacatcatcgaccgccctagcgccatggtccgctggcggttggcaagctctggctcacttcttcggctgctcagtcatagagtcgcatcactagctctctcatttggtcgcttgctcgtagactcacagcactgacggccgcttgcagaagcgctggcctttaagttttttttctctgaaccagtgaaccccagacccaaaggcccgaaagcatataccttgacatgggccacatcctaggccatggcccaggcggtgcggggcccaaatttgcccctgtttaagaccactatgggtgaaagtccacgcaatctagttcttgtccagtaagtctgtttaagctattttttgtggccgcccatcaagtttgtcccccaaaagatgatctaaaaaagttaggcttctttgtgctgcattttttttgcttggtagctataaaagaatagaagttggatggctgaccgactcagtaagcgtgggctgccacgtttggctccttgtcctctctatgatcaagccaaagaaacaatattttatgcattttcaattgttaaattcggtccttgatctggttgatgt

SEQ ID NO: 155084 - DNA, 1591 bp, Zea Mays
tgaatgcccacccataatcgacggagttaatgtcgtgggaggagaagaggtcgtggtgcttggtggaggtaacaacatcggcggtcaggggcggagggcccagtatggtccagtattgcctgggcaataccttgggtcggcccactaagagaatagagattagggttcgtcccgcacagccgcacaggcgcgtcccgacgtcccgcactcctgccggcgctcattcctccaggcctccagcctccaaccgctcgcccgctcggctgcagaccgctcctggcggcgctccagccgctcggagcctcggcacgctcggcgctccagctgtccgctccggcgcttcgctgatctgcttgtctgattgtcttgtcccgcccggcggccggctgcaggctgcttgccgcttggtcccgccgaggcgtcgacccgcaccgcacggctgccgcctgccgctgcttcctgcttggccgcacgtctgcttgtctagttgtttgcttggctgcttgcttagtgcttctagttgtctgcttgcttcgtgcttctgtgtttctagttgtctgattgtgacttgtgagacttgtgagcatagaaaggtcaaaggtagtgcgtgagtatttgattgtgcgtgtctaatgtattagatttttcaaggtgcagattttccaatttctaaatagcagtcttggatacaaacaaaaacaaggcaaagaatatggcccaaaaaatttaaagagctattttagtcaagcttctagtggaagtagactaagcactcgcgctagtggagtttgcaatgaaccggaatacaagttggaattcaagagaataatagtgaagataccaatggtgaaaatgttaatggtcaagtcgaagataagaaaactagacaaatgcaattgtctagatcttctagaactagacacaactaaacattttattcgctatatggtatttggttgtaaatggattgtaatcaagatgactactaaataaggtggtggattttgggtgttacatcatcgaccgccctagcgccatggtccgctggcggttggcaagctctggctcacttcttcggctgctcagtcatagagtcgcatcactagctctctcatttggtcgcttgctcgtagactcacagcactgacggccgcttgcagaagcgctggcctttaagttttttttctctgaaccagtgaaccccagacccaaaggcccgaaagcatataccttgacatgggccacatcctaggccatggcccaggcggtgcggggcccaaatttgcccctgtttaagaccactatgggtgaaagtccacgcaatctagttcttgtccagtaagtctgtttaagctattttttgtggccgcccatcaagtttgtcccccaaaagatgatctaaaaaagttaggcttctttgtgctgcattttttttgcttggtagctataaaagaatagaagttggatggctgaccgactcagtaagcgtgggctgccacgtttggctccttgtcctctctatgatcaagccaaagaaacaatattttatgcattttcaattgttaaattcggtccttgatctggttgatgt

SEQ ID NO: 155085 - DNA, 1538 bp, Zea Mays
acgataatttgggtatgggcagtgatattttttctggcaggctttcaaaattctgatctaatggttggagttctgaaggtcctgccttacctaaatcaagagaagcagacttgtcaatagtttttcccaattcatcagctttgtctttgaaaatctttgtgggagcaggtgttgtgatctttgaaggcctcagaacagcatctagcacgttggccattcttctccctttcttaggagttcctgctggagcgaacgctaccctcgatagctcttgcaccatcggaggattttgtaacttcggatgttgttctaccttagagctttctgctttggttgtttccaaatgaatagtgggcacttcagctactacaacagcttcctcgatttcctccaccatctattccaaaattccaaaagtaacattagattagaagtgcttagattcaaatcagagaaaacgaaaaccattacctttggaggagaagtaacctctccaactgcttcgacagttcctactttataacctacaacaccagatagtgcaggcagttctgcagccctttccaagtaatacaacttcagctgatgggttggaacttttgccttcttttgcttcggcacggtggaggaagttgttgctaccgttttcctttttgttcctttcttccgtgcgggaaagcagtagtcaggatacacaaacccaatgacatcaaacactatattcaatcttcttcccccctcaagcaccaaaggcagtattcatagctttatcttcagacttggtgtatatccccaacaattcatcactagtcgcttcaatagcttctagccagtcatcattcggttcaccaaattgatccctatagcggtaagtatatttcaaatacacaaggccaccttaacttgagctagtgtcagtttccttcgacatttcccacttgtttgttagcggtgatgtttgcggtgtcctcgtcggaggaggaatcggtggagctctcatcagagtcccactcccgacaaacatgggcattgccgcccttcttcttgtaatacttcttctccttccttctttccttcttgttgtcgcccctgtcactatcactagataatggacatttagcaataaaatgaccgggcttaccacatttgtagcaaactttcttggagcagggtttgtaatccttctccctcctttgcttgaggatttggcgaaagcttttgatgattaaagccatctcctagttgtcgagcttggaggcgtcgatgagaagcctacttgatgtagactcttccttcttctcctccgtcgctttgaaggcgacgagttgcacctcggatgtagaggtggtgccttgctcgatgattttcttggagcctttgatcatcaattcaaagctcacaaattttcctattacttcctcgggagacattagtttatatcttggatcaccacgaattaattgaacttgagtggggttaagaaaaacgagtgatctaagaataaccttgaccatttcatggtcatcccatttgctgct

SEQ ID NO: 155086 - DNA, 1391 bp, Zea Mays
gaaaatatcgggtaaacctaccgcgcagcgtctactcaatcactacttcaccttccttctacgctcccacagtccaggcgtccaccccaaaacaatcatgactcgtctctgtccccttcacctcctcctcatcgctgccgcggcggcgtctgccagcggtgccgacgaggcgcacgtctccatcgcggtcgcggagaagggcctggccttcgccaaggacgtgcttatcagcgaggccgtgcggtcgctgacccctcttcgcctccccggggtggagaaggccgtccgcgtgcccttccttggcggcatccgcgttgccgcctccaacatcacgctattccacctagacgtcggggacaactccactatcttccccggagactcgggccttctcgtcgtcgcctccggcatcaccgccaacatcagtatgcattggagctactgctacgattcgtggttgtttcccatagagatcaccgacagcggaacggcctcaatcctggttcaaggaatggaagttgggataaccatggttataaagaacaagaatgggagtttggctctgtctgtttcacagtgtggttgttatgtgaaggacctagtgatatccctggatggtggagcatcttggttttatcaagggctggttcaatgcattgggttgttgacaaagtccctgatcaatctctactgaacacagctaattggaaatttatcattcctcgtttatactggaattacccaaatgacgatatactgctaaatatctcaatggcctcatccccggtgataagggttacatcagaaaaaattgaagctaccattaatggagacatgataattgatgttgtagataacaaggagatagttccagttgcatgcatctcagtgattgtcagtgcttcaggtgttgtggatgcatcaggcaataaagtatatggtagagttggattagataatttctcccttgcgttgaagtggagtaaaattggcaacttccatatgtctttgattcagggagtgattcgggttctcctgaacacagtatgcatgccgtatttgaactcacggcttgggaatggattgatcttgcccgtggtccatggtttcacacttcaagacgtctacgttttaacctctgctgagcagctgacgctttgttcggatgtcaccttcaacgcaagcagcatggcgagtttattatgatacagggaagtgcgtgtctggcgtatttcatttagcgttgaagtacaacactcgcacatatgtgtacattatattgtacatactacacaacatctcgttataaatattgtttacattcaattctaccaatccatgaattcaaacatctgtgtacaatatcttaggtaatcaaagttatccacagc

SEQ ID NO: 155087 - DNA, 1692 bp, Zea Mays
gaaaatatcgggtaaacctaccgcgcagcgtctactcaatcactacttcaccttccttctacgctcccacagtccaggcgtccaccccaaaacaatcatgactcgtctctgtccccttcacctcctcctcatcgctgccgcggcggcgtctgccagcggtgccgacgaggcgcacgtctccatcgcggtcgcggagaagggcctggccttcgccaaggacgtgcttatcagcgaggccgtgcggtcgctgacccctcttcgcctccccggggtggagaaggccgtccgcgtgcccttccttggcggcatccgcgttgccgcctccaacatcacgctattccacctagacgtcggggacaactccactatcttccccggagactcgggccttctcgtcgtcgcctccggcatcaccgccaacatcagtatgcattggagctactgctacgattcgtggttgtttcccatagagatcaccgacagcggaacggcctcaatcctggttcaaggaatggaagttgggataaccatggttataaagaacaagaatgggagtttggctctgtctgtttcacagtgtggttgttatgtgaaggacctagtgatatccctggatggtggagcatcttggttttatcaagggtttataaatgcttttgaagatcatattaaagctgcagttgagaaggcagtacctgaaaatatcattgaaggcgctgggaaactggactcctttctgcaaggtctccccaggaccatcagtttggacgacgtcgcggccttcaacttgactttcattaatgatccacactatggcaattcttcaattgagttcgatatcaatgggttgattacttcagcggttgctgagacagccaatctgcagaagcatccacaactttctttggcttgtggtggtgcatcaaaaatgcttttgctctcacttgatgaagatgtattcaattcagcactagaagttcattttaaggctggttcaatgcattgggttgttgacaaagtccctgatcaatctctactgaacacagctaattggaaatttatcattcctcgtttatactggaattacccaaatgacgatatactgctaaatatctcaatggcctcatccccggtgataagggttacatcagaaaaaattgaagctaccattaatggagacatgataattgatgttgtagataacaaggagatagttccagttgcatgcatctcagtgattgtcagtgcttcaggtgttgtggatgcatcaggcaataaagtatatggtagagttggattagataatttctcccttgcgttgaagtggagtaaaattggcaacttccatatgtctttgattcagggagtgattcgggttctcctgaacacagtatgcatgccgtatttgaactcacggcttgggaatggattgatcttgcccgtggtccatggtttcacacttcaagacgtctacgttttaacctctgctgagcagctgacgctttgttcggatgtcaccttcaacgcaagcagcatggcgagtttattatgatacagggaagtgcgtgtctggcgtatttcatttagcgttgaagtacaacactcgcacatatgtgtacattatattgtacatactacacaacatctcgttataaatattgtttacattcaattctaccaatccatgaattc

SEQ ID NO: 155088 - DNA, 1782 bp, Zea Mays
atgcctccactcgggcttgacctcgttccggtcttacccaccctcgagtctggtctcgggtgggcgcttaggcaaggaacatattctgcattcgatgggtacaggaataggttgacaaagggccattcaaactggaaacgattaaagaaaggtcgattaaagaaaggtccactagagcatggagaattgttacataaaatgtttggtggcattgttgtggatagatctagtgcaagcgcaccccgtgaagtgtttggagggaatgatgaagaagaggttgttgttgatggatgttatggtggagatgacagtgatatcatgccactaaggaaaattataaaattgcaaacaaagtttgcaacatttacgcgatccattgcattgcgacttgcagctgcagagccggtgatggcggaccggcggagcaatggtggttcgccccctagctggagcttcgcgtctcaaagcagccactaccacttggcggcgatgagaggaagctacgcgccacagagcctctggcgcccgtcgccgatgccggtccgtggtgccgccctgtcctcgacgccgcacgttgtggcctcggcgcccgccgagaagaacttcgccgccgacttcctgctgggcggggtgtcgtcggcggtgtccaagaccgtggcggcgcctatcgagcgcgtcaagatgctgctgcagaaccaggacgagctgatccggaccggcaggctgtccgagccgtacaggggcatcggcgactgcttcggccgcaccgtcagggacgagggcttcctgtcgctgtggcgcgggaacaacaccaacgtcatccgctacttccccacgcaggccctcaacttcgcgttcaaggactacttcaagggcctcttcaacttcaacaaggacagggacggctactggaggtggttcgcggggaacatcgcctccggcagcgccgccggggccacgtcgctgctcttcgtctactccctcgactacgccaggacgcgcctcaccagcgactacagggcggcggctaagggcggcgagaggcagttcactggcctcgtcgacgtgtaccggaagacgctccggtccgacggcgtcgtggggctctaccgcgggttcaacgtctccgtggccgggatcgtcgtgtaccgcggcctctacttcggcatgtacgactccttgaagccggtgctgctgacggagaagttgcaggacaacttcttcgcgagcctggcgctcggctggatgatcaccaatggcgccagtctggcctcttacccgctggacactatccggagaaggatgatgatgacctcgggggaggccgtcaagtacaagagctccatggacgccttcgcccagatcgtcaggaacgagggccccaagtcgctcttcaaaggcgccggcgccaacgtcctacgcgccatcgccggcgctggcgcgcttgccggctacgaccagctgcagctcatcttcttcggcaagaagtacggctcagggggcgcgtgaacagggacaagtttcagcgaattcagtaaaactcagcgaatagacgacgacgacgaaaacggcatttgattccttcatttactatattttttttacaggttcacatatttgtatagctcaaaattcacaataagaagcattcagattgcttccatttgttttcgctctgattgattttttttttaaaaaaaaattatgtttgtaagattgcagtgatgtaatataagtactaaaaataataaagagttgcttgaaagcattcagtgttatcaa

SEQ ID NO: 155089 - DNA, 603 bp, Zea Mays
atgttcgatacctgcgacatcagctcgattccgggccaccatggatccaacaacgttgaggataatctttctgaagctttggaacaccgaaatttgttgccacggcgcgagctcatcttcgattggagcatagaccatgtcggcggaggaaggagacacgacaaccctgacgtgggcgttggcttggggaatggcgttggacgcggtggtggtgtatcccgaggccgcggaactgccgatattgggcgcggaacgaccggcttgcagcgtggtgttgggcgcgggactgccggtggtctggcgcgaggcacgacgcgtggcgcagcatgcggcattggacgcaactccgcctacctgaagctcagcactggcgcacctacaggtgttgctacagatggactaccactgtcggggatagggcgtggctgtggaagcaagcatcataaggttcacagagatctatttgttcaccgattgatccgattagacttcccgcggggtagcacggggaacttgctgaatcaactccttggaatcggaggcctgactgagggtcaatcctatggtaacctcaacctaggaatgcctgtttcacttccttga

SEQ ID NO: 155090 - DNA, 349 bp, Zea Mays
tttcttgatcaccaattcatcatgcttaacatgaacttttcaatcttcctattgcagattgcaagcattgtagcttctggtattcaacctctccataacctcacaatgttgaggttcattgactagaaggttggtgcaggggagagtgtgttgtggactcaacaacaaatcgagagaggtttcacagctattgagaacctgatacaactaaaaggatgcgccgggaagtatgcaacaggagatgaagtccaattggtacgtttgctcgccatttgtcacctttttttagaatgtgttcttgagcacttcctgctgatgcgtgagaggggattttaaaaataaataaaat

SEQ ID NO: 155091 - DNA, 102 bp, Zea Mays
gattcatacttcttgataaacgaattgtttcgatacattcttttaacgatcaactaccagttcaaatggtgttcctatgctaaacagaccatctctaagcag

SEQ ID NO: 155092 - DNA, 396 bp, Zea Mays
aaatcgtgtgcactggcacctcatcggagctctacaggaaaagtccccaggcgtcatcggtgatcgatcagaattcaatctatgggctttgtcaggcgctgaggaaggtgtgatagtcattcgtcctgtgttcaaggccgtaggggagccacaattcttcattggagttcgcgattggtacgagagccgctgcgctagggctttgcccacatcgtgcctctctgcccacggagggtggtcgaggatgatcgctagatcctgtgcaagctcttcatgcagtcgtcgagaagagagggtcaccttctccagccaaattgttcaccggtgttgaagattcgccttggcgtcacggtgtcacgtgggtggaactctggtcgcctcaatctgaggtgagaa

SEQ ID NO: 155093 - DNA, 789 bp, Zea Mays
atgtcggactctttaagcatgaccgacgctaagagaatgctggaagagatgcttgcctccaccacagacttgcagaagcgcatggtggcacaggaggataatctggtcgccctgaacagcgaggtatcttcgctcaaggttgatcaaggcaggttccacgtcgccgtcaacaacgtccagtcccagcagatggacacgatggggagatccagcatcccgaccaacaacctccaggatcccacatcaagaaccgagtcgtcccaaaccgggggcatggccagagctctcctcgccgctgctgcccaccagctgcgcttccccaagtatgacggcaccgaggaccccctcccgtggttggatcgctgcgaccaattcttccaggcaaccgcaaccccggacaacgaaaaggttcgcctggcaaccttctacatgcagggtgtcgcccagcagtggtactacatgttggaacgcaaccagggaatcccaacctggccatgtttctcccaactggccaaccagcgatttggcccaccaactcgcagcaaccccctgggcgagctatgccacctttgtctgcaaggatccgtcgctgactacacggaggctttcctcgcacacctgtcccgctgtgacaccctcacggagcatcacgagatcgccatcttcaccgcaggcctgggcgaaccattgaagaccgacgtcgagctgcaacagccggacactttggaggacgccgtggggttggctcgtgcctatgaacgaccatttaagaagtatgttgacatatga

SEQ ID NO: 155094 - DNA, 591 bp, Zea Mays
tgaagctgaaatgacaacagcataactaacaatgggtattgattaatttccaattgtcatgtccaaacgaatagtgtctcccattctcccctctttacatatcgaaattaacagaaaagggagaaatggcaaagcaaataaaatgaatggatcaatcgacatgttcagacccaaattaaagtacttaaatatatatataaacggaatccaaccgaatacaggcaatggcagccagcagcctctccctccgatcctcctttaattttactgcaggtagtaggcgaagaaggagagcacggaggcgcccagcacggcgccgacggccgggaacgcggccgaggaggcgctggtgggggcgggcgccggggcctcggcggcgaggaccacggtggcggaggcggcggcggcgaggacggcgcaggcgaccttcttcatctccatcgcgacttgatgtggtttgccggagccgaacggagcgtcgtcgggatcgagacgaggaagaacgaagggcacgcaggcttattagcaagatggatcaacggatgatcacacttgctattattggttgcgcccttgcctgtggctagcttg

SEQ ID NO: 155095 - DNA, 574 bp, Zea Mays
ttaaattccatcttttcctctagagatgaagtttcagagccattcccttctctcatgcccttcatcatcataccctagttgtcgaccgccgattacaacggcggtggttattacctataattcctgaactcttgtatggcgctatcccagatgagcttttggatgagcctataatgctttcctgccgtacacaatgggtgtttaatttctttgtcttcttgatggaggatggggaaacccttatgttagtgactgccaggctcttggccttgcaagggcgaggttctggcttagtgcactgcaggcagggctgctgatccacggtgataggctcatctcctgtatcgactatcccttctgagcttgtaaatttcgttttagcatttaaattttattaaactctctttcttctctctcactcactcactctctctgtcagtctctctctcgctctctctcttcttcgtgcatttggtagtgttttaatttctttcggctagtagttctggaggtggtgttagttttgtgccttctgctgtgcacagcaattctacaatgctactagaatttggca

SEQ ID NO: 155096 - DNA, 343 bp, Zea Mays
atctgatcagcagacgatcccttcttctccatggcggcggagaagttgtacatcatatattcatatatcagttggagtgacctcgagcgtggactatgggatggagtagcagagttgtgttaatcagagaaccagcagtcacgcgttctactgtctcgcggtctgcagttgcatctgctgatctgcactttgcatgctttcccatgatcccgtcaatgtgagctttctactgcttgtgtaaaaatgtctctttggcggtggccacaaaattttcagctgcaccggcaccacgccaccaccaccacgctacaaaattttctttggctttggttactgaataatt

SEQ ID NO: 155097 - DNA, 879 bp, Zea Mays
agaaaggaatcacacggcacgccgtctcgtgtgcttcctaggtcattcggtcattccacttccaccaatctgtctcccaatctttcttgctgctccaattcgctctctttactcggccagcggaaggggagaggagggcgagatgacggtggagaaggtggacgcggggctttccgacttcgacgcccacttcgatcgcctcttcgcttccccggacgccgcctccgacggcaaggtgaagctgctgctcttcctggccgaccgcaagcctggctcctccctctcctggtgccccgactgcaacgtggcggagccggtgatctacgagcggctggaggcactggagggcaaggacgcggtgctcctgcgcgcctacgtcggggacaagcccacttggcgcgacccggcgcacccgtggagggtggaccccaggttcgggctcaagggcgtgccaacgctgatccgctgggaggatggcgccgccgccgcccgcctcggggacgacgaggcgcacctcaaggacaaggttgacgccctcctctgcgctggcggcaactgagtactgacagatctggtttcccgttcgggttccatctgcgtagagtggccataataacatgtactgtaattcagttcatctacatgccggaccagaagctggggaatcgtgtgaagcttaataattcagtttatctacatgccgaaccagaagctgggaaattgtgtggaactaataattcagttcatatatgaccaaaaaaaaagaaactgcgagattgttaagctagtatttcgatggtatcacagtacaatatagtacattcccagagtccgaatcctaggttcaaatgttcaattaaataattgcatttcacgatc

SEQ ID NO: 155098 - DNA, 820 bp, Zea Mays
tacgatgaagctgacactttaattcaaacccatacatccgcacttccgtgcagcaaagaaacaggaccaggaaaccataaatattcagaagtatataccataagataatatttttgcaatcttatttggtccaggaacggaaatacagtcatccagctaattgactaacacttgagctcagtaaagtattgatctctccaattatatacactggtcttccatcaaaaacagacgacagtgtcgactcacacagcttctttagttcccttgtttttgtaattgctgcctcctgtatatatagaaggaaaataattaacatactccacattcagcaaacttaaaaagatttattggctatataaagcgcaaggaccaaggagacatattggtgttttggttcattagcacataatggactccaatttgcaatgagcaaatatgaatcataagcataggtatttttgcaacactataaatcataaggctgtctccaatagatcgtgtatatgtcatgcaaaacactgttttgcactgctcacaaagtgaagtttgaaatattagatgagacaagagataagatggtaagctgctggacacagctaagtataggcattttcgcaccgatattatgtgctactacacgtgtttttaccaatctcagaaaaactgtaaaagtatatgtgcaaatgaaaagtgcaacagaatataaggccccgtttgtttcctatcatttcgaggaattggaatcttactaatagaatagactatttttttagaatatgacattccaccactttccaaagttatcatataagcctac

SEQ ID NO: 155099 - DNA, 1270 bp, Zea Mays
acagaaccaaccttcggccatggcttcttcttgatctgtggtgcgcgtgggtctccgtctcccctaccggtgtcgcaatctgcagtattttttccccttcggtgctagggaaaagagagagaaaatctcacatcttttgactgcagacatactagtttgatgcaaggtcagtttttctctgtcctccatctattttctctagtctgctggtgacatttctggattatataggcgcattctgatacgagattaggtatatatatatatatatatctctggatatatatgtgtttcttgagattgttgacgcggatctaactagaactccaatctcgaatattcaacaatgtcccaatctgggttttacattaggttcttggttttttctatcgcagctttgtagattgtcttggctgcactgtcctagagcaagtttctgtcacaagtgagatatttctgcgggttccaaaaaggaagcaacgacgaattgaaccatctgcagcttcttccgttgcattgcctcgtactgcatacatctgcagcttcttccgttgaattgagccaacaatgggtagggggagaggcagagggaggaaacagctcaccaacggcaggactcacgcggacaagaggagcagcggcgaggaggtcgccgcgcctgcaaggaagaggagggggcggccccagaagcgtgtagccgctgagaagaccattgaggcagagatgaaaaaactggtggaggaggccgatgatggcgacgaggactacgtggtgggagcaggggatggtggtgccaagccgaagggctccagaacagagcatgcttccgcaggagccggtggcactggcaacaagaggaacagggtgcacaatgaagaagagggctctagtctccttgacatggacgagaacagctccagcactcggtccagcaatgacgagtccaccagatccaatggcttccgccagtctggaagccgccggaagagcaccccacggcgagcggcggaggcagggctatagtcagaagttggagttggaatgcagcagattctttggtatcgtttaggcagatgctcttcagttttgtcgcacattcatatttttagttgcaatgttcaattttttgtcgtcttggtgtttgctaggcctacatctacatgagtgtaaaaacatatatataatactgattgcaagccatctgaattttgtgcttatgttaatgaagaaaatgtaagaacaaaccacgaagggtgtgactggtttgctg

SEQ ID NO: 155100 - DNA, 996 bp, Zea Mays
caaccttcggccatggcttcttcttgatctgtggtgcgcgtgggtctccgtctcccctaccggtgtcgcaatctgcagtattttttccccttcggtgctagggaaaagagagagaaaatctcacatcttttgactgcagacatactagtttgatgcaagctttgtagattgtcttggctgcactgtcctagagcaagtttctgtcacaagtgagatatttctgcgggttccaaaaaggaagcaacgacgaattgaaccatctgcagcttcttccgttgcattgcctcgtactgcatacatctgcagcttcttccgttgaattgagccaacaatgggtagggggagaggcagagggaggaaacagctcaccaacggcaggactcacgcggacaagaggagcagcggcgaggaggtcgccgcgcctgcaaggaagaggagggggcggccccagaagcgtgtagccgctgagaagaccattgaggcagagatgaaaaaactggtggaggaggccgatgatggcgacgaggactacgtggtgggagcaggggatggtggtgccaagccgaagggctccagaacagagcatgcttccgcaggagccggtggcactggcaacaagaggaacagggtgcacaatgaagaagagggctctagtctccttgacatggacgagaacagctccagcactcggtccagcaatgacgagtccaccagatccaatggcttccgccagtctggaagccgccggaagagcaccccacggcgagcggcggaggcagggctatagtcagaagttggagttggaatgcagcagattctttggtatcgtttaggcagatgctcttcagttttgtcgcacattcatatttttagttgcaatgttcaattttttgtcgtcttggtgtttgctaggcctacatctacatgagtgtaaaaacatatatataatactgattgcaagccatctgaattttgtgcttatgttaatgaagaaaa

SEQ ID NO: 155101 - DNA, 2239 bp, Zea Mays
agcagcacggacggggcatgggattgacccacacacccgccctccgccccgcaagccaaatacgccgtggcacgcgtcgccatgccgccccagttccccaccgcccgcctcctcctccctagtcacaggctgctcccgctcctctcccctctcccctccgcgtccctgtcccctgctcctcgcaccctccgcctcccgccgccgcagcttcttcaccgagtcgcccgccgccgcccgctgctgcgcggcatggcctccgccgccgcccccgggtcacacgccgccgcggaagcgccccccgtcgacgtggggggagggggcgctggcgccccgcggcggctcgtcctggaggagctaccctgggaccattccttcgtccgcgagctgcctggcgacccgcgatcggacactatcccgcgggaggtcctgcacgcctgttactccagggtgtctccctctgccaaagtggacaaccccaagctggttgcgtggtctgattccgtggccgatctactcgatctggatcacaaagagtttgaaagacctgatttccctcagtttttctcaggagcaactccactagtggggagtttgccctacgcacagtgctatggaggacatcagtttggtgtatgggctggtcagttgggggatggaagagcgatagctcttggagaggttgtcaactctcgaggtgagagatgggagttgcagctcaaaggttgtggaaagactccatacagcagatttgctgatggtcttgctgtcctacgcagcagcatccgtgaattcttatgcagcgaagccatgcacggcctaggcattcctacaactcgtgctctttgtctagttgaaactggaaaatcagttgtccgagatatgttctatgatggcaatgcaaaggaagaacctggtgcaatagtttgtcgtgtagcaccgtcttttttacgttttggttcgtatcagatacacgcttcaaggggcaaagaggacattgagattgttcgtcgtttggcagactacacgatacatcatcactttccacatcttgaaaatatgaaaaagagtgaaggtttgtcattcgagacagctataggagattccccaacaatagatctcacatcaaacaaatatgcagcttgggcagttgaggtggcggagaggactgcttacttgatagctagatggcaaggtgttggcttcacccatggtgtacttaacactgacaacatgagtgtgctgggcctaactattgattatggaccatttggatttctcgatgcatttgatcctagctatactccaaatactactgatcttcctgggaagaggtactgttttgcaaatcaacctgatgttggcttgtggaatattgctcagttcactggaccactgtcctctgctgaacttatcagccaagatgaggcaaattatgtgatggagaggtatgggacaaagttcatggatgagtaccaatctatcatgaccaaaaaactgggcttaactaagtataataagcagctaattagtaagctgcttagcaacatggcagttgacaaggttgactataccaacttcttccgtcttctttcgaatgtcaatgcggatcctggtattccggagaatgagctgcttgtcccactgaaggctgctctcctagatattgggaaagaaaggaaggaagcatggattagttgggtacagacttatattgaagagctggtggagagcggcgttcctgatgaagaaaggaaagccgcgatgaactctgttaatccaaagtatattctccgcaactatctctgccagtctgctatcgacgtagctgagcaaggcgattacgaggaggttcgccgggtgcttagggtaatgcataatccgtatgacgagcagccgggaatggagaaatatgcacggttgccaccagcttgggcatacagacctggagtgtgcatgctgtcctgctcctcgtgaaccccatgatgcaagacgtggagtcgtcgtggacattacaaaaatgcttgggtgcttatagtcttcctcctgtataggggtccatctttgtgctgtaatgtgtcaagcatcgcatgctattttttttccggtgatgcaagtgtgtaagaaccatgtcgttgcaggaatagtgaagcagtgggacctgttattgtgactacctagtatcccgtacggagatggaaatttggcggtttactagtctatatagtgaagctctggcact

SEQ ID NO: 155102 - DNA, 498 bp, Zea Mays
acctaatgctagcagccacaatgagacacactaaagcaaaaccatgcattagtatataccgagacataataaataaatgcaaattacagtattgggatatagtgaacaagacagcttatccactagccaatattaccatacatttgcctgctcgtgttcatgagcatgacaacaatgcggatcgcacatgcatggtattaagcacttaacacagacaacataacacttgacggcatatgcttttctatagtcaggttttgtagcaatcagtataagctatttttcccttattgtgcaacagtggcagacttgtgagagtaattattttagtgaacgaaggtccccagtactaaaaaaatgaagcacaagagtccataaatccacatggggtcaaatcggagaagcttccaagtggtcggtccccttgcgtgagatgttgggtataacaagtgtgaactgtaaacagctaccaagtgcttgtaatctacttttcttttc

SEQ ID NO: 155103 - DNA, 582 bp, Zea Mays
tccctgtccctcaggccctcacgatgagctaaccacaaccctagtcgaacaagtcttccaagtcccaagtcagccgcccgccgcccccaagccgcagcccgccgctccaagccgtaggaacgccgccacctgccgccgactacagcttccggctccagcgtgcgctcagctcaactgctccaagcctccagctctcacttgccgcccagctgccacccgccaggccccatcccatcaactgctccaagcctccagccttcctggtgttgtgctacaagcgaccaagttgtgtaactgtatgaggttggcaaggtgcctagttggccagccctacctgtttgctgtttggcggtggcttggccatggcctgttgttgtctacttctctattgcagacttgcagtttgtttgttccaatttgcagacttgtcacaaattttgttgtttgcttcattgcttattgggtacttgtttcaggtatttctaagttaatttgtcatgaacattgtatggacgtgtgtgcagtttttagattttgtaccagtttgtttgctataataacatggagtaatggggctgtttg

SEQ ID NO: 155104 - DNA, 703 bp, Zea Mays
tcgtcgtcgagcccggcgaaccttgttcttctctgctcgatctcgtcgaaccacgaatcccggactttagacaaaaataagcgaggtccctgtgcatcgcttatcaagtactcggtcgaagacttcaatcgaagatcgtcgtcattccgtgcgtcatcgaggaatcccaaggatcggatgaagacgaagctagcagcgcgatattccccaagcgctcgacaaattgcctgaatcggaaaatcgctaccgatctcgtggattcatgtcagctgtggaaacggtaagctgataaattattcataatagttcgatcagtgcataaattaatgtgctagtgcgctgcttatttaggtgctcaataaattgcgtaagtcacgaaactctcgtcgacttcgcagttcttgcgattatcgagccaggttcagttacagtgagttatttcgctatttcggtcaattagcggaattagtgtaccgagtagaatatgagtaggcctgtgtgatgataaaatattttaatcacttctatagacgtatatatatatatatatatttacgataaagaaatgtttgagtaattgttgacatgaaaaacatgtgaggagtaaaataaaattaaaatagttctgtgggagcgatgtagtataatttataaaacgagggataagtttagaatttaattaattagctgataagttgtgtta

SEQ ID NO: 155105 - DNA, 330 bp, Zea Mays
atggcggctcctagtccctggttgctcctccggccgagttctctgttttttcttctcccagttttctgcgctcgccgagcaacctccatggccggatctccctgctcctcgctgctcgccccaagctctcagccatggccgtcgagtcccctgttcccatggccgatctcggttctgtttgtcgcgacagccgactctgctgcttgctcccctgcgcgccgtgctcctctgctctctgtctgtgcgcgtgctgtgctcgacgtcttcccatggcgctcgactgttggccgtgccgtggagccagcgcgctcggtcctgcctatctcgtag

SEQ ID NO: 155106 - DNA, 214 bp, Zea Mays
aaactttatcttggattggaatttgaattttgtaaatcaaaaagggaataatatgggaatatctcatttgactaaataatggatatatataataaaataaaccatgtataacaagttagagtttctgtttgagcacttaaatatactttaaatttgaactctgtttgaatttaattcaaaatttgaatttgaatctaatttgagattgggaaag

SEQ ID NO: 155107 - DNA, 715 bp, Zea Mays
gaaaatacatcatcaccaaatttattaatttaaaactgaaaggtacatattttcactcgtccaattgacaatataatatagtagggtgggagggaattaattggctgctatcgttgggagacctacgttctgcacaccacgcaacgcgagcgcaggagtctcttcatgccgcgtcctcagttgatttcaggaaaggggaccataaaaaacccttcaggaaggttttttatggtggtgccctcggttttgctggtgtcctcatttgacgatggagaaagttgctcgtggagatgttcgaaccttcactgctgttgctgctatatatctttgttttgccatatatgtgcacaggagatcattattacgggtcacgaatggcgtagagtagaacggaacgagaaattgttggggatatataggcggcttctgtggccgcagcatgcagtagggtaactatctagtagtcttcaccaccacgacgagcaatcggtagtacgactttggtgacgacggcctcgctgggaggcgatgctgccgacgacccacggccatggttgtggcgaggacgactagcagagacatacgtaccctgaggagcttgctgcacagccagatccctagaagcagcttgcggtgctggagtagtggtgggcggcgccacgatcttctcggtagttatcgtcgtctctccacctcggacaacgccgtcgtctga

SEQ ID NO: 155108 - DNA, 328 bp, Zea Mays
cgcctatgtagtagctttagtatgtgtttcgtctaccctgttcatgctatctgtctttgcctttctatgttacatttccctgtttttgaagactggaagccaagtttagttggtgggcagaataccttgcgctgcagctagaaggacgttaagttctcgggttgagttcggtgaggtatttcgggaacgtcatgttccagaagcccctatgtaaataaagttcaaagcgtttttggatctaaagcaaggtgaagaagcgagtgtaatggactattttagaggtttactcgcctatcccagtatgttttggattatgtggatgccagtg

SEQ ID NO: 155109 - DNA, 255 bp, Zea Mays
atgtccgccattaaagccacggccgaggacgccgcttcgtccgccaaggccggcgtcgccaaggccaaggccaccgctgacgagaaggttgagaaggccaagacgagagatccgttgaagaagcgggaggtcgaggaggacaaggaggaccgtaagctgcagatcgagtccgacgagcgggtcgagaaggccgcccacggccccgagaggaccgtggcgcacacggccgaatttaaaatagagattgcagagtag

SEQ ID NO: 155110 - DNA, 316 bp, Zea Mays
aacaaagaaacctatttctcgtggttactttagagtgtagacaatcgcaacagcgcaaggatgcagctctaaaaaataaccagtaacccaaacaattcaactctcaagctagcgagtagcaagagaggcacatacagacagtatgtacacataggtgattagagatgaagcagcacgcctcgacacccctaaggccgtcgtagacaccgatgaaggtggtggcaacaaccgtctccacctggttgtggtcctacaacatgtcgttggcctgcaccatggcgaaggagaactcgcccgccgcgtgctgtgttagatc

SEQ ID NO: 155111 - DNA, 2315 bp, Zea Mays
tgtaggttggtttttcaggcactgatgagaatatatagcaattctaaatttctaataggatcatctttgatcgatcgttggttgtaaccatcctccttgcagaatcattatgcaagggtaaggctatctaaaaaatcccttccccaagccccaccttaggctttgttcggcatcttaggatttttttcctaaactaggtttttcccccacatggattgggtgaatccaaacctttcacccaaccctttatgggattaaattcctaaacccaaccaaccaatgtttgttcttttattccaaacccaatccatgccctcctcccaccaccaacagcagctgctgcgctttggtggcagtgttgataagtactacactactacagctaccaggaggatgaaatggaacagtccagagctctcatggtcatgggagccactgcgtctccgctaccggcagctcctccggagcttcgacgacggacacaccaggtgcatactcatcgccggcgacgtggacgacgacgatgcaacccaacaccgcacacgggacaagacaagccccgcgactacctgctgcagaggaggcggcgacgcaccgctgatcagggtgcggaagtggccgtggggctagttcgtgtcggagatcagggactccacacgcaatggacaatgcgtgtggatcagcaccttcgacactcccgaggccgcaccttcgacactcccgaggccaccgtgctgactacgaccaggaccaggccgcctactccatgcgcagctcggccgcagtgttcaacttccccgtggagcacattcaagagtcgctgcgggcgctggggctcagcgtcgacgcagggggctcgccggtgctggcgctgaagcggcgccactgcatccataggcgcttgcccaagaacaagatggaggccaacaaggaggaacaaacgaaggcccaacctgcccgggctgggcacaacaaaacggagccttatgtggaaactttcagcactgagtacgcccttcttgatcaatccaagacacctgcttttgaaaagagtttcaaaagctacactatccaagtgcagtcctaaacttgttaaagatagaaaatatgaaacacttgctaggctgctttttatgaagtagccctaccagtaccaattgattcataatgcgattcacaccaaaaaaaagaacaagaaaagtgatgcacttttactacatattcaagggatgatgatagaaatataggatggtcataggtagaatcagcaagaaccactttccaagttttgatattcaacattattaaagtttgcaaatttaggttgtccttagtttggggatgaggtggaatgggatggtttcatcctagtttcttgaaatgcaatggtcccatcttgatgtttggttgaaaggatagaatggtccctgttttttgtttggtagggggatatgaatagataggatgaaccaggttctttcgaggattttctcaaacactttgcaagagccacctgtctccaggcatatgctgctcatctggcacctctccgtctctgagcatctgtgtcccatgctcttgataatgccaccatcattccaacttatcccacgtgatttgtgtttgccaccgctcgtgaaagcaagcaccagcgcgtgcaggcaaggaagcttgcacctggctgcctgcaagcaaagctaagcaagcagctgctggacttcttcacaagtactgtgttcactgggtgcgcttgccatcctcatctcatctgtgtgagctctccctcgccagcagcccaagctttcacacgcctgcccaaggatgcaggcacacagactcttcttcaacaaccatgcaacagctcctcttgagcttgagctccgcaagacctgcagcgccgccagagcgacttccactcaatccccatgcatccagcgctgctcctccttgttgagcttgccctcatttgcaccccacaccgatctccagcggtgccaagctcatccgggccttctccttttctccctgcgtgtcttgcagccaccactgctctccttcatgtgcactcacgcactcaggcaaaagattgctcatcccacctctttccaccaaattttagggaaaggttctcacccggaatattagggaatattccctggtggaatagttgcattccctgctgttcctgaaccagatacaaaaacaacatggcatatcccacgaaccaaatgctaccttagtaatgtgttttagtgtgacaaaattctgatgtcaaatcttgtccatggatcaacttacagtttataagcttacaa

SEQ ID NO: 155112 - DNA, 426 bp, Zea Mays
atggacaatgcgtgtggatcagcaccttcgacactcccgaggccgcaccttcgacactcccgaggccaccgtgctgactacgaccaggaccaggccgcctactccatgcgcagctcggccgcagtgttcaacttccccgtggagcacattcaagagtcgctgcgggcgctggggctcagcgtcgacgcagggggctcgccggtgctggcgctgaagcggcgccactgcatccataggcgcttgcccaagaacaagatggaggccaacaaggaggaacaaacgaaggcccaacctgcccgggctgggcacaacaaaacggagccttatgtggaaactttcagcactgagtacgcccttcttgatcaatccaagacacctgcttttgaaaagagtttcaaaagctacactatccaagtgcagtcctaa

SEQ ID NO: 155113 - DNA, 788 bp, Zea Mays
atatattcaagcgcgcgcatcagcgctgcccccaaatagtacatctccctccatgatgctcgcaactcctcctagcatcactcaccgccaccttcacagcggcatcatcccgccaccgggtccgggccaccgcaggagactcgtctccactgcacgcgccgccgtgaagcgagatggtgccaccacggaggtagcaggcgatgagggcgcgtcgtcgtcgtcgtcgtcgccgccgccgccggaaagctcgagggtgactaaggctgccgcgacggcgaccccggcggcgttttcgttgcccaaggactacagccatacgctgttccactccgagttcctggaggtgctgggcctgatcgacctcgagtcgctgcggaagcggccgaggctcaccgtaggggtgacggtgaaggcgtccctgccgctcccggtgctcgtggtcctggcggccctgtacctcgcggacgtgaccagcggtcttgttgactggacgcatcatcacctggagggcgacgccgacgacgtaggggactagtgaagaagggacgccctcactgccctgccctgccatgccccggctctccattgtagcggatgcaggcatgcagcagcctcaacttgcttgtgtaaacaatcagcttcaggacataaactgacttttagtttagtggtgtgctttgtaaaccctgcttttatcttactcgctctatttctaactattagatataatgtattcaaacacatctttgaataagaaacgattttagtctctacaaccatctctagtt

SEQ ID NO: 155114 - DNA, 621 bp, Zea Mays
atgcgtactccacgcgtgcctgccgtgggtggcctgggtgtgcttgccttggcgttcattgtgttggtgacgacgacggtgaccatgcccgcacgtggagcctcgcccgaagcagaaagcccgccggtggttcaggtgcaggacgtagatgcggctggagacgacaatggcatttacaatgccagcagcgtcaccggccgcaaggacggaggcggtggcggtgggggaggaggcggcagcagcgggggcacctcgtggagctatgggtggggctggggctggggcactgacggcggcggcggcgccggaggtggtggtagccgaggaggaggtggtggaggtgggggctgtggtgcaggaggaggtagccgcggcggaacaagaccagagcagcacggacacgacggccgtgggacggcggcggcggcgtcgcgcggcggaaggagggcgcgtcggcggcaccggcccagctacagctctggcctgtaccgcgtgggggagtacgcgcggtgcacggcgcccgggcggtgcagcggcatgcggctgctgtgcccgatgcactgcgacgggccctgcttctacgactgcgacgccaactgcaaggcgcactgccgcttctag

SEQ ID NO: 155115 - DNA, 382 bp, Zea Mays
tctttattttctctttctttccttattttctctttctttctttcctttctttcttttattttctttattttctttcatctccacattcaatcatgtacgcgatgccttctatctttccttaactttttgtggttttttcttctttgatttttttatcttttaaaatttctaataattttctggttttattttgatatgtggctgccacctaacacgccgcgtaggaatataaatggtacggatattatctttacgtatttaaatttgatctatgtaaaagggttgagatgcaatccgtatctgagttctagtattcaatatctgattcgtatacgatttatatatgtatccatatactcaaagttggatatttaagatatcg

SEQ ID NO: 155116 - DNA, 2359 bp, Zea Mays
atgcccaccacctgttcgacttgggggctcaccgagcatgctatggccgaggccgtgcaccgtcgcgcgctatggatgccccgacgcgagccacttccgcgcctacttcgtgcgttcctaacgctcgagcggctcaacctctccgcctgcgcctcactcgacgacgcctccctcgttgcgtccgtcgctgatggaccagcagccgcgacaacctggtggtggtgcgcttcggcttcggtgacgggcgacatggagagcacgctcaaggggattcgcggcagcgacacgccgttcgtgatggacctagacgatgcagccaccgtggcgggcggcatcgaggacacttacggtgaggaccacgccatcgaggagcagctcgctacgcccttggacacgctcatgtgcgcccgcctcgaccctgtcaagtcgcacatcgggtgcctgctgctgcagcacctcaagctttcgcctaccttgattggtgccaaggtggtattcgaggaaatgcagcaaagcaccatcctcagggacgcgcacaccgctatctgtaccatgcccgacccggcactcgacgcccacttcgccaacaagtggcggatgcgctgctcccacaacagcaccagtacggcggaagcggcattggagttcgatcccgacagctgcaccacctgcgacaccagttactaccaccacgtcgcacagtcacacggactgctgcgttccgacgcatcgctcctggaccaccgcttcactagggtctacgtgatgcaggttgccttcggcaggttcgacggacacttcttccacgaattcaccatcatcaagtcaaagacagacaacagcagcagctcgcccctcgagtgttcgaccaaatgtctcagcctcgatattggactattctctgaagctcgtgctgtgttaaatgcagcaagacaacaagcaatgaagattggaccaaacatgccacaacaccagacctgcattgctgtgatggaagaaggcatattatgtggaggccaacctggtgttttgaaggaagccattgtttgctcgattcctagtgtcatggtgtttacttggaccgttaagaatttttctggagttactggtttatacagtcagcatgacagatgtatggtgtggttaatcgttgctcctgattgctacttcattcaacacaatgagagggtgcacatgatattctgtggctttgatctactgagtttgcaacacttacagggacatttcactgaggttgatatgtttgctccttgggatggtcaggaattaacccagtttcagttttctgaactatcaatatattggcagcagtcacatggcctgaacagcctattctttttcagaaagctcaagtattcatcatcagttgaggaattttgtggtgcacagttttcatttcctaatattctattgcccaagtcttggtcacaggagttagccaccaacatagaaaggcatttactaccagaaatgatagaagtggccaatggctatatttttcatgagcttcatctaatgcttgcttctattggagtgacacgtatgatcggttgtgatgaagagaggaaggggatcaagagaacgccatggtattcttttctcagcttcacaggaactctgacgtgcaacggcagtcttcaccgcgaactcctcttttgtgctgatgatgatgcggcagaggcagggtgatggttatttttttgggagatgaactgcagcaggtcttgcggtgatttggaggcagcctgacggcggtatggaaaaaaaatatatccgggatgatcgctgtggtctgctatttatagcgcagggaggccagtagtttctgagcgattttggcgctctttgcatttgattttcttttgctaatgatgtcggcgccagagtttgaattgcagagcgcgttaatcgtgggagcgtgtggaagttgctttcttctgactcaatcagtcaataagaagttgctattctttctccatggcatgtgggccattgctgttatttagattattaaaatcataatcaatttaattaaggaaaatagttgtggatggagtgattggcataggacggcatgtccggcgtacgtatgcatgtacactgtatatacgtttgacaccgtgtatgtggcaatgtatgcacatataagaccgaattttcatctttttaattttggtaaagtacaattgatatgtctcgttgcttttattttactttatcaaagcaatgagcacactcctatatataggtatacattttcttcctcttatttgctgtacccatcataatcacatatgcctgtacacatacgtccattgcacggcttatatttaattag

SEQ ID NO: 155117 - DNA, 1169 bp, Zea Mays
agatttctcaaaactcttaataaaccccagtccaaaaccctaggctccacaaccggccgccgtccaccccctcctagagcggaaccacattccacggctctaaggccatgtcgccggcgtccctcgcagctcggctcctacgccgcgccgcttccacctcttcctctcctctctccgctcttgtccgccgcggtctctgttcctcggcgcccgttcccctcctccgccgtctccctgcggccacctcatcgacggcggggaccaccgcccgccgcttcctggcgtcgcagtccccggcgtcctcctccacgtcttcggcggacgataacctgaggcgcatcgtcgagtctgagatcgagtgcgttgtccagtcggaggagagcaacaccgacaagcacattgatctaccagaggacttcccttttgagatcatagacaatcctggtgatcagtcaataaccctccaaagggagattgcaggggagacaattaaagctgttatatacaccaactttgatacagatgaacatttggatgatgaggatgacaaaagtggcacagatgaggaatctttcaaaccactacttcagatggttgtcactattaaaaaaccagaaggtccaatcctagaatttgactgcaactttaatgatgatgaactaacaattgaaaatatgagggcgctgaaccgtgataaccccgatgctaagaatgtgtatgaggggccacaattttcggacctggataagagcttgcagaaggccttgcacaggtaccttgaggtcagggggttcaaacattcactacatgattggctgtacgaatacatgatgagaaaggatgagaaggagtatgttgtttggctgaagagcatgaaggagttcatcggcggaaattgattgtttgcgctttaagttttatctgcattgtgagaacgagacctgtactcatcatgaaatactagcatcataattgcgcgaagatacctggcatggctttacatcctgctggtgcaagagtttttgttgacctggtagtcttacggacgcccttcttttctgttaagcgatggactgtgttgtcatctttatcaacgctcctaacagcataggggattagcactccagacaaccctattctctttataaatgggatccacgttcagtgag

SEQ ID NO: 155118 - DNA, 926 bp, Zea Mays
cttcaattggagttgtgaatcaaatctgacgggaatttttgtttgcaaagctattagatttattcaatgtaacaaaggcctaaatgtttgtgcatgggtttaattggcacggtgggtaaacatgatctgaggacttgtccatgagcctggcatataacagtttaggtatgtcagagtgcatcaactcattatgcatgacaaaatggatgcacacactgcatggcttgacatggtcatgcgagtcatgctattaacagaaaacttataagtgggaaggccagacgtgcacgtaatctaagcattggattctacatccaagaaggccccttgtgcatgtaagctctaaacatctaatggacaaaaacttaataaagttcaatagatatgcatgcagtttcccttctttttgttgtggctgtagattatgtggtgaaactacaactaacacattgctaaggataaagcacgcgaaccatgcttgatgcctcgatgcaagatgacagatgcttcgagctatgtttcgttttgagtttttattttcccgtggttcatgctatttcattgtttgccatgcagggacctggataagagcttgcagaaggccttgcacaggtaccttgaggtcagggggttcaaacattcactacatgattggctgtacgaatacatgatgagaaaggatgagaaggagtatgttgtttggctgaagagcatgaaggagttcatcggcggaaattgattgtttgcgctttaagttttatctgcattgtgagaacgagacctgtactcatcatgaaatactagcatcataattgcgcgaagatacctggcatggctttacatcctgctggtgcaagagtttttgttgacctggtagtcttacggacgcccttcttttctgttaagcgatggactgtgttgtcatc

SEQ ID NO: 155119 - DNA, 489 bp, Zea Mays
atgtccaaatctgtctcaagaacggggtgtagaacacctggccccaactcgaaattaaccatcatgaggggagtccctgaatccttaagccctgctgggatccaaggacttgtagtcctccacatgcagagtgatagggaagtagcccattgcgtgtctgcatatgaacctggcgacgctctggccccatttgtccctgtcgttgacgggcgcgaacatgaacaagagctggaacgccacgactatggcagcggcgcggccggagaggaggaagagcgacgcaaggacgagaaggacgttgaagtggataccgcccagccagagcgccagcgccagcgtcgtccgcggcagcgagtagtccgtgcaccggaacaccctcgcctccccgccctctccatccctgggcttctccgccgcccggttcagcccgccatccgcgcccatctcggcggcggcccggaggtgcaggtgcagcagagtcgggaatag

SEQ ID NO: 155120 - DNA, 976 bp, Zea Mays
gcaatccaatcgccaaggatcctctccccgcctggaaccacactggatcagtatcgcagtgctcgtcaatcatttcatcccctacaatatcgacaagtccataagctttggcttccctctgctgacataaaaaaactctttccatgtcttcggatacaaccaaaaaggcttgcctgttcttagtgcataaaccgttgtgatcatttcgcgaactttgtgtaactcttccacttctagtaaaaattctggtgtccttgcccgataataagcactagcaggttggtgaagcataatcctagcgtgagggaatgctatacgcttggtgggttctcctccaagcagaatgaaggaggccatggacgcggctattccgaggcatattgtatatatatcaggtgtcaccgtttgcatcgtatcaaaaatcgccattcctgagattagccacccgccaagggagtttataaacaaaaaaatatcgctagctataagacccaattccctcgacgattaaccaccttaactacctcctcgtcacctagatctcagccgccatcgtcgtgtacgcctgggttggtgaaggagggagcaccgccgggagagatcgaccgccgcacccatatcccgggtacgccgccgggagagatcgactgccgcacccatatcccgggtacgccgccgggagagatcgaccgccgcacccatatcccgggtacgtcgccggtcggtgtccggggaggcgtcagggacgttcccgatcgtgcgcaagcaagcaatcgggcctaagcgtcaccatagcttagcgaattgctcgccggtaatcagctcggcgtcaccatccacattgtcgtgtggccagcgtcacgtgaacaccgataggagggaggttacaagtcacttgaagaccaagtgagtacctgtgaatctcaagtctaaggcaagttgtgcccttgatcacttttctttacctaataatgtt

SEQ ID NO: 155121 - DNA, 408 bp, Zea Mays
atgagtgatctgaagtactcatcctacacgaggctgggcctgcggcggtggcgacggacggcgaggggagtccggctcagcccgacgcgcatcaccgtgcgcaggctccgtgccaagctgtggacgctgctggggctcctgggccgttgcgtgcgcaacctacggctactcacgaagggccggatggcagcggcagccggtgctgtgaaggcgagctcgccccctgccgctgccaccggcagcaggaggtttcttgtggccggtcagaaacgctccctcgccggagggaagaccggacgacaggccgccggggacggcgggagcagcagcagtaagccaccgcggcggccgccgtgcatgcggtccaactccttctacgcacgcgccgtcgccgagtgcctcgaattc

SEQ ID NO: 155122 - DNA, 109 bp, Zea Mays
actccggtttgcatggcttcctttgttacgtatttccagccgcatacccttcattgcatcaataacctttttacttgtcttccttttttcagatgcgtgctgcactttg

SEQ ID NO: 155123 - DNA, 510 bp, Zea Mays
atgagcagattaataattcttatatgttatccaccaacgcacagccgtgcccacgcgcctactcagcatccgcgcgtccacgcaccgcacgctaaaccagagaatgccagaaaaaggacaagcaaaaaaggtaactggaagtctggaacagtggcagattcggagcagggagaggagacaggcacccaacacgtcaggcgacattgttggccgcagttgtcgatgggcgttggagggctgaaggtgccagacacgtggtcgagtcgtcacgtgcagccgtgtaggggcgatggagcactggagtcactgtggcgtcgctgtggaggtgtggaggtggagccgtcggcgctcgacgagccggcgaggggtggacgacgactctccctcccgccgaaccctaaccccatcctcagctccgttctcagtcgtgcaaccactttgccctggcacaaaaaatccctaatctccaccctccaagcttatcaaatagtccccaaaaaattcccctaa

SEQ ID NO: 155124 - DNA, 1581 bp, Zea Mays
atatgatacactcgacccgaaatggacacttgaatgaaacccgattcacaaaaccctagcgacctcgattcctcaccagcatggccgtcggcctctactctctcggcctctctccgccgccgcggcttgataccatcctcttcccacagctgcggcctcacctacgccgccgcgtgcccgctcgggttgctgcagccggcaccagctggtctcccgccgccggtgactccgaagacggggtcggcggctggtggtttcccgagtacgagaaatcgatgaaacaggcgagggggaggattgggtttaagagagctgtcgtggttgggttgggagcttctgcggcgatcgccttggctgggctggcgtggcgcttcccatcttcccagaagcgtatacagcaactcattgttgctccattacactatgttcaagagaaattgccaacaatagagtcaacagagacaaccaaggaggatgcaagtgacagggaatctgatgaaattgaagtttctagtgcaacgcatgataagaaggctgaagcaataactgatgattcaaggcaaaactacagaacaacaattgccagcccttttccatttggagttcctacagatcctgtgcatgaggaggctttatctgtattgaagaaactacaggtactttagcattctgaactattgcctactagatttagtttgctaaactatcttaaccgtgcatgaaggaaatcatttcatgacttgcgttgtgcataaggcactatttcctcttacatttttgtatcaaacaactgtggaaaatgtttttttgttaccttcccaatgctgtttcatctctaaacactagtgtcatattatgtttggtgggaaatcaatattcactgcatctatgtatgttcttagttttactattcattcgtattgttttgagccatactaaccagaaatctaggtcaactaggcatggttgagtgggatgcgggtacccggtttctaaaaacatacgtcaaggtgttagttcagatcgagtggtttcatctaatctggatctattacctttggtatgctacaaatgagtatttataaaagatgaatacaaagctacaaaaatggattcggtacataatgtgtgtcattggttccttggaaaattcgaatcctgcataagcccaagccagtctagctgcatgcaatatgttggtgtttggttgggttgcataggtcattgtaatcttgtgcattgtcacacaaaagcttctccacccaaaacagacccagtttctatgtaatcttgtgcattgttgcatgaagctgtttgtctctctctcaccaaaatgaactaacactagctctggcagctccatgtaactgtagcagggagccgtacttatggagctgggataagccctctgaaatagccctagatgggcttctgtgctctggcccatacaactttaagcccagctcctttggaacatgggatttcagaaacatgggaataggaaaaacacaggaaatagaagatatgttttctaggatcctatggaattaaaaaccgaaggaagttggtggatgacttgtt

SEQ ID NO: 155125 - DNA, 1442 bp, Zea Mays
aagtcccaaacgtgtattcgactcgaacgtttgatgtgagccttggagtgctagattctgtttccattgtccattctcagtcacctgagcagccgaacgttctcagtcacctgcaggtcaggaaccaacgatgccgggcatccaccgctacaccgccgagctgctggtgctgctcaccatcattacccgcctcctgctgctggccacggcgtggccggcattgcccgccccagcgtcgctcgagccgtcgctgcttttcccgtccgccggcgccacctcgcccacgcagacccagtcagccggggtcgcctccacaatcccggccttcccggagcagtcagaggccgccgcggctgctgccacctccgtctgccagctcaccccgtcgcctccgctccttcccgctgtcctagcatcgtgcaacgccaatgccggcgggagtggcgtgacgctcccgccgcgcctaagatgctgcccggcgctcgccgcgtggctgtacactgcgtacgcgcccaccgcgctctcgggcagcggcgtcggagaagcgtcggtggccgcgtcggccgaggccgccgccgtggtggacttgccagtgctgccggacgacgcggaggaatgcgccggcgcggcggaccgtgcgctgcgggcggccggggtggcgctaccgcggccgcattggggcgaaagcaccggcactggcaacggaactgcggcgtgcgacgtagcgttctgctactgcggggtgaggctgcggcggcctgcgtgcgcggcgccgcagggccggatggcaaggagactggagagggactgcgcgctgccggggctcgccggctgctccaggtgcctgcgggcgctcagcaagctgggtgggaggagcaacgccacgtcgtcggcgaaggcgaagcaggagcaccgcgaggactgccacctcatgggcctgacatggctgctgaaccggaaccccacgcggtaccgcgaggcggccacggcggtcatccaggcgctcatggcggccgacgaggccggcgcgggccacccggccacctgctcgctccccgccgacgatgagctaccagtggccgttgcctcctcgcagattaacggcgccacgtccgcatcgatgtcctccgcccatggcagtctgcttctggtggtcctcgctgctgccgtcattgtcttgtcctgctgatcctaatagaatgcttccaaatcgatgtgtcgcatcgcatggtctctttattactactagtacgtacctttttttctttgttcggtctagttgagacaagatttagaattaagacgctggttttgggtggacctcgttaatgatgtaattatatatttgttccttcgtctaaggctatttttaatggtggtttcatgcacatttaatagtgtgccacatcagatttttttagatgaaactatgtcaatttgtt

SEQ ID NO: 155126 - DNA, 754 bp, Zea Mays
aagcagcttgtgatagcagtgacatcacgccgattccgcgtgcgccaactgttccgagagcgatggcacgaggaccgccattgccatggccggtggccccgtcctctctcggagtcttgtgtcctttacctccgcaggaatctctgtcctttcgcgatgtaaaaaattaccgtcgctgttaatttgtttactgactccctgtactgggtttcctgggctgcagctgggtgggaggagcaacgccacgtcgtcggcgaaggcgaagcaggagcaccgcgaggactgccacctcatgggcctgacatggctgctgaaccggaaccccacgcggtaccgcgaggcggccacggcggtcatccaggcgctcatggcggccgacgaggccggcgcgggccacccggccacctgctcgctccccgccgacgatgagctaccagtggccgttgcctcctcgcagattaacggcgccacgtccgcatcgatgtcctccgcccatggcagtctgcttctggtggtcctcgctgctgccgtcattgtcttgtcctgctgatcctaatagaatgcttccaaatcgatgtgtcgcatcgcatggtctctttattactactagtacgtacctttttttctttgttcggtctagttgagacaagatttagaattaagacgctggttttgggtggacctcgttaatgatgtaattatatatttgttccttcgtctaaggctatttttaatggtggtttcatgcacattt

SEQ ID NO: 155127 - DNA, 559 bp, Zea Mays
atcgagcagattacaatggactcagcttcggtcgagaccaatatgttcaagctctgcaaggtgaggtctgttcagtttggctagaaaggcatcccctacctgaacacctacgacggccgcaccatccgctaccccgacccgctcatcaaggccaacgacaccatcaagatcgatctggagaccaacaagatcatggacttcatcaagtttgacgtcggcaacatggtgactggcgggaggaacaccaggcgtgtaggagtcatcaagcatagggagaagcataagggcagctttgagaccatccacgtgctgcttggagctttttgctatgtctagttttctcctatttgttgtacaggaaaacatagaatggaattcaaatttggtagccgcaaaagtgtggagacttgaattcatataaagttaggcttaacattagtgcaaacagttgtattttagtttagatttagagtacacttatgtatgcgttgtttgacaaagcttatttatgatatattgaatggtacttatttatattatattaattataatgttgttc

SEQ ID NO: 155128 - DNA, 2697 bp, Zea Mays
acaactagggatgggcaaccaggctctctttcccagttgatgcgcgtcggatttgcttgtccgctatgggacgctggttcaagcccctttctcacccgccacactccatcacttgtcgctactcaccagattgccccgcgcccatgctgctgtggccgcctagctcgtgatcctgttctcctacccacaagttgcgattcgcagatctctggcgcagccatcgaatccatcctttgtccttgactcatacttctgttgcaatttgcgtgctggttcctccggtggtgcatgtgcacgggccatgttcgacgaggtgggtttgagaagttctgttacatggtaatccccgtccttgggcttgtcatggtcgattgggaacagtaggattggttgctgagcatggctggaccggagaagactgttgtttggttcaggagagacctcaggatccaggacaacccggccttggcagcggcggcgaaagggggctctgtcctccctatcttcatatggtgcccctcagactacgggcagtactaccctggaaggtgctcccggtggtggctcaagcagtctcttgtccaccttgggaagtcattagagctgctcgggtgcccactcgtgctgatccgtgcggaggacagcactcttgcagctcttttggagtgcgttcgttccatcagtgccactagagtggtttacaatcgtctctacgaccctatttcacttgtgcttgacaacaaaatcaagaatgagcttccagcccatggaatttctatccaaagtttcaatggtgatttactttacgagccgtgggatgtttatgatgagaatgggcaggcatttacaacctttaacaagtactgggagaaatgtatgagcctacctattgagatatcacaatatcttgcacctacaaggctggtggcagcgccaggtctagcaaatgttcgctgttgttcgattgatgatctaggtcttgaatctagtaaggatgtggaatcaagcaatgctttgctaagcagggcctggtctcctggctggcgcaatgcagagaacatgcttgaggaatttgtgtcttatggtcttctagaatattcagaacatggtatgaaggttgggggaagtactacgtcattattgtcaccgtatctccatttcggggagttgagtgtaaggatgatttatcaacttgttaaaatgcgtcaagtcaagtggcaaaatgaaggaaaatctgaagctgaggagagtgttcgattgttcctacgatcaattggttttcgagaatattcacggtacttatgctttaactacccattcacacatgagagatcatttttaggtaacttgaagcattatccttggctattggatgagggccgtttcaaatcttggagacagggaatgactggatacccattagtagatgctggcatgagggaactctgggctactggttggacacataatcggataagagtgattgtctcaagtttcgctgtaaaatttctacagataccctggatttggggaatgaagtacttttgggatgtgcttctggatgcagacctagaaagtgatattcttggttggcagtacatatctgggagtttgcctgatggacatgagctcagtcgtcttgataatccagaggttcagggtcaaaagtacgatccggacggtgaatatgtaagaacttggattcctgaacttgctagaatgccaacagaatggatccatagtccatgggctgcgccaaactctatattacaagttgctggagttgagctgggctttaactacccaaagcccatagtagaacttcatatggcgcgggaatgtttagatgacgccatctccacaatgtggcaattggacacagctgcaaaacttgctgaactagatggtgaagttgttgacgacaatctgaataatatcaggaattttgatatcccaaaggtggttttgaacaagaaattatcaccaagcacttcatccatggagcacagggtgttgtctactaatggcaaggacgaaaagtcgcagcctactgaagtgaaggccctgtacaaacagattattcgagatgatatgatgaatgactcaaacatggatgacacatgctctactgctaacttgaaagtgacaaggaaaagatctagcagtgatagtgcgttcaatgttccctcatgttcatcctcattagtcatggaatcacggattcatcataatgaacctagttctgttctgtattcaggctacttccagaagacagcagacagagatggcactagttgaagataatgacagtgaagatagtggtacgagcatctctaggccatccaagaaagctgcttagcattagcgcattgaagatgttgcaaatcttcaatgagaaatatttaccgtcacatgtaatttagctggtgcgtttgtagtgatcatgcaaaagctgttctgtgaattataattagttttacacggcctatccttattccgatagaaggcaatttttgtttggtgaaaaaacatcgctcacggacaggccatagtttgctgtcgctgctgaacagcctaatgcctggtgtaaatgactcatcaacgttacgacactattagcgctggttggttttgctatcaatccgtattcatggattgggtaagattgagtagatttaaatatcaaataaatcaaaa

SEQ ID NO: 155129 - DNA, 2764 bp, Zea Mays
aaacttgggacgggcaatcgtctttccatccccaaacttaccacaatcaaactgatcaactgacaactagggatgggcaaccaggctctctttcccagttgatgcgcgtcggatttgcttgtccgctatgggacgctggttcaagcccctttctcacccgccacactccatcacttgtcgctactcaccagattgccccgcgcccatgctgctgtggccgcctagctcgtgatcctgttctcctacccacaagttgcgattcgcagatctctggcgcagccatcgaatccatcctttgtccttgactcatacttctgttgcaatttgcgtgctggttcctccggtggtgcatgtgcacgggccatgttcgacgaggtgggtttgagaagttctgttacatggtaatccccgtccttgggcttgtcatggtcgattgggaacagtaggattggttgctgagcatggctggaccggagaagactgttgtttggttcaggagagacctcaggatccaggacaacccggccttggcagcggcggcgaaagggggctctgtcctccctatcttcatatggtgcccctcagactacgggcagtactaccctggaaggtgctcccggtggtggctcaagcagtctcttgtccaccttgggaagtcattagagctgctcgggtgcccactcgtgctgatccgtgcggaggacagcactcttgcagctcttttggagtgcgttcgttccatcagtgccactagagtggtttacaatcgtctctacgaccctatttcacttgtgcttgacaacaaaatcaagaatgagcttccagcccatggaatttctatccaaagtttcaatggtgatttactttacgagccgtgggatgtttatgatgagaatgggcaggcatttacaacctttaacaagtactgggagaaatgtatgagcctacctattgagatatcacaatatcttgcacctacaaggctggtggcagcgccaggtctagcaaatgttcgctgttgttcgattgatgatctaggtcttgaatctagtaaggatgtggaatcaagcaatgctttgctaagcagggcctggtctcctggctggcgcaatgcagagaacatgcttgaggaatttgtgtcttatggtcttctagaatattcagaacatggtatgaaggttgggggaagtactacgtcattattgtcaccgtatctccatttcggggagttgagtgtaaggatgatttatcaacttgttaaaatgcgtcaagtcaagtggcaaaatgaaggaaaatctgaagctgaggagagtgttcgattgttcctacgatcaattggttttcgagaatattcacggtacttatgctttaactacccattcacacatgagagatcatttttaggtaacttgaagcattatccttggctattggatgagggccgtttcaaatcttggagacagggaatgactggatacccattagtagatgctggcatgagggaactctgggctactggttggacacataatcggataagagtgattgtctcaagtttcgctgtaaaatttctacagataccctggatttggggaatgaagtacttttgggatgtgcttctggatgcagacctagaaagtgatattcttggttggcagtacatatctgggagtttgcctgatggacatgagctcagtcgtcttgataatccagaggttcagggtcaaaagtacgatccggacggtgaatatgtaagaacttggattcctgaacttgctagaatgccaacagaatggatccatagtccatgggctgcgccaaactctatattacaagttgctggagttgagctgggctttaactacccaaagcccatagtagaacttcatatggcgcgggaatgtttagatgacgccatctccacaatgtggcaattggacacagctgcaaaacttgctgaactagatggtgaagttgttgacgacaatctgaataatatcaggaattttgatatcccaaaggtggttttgaacaagaaattatcaccaagcacttcatccatggagcacagggtgttgtctactaatggcaaggacgaaaagtcgcagcctactgaagtgaaggccctgtacaaacagattattcgagatgatatgatgaatgactcaaacatggatgacacatgctctactgctaacttgaaagtgacaaggaaaagatctagcagtgatagtgcgttcaatgttccctcatgttcatcctcattagtcatggaatcacggattcatcataatgaacctagttctgttctgtattcaggctacttccagaagacagcagacagagatggcactagtaaggttgaagataatgacagtgaagatagtggtacgagcatctctaggccatccaagaaagctgcttagcattagcgcattgaagatgttgcaaatcttcaatgagaaatatttaccgtcacatgtaatttagctggtgcgtttgtagtgatcatgcaaaagctgttctgtgaattataattagttttacacggcctatccttattccgatagaaggcaatttttgtttggtgaaaaaacatcgctcacggacaggccatagtttgctgtcgctgctgaacagcctaatgcctggtgtaaatgactcatcaacgttacgacactattagcgctggttggttttgctatcaatccgtattcatggattgggtaagattgagtagatttaaatatcaaataaatcaaaa

SEQ ID NO: 155130 - DNA, 2729 bp, Zea Mays
aaacttgggacgggcaatcgtctttccatccccaaacttaccacaatcaaactgatcaactgacaactagggatgggcaaccaggctctctttcccagttgatgcgcgtcggatttgcttgtccgctatgggacgctggttcaagcccctttctcacccgccacactccatcacttgtcgctactcaccagattgccccgcgcccatgctgctgtggccgcctagctcgtgatcctgttctcctacccacaagttgcgattcgcagatctctggcgcagccatcgaatccatcctttgtccttgactcatacttctgttgcaatttgcgtgctggttcctccggtggtgcatgtgcacgggccatgttcgacgaggtgggtttgagaagttctgttacatggtaatccccgtccttgggcttgtcatggtcgattgggaacagtaggattggttgctgagcatggctggaccggagaagactgttgtttggttcaggagagacctcaggatccaggacaacccggccttggcagcggcggcgaaagggggctctgtcctccctatcttcatatggtgcccctcagactacgggcagtactaccctggaaggtgctcccggtggtggctcaagcagtctcttgtccaccttgggaagtcattagagctgctcgggtgcccactcgtgctgatccgtgcggaggacagcactcttgcagctcttttggagtgcgttcgttccatcagtgccactagagtggtttacaatcgtctctacgaatgagcttccagcccatggaatttctatccaaagtttcaatggtgatttactttacgagccgtgggatgtttatgatgagaatgggcaggcatttacaacctttaacaagtactgggagaaatgtatgagcctacctattgagatatcacaatatcttgcacctacaaggctggtggcagcgccaggtctagcaaatgttcgctgttgttcgattgatgatctaggtcttgaatctagtaaggatgtggaatcaagcaatgctttgctaagcagggcctggtctcctggctggcgcaatgcagagaacatgcttgaggaatttgtgtcttatggtcttctagaatattcagaacatggtatgaaggttgggggaagtactacgtcattattgtcaccgtatctccatttcggggagttgagtgtaaggatgatttatcaacttgttaaaatgcgtcaagtcaagtggcaaaatgaaggaaaatctgaagctgaggagagtgttcgattgttcctacgatcaattggttttcgagaatattcacggtacttatgctttaactacccattcacacatgagagatcatttttaggtaacttgaagcattatccttggctattggatgagggccgtttcaaatcttggagacagggaatgactggatacccattagtagatgctggcatgagggaactctgggctactggttggacacataatcggataagagtgattgtctcaagtttcgctgtaaaatttctacagataccctggatttggggaatgaagtacttttgggatgtgcttctggatgcagacctagaaagtgatattcttggttggcagtacatatctgggagtttgcctgatggacatgagctcagtcgtcttgataatccagaggttcagggtcaaaagtacgatccggacggtgaatatgtaagaacttggattcctgaacttgctagaatgccaacagaatggatccatagtccatgggctgcgccaaactctatattacaagttgctggagttgagctgggctttaactacccaaagcccatagtagaacttcatatggcgcgggaatgtttagatgacgccatctccacaatgtggcaattggacacagctgcaaaacttgctgaactagatggtgaagttgttgacgacaatctgaataatatcaggaattttgatatcccaaaggtggttttgaacaagaaattatcaccaagcacttcatccatggagcacagggtgttgtctactaatggcaaggacgaaaagtcgcagcctactgaagtgaaggccctgtacaaacagattattcgagatgatatgatgaatgactcaaacatggatgacacatgctctactgctaacttgaaagtgacaaggaaaagatctagcagtgatagtgcgttcaatgttccctcatgttcatcctcattagtcatggaatcacggattcatcataatgaacctagttctgttctgtattcaggctacttccagaagacagcagacagagatggcactagtaaggttgaagataatgacagtgaagatagtggtacgagcatctctaggccatccaagaaagctgcttagcattagcgcattgaagatgttgcaaatcttcaatgagaaatatttaccgtcacatgtaatttagctggtgcgtttgtagtgatcatgcaaaagctgttctgtgaattataattagttttacacggcctatccttattccgatagaaggcaatttttgtttggtgaaaaaacatcgctcacggacaggccatagtttgctgtcgctgctgaacagcctaatgcctggtgtaaatgactcatcaacgttacgacactattagcgctggttggttttgctatcaatccgtattcatggattgggtaagattgagtagatttaaatatcaaataaatcaaaa

SEQ ID NO: 155131 - DNA, 1761 bp, Zea Mays
cgctcggctccgccccgcccgcctctccccattctcacttcttttcccccagttgcgttgcgtgcccctcgtttccacactttgttgcgctcctttagcgccggcggcccgtagcctcaatcatcatttccattccatccggtttcttccgacgacggtgtgtacagagagcaggatcggacaagtctctgctggtagaagcatggcgcagcgccggctgttgggcacggcgccggcgcccgcgggcgatgcggcgtcgcacggctcgggctccagccccgacgcgatgcggatcatggtgggcgtgctggtaacggtcatcgtctgcacgctgctctactgcgtctactgctggcggtggcggaagcgcaatggtgaaactgcgctctgctgccatccggagatccctgctggacagcctatggcggcggtcgagctcggacctgccgctcatggacctcgcctccatcctcgctgccaccgacaacttctccaaggccaacaagctcggcgagggcggcttcggccccgtctacagaggcgtgctgagcggcggctccgagatcgccgtgaagcgtctgtcagcgcggtcgcggcagggcgcggcggagttccggaacgaggtggagctcatcgccaagctgcagcaccgcaacctagtgcggctgctgggctggtgcgccgagcgcgaggagaagctgctggtgtacgagtacctccccaaccgcagcctcgacgccttcctcttcgatccgagcaagagtgcgcagcttgggtggagcacccggcacaacgtgatcctgggcatcgcccgcggcctgctgtacctccacgaggactcgctgctgaaggtggtccaccgggacctcaaggccagcaacgtgctgctcgaccacaagatgagcccaaagatctccgacttcggcatggccaagatcttcgaggacgactccgacgcgattaacacgggccgcgtcgtcgggacctacgggtacatggcgcccgagttcgcgttggacggcgtcttctcggtgaagtcggacgtgttcagtttcggggtcctcctgctggagatcttgagcgggcaacggaacggcgccttgtacctcgaggaacaccagcagtccctcatccaagacgcatggaagctgtggagtgaagaccgcgcggccgagttcatggaccagtcgctggggcggtcctactccaaggacgaggcgtggcggtgctaccacgtcggcctgctctgcgtgcaggaggaccccgacgtccgcccgaccatgtccaacgtcctgctcatgctcatcagcgaccacaccaagttacccgagccagccatgccgcccttgttcgcgcggctcaggaacatctccttgctggcgccgccactcaccaccaaaaccgagtccaccacgtctccgctgtcgatcaacgacgtctccatcaccatgatcgaaccgcgatgagctcatgcgttttgtacttctgacaactgagggagaggcttcgagtgtaaatttataagactgcaatcgttcagaatgactactcatatgtactagtaagtttttttttgatggtgtgcacaagtgtgggatttagctactagactagaacatgcggcgcccgtaatcgggtcataacagatttcttttttatgtttatgcattctcctatgtgatccaatggactaaaatgtgtcaccactggtagcaaagagcatataactattttaattagtttgtatccaaatgcataaga

SEQ ID NO: 155132 - DNA, 1805 bp, Zea Mays
cgctcggctccgccccgcccgcctctccccattctcacttcttttcccccagttgcgttgcgtgcccctcgtttccacactttgttgcgctcctttagcgccggcggcccgtagcctcaatcatcatttccattccatccggtttcttccgacgacggtgtgtacagagagcaggatcggacaagtctctgctggtagaagcatggcgcagcgccggctgttgggcacggcgccggcgcccgcgggcgatgcggcgtcgcacggctcgggctccagccccgacgcgatgcggatcatggtgggcgtgctggtaacggtcatcgtctgcacgctgctctactgcgtctactgctggcggtggcggaagcgcaatgccatccggagatccctgctggacagcctatggcggcggtcgagctcggacctgccgctcatggacctcgcctccatcctcgctgccaccgacaacttctccaaggccaacaagctcggcgagggcggcttcggccccgtctacagaggcgtgctgagcggcggctccgagatcgccgtgaagcgtctgtcagcgcggtcgcggcagggcgcggcggagttccggaacgaggtggagctcatcgccaagctgcagcaccgcaacctagtgcggctgctgggctggtgcgccgagcgcgaggagaagctgctggtgtacgagtacctccccaaccgcagcctcgacgccttcctcttcgatccgagcaagagtgcgcagcttgggtggagcacccggcacaacgtgatcctgggcatcgcccgcggcctgctgtacctccacgaggactcgctgctgaaggtggtccaccgggacctcaaggccagcaacgtgctgctcgaccacaagatgagcccaaagatctccgacttcggcatggccaagatcttcgaggacgactccgacgcgattaacacgggccgcgtcgtcgggacctacgggtacatggcgcccgagttcgcgttggacggcgtcttctcggtgaagtcggacgtgttcagtttcggggtcctcctgctggagatcttgagcgggcaacggaacggcgccttgtacctcgaggaacaccagcagtccctcatccaagacgtaccattctgaaccttcattcagtgatctgaactgaacggagttagccaatctatatacatgttttttttgttgacaggcatggaagctgtggagtgaagaccgcgcggccgagttcatggaccagtcgctggggcggtcctactccaaggacgaggcgtggcggtgctaccacgtcggcctgctctgcgtgcaggaggaccccgacgtccgcccgaccatgtccaacgtcctgctcatgctcatcagcgaccacaccaagttacccgagccagccatgccgcccttgttcgcgcggctcaggaacatctccttgctggcgccgccactcaccaccaaaaccgagtccaccacgtctccgctgtcgatcaacgacgtctccatcaccatgatcgaaccgcgatgagctcatgcgttttgtacttctgacaactgagggagaggcttcgagtgtaaatttataagactgcaatcgttcagaatgactactcatatgtactagtaagtttttttttgatggtgtgcacaagtgtgggatttagctactagactagaacatgcggcgcccgtaatcgggtcataacagatttcttttttatgtttatgcattctcctatgtgatccaatggactaaaatgtgtcaccactggtagcaaagagcatataactattttaattagtttgt

SEQ ID NO: 155133 - DNA, 1695 bp, Zea Mays
cgctcggctccgccccgcccgcctctccccattctcacttcttttcccccagttgcgttgcgtgcccctcgtttccacactttgttgcgctcctttagcgccggcggcccgtagcctcaatcatcatttccattccatccggtttcttccgacgacggtgtgtacagagagcaggatcggacaagtctctgctggtagaagcatggcgcagcgccggctgttgggcacggcgccggcgcccgcgggcgatgcggcgtcgcacggctcgggctccagccccgacgcgatgcggatcatggtgggcgtgctggtaacggtcatcgtctgcacgctgctctactgcgtctactgctggcggtggcggaagcgcaatgccatccggagatccctgctggacagcctatggcggcggtcgagctcggacctgccgctcatggacctcgcctccatcctcgctgccaccgacaacttctccaaggccaacaagctcggcgagggcggcttcggccccgtctacagaggcgtgctgagcggcggctccgagatcgccgtgaagcgtctgtcagcgcggtcgcggcagggcgcggcggagttccggaacgaggtggagctcatcgccaagctgcagcaccgcaacctagtgcggctgctgggctggtgcgccgagcgcgaggagaagctgctggtgtacgagtacctccccaaccgcagcctcgacgccttcctcttcgatccgagcaagagtgcgcagcttgggtggagcacccggcacaacgtgatcctgggcatcgcccgcggcctgctgtacctccacgaggactcgctgctgaaggtggtccaccgggacctcaaggccagcaacgtgctgctcgaccacaagatgagcccaaagatctccgacttcggcatggccaagatcttcgaggacgactccgacgcgattaacacgggccgcgtcgtcgggacctacgggtacatggcgcccgagttcgcgttggacggcgtcttctcggtgaagtcggacgtgttcagtttcggggtcctcctgctggagatcttgagcgggcaacggaacggcgccttgtacctcgaggaacaccagcagtccctcatccaagacgcatggaagctgtggagtgaagaccgcgcggccgagttcatggaccagtcgctggggcggtcctactccaaggacgaggcgtggcggtgctaccacgtcggcctgctctgcgtgcaggaggaccccgacgtccgcccgaccatgtccaacgtcctgctcatgctcatcagcgaccacaccaagttacccgagccagccatgccgcccttgttcgcgcggctcaggaacatctccttgctggcgccgccactcaccaccaaaaccgagtccaccacgtctccgctgtcgatcaacgacgtctccatcaccatgatcgaaccgcgatgagctcatgcgttttgtacttctgacaactgagggagaggcttcgagtgtaaatttataagactgcaatcgttcagaatgactactcatatgtactagtaagtttttttttgatggtgtgcacaagtgtgggatttagctactagactagaacatgcggcgcccgtaatcgggtcataacagatttcttttttatgtttatgcattctcctatgtgatccaatggactaaaatgtgtcaccactggtagc

SEQ ID NO: 155134 - DNA, 1398 bp, Zea Mays
gcggcccgtagcctcaatcatcatttccattccatccggtttcttccgacgacggtgtgtacagagagcaggatcggacaagtctctgctggtagaagcatggcgcagcgccggctgttgggcacggcgccggcgcccgcgggcgatgcggcgtcgcacggctcgggctccagccccgacgcgatgcggatcatggtgggcgtgctggtaacggtcatcgtctgcacgctgctctactgcgtctactgctggcggtggcggaagcgcaatgccatccggagatccctgctggacagcctatggcggcggtcgagctcggacctgccgctcatggacctcgcctccatcctcgctgccaccgacaacttctccaaggccaacaagctcggcgagggcggcttcggccccgtctacagaggcgtgctgagcggcggctccgagatcgccgtgaagcgtctgtcagcgcggtcgcggcagggcgcggcggagttccggaacgaggtggagctcatcgccaagctgcagcaccgcaacctagtgcggctgctgggctggtgcgccgagcgcgaggagaagctgctggtgtacgagtacctccccaaccgcagcctcgacgccttcctcttcgatccgagcaagagtgcgcagcttgggtggagcacccggcacaacgtgatcctgggcatcgcccgcggcctgctgtacctccacgaggactcgctgctgaaggtggtccaccgggacctcaaggccagcaacgtgctgctcgaccacaagatgagcccaaagatctccgacttcggcatggccaagatcttcgaggacgactccgacgcgattaacacgggccgcgtcgtcgggacctacgggtacatggcgcccgagttcgcgttggacggcgtcttctcggtgaagtcggacgtgttcagtttcggggtcctcctgctggagatcttgagcgggcaacggaacggcgccttgtacctcgaggaacaccagcagtccctcatccaagacctgtggagtgaagaccgcgcggccgagttcatggaccagtcgctggggcggtcctactccaaggacgaggcgtggcggtgctaccacgtcggcctgctctgcgtgcaggaggaccccgacgtccgcccgaccatgtccaacgtcctgctcatgctcatcagcgaccacaccaagttacccgagccagccatgccgcccttgttcgcgcggctcaggaacatctccttgctggcgccgccactcaccaccaaaaccgagtccaccacgtctccgctgtcgatcaacgacgtctccatcaccatgatcgaaccgcgatgagctcatgcgttttgtacttctgacaactgagggagaggcttcgagtgtaaatttataagactg

SEQ ID NO: 155135 - DNA, 604 bp, Zea Mays
cgctcggctccgccccgcccgcctctccccattctcacttcttttcccccagttgcgttgcgtgcccctcgtttccacactttgttgcgctcctttagcgccggcggcccgtagcctcaatcatcatttccattccatccggtttcttccgacgacggtgtgtacagagagcaggatcggacaagtctctgctggtagaagcatggcgcagcgccggctgttgggcacggcgccggcgcccgcgggcgatgcggcgtcgcacggctcgggctccagccccgacgcgatgcggatcatggtgggcgtgctggtaacggtcatcgtctgcacgctgctctactgcgtctactgctggcggtggcggaagcgcaatgccatccggagatccctgctggacagcctatggcggcggtcgagctcggacctgccgctcatggacctcgcctccatcctcgctgccaccgacaacttctccaaggccaacaagctcggcgagggcggcttcggccccgtctacagagtgagaaatcaacccaaggtcgatggatgtggccacagctagctgttttgttactctacatctaatagcaatatgcatgatttg

SEQ ID NO: 155136 - DNA, 1116 bp, Zea Mays
gaattccacgctgcgtcaccggcggttaccgtgcctgcctcgccgctcccgtcaaagaacgccgggggcggcctcgcaaacctccaatggctgctcaggaagcgcgccaacaaggtgcagcagggccggtccgtcaccgtcgaacagcaagaggccgccgacgactgcgacgacgagtgcgcctccatgttcgccggcgccacgccctacaacgtccccgtcgccgtcgctggtccaactccagacgacgcgccgggcaggaagcgccacggggaagcgctttcgcggctccggtcggcgatcctggccgtgctagctcgagcgcggcgcgggcgcgggaggcggccgctggggtcctgcgccaccgtcaccggcaccatcttcggccgccgccgcggccgcgtgcacctggccctgcagaccgacccgcgcgccccgcccgcgctcatggtcgagctcgccgcctactccaccggcgcgctcgtcagggagatggcctcgggactcgtccgccttgctctcgagtgcgagaaggcacccgcaccgccgaagcaaactggtgacccatccatcgatgtcgatgcttactttggcggtgaccatcaccaccagaggcgaccacgtcagcagacggcgctggtggaggaggccacctggcgcgcgtactgcaacggccgcaagtgcggctacgcgctgcggcgggactgcggcgcggacgagtggcgggtgctgcgcgccgtggagccggtctccgtgggcgccggtgtgctccccgacggcgacaacgtgggcacgggagccgccgccgccggcgagggcgacctcatgtacatgagggccaagttcgagcgggtggtggggtccagggactcggaggcgttctacatgctgaaccccgacggcggcaccgggcccgagctcagcatctaccttctcagggtctagatgacaaaatagacatgtataacatataataatatgctgttcgtttgcgtgccttttggtttttattattgtgaaaacaacatgggcttctttctgcgtgtgttttggttgttttggctgcattgtgcatgcagttactggctaatttgatagtgtcactttgtcattgtc

SEQ ID NO: 155137 - DNA, 1080 bp, Zea Mays
gaattccacgctgcgtcaccggcggttaccgtgcctgcctcgccgctcccgtcaaagaacgccgggggcggcctcgcaaacctccaatggctgctcaggaagcgcgccaacaaggtgcagcagggccggtccgtcaccgtcgaacagcaagaggccgccgacgactgcgacgacgagtgcgcctccatgttcgccggcgccacgccctacaacgtccccgtcgccgtcgctggtccaactccagacgacgcgccgggcaggaagcgccacggggaagcgctttcgcggctccggtcggcgatcctggccgtgctagctcgagcgcggcgcgggcgcgggaggcggccgctggggtcctgcgccaccgtcaccggcaccatcttcggccgccgccgcggccgcgtgcacctggccctgcagaccgacccgcgcgccccgcccgcgctcatggtcgagctcgccgcctactccaccggcgcgctcgtcagggagatggcctcgggactcgtccgccttgctctcgagtgcgagaaggcacccgcaccgccgaagcaaactggtgaccatcaccaccagaggcgaccacgtcagcagacggcgctggtggaggaggccacctggcgcgcgtactgcaacggccgcaagtgcggctacgcgctgcggcgggactgcggcgcggacgagtggcgggtgctgcgcgccgtggagccggtctccgtgggcgccggtgtgctccccgacggcgacaacgtgggcacgggagccgccgccgccggcgagggcgacctcatgtacatgagggccaagttcgagcgggtggtggggtccagggactcggaggcgttctacatgctgaaccccgacggcggcaccgggcccgagctcagcatctaccttctcagggtctagatgacaaaatagacatgtataacatataataatatgctgttcgtttgcgtgccttttggtttttattattgtgaaaacaacatgggcttctttctgcgtgtgttttggttgttttggctgcattgtgcatgcagttactggctaatttgatagtgtcactttgtcattgtc

SEQ ID NO: 155138 - DNA, 365 bp, Zea Mays
tcgtcacgcccatgccgccctcccctccgaccacctaacttcgctccgcccatggccgtcgtcgcccatgccggcctcccacggcctcgcctctttctccctttctccttccacggaagccccatctattcatcatgcctgtcattggctctgccttcggttgctgtagattatgaccatgggaacccatggtgtcgccctgacactcctcacaacggtgcttctcgaggccaccatcccagtgtcagcagtggatggccttgcgtgggtcgtgcaagaagccacgagttcctcatcaagatcagatgcaattattggtcttggtgaagcagaggaccgggtaggattgttgggtacacttgcca

SEQ ID NO: 155139 - DNA, 486 bp, Zea Mays
aatcaaaatagctcctttattatttcaaatgactagagtcatgagtactctatactagggtttacagcaactgccttggctgttgcagtgtattagatactgacttctgattgatttgttgcatgtttgttttaacactatgcttccttgcagtacctctttccatctcctgtcgctgcctctaccatatctacctgaaggaacaaatttgagcgcatcttttgttgacagtggctttagtttgctattggtgctctagtaagaaaaatagatgtattttgttgacggtgtcttcacaatctagcacatgactcatgaaaagcagtgttctggtacaaacattttgttgataatggctttagtttgtgttgatgcttcagtttgctgatgatgatgcttgtactgttttttactacttcagtttgcttgacaaactattgtgaagatggataaagtgtgatgtgatgatggatgaactaatttact

SEQ ID NO: 155140 - DNA, 2835 bp, Zea Mays
caccacttgcggtgcgcccatcgaccaccgctccctccttaattccgcctctcatctcaccaagtcaccatccacccacctgctcgacccgcctccgtccgcctctctccattcaatcacgccatcgccacgcctcctccgcttctcagttctccctctctgcgcccacaagcgccaaatcattttcaccggaggccatggccccgctgcctccgggcccagagatggaggtaatgagtggatggttgtggaagactgcgctcatggaagttcccagaaaacatcacagcccaccaaaatggtcagtcatactatggatgcttgtcacagccaacctctggataatgtgcagcagcagtacccagaagaaagttctcatgccagggttcagcgcctcggaaatggattacattgataacgatgggaagtttcttctctccaatggctatgtctttggctttggctttgccaccgtcagcgtgtcagacagcacatactacgttcttgcagtagtccacttgcccaccacttctattgtctggtctgctaatgctaactctccagtttctcattcagacaactttgtgtttgacaaggatggcaatgcctacctgcagtctggaggttccacggtgtggactgccaatatctccggcaagggggccacctctatgcagctgctagactcgggcaatcttgtagtgtttggcaaggacggctcttctcctctgtggcagagtttcagccatccaacagacacacttctgtctggacaaagcttcatcgaggggatgagtttgttgagccattccaatgcacagaacatgacctatacacttgagatcaaatctggggacatgttgttgtatgcaggctttcagttgccccaaccgtactggtccgctctgcaggataacagggtgatcatcgacaagaatggcaacaataacatatactctgcaaacctgagttcaggttcctggtcgttttatgatcaatcagggcttcttcaatcacagcttgtcattgcacagcagcagggtgatgctaacaccacactggctgctgtcctcggtaatgatggtttgattaacttctatatgctccagagtgtgaatggcaagagtgctcttcctatcacagttccacaggactcgtgtgacatgcctgcccactgcaagccgtactccatttgcaacagcgggacagggtgccagtgtccttcagccctcagctcctatgcaaactgcgaccctggcgtcatatcaccatgcaactcgaagaacaagtttcagcttgttcaactggacagtgctgttgggtatgtcggcactagattcacactgcctgtgcccaagacaaacctcacaggatgcaggaatgcctgcatgggtaactgctcatgcattgctgtattcttcgaccagacttcaggaaattgcttccttttcgaccagataggaagcttgcaacagaaagatggaggtaagagtagccttgcatctttcattaaggtatcaagcagtaatggcgggtcagggcaaggtggcagtagtgacaatggtaggctcaccatcgtaattgttgtcattatagttggaactttggctgtcataggggtccttgtgtatgttggtttctgcatttaccggaggagtcaccatacaccctcgcaggatggtggtggttcgtcagaagatgatggtttcctgcacactatatcaggagcaccgacacggttcacttacaggcagctccaggatgcgacaaacaacttctcagacaagcttggccagggagggtttggatctgtgtatcttggtacgctgcctgatggcagccgcatcgctgtaaagaagctagagggcatgggacaagggaagaaagaattccgttctgaggtgaccatcattggcagcatacatcacatccatcttgttaaactccgaggcttttgcgctgaaggagcgcacaggctccttgcatacgagtacatggcaaaggggtctctagatagatggattttccaaaggaacgaggattcctccctgcttgactgggacacgaggtttagcatcgcccttggaacagccaaggggttggcgtacctccaccatgactgtgagtcgaagatcattcactgtgacatcaagcctgagaatgttctccttgacgacaacttcctcgcgaaggtgtcagacttcggcctcgccaagctgatgaccagggagcagagccatgtgttcacgacgctcaagggcactcggggctatcttgcacccgaatggatcaccaactatgccatctcagagaagtgcgacgtgtacagctacgggatggttctcctcgagataatcagtgggaggaagagctatgatcctgtggaaggttcggagaaggctcacttcccctcctacgcttttaagaagctggaagaaggtgacctccgcgatatctccgactccaagctaaaatacaagggccaggatagccggattgagatggcaatcaaggtcgccttgtggtgcatccaggaggacttctatcagaggccgtccatgtccaaggttgtccagatgctggaaggcgtctgcgacgtgccccagccaccaatgtcttcgcatattggataccggctgtacgcgaatgccttcaaatctagcagcgaagagggcacgtcgtctgggatgtcagactacaatagtgatgccttgctttctgctgtgcggctctctgggcccaggtgatatggttatgtacattgctctgctttagttagcatggcgaatcgatgatgtccaatttttggggaaggccattcgtttgttcgtagtc

SEQ ID NO: 155141 - DNA, 3418 bp, Zea Mays
caccacttgcggtgcgcccatcgaccaccgctccctccttaattccgcctctcatctcaccaagtcaccatccacccacctgctcgacccgcctccgtccgcctctctccattcaatcacgccatcgccacgcctcctccgcttctcagttctccctctctgcgcccacaagcgccaaatcattttcaccggaggccatggccccgctgcctccgggcccagaggtagtctgtctgggactcaactgaactgtaaaatgctcctaaaggaggttgacaaacaaatacaaagctttatcacgaatcgctcccacccaaggtagcataatgagctcttgttctggattctgacgagggtaacttttatgatgacgattattttaccctcatgagaggctagggttatggtggtggtggttgttggttattgagattctagggcctccaaacatgcctagagaaacacctcttgctgggtgggaaatttttttgttacagcccggatgcaaactaggatttctacagcccctcacaaacaggagggtaggctcggcatgcagcagcagcaacaacaactagaacactatcccgtaacagctggtggacttgcacgtgggacctattctccagtttgtgaggggttgcaaagatccctgtttgcatgtggtctgcaaagaaaatttactgctgggcaaagtgggtcagcatcttggcgacggaatccggtgacagctcatcggaacctggcatcttcgatatcaaatgttatggtggtggctcgtattgagggagcgcaagggggtcagacgaggtcttgtccatgaccaatggaggtaatgagtggatggttgtggaagactgcgctcatggaagttcccagaaaacatcacagcccaccaaaatggtcagtcatactatggatgcttgtcacagccaacctctggataatgtgcagcagcagtacccagaagaaagttctcatgccagggttcagcgcctcggaaatggattacattgataacgatgggaagtttcttctctccaatggctatgtctttggctttggctttgccaccgtcagcgtgtcagacagcacatactacgttcttgcagtagtccacttgcccaccacttctattgtctggtctgctaatgctaactctccagtttctcattcagacaactttgtgtttgacaaggatggcaatgcctacctgcagtctggaggttccacggtgtggactgccaatatctccggcaagggggccacctctatgcagctgctagactcgggcaatcttgtagtgtttggcaaggacggctcttctcctctgtggcagagtttcagccatccaacagacacacttctgtctggacaaagcttcatcgaggggatgagtttgttgagccattccaatgcacagaacatgacctatacacttgagatcaaatctggggacatgttgttgtatgcaggctttcagttgccccaaccgtactggtccgctctgcaggataacagggtgatcatcgacaagaatggcaacaataacatatactctgcaaacctgagttcaggttcctggtcgttttatgatcaatcagggcttcttcaatcacagcttgtcattgcacagcagcagggtgatgctaacaccacactggctgctgtcctcggtaatgatggtttgattaacttctatatgctccagagtgtgaatggcaagagtgctcttcctatcacagttccacaggactcgtgtgacatgcctgcccactgcaagccgtactccatttgcaacagcgggacagggtgccagtgtccttcagccctcagctcctatgcaaactgcgaccctggcgtcatatcaccatgcaactcgaagaacaagtttcagcttgttcaactggacagtgctgttgggtatgtcggcactagattcacactgcctgtgcccaagacaaacctcacaggatgcaggaatgcctgcatgggtaactgctcatgcattgctgtattcttcgaccagacttcaggaaattgcttccttttcgaccagataggaagcttgcaacagaaagatggaggtaagagtagccttgcatctttcattaaggtatcaagcagtaatggcgggtcagggcaaggtggcagtagtgacaatggtaggctcaccatcgtaattgttgtcattatagttggaactttggctgtcataggggtccttgtgtatgttggtttctgcatttaccggaggagtcaccatacaccctcgcaggatggtggtggttcgtcagaagatgatggtttcctgcacactatatcaggagcaccgacacggttcacttacaggcagctccaggatgcgacaaacaacttctcagacaagcttggccagggagggtttggatctgtgtatcttggtacgctgcctgatggcagccgcatcgctgtaaagaagctagagggcatgggacaagggaagaaagaattccgttctgaggtgaccatcattggcagcatacatcacatccatcttgttaaactccgaggcttttgcgctgaaggagcgcacaggctccttgcatacgagtacatggcaaaggggtctctagatagatggattttccaaaggaacgaggattcctccctgcttgactgggacacgaggtttagcatcgcccttggaacagccaaggggttggcgtacctccaccatgactgtgagtcgaagatcattcactgtgacatcaagcctgagaatgttctccttgacgacaacttcctcgcgaaggtgtcagacttcggcctcgccaagctgatgaccagggagcagagccatgtgttcacgacgctcaagggcactcggggctatcttgcacccgaatggatcaccaactatgccatctcagagaagtgcgacgtgtacagctacgggatggttctcctcgagataatcagtgggaggaagagctatgatcctgtggaaggttcggagaaggctcacttcccctcctacgcttttaagaagctggaagaaggtgacctccgcgatatctccgactccaagctaaaatacaagggccaggatagccggattgagatggcaatcaaggtcgccttgtggtgcatccaggaggacttctatcagaggccgtccatgtccaaggttgtccagatgctggaaggcgtctgcgacgtgccccagccaccaatgtcttcgcatattggataccggctgtacgcgaatgccttcaaatctagcagcgaagagggcacgtcgtctgggatgtcagactacaatagtgatgccttgctttctgctgtgcggctctctgggcccaggtgatatggttatgtacattgctctgctttagttagcatggcgaatcgatgatgtccaatttttggggaaggc

SEQ ID NO: 155142 - DNA, 843 bp, Zea Mays
cctactccggtggagtccacctccactcctccagcgagtcaccactgggcactggccaccgccacctcggccccgctcctcacgttgtcatccgtccacactgcacccgctcctctccgtctccccaacagtttcattcctcgagggggatcgcttgtcggcggggaagcaaagcttagttcttgacgcccaacctccccgttgcctattcgcctcaggaatttgggaattatgtctctttgaggggaatcaagggacttgcttttacttgtctgggctccatgtctaagtgggagccagtcacgtttcaggaatctcttagctttgttaagaaagtaaaggcacgtgactacatgctatacatatcattgctcgatgtgctcaaccggaatgatcaaatccctctgcaagcttacagcgagctctcgcttctgtttcagcatcacgaagatctgttagcggagctgtcgaagttcaggcccctcccatgcccaaacaacgtttatacacacggctcgatttggatgatcatattcctcatgccttttctgctcctgagccttgtcctcgccttgagaagccattgaagtgtttcctgctccatagactgttgcgagcctaaatgatttgtcgtagcactaacacctagttgttgtatatagatatatggatggggttctatatcctgtaatttctttatgatctccttgtacgctcgtgcgcacggaaataatcgtacaatattatttcagtcgcggcagtctggcagtatgtaaagcctaaacagagatcgtttgacctcgtccaatcggaaattcagctttgtacagagaatttttggtt

SEQ ID NO: 155143 - DNA, 550 bp, Zea Mays
gtgcatcaagtaatactgtaatagttgactgatttgtgtttgactgtctctttgctggtgcaggcacgtgactacatgctatacatatcattgctcgatgtgctcaaccggaatgatcaaatccctctgcaagcttacagcgagctctcgcttctgtttcagcatcacgaagatctgttagcggagctgtcgaagttcaggcccctcccatgcccaaacaacgtttatacacacggctcgatttggatgatcatattcctcatgccttttctgctcctgagccttgtcctcgccttgagaagccattgaagtgtttcctgctccatagactgttgcgagcctaaatgatttgtcgtagcactaacacctagttgttgtatatagatatatggatggggttctatatcctgtaatttctttatgatctccttgtacgctcgtgcgcacggaaataatcgtacaatattatttcagtcgcggcagtctggcagtatgtaaagcctaaacagagatcgtttgacctcgtccaatcggaaattcagctttgtac

SEQ ID NO: 155144 - DNA, 5073 bp, Zea Mays
ccctgccatatattcccacagatttccaacacgaacacacacttccagctgcatcccacccgaaacgaggagccggagccacaggcacaaggcagcgccgccggccgctgccaattctcttcccgctgtcatgtacagctcctactccgccgcggcctttgcgctgagggccgcgaagccatccttgcacgcccattcctcctactcctatttctaccacccccctccccacctctgccattgcgacgacgccgacgagcaccgccaccataataaggtcgtcccgcggagcccgtacctcgccccacgcttcttgttcgacggctgcctgctccgccactcggcctacctgcttctttccgcgcagctccggctcctgccgccgccgccgcgcccgtatgcatcccgatgctgccgccggcgagcacccataggctgttgccgcgacggcggtggtgggagacagctggctggacaactctgttgtcatgttgaggcgcacaagtgccggtgctgtgggagtggcgctgggaggccggatcttggggcgatccgccggcgattgaaagcgcctgagtgccgctgcggcagttccggggatgggaccttgcttggagctggatgcgtacggcgggatgtgccgagattggtggggagggcgatgcggcaggaggtgtgggagtatgagggcggccagtggctgtacggaaggtcttcgacggaatgccttgattcggaggaggaagaagaggattgcggttatggtcaattggaggtaggtgggatgcatttcagtaggagatgggaagatggtaatgttgatgatggggatggtcattgtatggattgctgtcggaggaagggcatagaaaactattacagtggtgaggatgtgtacagtagccggcgtagagagaggagagatctgaatgagggccgtcatagtttcagagattctgaccggcgccagcgaagtgagtactatgatgatgaggatgatcttgacttggggcagcgaaagcagggatgggaagggagagatacgaggaattttgtacccaatgatgcagttgacacaaggagtgttgaaactagaaggtactgtgatgatggcagggaatataactgcataagagacaggaggaattttaactctgatgatgtggccaatgtcaggagggctggtcggtatgcagaggatataggaggatttgatcgtagaagagagagtagggattttgagatcgatgataaggttattgtgaggagagaaggcaggcgccatagaaatgaccacagatatgtttcacggcacccaagaagaagtgaagatacagatggagaggatgtttcactcttgagatcacgtcattggaatgacaaagagattggttacaatgagcaagatcttgctgacagaaggtactactctatggtgagatctcaaaagtctgcgggagcatcttcattgcatgaggatgattcaaagagggcttcaaattttaggagcacatttgatgctagacatacagggcagaaggagaattcagcctcaagtgtgaggtggcatgacaatgtaggtggacgaactgagcagatatctgaggagagggaccggcgacgttcagctggttggtcaaatgatgagagagagagatatgattacgatgatgcgcagtttgtgagagtaagaaattctaggataggaagacaagatgacaagtttataactgaggatgaaactagggttacatccagttcaaagaacacatccattttaaaacacggtagcaatgctgatcagcaggctgcagtacataaggatggttcaacgaagagctcacagaagataacggagatatcagaagtccacgataattccactgaacaagattcaagagcacagcgctatcatcaggaagatagagaaaactacactaagaatacgccatcttctgttcaaaattctgtgaagatggctagtgacagtagaagacaagttgatcagcataatgaggtgaatcagaacttggtctcagtcactgattcaaggaaaaactcagggaacctcaatgtaacaattgatagcagtcacaatgtcagcagggtctcacactcaatgagaaatcataatgaaataaaccagatggatattgatgacagttctacttccttacagaatataactcatgttataagagataagaagagcattgtaaaccaacaagtgatacatgaaacggatatagacgcgcagaatattacacatgtcgatatttcaaagatccatgctagtgatacttccacgtctaggagttcacaaagtcatttggaaactagatcagacatgaactcatcttccagtatgggtttcatcaatagaacaagaagccaggaaaaagaagggtatggaaatatgatctctgctaatgatagtggcatggttaggggttcacaaagtcatcttgagactggattgtatgatccatttcactcaaagccatcggctaatattactgacaacaaaagggaaagtcatgaacaagctgaacttaatattgccaatgctagtaatgctgctgcagccaacacttcaggcagtcatctccaaaccaaaacagattaccaatttcaatcgccttcagctgtagcaattgacagtatgaatgaacaaattgattttgctaagatccatgctattgatgctacagttagcagttcacaaggtcctgtgattagaaatgacaatcaagttcataaggcatcaactgtacattggtcaagtgagagacaaggcatgaatggtcggcaaattacacaagtttccaatacagaacgagatgatgaagcaagaagtatttttcctgaatcctctcaggatacacatcataacatggatttgatctggcagcaggcagacaccagtgggatctctgatgacaaaaatattactggtttgctcgtggagagcaccaaaaagggatttatgactaatgtggatatgggaaaacaagaagcaacaatgggtagctatgaccaagaagtaaggagtgaaattactgcaggaagtagtttaccaagtgattcaagtgccagacagtctgtcaaggaaagcatgctagaatcagctgctcgattagagaaatcatctacctttcttgttggacggtttgttgatgagctccaacagggagtctcagatccagatgctactttaacaaagaaaaatgggaaatccataatggaaggtataacaagctcttcatcaaggtctagaacaaaaggaccagcagatgaaatgtgggatgtccagagtactacttctgaagagaccttcaagacggccgacaaggaggaaggttcctcagctgatggagctactaattctgcctctcagacaccaaaaaatgaatctgttgttgctaggaaagttcacaagtcactctgggcttatgttgctgatataatccgtcttggatttattcaacatggtgactcccatgattctagtcacaaatcagttaagaaaagttcatctaataattctcagagcacagagggttggctttctagtcaggaacgtgataatgatggcacaaagaagaaaaatggaagtaccaacactctgggtggtggtgaacaagaatctggagtggcttcaatgtcaaatgaggaatatttgcacactgatacccatggtttgcagatatcagaaactgttgttgaacctcaagtaggtagatctgagggagacttgttgcctacaagttctacagatgatctacatatatcaggggggagaacaaagcaatctgatgcaggtgaattacgcaaaggaaatagcatagatgatagcactccaacttatctagatatcacgataggacatttacctgaacgcaaaactgcatccaggatcacaacagagggttctggtgagtttattactgggaaaggaatgttagctggcacatcttctgtgaccatcagtgcaatggaagctggtcgcagtgaagatggagctgattcgatatatgatccttcaggtgctataactccttatcatgattctcaaacgcaaacagtaatgccacatgagaatacctcaactggtatccttggaccaccagcgttacctgtgggagtttctacaaggtttgaagaaaagaatatcatgcaagaggccccagaaattattaaaacaggagggaaggatacagaattgaaaaggagaaattttcaaagaaataaacaagtattgaaggatacatttgatgaatgggaggaagcataccagcgggatgctgagcagagaaaagctgatgagttattcatgagagaagctttacttgaggcccagagagctgcagatatttgggaggtacccgttggtgcagtgttagtacagaatggcgaaattattgctcgtggttgtaatcttgtcgaagatcatagggattcaactgcgcatgctgaaattgtttgtataagagaagcttctaacaaactcaagacatggcgcctagcggacacaacgctttatgtgacattggaaccttgtgccatgtgtgctggtgctattcttcaagctagaatcgatactgtggtatggggtgccccaaacaagcttctgggagccgatggcagctgggttaggctgttccctggggatggacaaacaagcactcttgattcaacaaaccagagccaggccgcagggcctgtccaccctttccatccgaagatagccatcaggcgtggtgtgctgtcggccgagtgctcagagataatgcagcagttcttccagctgaggaggaagaagaaaccacagtcaccaccgcaggcccaccgccatgggcaccatcatcctgtcaagttcttcagcaagatgcaccacatgttcggcacgatattctgtttataacttcgcctctctgttttattttagcttcctaaatttcgtattatggaagtgtgaaaaatgcatttctttctgtgcatctagtgtttttatacaggtaccagtttgtattgtgagatgtcatcgataattgcttagttccaatgtcgaaa

SEQ ID NO: 155145 - DNA, 423 bp, Zea Mays
tccccagctcagagtgcggcgcacattcaccacccaccaactctgtcttctgtacgttacgcccaagcaaccatggcggccgtcatgccagcgacaccaaccacgacgacggtgccgctgcccaactaccaggtgtccggcgcgggcgcagctgcagcagcgccgcggcacggcgcctctgggtcaggctcggtcggcgccttcttcggggtgctggccgcggtgctggtgctcaccgtgctctcctgtgtgtttggccgggtgtgcgccgcgcaggccgagggacccgacgagtcctacgactgcaccaggctagcgcgctggcggaggagcgcgcaccggcggcgaccggtgctgccagccgcggagacaaagcagccggctgcatcgcagccactgccgctgccgctgccggagccgtga

SEQ ID NO: 155146 - DNA, 381 bp, Zea Mays
atggccccgctcctcaacgacccgggcggcgccagcgccgtgacggcatgcctccgcggattcgggtcgggcgccgggaacgacagcctctgccgctggctctacgacgtgttccggtccaacgtccccgagctccagctcgcactgttggtgccgtcgctagctagggcgcacctgtgccacgccatgtcacggaagccgctggccgggttcgaggcagtgctcctcgcgctgtacgcgcatgtcgcgtcgcagcgcgacgccggggaggtcgagactcgagaccatatcgctcccgaacctggcaaagattttggtacatcacaaagagaacccgtaggaaaaattgaacaagtacaatcaatcggtgaggttcactga

SEQ ID NO: 155147 - DNA, 1661 bp, Zea Mays
ggagtctttttatcggtcgtgcccgcagtcgactcgccgcccacttctgtagctgtagactgtagttctgttcctcttcctccccactcactcctgcgcttcctcgccgcgcggttccttctccctgatcctcctttggcttcgcggttcatggcgatgtggagggccgccgctaggcagctggtcgaccgggcgctcggctcaagggccgcgcacacgtctacaggcagcaagaagatagtcggggtgttctacaaggccggggagtatgccgacaagaaccccaacttcgtcggctgcgtcgagggtgcactcggcatccgcggctggctcgagtcgcagggccatcagtacattgtcaccgatgacaaggaaggccccaactgtgaactggagaagcacattgaagacatgcatgtcctgattaccaccccattccacccagcttatgtcactgcagagaggataaagaaggcgaagaatcttgagcttcttctcacggcaggaatcggctccgatcatattgatcttccagcagctgctgctgcgggcttaactgtggctgaggtcactggaagcaacactgtctctgtggcagaagatgagctcttgcgcattctgattctgctcaggaacttcttgcctgggtaccaacaggtagttcaaggcgaatggaacgtagcaggcattgcccacagagcttatgatcttgaaggaaaaactgttgggactgttggggctggtcgtattggcaggctcttgcttcagcgtcttaagccctttaactgcaacctgctttaccatgacagacttcagattgacccagagcttgagaaagaaattggggccaaatttgaggaggacctggatgctatgcttccaaagtgtgatgtgattgtgatcaacacacctcttacggagaaaacaagaggcatgtttaacaaagagaggattgcaaagatgaagaaaggtgtaattgttgtaaataatgctcgaggagcaatcatggatgctcaagcagtcgcagatgcatgttctagcggtcacattgctggatacggtggtgatgtgtggttcccacagccagcaccaaaggatcacccctggcgctacatgcctaaccatgccatgacccctcacatctctgggactacaattgatgcgcagctgcggtatgcggatggtgtgagggacatgctggataggtatttcaagggcgaggacttcccggtgcagaactacatcgtcaaggaaggccagcttgccagtcagtaccagtgaccgcgcgagatgttgctgtgctgtgtaggcttttctggtgagaagctgcgaggaagaaactcctgttgcgtacttgcgttactgtatgagtagctctgagaaatctgtcagcggccacctgtaataaaagaatgccttgctggtatctcaccgtggagatcaataagtcccttttttttccttctctgtcactgaactgcatgcactgtcttttttcggctgtgacaacgcaaatggtaaccaactggagccatttgtcacatgtttgttttaacaagcacatggtaatgaaatcaggttgcactgtaaccagagatgggatcagagtgcctccggcggggtaacctgttttcaaagagagaaaaaaacctactcatcca

SEQ ID NO: 155148 - DNA, 1350 bp, Zea Mays
cactctgaatctgaactttacaccatagtttctgttacatctcttgaaatgcagtgttcagttgtggagaagtagattttaatctttacatttacagaatatatttcacagtctagcttatcaccattttgattatgcagggttcctatgtctatgacattaatgggaacaagtatctggactctcttgcaggattatggtgcacagctttaggtggtagcgagcctcgattagtcaaagcagcaactgagcaattaaacaaattacccttctaccattccttctagaaccgtacaacaaaaccttcgttggtctattgctttcagagataatatgctcaacctttgcaaccctgagttgcatagaactaccctagttgagctctccaaggtccctcctgtgccttgtctgcagattataaatctcagcaacgaaagatttagcccgattttagctctagagagaattcttgcctgaattcttattagtgaaactctgcatcttgtggtatgatatgtttttctgggattaggatggttcggttttaatgctggctgcaggggctatcatataactaggtaattaaacaacatttcttcttgatcaaatctgggtgtgcaacgactgcactatttgaaatcttgcagattttaacatgagggtgcatggttatgttgtgcgattagatccatctatgaattgtttgtgcttctacatttaggaacaatgggcaattaggattttttatgtatgttttgaatgattcttaattgttgcagtaacagtgacaagataggttgtttaattatgtcctcattgcaatatcattggtaaagtaggcagtagtcataggatattctgtaccaaggttgctttttataggaattacttgaactaaataacaacaatgtatgatctgtctaggaataagattgtttatatcatattgtatacatgctgaaagtagcagcaagcaacagatttcctaaactatgttcccaagtagttcacatgtaattgtgtgttcttgaagtgcagagcaatccaccacaaccacgacgcgaaggactccaagctacaatttctgcatcactaaaacaaaaaaacaacagtaatgcatccaagttctgaacctggaacactatgaagatgcaagggcttgctgcatatggatatttgttttgcatattggttatttatttaggatctagatcaccgatgactatgagtcatatgtaaatatatttttatcataccaaaagtgtctcgaacatatattatatatgaaactatggatcaacttcttgtaatgcaattattgatttttaatatatattattttttcttctt

SEQ ID NO: 155149 - DNA, 231 bp, Zea Mays
atggatggaaataacaataagctcgaagagaaaattctcgatgacaagctagtgctcgccaccctatgtggccacattgagaagtttgcctacatgatcgttatcatcaagttcaccaagacctccctcaacttcgctactatcttcaacaacctttgcctagagatcaagatgcaatctaaaggtaacccaatgtacaccactcttgtggatggctctacccccttgtag

SEQ ID NO: 155150 - DNA, 2763 bp, Zea Mays
acggtccaaccgagtgagagtgaaaagcttccagttttcgtctacacgcagtgcagcagcggccatcgttagtgacctttgcctttccccatgcgtgctgccctcccctcccatctcgctgtttcccttctgaaatcccgagaaaaagaggatcgagccaggaatctgcaagcttcttccttgcttcagagtttgagaatcttgtggttgcttcttccctctgtgaatggagaaaaataatgatgaagcaatgggtacaccacgacacaacgctcatccgaaggttcatagcaaaatgtgcaaggagttgactttgatgttggataaggtttcctctattcttccatcaatagaagatgctcaaccaggatgcaaagcaggtgtagatgaactatgcaacctatacaacatagttgacaaagggaaactcataatacagaattgcgttgaatgtagcagcctttacctggctattactagtgaagcgactacaatgcgatgtgaaaggataaggaactcattgcgacggagcttgttcctaatacagaacatggttgaacaattgttagctgatgaggtggctgatgtccataacgatcttcgagatctgaaattcattgctgatccagcagaagaggatgctggaaaagtaattctggagatgcttcggcattctgaagtatccgaacaaacggagcttcagactttccttgaagcagcttccaaactgaacattacatcacctaaagctgtcctaattgaaagaagagcaatcaagaaactacttgccaagatcaatggcactgatcataaaaaggaaggaatccttaagtacctcctatatcttgttaggaaatatgggaagaatgtcaagccagagactgatgaaaagaatcaaaatctgaatgtggcaactgaagttttgagtttagactctgttgttaatgtcatcaatactgcagaaatatgcatttcagctacagagtctgccaatatgatatatgatggtcagagtagtttatctggagcaaccacaccacctcaagagctctgctgcccattgtctttgaagctgatgcgagatcctgtgataataacatctgggcaaacatatgaaagagaaaatatcgagagatggttcagtgagggatatgatacttgtcctaggacaaatatgaagttaaagaacttcacggtaactccaaatacatgcatgaaggctgttattcataactggctcaaagatcatgagcttgaatctactgatttgcctaagcaatttcagaattattattctgtatcaagtttgcacaatatctctgcacctctaattatagaaaagaatagagactacacagttgattatagcagctcatcttttggactatcaggtgctagttatatatcatcccccatgagggaaacagagcagtcaaagactagttttgaccagttttattctaatgccaatttccagttgtatttgtccttctgcaactttgacaaggcaatgttcttgggtttctttcatgagctatccgagcttccctttgaactgcaaagaaaagctgtcagagatttgaagacttctctgagcggtgaaaatgaaatttggcattctatggtctacaatgggttttttgaagcattccatgaattcctcaagaatgacagtggaattcacacactgcaagctcgaagggctgggattcagttttttcttgctttcctttctagtggcagggctcgaattccttcagtttgtgaagatgtggtacttctgattgcatcactacatgattccgagttcaaacaggaggctcttctgattgtacatgaactgcttcaggaaccaagctgtccaaaatctagtctcatggcctccattctttctccttcagtgtttggagctttggacagtggagaaaccaagtgcctggacctcgctctgcagatcatctgcaagatttcatctgataatgatataaaatcttaccttctttcgtccggaatagtgtcgaggttatctccgctccttggtgaaggaaagatgacagaatgctctttgaagattctacggaacttgagtgacgtgaaagagaccgcagggtttataatcagaacaggtaattgcgtcagctccatttcagatcatctggacactggaagccacagcgaacgtgaacatgcggtggtcatccttctaggggtatgctcccacagtcctgaggtttgttcactttccatgaaggaaggcgtcatcccagcccttgtagacttatcagtgagtggaaccaaggtggcaagggattgctcggtcaagttgcttcagcttctgaggaacttcaggcgatgtgaccagttcagcagttcatgctcaagagagcttgctgtcgatcatgtttcagagaacactcgcaatggttcaatttgcatgcagccgatatcaaagtcagcccggtatatttcaagaaagctcaaccttttctcaaaacctcggtcgctgaccctggcttgagaaatggaaggggtcggttggatcgagccctattccgcagcgctaactgccagatgtacagatagtagcaggtagcgttcgtcgagatgaaatgtttgtgggaggctttttaaaactcaccatgtatttcaagagtttttattagttttttttggattttctttactggcgctacaaacagtagatgtatgactgttcgagctggaaacctgtgcgctttttatcgtagcattgtcttgtttact

SEQ ID NO: 155151 - DNA, 1064 bp, Zea Mays
ctggcttcgttatatcctggccgccgtgttgattcctgcttatcttcaacgccggccaacctcacttcccatggccgtcctctacctctcggctctctgttggccggtgttcctctcctcctcacggcgcctcctctgctccagctcggccccgccctgcgtgcgctgctccctggcgctcctcctcctttctcccaaccgcgcgtccctcccatggctgcctgcgccgcgcgccctgctcctctgcacgcagccgcgttcctctaccgaccatccatttccctgccgaggtttcgcccagccgtccttcctttctctcaactccggctgcgctgtttccatgcctggccgcatcgagctcggggcctgctcgctgtccttcagctcacgcccggcccagctcggatctcgctccagttcgccgttcccccttccttgccgtggaagctggccactgctgctcggcttctctggtgcgcgcgatttgccggccaggtcccctcacctgtggtctcctcgccgcgtgttctggccgtcgacctcgcttggccctgtatcgttaggctattcaatcatggtcgctgccgcgggcgcttgtccctgatgcacattgcgcggtatttggatcacgccgattgactcccgccttacgtcgtgttgtgtgccggctttccctcgcggtagaccacgccgtcgtataaccttgttcgcttcgcggcatcaccatcgtcatctgccagctccatcactgacctttcctagtattttttccccaacaccgagtctctctgaccttactgctcatcggtgcaatttgtgtgcgtgggtgaagaaagcgaggcccgtgtgcatcgctcatcaagtgcttggccaaagacttcaatcgaaggtcgtcatcgttcatgtgatgattgagtcaaattacaatatagtgagttgattcgctatttctattattagttcgatcattggattagctagatttattagtcgtgataattctcgtgtttagcaggcgtgttgtgtgatcagctccatattcttactattttaggtattctgct

SEQ ID NO: 155152 - DNA, 187 bp, Zea Mays
aatggcattagtccctcaaagtctatcttttcgtgactgtagatctggcagtatattatttgttagacctagtaagggtttttggggctagtccccttgtaattaactgcataccctgtgtaaggcagacccatctatacttagtctattaatacaactcctaaccctagttagggctagtttttcc

SEQ ID NO: 155153 - DNA, 534 bp, Zea Mays
gcaggttcatgtagtggacgtagaagaggcattgctggggttttggaggcaaacttcataagacctacacatgataagcaagattttgagaggacgggtcttttccaaagacttgagacacgattgaaagacatggcaaaagagtattggacttaccattgtcatatggttggttacactcgggtcatgaaaaagcctcctccagcacattatgtatcaactattgctgagaagggtgatgataacttagcagctcagtctaccacaaagacttatggttacaattcaagagccagggtaccggtagcattgcagccttgttccaatgcatataacacacaagatcctatgcatgctgatgttggtgtcgtgatggatcaaatgaactatggtgcatgcccttcaatgactataaatgtggggacaacattacattcactaagatatgcaccacaacaatctcaatctgaactatgcaaacgaagaaagtcttcggagattcactggagatctcaaaaaaagcagaacaccaat

SEQ ID NO: 155154 - DNA, 2056 bp, Zea Mays
ccccactccccagcaagtctctaccaccatctcttctgctactgcaactgagaaccccagcaactgaaaaccccattctccgcggagcagccccattgtagattaagcaatgctagtagacattgttgatctttccagtgatgatgacgaggtggctgttacagaagaacacagtgttgatggaaaaggtgtttatgcgaaggcaaatttttttgacttaactattgacgatggcattcttgaaggagagcatattgcttacgaacaagaacaaggagattctgctcagggcacatcattttataaacaagagttcattgcagatgatggacaagctgaagctgcccagtgcatagtaacattagagttgcaaaatcttggagcagatggtggatgctatgcttctcaatgcacagagacattgttggtgcaacaacttagaagaaatgatggacaaaatgatgctgcccactccacaggaacactaccgatacaagaacttagaacagatggtggacaacacgatgcggcccagtgcacaacaagtctacatatgcaagagcttagagcaactgatgtacaaggtgatgctgcctgtttcacaccaacattacagaggcaagaacatacagcagggaatgaacaaggtgacactgtccagtacacaacaacacaacagggtcaggaatctattgcagatgacacacgaggtgattttactcactgcacaacagcactgcaatggcaaggatctcataaagctcagtgcacaacaacattactaaggcaggagtttctagcagcaggtgatagaatgcaagatgctgcactgttgagaaattcagctgaagctaccacatccttgacaagtacacaacaagggagacacatgagaactgaattattcaatgtgtcaactgcaacaccatttccccggcaattttggaaagctggagagaaagctggagactatggattagcttctcaagctgatctcaacaatgaccacaaccgcttacagattcaccccaagtttcttcattctaatgctacttcacataaatggccattcggtgatatagacaagctagtgttggaactgattaatttctgttatacagctattgcagaactgctcgacaacgctattgatgaggtgagcagtggggcaacctttgtgaaaattgataagatgaagcattctcctaagggggattattcattggtaatagaagataatggcggcggcatgagtccaaaatctctacgacaatgtatgagctttggattttcccagaaaagcacaacttcatccatcgggcaatatggaaatggcttcaaaactagcacgatgaggcttggggcagatgctattgtattcacatgcactaaagatgataggagattgacacgaagtatcgggttgctgtcttacacattccttatgagaagtaactgcaatgacatatttgtaccagtggttgattatgaattggatgccttgtcttcaactttcaagaggaaaatgaactgcggtgaaaaacattttttatctaatcttttcactattttgaagtggtctccattttcgacagaagatgaattattgaatcaattcagcaatatggagtgccatggcacaaaaatcattgtattcaacttgtggttgaatgatgcattggaaatggagcttgactttataactgataaagaggatattttggtctcaggagcaccggaaatacgagcagggcggaatacagtggaaagcttgacacagatgcatgtagcaaaccgtttccgatattcgcttcgggtgtatgcatctatactatacctacatgtacctgaaaactttcaaatcatcttgtgtggacgagctgttgaaccacattatgttgtcaatgatctcatataccgtgaatgtatcatatatcgaccacatgttcaagtaaccacagaggttgatgtcattactacaattggctacttaaaaggtgctccacgacttgatatctatggatttagtgtctaccataagaaccgtcttatactg

SEQ ID NO: 155155 - DNA, 547 bp, Zea Mays
gaatggttgacatatgcaagggttaagttctacatatgtcgtgtggttagagatcctcagctgagtaaatcgattcggatcaccgttatatcctcggaatagtggagacttgatctctgacctgcaacctaggtcaggatgtaaacattatgaataaaaatgatgttgtattgatgagatggtggaatcagactagatgcaaccagagtctattaatatttaatctggtgttaaaatattgaaagtaaggactcactttaataagttatttccacaaaagtatctaagttgattcttgctaaagccttttccttgatttatatttaaccatcatatccttgagagtcatttttccttagtcgggtaagacttgcgaaagtacacttcgtactcagggttttcggacccatgttattgcaggtgataaaaagtactcaaggtgtttcagaggctggagagcgtttccagttctggggaaggattagttaggcttgtgtataagctttggaggattcctaccttcctgctattgtaataagttatgcac

SEQ ID NO: 155156 - DNA, 840 bp, Zea Mays
atggaggctaggcgggttctgcaggggcaaacacgccgaacagagggccaagccgagctggggcagacagccatgggaggtcaggggcgagcgccaggcgagtgcagggagcttcgacggctgggcgcgcaggggaaagaaccagggagcttggaccaggaagtggcgctagtcacaaatggaggggatccagaaagggcagttcccgggcgagcactagggttggcggtgtccaaggagatgggctgggcgcaggggccaggctcgcgcgtccatgagagacggaaaggaaaagcagggaaagcaagcagcggacacagggaggaagacgccgacgaactagagccgggcaccgagcgagcagggatcaccggcaaggctctagatgcaaaagtagccaccagggttgggggcgcgacgagcagagcacaagggaggattctgcggcgcgcagggacgcggcttggggagatgggcgcgccagagagcatgcgatgccgcggtcagctgaggaacgacgcagggagctccacggcgagagagagagaggcaccgcgggctgaagagggcgtcgtagggaagacgaacagagagagaaggcgcggtacagacttcagagaaggaaaaactcagcgacgggaggataaaatcccaagagatgacgaccgcgggaaatatcagaccggagataaggcagaggagggagcaggaaatatcccacgacgggatgagaccgacggctggaactcggctgggagcttctgccggcgagcagggagagcagaggatgaacttggcggcgggatattcttcctggagcttgagcggcgtaggagataa

SEQ ID NO: 155157 - DNA, 552 bp, Zea Mays
atggaggctgggcgggttctgcaggggcaaacacgccgaacagagggccaagccgagctggggcagacagccatgggaggtcaggggcgagcgccaggcgagtgcagggagcttcgacggctgggcgcgcaggggaaagaaccagggagcttggaccaggaagtggcgctggtcacaaatggaggggatccagtgagggggcgcatgcagggagcagtgaagtgctggctgccatggaggccggtgttgagggagtttggccggcgagctagacgcactgcccggtggggagcaacgacaaagggagcagtgacgcgcgctggaaggggtgtcaagcagagcttgggcgccatggacaggaaagggcagttcccgggcgagcaccagggttggcggtgtccaaggagatgggctgggcgcaggggccaggctcgcgcgtccatgagagacggaaaggaaaagcagggaaagcaagcagcggacacagggaggaagacgccgacgaactggagccgggcaccgagcgagcagggatcaccgacaaggctctag

SEQ ID NO: 155158 - DNA, 1766 bp, Zea Mays
atggtgcaagagcaagacgcacccaacgcacttgcctccgacgccgatcaccccgctccgccgccccgcctcctttctaagcaccgcccgcgtcgccgcgccgctgcccctcgcccgcccctgccaccacctgcgccaccactgcccgcgcgtcgcctgcccgatctcagccagtgccactgctgcggcttccgcttccgaacgccccagccgggggccaggcccaagcgccgcccgctctgtccactcagttccctatggcgcgtcgtcctcctctgcgccgaatgcctctccctggtccgctgtggcgctgtatgctcttactgcctctccctcgacaacctgccgcccgaggattccgccgtcgtctgtcgccgctgcaaccgctatgtccatcgatcctgtatccctgccgaacaccgcacggccgtgatccagccggtcgatgtggaggatttcctctgcgtcgattgccgtcccaccgtgagatcgaagaacgggggcttcaatttggggctgaatctggatgcttgcatctgggatcgtacatccgttgccagggagaacgctctgaggaaggctgtggaggtgaagcccgcttctaagcgggggaacgacgctgttggcggcagtgggttggtcggaaggggcagtgatgttccagttctgccggacgaagagttagctttgcagctgcacctggcaatgaatggatcacagaggatttcacgttcaggtggtgcctctgccgatccagccaaggggaagaatgatggggttgctagtaggatttgcaacacaaatcaggatatttgcgtaacaaatatgatggctcagcttgatgaagaagaaccaggttgcaacagggtattaaagggccttaggaattctgattcctctgtcacagtggttcttgcgctggaatgtgtgaaaggtaaacgcactgaggaaagcatgaaagctaaaggaaaaggtcctcatgtgattacacagaaggatgatttggtggatccctataagaagtatagtaaaaggagttcaagcaaattagcaaaagatgaatatgttgcaagcccgaaaatgtatgatgggatggacatagaagatgctgatcatgatggtaatggggtagctcctatgaaatagactgcttataccattctgaggttattgttggcaacaggagatgacaatgaagcttcaaactggaaaatgaacgtagtaacttctgtttgtgacaatacagaatcagcagcagcagcacttccaaaacagcccaccactcaccagccatgtagttgctgggttttcctgcttgcatgctgcaacagcttcacattattgaagaaaccgatgaggcttctgtggaattatgagctgagatgaacctggcaagcattggaatctggtttcagaatgctctaattttgaagattaacttgtgttccattttaagcgtgtagtaagttgcaaggaagccctttacttctgttcataggttgcaatcagttttgtgtgctccaaaggtaatatttgattgccacagttgcagggattcaataaatccacgagttagaaatgaccatttgatgatgaataagaatgaatgtctgccttgtgctattggatatggataccaataacagacacattgtcatgtatgcgggtttaatcccataacaatgaaacaaatatgttggacatgcaaacctttgtctcagcaacttggtccttgcttgagttctattacatttatattttatttc

SEQ ID NO: 155159 - DNA, 1527 bp, Zea Mays
ccgaatccctcatgggcttccgggcgcgatgaggacgtgggactagcagacttcgtcgaagtcttcccttcgtcttgcaatggagaggacgaagggtgaccgcgccagtcatcatccggccggcgctctcggctcactcgggcgaaaggccgaaagcccagtcggaccacgccactcccaaaccctaagctgagcctgtgacgctttcatccaatggtgcaagagcaagacgcacccaacgcacttgcctccgacgccgatcaccccgctccgccgccccgcctcctttctaagcaccgcccgcgtcgccgcgccgctgcccctcgcccgcccctgccaccacctgcgccaccactgcccgcgcgtcgcctgcccgatctcagccagtgccactgctgcggcttccgcttccgaacgccccagccgggggccaggcccaagcgccgcccgctctgtccactcagttccctatggcgcgtcgtcctcctctgcgccgaatgcctctccctggtccgctgtggcgctgtatgctcttactgcctctccctcgacaacctgccgcccgaggattccgccgtcgtctgtcgccgctgcaaccgctatgtccatcgatcctgtatccctgccgaacaccgcacggccgtgatccagccggtcgatgtggaggatttcctctgcgtcgattgccgtcccaccgtgagatcgaagaacgggggcttcaatttggggctgaatctggatgcttgcatctgggatcgtacatccgttgccagggagaacgctctgaggaaggctgtggaggtgaagcccgcttctaagcgggggaacgacgctgttggcggcagtgggttggtcggaaggggcagtgatgttccagttctgccggacgaagagttagctttgcagctgcacctggcaatgaatggatcacagaggatttcacgttcaggtggtgcctctgccgatccagccaaggggaagaatgatggggttgctagtaggatttgcaacacaaatcaggatatttgcgtaacaaatatgatggctcagcttgatgaagaagaaccaggttgcaacagggtattaaagggccttaggaattctgattcctctgtcacagtggttcttgcgctggaatgtgtgaaaggtaaacgcactgaggaaagcatgaaagctaaaggaaaaggtcctcatgtgattacacagaaggatgatttggtggatccctataagaagtatagtaaaaggagttcaagcaaattagcaaaagatgaatatgttgcaagcccgaaaatgtatgatgggatggacatagaagatgctgatcatgatggtaatggggtagctcctatgaaatagactgcttataccattctgaggtactaatttttttaatgaattccttccgtgccattctgcaatgaagtgcagcatttagtgcaatttcaatgttgcctgttggtcacttgttcaagtaaatgttacttatattttactgcaaagatggaagatgttgaagccacaaaa

SEQ ID NO: 155160 - DNA, 116 bp, Zea Mays
ggttgacatttcacgaataatattctttccctctccgcaaattcctttgaagtttgggcggattctaagcaactttgtttgcccggcactaccgctcttcaacgtgacattgtggg

SEQ ID NO: 155161 - DNA, 813 bp, Zea Mays
gtcctcggggccgccccaacggcccttgcgatcgccaccacgtcagcgcggaggatgcacggccaccagcagcagccgtacccatacgggctgcggcaagacccgctgcggcggatgcgaggtctggacgtgaaatcggcgctccaggccagcccgcgcacgtccacggtggccacggccgcactcgtcgtcccgctgggtgccgcgctgctgtgcgcgtcggggatcgcgctggctgcgaccgtgaccggtctcgcgctcgccacgcctcccctcgtgattttcagcccggtgctcatacccttcgcgctggccgcggggctcatcgcgtcggggctcctcgcgtcgggcgcgctcggcgtcgcgggcgtctcggcgctcacgtgggccgtcgggtacgtctggcaacggcagggcgaaggcggcggcggggtcactgggatggtggtgcagccgctggaccaggggtcgaagcgccatggtgtccaaggcgccgccgcgttcgtggggcaccgccgcctgccacgggacatcgacgttgctggtgaatgatggtttggcggcgtgtgtgcaaacttttctatgctagtttagtttgcaggtgtgtatggattttgatttatggcctggatggatcacactatgtagcgaacgatgtgttcaatttactgttggaataaaactgcagattggtgttacttaataataacgtcctagggaaaattgaaatactctcagcgtcctaaaaaactttatattctagaatttaataaatactgtatgatgtttttggagaatattgttttttacaca

SEQ ID NO: 155162 - DNA, 237 bp, Zea Mays
ttcgtcttcagatctagggttctctcgtgctctgttctcatcttctgctcgctggtgtcccctctctctcacccatggcttcggcggcaactcaggtggggacttacttcctgcggaactactacaacctgctgcaacaaacccccgatgtcgtccaccagttctacatcgaagccagcaccatggtccgcgtcgacgacctcaccggcacgaccgcggctgccaacaacatgatgg

SEQ ID NO: 155163 - DNA, 697 bp, Zea Mays
tttctttttccttaatcttatctctcttcccaccgctgaaatctactttgcttcttatctcctcgcgtagcaaaaaaatctggccgcggtgctcatctcttcagctcggccttatctcatcgtgtgcgggcagtgagcacggcttgctttctctccgttgctggctgctggccgcacaggctctagccgttcccagcgtcatccacagcaggccattgggaagaaggtgctggcgttggcgctagggcagcaggacccgaccgccgtggacaagctgctgtccacgcagcacccacagttcctggcaaggaagggctccgtgctgcaggccattgcccctgctccctccgttccaactctcccttgtgctcgctggtctgaccatagaacttgtatctactcctccgttccagctccagctcgcagcgcgtcctgctccttgttgtcgcgagttccagcccgaatttcgccttgtcgcccagctccttactcgccacggccctggtcgtcgcatcgctgtgcgcagcgtagcgtggtgggtattggtcgcgggcatggtcgggcgacgcgagatctgggcacgccgtcgtttcattatgcccaacgtcgtgccttttgtacctgtcgtcgattttctattcgccacagcgtcaagctcctcccgtccgtaccagccatcaaattctgctttcgcttc

SEQ ID NO: 155164 - DNA, 225 bp, Zea Mays
acacataagttttctatgacttatatatttggacagacttagatagaaagggatattcatttaatcggggttttacaatcattcacaatattctcatgcaagcacacaccaaagagaacacacatgaggagatagtttaatcgtcattacatgttatactactttaatgacgttggttacttagtagtattagcagaaagccaaggacaggacattattcatttt

SEQ ID NO: 155165 - DNA, 372 bp, Zea Mays
atggtcgccggtcgcagtcgcgcaggcgtagctcgaccgctcggggcagcgtcgcagcggggcagcgggctgaagcctgaagactggccgactgggagccgtcctggcgggtggaggcggactggctgctgcctactgggcgggggcgcggggctggggcctggccgccgcctgggagcctgggcgggggcgcgcggctgggggcctgggactgccgcagtgccgcgtgccggcgtggccgcgtggggcgctggggtcctggcctccagggaaggctgggaggctgggacgactgggagtggcggctggggtagtggggtgggcgaccgggacggctgggaagggaagggagtagggaatttagggagttag

SEQ ID NO: 155166 - DNA, 705 bp, Zea Mays
ggtatggagtcagatgatgaattcaatcagtttgtaatgaacgacctgattgatccgtcatcttcggatgatgagaatgatatgttttttgatgccgcccacgtgatcgttgatggtttagttaatcatccgggacgaattggttctgttgaggggcacgcggtagtgcatcgtgacagactgttacaccatgctcttctttacaaagactatttctcagataatcctacgttcaattcaaagacttttagacggaggtttcggatgaggcgacctgtatttcttcgcataatgaatgctgttgaggaacatgacaactattttgtgcagaagaggaatgctgctggtgtgctaggtctatcttctcttcaaaaggttgttgcggctttccgtatgttagcttatggagttccggctgacgctttggacgaatacattcgtattggtgagagtaccgctctggaagctttgcgaaagtttgtagtagctgttgttgaggtattcggaccagagtacatgagattgcctaacgaacaggatacagctaggttgcttgcaattggagcaagcagaggatttccaggtatgctcggatccatagattgtatgcattggagctggaaaaattgtcctaccgcatggcacgggatgtacaggggacataaaaaggagcccacaattatactcgaagcagttgcatctaaa

SEQ ID NO: 155167 - DNA, 123 bp, Zea Mays
atcaccattggaaggaggttggcgctcagctttggagtacaacaaacttggtggctaggaaaggtttacaccgactgaacaccagagctacctctcccatgtagtggacactagctagaggtc

SEQ ID NO: 155168 - DNA, 3075 bp, Zea Mays
atgcacgaggggctgggccgctggggtttggactccctaaaatacggatgtcacagcaactacaccgttcgcatgccgcccaccccggacaaccagccatacagtgtcggtggtggagcgccgttgtccgtgtgcgcgggtggtaccaagccggacgatctcccattgccgccctctaagctcgtcaaccggcgtgggggtgcctgcgcggacgacggcttggcgggagccagtggcaagatggaccggcggctgtccacggcgcgcgtgccggcgccgtccaagtcgctgcttgtccggagccagaccggggacttcgaccacaaccggtggctgttcgagacaaggggcacgtacggcatcgggaacgcgtactggccgcaggacagcagcgcctatgccgacgacgaggacggcggcgtgggcagcgatcccgtcaagatggaggacctcgttgacaagccgtggaagccgctcagccgaaaggtgcccatccctcccggcatccttagcccctacaggctgctggtgctggtgcggttcatctcgctgttcctgttcctgatctggcgtgcgacgaaccccaatctggacgcgctatggctgtgggggatctccatcgtgtgcgagttctggttcgccttctcgtggctgctggatcagatgccaaagctgaatccgatcaaccgtgccgtcgacctcagcgcgcttcgggagaagttcgagtccccgacgccgtccaaccccaccggccggtccgacctccccgggctcgacgtcttcatctccaccgccgacccttacaaggagccgcccctcaccacggccaactcgctgctctccatcctcggcacggagtaccccgtggagaagctcttcgtctacatctcggacgatggcggcgcgctgctaaccttcgaagcaatggcggaggcctgcgagttcgccaaggtttgggtgcccttctgccgcaagcactcgatcgagccacgcaacccggacgcatacttcaaccagaagggcgaccccaccaagggcaagaagcggccggattttgtcaaggaccgccggtggattaagcgcgagtacgacgagttcaaggtccgcatcaacggcctcgccgacctcatccgccggcgcgccaacgcaatgaatgctcgcgagcgcaagatcgcccgcgacaaggctgcggcagcctcctctgatgcccctgtcgccgacgcttccaccgtgaaggccacatggatggcggacggcacccactggcccggcacctggctcgactccgcccccgaccatgcgaaaggcgaccacgcaagcatcgtgcaggtgatgatcaagaacccgcactacgacgtggtgcacggcgacgccgggtcgcacccgtacttggacttcactggcgtggacgtgcgcatcccgatgttcgtgtacctctcacgggagaagcgtccggggtacgaccacaacaagaaggcgggcgccatgaacgccatggtgcgcgcgtcagcgatcctctccaatgggcccttcatgctcaacttcgactgcgaccattacatcttcaactgcatggccatccgtgaggccatgtgctacatgctcgaccgtggcggtgatcgcatatgctacatccagttcccccagcgcttcgaaggcatcgacccctccgaccgctacgccaaccacaacaccgtcttcttcgatggcaacatgcgtgcgctcgacggcctccagggcccaatgtacgtggggaccggctgcctcttccggcggtacgccatttacggcttcaacccgccgcgcaccaacgagtaccgtggcatctacggccaggtaaaggtgcccatcgacccgcacggtcaccatgcacccggcgccgccgaggagctccgcccgctgtcggagcaccctgaccacgaggcaccgcagcggttcggcaagtccaagatgttcatcgagaccatcgccgtggccgagtaccagggccgaccgctgcaggaccacccctcggtccagaacgggcggccgccaggagcgttgctgatgccgcgcccgccgctggacgcggccacggtggcggagtccgtggcgatgatctcatgctggtacgaggacggcaccgagtgggggcagcgcgtggggtggatctacggctccgtgacggaggacgtggtgaccgggtaccgcatgcacaaccgcgggtggcgctccgtgtactgcatcacccggcgcgacgcgttccgcggcacggcgcccatcaacctcactgatcggctccaccaggtcctccggtgggcgacagggtccgtcgagatcttcttctccaagaacaacgcgctgctggcctcccagcggctcaagttcctgcagcgcctatcctacctcaatgtcggcatttacccattcacctccctcttcctcatcatgtactgcctcctgccggcgctgtccctcttctccggccagttcatcgtagcgacgctggacccaacatttctgtgctacctcctgctcatcaccatcacgctcatgctgctgtgcctgctggaggtgaagtggtccggtatcgggctggaggagtggtggcgcaacgagcagttctgggtgatcggcggcacgtcggcccacctggcggccgtgctccagggcttgctgaaggtgatcgcgggcatcgagatctccttcacgctgacggccaaggctgctgcggaggacgacgatgaccccttcgcggagctgtacctggtgaagtggacgtcgctcttcatcccaccgttggcagtgatcggtatcaacatcattgcgctcgtagtcggtgtgtcccgcgccgtgtacgcggagatcccgcagtacagcaagcttctgggcggcgggttcttcagcttctgggtgctggcgcactactacccgttcgccaaggggctcatgggtcgccgcggacgcacgccgaccctcgtctacgtctgggcgggacttatctccatcaccgtctccctgctttggatcaccatcagcccgcccgacgacaggatcacccagggcggcgtcgatgtgtgatcatccaagcttcac

SEQ ID NO: 155169 - DNA, 384 bp, Zea Mays
atgcccttcacgatcactcagacacccatagcgccttcgacgagatccacctctccactggcgacaacctatgtctgtaggcaaagggcagaggaggactcgagtcgaggtgagacgatggggcagcagtcgctgatctacgtgttcgtggcgcacgcaacaagttcacctacaactgcgacaaccccaccttcaactacctcatcgaggatgaagtcgaatctggccttagtcttggatgaagttatagttctgttgcagaaagatgaaggtgcaaccattactaagatggtaacgtacaacaggatactgatagttagagtggggactggggacatagtgaaggaaaggtttgcatttggaagaatgggatttgattggtga

SEQ ID NO: 155170 - DNA, 393 bp, Zea Mays
atgaacgccgcgaaggaactccgcgagcagagcgcgacgctggagcacacgcggccctggcgagctgggcaccggcgctggagagctgagcaccgcggagcgcgcagggaggaagacacaccagggagctacgcaggtctggcggaatccgaacagggagggagaggatctgggcgcggccatggctggggagggaaatcgagctggggagctgccatgggaggagcagggacgcgccatgagctggagcagggcgcagctgccgggcgctgggacaagacaaggaacgcgcgcgccaggagatatacgacggatgagaaatatcagatggagggtggcggctggagatttttcagaggaatgactagtggagaggaatcatatggaagctag

SEQ ID NO: 155171 - DNA, 456 bp, Zea Mays
atgacgaataggaaatcgacgaccgaccaagatgtgatcggcaagttgaacgactccgatgatttgacggcagtcgcgacagctaacaggaggacgtgcgtagagaaacagcacggcacgggagcttcgcggcagcacgcgcaggaacaacagaacgctacgagcgacgaggaagcagaaagccacgacaagggagcgtggcgtgcagactgggcaagctggacgcgcgaccgactggagcagcccgcgagcagaggaaagggaggaacttgctatggccgagcaagatccggggcggctgggcagaaggagcagctgcgcatgcggcagctggaactgggagatgggcagggcgcatggcacaggaagaacgccaggaggaggaagaagcagctggactgcgcggctggaggagcttggggaaaggaaagccgcagcagagagctcagcacgtag

SEQ ID NO: 155172 - DNA, 1650 bp, Zea Mays
agttggggtcatcgagcaaacatacccttactcaacttctactttctttgaactggatattcaaaagatgttttactgtcatcctttgaatttcccgtgcttgttgtcatgtaacagtggaatagtttctaattctttccatacatttaatggcaacagggatgaggacctattaagtcagggccttactttgaatgatgatttacaacgtgttttagcaaagcacgatgcaattgctgctggcatagccattcgattacaaaaaccaaaatcagccccggcccgcgcagacagttctccaacgaagcctgagccgacaaaggaaacagaacaaaggtctgctaaagttgccagtagtgtgactccatttgagcagttagcacttcctgcaccaccatcatcaagtgcttcaaagtctcatggagaatcagctgttagcccaaatattgatttgcttagtggtgatgagttttttaaaccagaacctgttcattcccaagctcttgttcctttagtcactcaggcttcagcttcttcaagccccagtactttagaccttttagacatgttttctgatagcaatgctatcaataacaccagccagaaccctaccatactttctatatctaactcaaatcctaatacatcagtacaagcctatcctgttccacagcaacctgttccaccacaccatccttcaccatatgctaatggcttaaattcagatacaatgacaccctttgatcaaggctctaagttaacctcagcaagttcatggaatgaacagattgcccatggaatgattccaccacagcagtttgcccatggtcaaggtgaacaaagcaacgaccttccactaccaccctgggaagctctgcctgcagaaactgagcaattagaagctgaccatcctggtgggttgtcagctctgccacaatttggagttagtcaaccccagccagtccaaattacacattctgggcagcaagtgttaccatcgcaattaatgccaactggacaaccgggagggcagttccagcctagatttggggctcaacaaccatatgctacagaaaatacgcagtatggaggaatgtatccgccagtgcaaggcaaccaaccaacgggtatttatccccagcaaatggctggagatgtctaccagcaacagatgtttggtggccagatgataggttatggctatggtccgcagcctggaggctactacgtgccgaacgccgcatatgcatatgccggtgcaaatgatctttctcagaggatgaatggcctctcgatgcaaggcaacagtctgtatggcacacccgcgtcgtcttccctccagcagcgtaacaggccaagcagacctgaagattcgctctttagtgatcttgttagcatcgccaaacaaagccttgtaaaactgcttccaacaaggctggtaacttgtaaaccatgagtttctgctcatagtatataaaattcttgaaatttttttcctattggaaagtagtgggcgagatttgtatatcctgatattgataaagatgtttacatcttttcaagaaattatattttgtttacaagtattctgtaccattaatgtcttatgtatatacataggagcaaaaaaaaaaaaagactccagtatgc

SEQ ID NO: 155173 - DNA, 2363 bp, Zea Mays
aattttattgtcgtcctcgcccgctttctctgaccgaccggaaaggcgctgcccaaacaaacgcggaggaagaagggaactcgccgcctagggttccgccgccgcctactcttccgccgatcaaggagcgggaatcattgcgcgatgccgcagtcggtgctggtggaacgcgcgacgagcgagtcgctcatcggccctgactggtctctcaaccttgagatctgcgacatcctcaaccacgacccctcgcaagccaaagatgtagtgaagactatcaagaaacggattgcacacaagaactcaaaggtccagcttcttgcattaacgttgctggagaccttgattaaaaattgtggtgattttgttcatatgcaagttgctgagaaggatatgcttcatgaaatggtgaagatagctaagaagaagcctgactatcacgtcaaagagaagatattaattctgatagacacttggcaagaagcttttggtggtgcccgtgcaagatatccccagtattacgcagcatatcaagagatgctgcgtgctggagctgtatttcctcaaaggccggagagtactgtgccaatctatactcctccacagacacagcctctacggaactatccgcctcctgcattgcgtaacactgattatcgacatgatgtgcctgaatcctcttctgcaccagaagtgcctgcattaagcttgacagaaattcagaatgcacgtggggtcatggatgttctttcagagatgttaaatgctatcgatcctggtaacagagagggtctaaggcaggaggtcattgtggaccttgtggaccaatgtcgttcatacaagcaaagagtggtgcagcttgtcaactcaacatcggatgaggacctattaagtcagggccttactttgaatgatgatttacaacgtgttttagcaaagcacgatgcaattgctgctggcatagccattcgattacaaaaaccaaaatcagccccggcccgcgcagacagttctccaacgaagcctgagccgacaaaggaaacagaacaaaggtctgctaaagttgccagtagtgtgactccatttgagcagttagcacttcctgcaccaccatcatcaagtgcttcaaagtctcatggagaatcagctgttagcccaaatattgatttgcttagtggtgatgagttttttaaaccagaacctgttcattcccaagctcttgttcctttagtcactcaggcttcagcttcttcaagccccagtactttagaccttttagacatgttttctgatagcaatgctatcaataacaccagccagaaccctaccatactttctatatctaactcaaatcctaatacatcagtacaagcctatcctgttccacagcaacctgttccaccacaccatccttcaccatatgctaatggcttaaattcagatacaatgacaccctttgatcaaggctctaagttaacctcagcaagttcatggaatgaacagattgcccatggaatgattccaccacagcagtttgcccatggtcaaggtgaacaaagcaacgaccttccactaccaccctgggaagctctgcctgcagaaactgagcaattagaagctgaccatcctggtgggttgtcagctctgccacaatttggagttagtcaaccccagccagtccaaattacacattctgggcagcaagtgttaccatcgcaattaatgccaactggacaaccgggagggcagttccagcctagatttggggctcaacaaccatatgctacagaaaatacgcagtatggaggaatgtatccgccagtgcaaggcaaccaaccaacgggtatttatccccagcaaatggctggagatgtctaccagcaacagatgtttggtggccagatgataggttatggctatggtccgcagcctggaggctactacgtgccgaacgccgcatatgcatatgccggtgcaaatgatctttctcagaggatgaatggcctctcgatgcaaggcaacagtctgtatggcacacccgcgtcgtcttccctccagcagcgtaacaggccaagcagacctgaagattcgctctttagtgatcttgttagcatcgccaaacaaagccttgtaaaactgcttccaacaaggctggtaacttgtaaaccatgagtttctgctcatagtatataaaattcttgaaatttttttcctattggaaagtagtgggcgagatttgtatatcctgatattgataaagatgtttacatcttttcaagaaattatattttgtttacaagtattctgtaccattaatgtcttatgtatatacataggagcaaaaaaaaaaaaagactccagtatgc

SEQ ID NO: 155174 - DNA, 2162 bp, Zea Mays
aattttattgtcgtcctcgcccgctttctctgaccgaccggaaaggcgctgcccaaacaaacgcggaggaagaagggaactcgccgcctagggttccgccgccgcctactcttccgccgatcaaggagcgggaatcattgcgcgatgccgcagtcggtgctggtggaacgcgcgacgagcgagtcgctcatcggccctgactggtctctcaaccttgagatctgcgacatcctcaaccacgacccctcgcaagccaaagatgtagtgaagactatcaagaaacggattgcacacaagaactcaaaggtccagcttcttgcattaacgttgctggagaccttgattaaaaattgtggtgattttgttcatatgcaagttgctgagaaggatatgcttcatgaaatggtgaagatagctaagaagaagcctgactatcacgtcaaagagaagatattaattctgatagacacttggcaagaagcttttggtggtgcccgtgcaagatatccccagtattacgcagcatatcaagagatgctgcgtgctggagctgtatttcctcaaaggccggagagtactgtgccaatctatactcctccacagacacagcctctacggaactatccgcctcctgcattgcgtaacactgattatcgacatgatgtgcctgaatcctcttctgcaccagaagtgcctgcattaagcttgacagaaattcagaatgcacgtggggtcatggatgttctttcagagatgttaaatgctatcgatcctggtaacagagagggtctaaggcaggaggtcattgtggaccttgtggaccaatgtcgttcatacaagcaaagagtggtgcagcttgtcaactcaacatcggatgaggacctattaagtcagggccttactttgaatgatgatttacaacgtgttttagcaaagcacgatgcaattgctgctggcatagccattcgattacaaaaaccaaaatcagccccggcccgcgcagacagttctccaacgaagcctgagccgacaaaggaaacagaacaaaggtctgctaaagttgccagtagtgtgactccatttgagcagttagcacttcctgcaccaccatcatcaagtgcttcaaagtctcatggagaatcagctgttagcccaaatattgatttgcttagtggtgatgagttttttaaaccagaacctgttcattcccaagctcttgttcctttagtcactcaggcttcagcttcttcaagccccagtactttagaccttttagacatgttttctgatagcaatgctatcaataacaccagccagaaccctaccatactttctatatctaactcaaatcctaatacatcagtacaagcctatcctgttccacagcaacctgttccaccacaccatccttcaccatatgctaatggcttaaattcagatacaatgacaccctttgatcaaggctctaagttaacctcagcaagttcatggaatgaacagattgcccatggaatgattccaccacagcagtttgcccatggtcaaggtgaacaaagcaacgaccttccactaccaccctgggaagctctgcctgcagaaactgagcaattagaagctgaccatcctggtgggttgtcagctctgccacaatttggagttagtcaaccccagccagtccaaattacacattctgggcagcaagtgttaccatcgcaattaatgccaactggacaaccgggagggcagttccagcctagatttggggctcaacaaccatatgctacagaaaatacgcagtatggaggaatgtatccgccagtgcaaggcaaccaaccaacgggtatttatccccagcaaatggctggagatgtctaccagcaacagatgtttggtggccagatgataggttatggctatggtccgcagcctggaggctactacgtgccgaacgccgcatatgcatatgccggtgcaaatgatctttctcagaggatgaatggcctctcgatgcaaggcaacagtctgtatggcacacccgcgtcgtcttccctccagcagcgtaacaggccaagcagacctgaagattcgctctttagtgatcttgttagcatcgccaaacaaagccttgtaaaactgcttccaacaaggctggtaacttgtaa

SEQ ID NO: 155175 - DNA, 583 bp, Zea Mays
tccctatcggcattgggtcggagggcgcaaggtgctcccagccgtggacagcacccttccctccctcggatgccctgctcgccccagccagggaccatcgcgcagagcgccgtcggcctcttgagcgcgctctccattgctccggcgtttccccctgctgtttcctgcgcccagtttttctcgtcgtgagcagcagcccccaacgcctccgcgcggctcgctgctttgttctgcgcagtgaacagcacgccgtcgacgcccgccgtgtgctcgctgttttgcgcagcccccaatagtgccgtcgaaactcgtgctaacggtcgacgtcgcgcttcgcgccctgcccattcgatgaagcgtcgagccttgtggacagtccatgcggctaaatcccgactcgttcaggttgaatccatgtgattgacttacttgcacatttgtcattgtcctatatatatatatatacatgtatgtgaatatgttgtatgcgaattaaaactcatggaggagaaagtggtacgcgtagatgtgtttgcgattggaatgtcaataagtgtatatgtggctgcgatagttcttttgt

SEQ ID NO: 155176 - DNA, 465 bp, Zea Mays
aatttgtagagactatatctaatggaggagaaagtactatcaatttatgccttgctgtccattaggaagcaactaccatattcttttgcttaattttagttggtacaaataagtggcatcattacttaagtttttatgttaatagaccatcgctgggaattcaaatgcacagaccagtagtttttggtcttcaaggtattgtacttagcagggctgtccaaacaggaccttgtccaaaccttgttgctattttatttggagagaaggcatccatgcactccaatgatgccatgaaattcagttcattcaataagaacttggatgattcataggttactatttaaaatgcttcctttgttggttcattcaataagttctgtttatctatattttggtccacacacggtatgaggtaaagaaaatccataagctgaagcattggtgatttcagtgcttcctttatct

SEQ ID NO: 155177 - DNA, 177 bp, Zea Mays
atggcggcggcatgggcggggctggcttcgtttctcgtcgcggcgcagttggcgtcagcggcgcagatcacggcgccagcgttcctgtgggagcccaaaaactatggtgatgatgcatgtcaatcaaaggtgctatttacttttgacctaccttatgtaggaatttatgatgtgtaa

SEQ ID NO: 155178 - DNA, 1545 bp, Zea Mays
ctaccgtgtgtgcctgtcttctctcctaggataaaaatcacgctgctccattctctggtttcttccagccgctcaccgccggtgagatcgcagccgtcgttcttatcttcttgcgccgctcctctgttgccgcttaagcactggataaaatcctgcgcaccgaggttcttcctcatggcgctcggcctcttcccagcgctaccggccatccctctgctcgccctcgctcctctgttggctcagaccgcacccccttctcggccccatctccatggcgtccggccggatctccagtgccgcgccggcttggagcttccatggccgcatctctttttccctgtgatttcatggcgtccctgcgtcgcatattccctgagctcgtcgccatggctgcacccagctgctcctccatggctcgtctctccttggcacccagccgagcccctccgcacgcccagatgcctgctcgctgccagctcgccctgctctctgttttctctctctgccgcgcccgctgttggttcgctctgctcgcggccagagctccactgcgtcgcgcccaagcttctggcgtcttcctcccctgcgcagagtctcagcctgcttgtcgagcccagccgcccttccctttgattctccctcgcccatggtcgagttcgccccagcgccgtgctctgcgcgcgaccgtttcctgttccctgcgcgcgtcgagctctcgtgccgagtccctctgttgcgtgcccagcctcaagttcctgtgcgcgcgctccactgttccctgggtgagttcctcgctgccacagttgtctggtgtttggcccgcgtcgattcgcgttcgctcatatcgccatcgtcgtgttgtcgctggtgatagcttcgcgtgcgcgtcaaactcccgcgtctaagtctttttcctgctcccttgtgcgcactctgcttcctcgccgagctcgtccctgcgcgccgaggtcgcgcgcagctctcccagctcgctctgtctgcgggccgtgctcccttatcgtggttttctgcttccttgtgatgcgcgcagtgtttcgttgtccctcgtcgtgccgagttctcctctgcacgcagtcgcgtcctgtttcctgcttgccagcgcgccctctcggctcgctcggccttaatccctatctcgtcgtcgatctcgctgtgacttagttcgtctgtcgtgctagtcgctatccgatactgtacctattagctcggatcctgcccagctcgtcgtcgcgtcgtttaccgtcgagtcgtcaaacacgtcatcccctgctcgaaccccacctcaccagcttactctagacttcaatcgaaggtcgtcgtcgttcgtgcatccccaagagatcccaagaatcgggtgaagacgaagttaacagcgcgatattcccccaagcgctcgacaaattgtctggatcggaaaatcgctactgatctcgcggattcgtgaaagctgttgaaatggtaagctaatgaattgtttagaatagtttgaacgttaaataaattaatgtgttattgcgatgctca

SEQ ID NO: 155179 - DNA, 637 bp, Zea Mays
ccccagcgccgtgctctgcgcgcgaccgtttcctgttccctgcgcgcgtcgagctctcgtgccgagtccctctgttgcgtgcccagcctcaagttcctgtgcgcgcgctccactgttccctgggtgagttcctcgctgccacagttgtctggtgtttggcccgcgtcgattcgcgttcgctcatatcgccatcgtcgtgttgtcgctggtgatagcttcgcgtgcgcgtcaaactcccgcgtctaagtctttttcctgctcccttcgcgccctctcggctcgctcggccttaatccctatctcgtcgtcgatctcgctgtgacttagttcgtctgtcgtgctagtcgctatccgatactgtacctattagctcggatcctgcccagctcgtcgtcgcgtcgtttaccgtcgagtcgtcaaacacgtcatcccctgctcgaaccccacctcaccagcttactctagacttcaatcgaaggtcgtcgtcgttcgtgcatccccaagagatcccaagaatcgggtgaagacgaagttaacagcgcgatattcccccaagcgctcgacaaattgtctggatcggaaaatcgctactgatctcgcggattcgtgaaagctgttgaaatggtaagctaatgaa

SEQ ID NO: 155180 - DNA, 1545 bp, Zea Mays
ctaccgtgtgtgcctgtcttctctcctaggataaaaatcacgctgctccattctctggtttcttccagccgctcaccgccggtgagatcgcagccgtcgttcttatcttcttgcgccgctcctctgttgccgcttaagcactggataaaatcctgcgcaccgaggttcttcctcatggcgctcggcctcttcccagcgctaccggccatccctctgctcgccctcgctcctctgttggctcagaccgcgcccccttctcggccccatctccatggcgtccggccggatctccagtgccacgccggcttggagcttccatggccgcatctctttttccctgtgatttcatggcgtccctgcgtcgcatattccctgagctcgtcgccatggctgcacccagctgctcctccatggctcgtctctccttggcacccagccgagcccctccgcacgcccagatgcctgctcgctgccagctcgccctgctctctgttttctctctctgccgcgcccgctgttggttcgctctgctcgcggccagagctccactgcgtcgcgcccaagcttctggcgtcttcctcccctgcgcagagtctcagcctgcttgccgagcccagccgcccttccctttgattctccctcgcccatggtcgagttcgccccagcgccgtgctctgcgcgcgaccgtttcctgttccctgcgcgcgtcgagctctcgtgccgagtccctctgttgcgtgcccagcctcaagttcctgtgcgcgcgctccactgttccctgggtgagttcctcgctgccacagttgtctggtgtttggcccgcgtcgattcgcgttcgctcatatcgccatcgtcgtgttgtcgctggtgatagcttcgcgtgcgcgtcaaactcccgcgtctaagtctttttcctgctcccttgtgtgcactctgcttcctcgccgagctcgtccctgcgcgccgaggtcgcgcgcagctctcccagctcgctctgtctgtgcgccgcgctcccttgtcgtggttttctgcttccttgtcgcgcgcgcagtgtttcgttgtccctcgtcgtgccgagttctcctctgcacgcagtcgcgtcctgtttcctgcttgccagcgcgccctctcggctcgctcggccttaatccctatctcgtcgtcgatctcgccgtgacttagttcgtctgtcgtgctagtcgctgtccgatactgtacctattagctcggatcctgcccagctcgtcgtcgcgtcgtttaccgtcgagtcgtcaaacacgtcatcccctgctcgatccccacctcaccagcttactccagacttcaatcgaaggtcgtcgtcgttcgtgcatccccaagagatcccaagaatcgggtgaagacgaagttaacaacgcgatattcccccaagcgctcgacaaattgtctcgatcgggaaatcgctaccgatctcgcggattcgtgacagctgttgaaacggtaagctaatgaattgtttagaatagttcgaacgttaaataaattaatgtgttagtgcgatgctca

SEQ ID NO: 155181 - DNA, 462 bp, Zea Mays
atggctgtcagcgggtgggggcgcgaatcacggacgcaacagctaggattgcgtcctcgacggctgacaaaggagcggggacgcgaaccacgggcgcgagagcagcggagagcgcggatcgaggccgcaatcccgtctgcgagcagtgattccgctcgacacctcctgccgaattgccttccatgtagagcgcgggagcaggggatggtcacagagaaaggggaggtgcgggaggaggtggcggaccttccatcgacgttgcgaggactgcaggaggtgaataagcgaaccttccaaggactgcgggcgaggagatttggctttccttccattgacggcgcgggcacgggaggaggtgaggttgaggactgcgggtttgccgttgtggcttccattgatggcgcggcaggaggaggagatggcggacgcaacggcgcggggcagataagttaccaaaactaa

SEQ ID NO: 155182 - DNA, 2049 bp, Zea Mays
actacagaaagcatggcaggagcagcagctcaccaaaccactagccacgccgacgacggcagcccggaatggagcgtggccgtgcctgccgccgcggccggccatgagaacaccaaaagcagccgccgggcctgctgcacgcgggcattggtggtgtgtctcttctcgtggttggcggcgccgatggtcagcctcgcgacgtcgtcgtgcctgtggctgttctcgttggcggccgcggcgcgggacagggtggttggcgttgccaggatggcgtggaggatcggcgccgacgaccctcgcaaggtggcgcacgggttcaagatggcgctcgcgctcacactgtgctctgtcttctactacgtcaagccactctacgacttcaccggccagaatgccatgtgggccgtcctgacggtcgtcgtcgtcttcgagtacacagttggtggctgcctgtacaaaggtctgaacagagccatggcaacgatgaccggcgccgcgctggccctcggcgtgcagtggatcgccagcttgtccgacaaggagttggagcccttcatcctcagtggctccctatttgttttcgccgccgcggccacctactccaggttcctcccgacgatgaaggcccgcttcgactacggcgtcaccatcttcatcctcacttacacgctcgtcgcggtgggagggtaccgcgttaacgaggttgccttcatggcacgacaccgcctgacgaccatcgccatcggcgccgtgatctgcttcgccgtctgcgcgctcgtcttcccggtctgggcggggcaggagctccacaaccaggttgcccgcaacatggacaagctggcttccgccgttgagagctgcgtcgaggactacttctcggaggctgctggtgtcgacgtcgtcgccggtgcagttccaaagcccgctctgtcggacaagtcacatgggtacaaggcagtgctgaacgccaaggcctccgaggactcactggccaacctggcgacgtgggaacccgcacacggccggttcggcttccgccacccgtaccatctgtaccagaaagtcggcgcagagatgcgctcctgcgcctactgcgtcgacgccctctctgcctgcgtcgtctcagaggcccaaacgccagcgcacgtcaagaagcacctcgccggcgcctccgccgctctaggccgccattgctcggccatgctccgcgaggcgtcgggctccgttgcctcgatgacaaggtccggtcgcctcgccctcgtcgtaggggacatgaacgccgccgcgctggagctgagggacgagctgagattcctcgcgccgctactggaggaagacgagtccacagacacagagcaggagcaaaacattacaatgtcaccggcaccggcgccttccctcatcgaggcgctgcccctgttcacagcggcctccctcctgctagagatctgcacgagggcggagggcgttgttagcgccgtcgacaacctggccatcatagcgaggttcaacaaggctgaccacggcgaggagactggacacgacgtcgagacggccgtgcccacgaccatgagcaccatgcttacggcagacgtaccgcaagagacggttgcggtcgaccacgggaagacggagacgccaacggatgagagctctgccgaccaaacgcctcgggaccaggtcggcgagctcctcaaggtgctcatgcgacgacgtagcaccaagaagtgggcgcgcggtgacaccaaggtgtgcccgaagccgcccctggacttcgtggtccacgcacccagcccaaggagccggtccatggaactcactgttgcgggacatgcgccggtcgcgccaagtccgaggcaccggtccgtcgagctcaccagccacccgccagtcgcgccgagtccgaggaaccggtcggtggacttcggcagtcatggacctgtcctgccaagccccaggaaccggtccatggatttcggcaaacatggggctgtcttgcctagtcctagccatcgctccatacttgggatggcatgattgggagagaga

SEQ ID NO: 155183 - DNA, 1909 bp, Zea Mays
cgagatcacattaaaactatagttatggtcttctagcttactcggatccaattttaacggcaaaccatagcgaaccgtttacaagcactctatctctcttaactagagcacaacatctaaactcagactaaaaatagaaatcatcccattaacttctagaattactattctaagttctcactaaattaaatattttatttatcctgcattttacacctaaggtgcaccatatcacgcatttatttcacacaattacattaccagaggggctgagatattttagcaagcatctaacacaaatacgacgcatctgctaaacacaagaattattacaactaatgagtctagttaatccaattcgattaaccgaaataataaattggcttaccaagaccgaatggattcgatatccgcgagggcgatgatggttttccaatttagtcatttggtcgagtcccaagagagcgcttacaggcctctctcgaacatcagggatttctcatccaaagcaagtccgactcaaagcttgcgagaacgtcgacagcctccgaataaaatcttcgatcaaacagttgatgagtatagaacggagctttactttctcttccatccgcaattcttggaatctctccatattaactagaactccgtataaatggcgatgattgacttgcttctctatatcttcttgggattcttttgtcggcgtgaatatatgtcggagatgccacgtagggactgacatcaagacgagacgacgaaacaacgacaagctagcaagctgagccacggcgagcgatgtcgacaacaagagcagagctgcacagatctggggctgctgcacgcacgacgcgacgacgaatgacgacaatcggcaaggtcgacgacgttggggtttctgcgataagacaaagtcgagcacatagggcgaccagcttcggatccggagcaggtcgaatgagaagacgcgactgcgcgccatcggcgagcaccagagaaggaatgagcggccatcattgaaacaggactacgcgcgccagagcttggcaagggcgcggcgaggaaattctacggcaacaccatggaggcgagcgaggagcaggggcttcacgacgctggagaagaactcggcacagcggccatgggtagggactcgcggccggcgagctggagaccacggctgggccagcgcagcacggggtcgggccagggtactccggccaacagagggacgcgcgcagggagctgggcgtggcgtgctggggaggagaagccgagggggctgcgtagtggccaggcgagcaggggcaaacagggagcggggcgctggaatccaagccaggggcgagctccatggccgggcagagggaactggaagggcgcggcaagctccacgacgagaagggggcgcggctggcgtccatgggcgagcgcgggggagaagcatctcctgccgccgtcatccacgggagcaggaatcggtgtcgctgtaaggagaccaccgaccatcagcgtggaagaacgctgggcgagctccagggcgcgactatggaggagcgaagtgccgggggcgagctcggccggtggcggctgtgcgcagggacctggggcgcatcgctgggagcttgcgggaggtagaggaagggccgctgggtgagctcaacggcggccaaggtagaggaagggagctccacgagcgggatccgagcagggagaagaaggttgggcgtcttgaaccagcgaggagatggtaagggagagtcgtcggcggacagaggggcaggggagcacatgcccaacgcttaggacgaaccggcgagcacagagccatggcctaggtgccacggacgccggagctggggaaggagatggaattgggtgcatggcagcttgggattgagctcggcga

SEQ ID NO: 155184 - DNA, 1760 bp, Zea Mays
ccttaatcctatactttcatcgggcgcggcgtgccccctcgcctccaaggctccaacgcatcaatcaatagagcgtgcgcgctgtggcatggagcacaaggatgggggcacagcttctgctagtggtctgcccgccggaagcagcttgtgctcgggctcgccgttgctggacgcgccgctcctccgccgcctctacgctgggcaaatccttgccagatggggcgcgagacatcctctctcgtggtgctcggtcccgtggtggggacgctcgttggaagggccacataccttcaggttttgggcatctggctgctgtcgcaaagcatatccttgattgtcgctggaacctcggtgaccaccctgctcatgtatgccaacctgagagccacaaggttcccggcattcatggcgctggtcgccgttaccaacgtctccggcgctctagctgccctctcagctctcgccggcaccatactgatcgagagagaatgggtggtggtgatctcgagcggccatcctccgtcggtgcggacggggatcaactcggtggtccgacggatcgacctgggctgctcgttgctggcccccgtgctgtcggctctcgtcatcagcctcgcgtcgactcaggcctctgcggctgtgctggcgctgtccaccgccgcctcggcggggctgcagtactgcctcttcgtctccgtctacaacggcgtgcccgccctcgccgcgccaagacagcccagagcttcggacgcagagcgcccgccgccagtaccgatgaccgtcgcgccggccgaggccgagccgacgcaggcgttggattggagggcgaggctggcagataagctctccgtcgcgtccggttgggagtcgtgggtggtgtacgcgaggcaggacgtcgcgcttcccggggtggcgctcgcattcctctacttcacagttctcagctttggtacgctgatgaccgcgacacttgactggaaaggcatacctgcatacgtgatcagtttggcgcggggcttcagcgccattgttgggatcggagcgaccctgctgtacccgctcgtgcactcccgggttaccacgctccggacggggctgtggtccatctggatgcagtggtgctgcctgctgctgtgcgtggcctccgtctgggcggccaccggcgtggcgtccgcctggatgctcatggccggcgtggcgacctcgcgcctgggcctctggacgttcgacctcgccgtgctgcagctgatgcaggacggcgtgcccgaccacgagcggtgcgtcgtgggcggtgtgcagaatgcgctgcagtccgtgttcgatctgctcacctacgtcgtggccatcgtcatctccgacccaaaggatttcagcaagatgatcgtgctctccttctcccttgttacctgcgccgcagtcatgtacacggtgcacgcctaccgagcacagaaagcagcgtgcacctcttccacctcgacatgacgtgatcctggaaaagaagtgcgagactgcaaggtgtagggatgaaaactgagcggcttatgtatgattgattgcctgcatggttttatcctagaccactgtatgtgttaattttatctgaacctatgtttggttacttgtacgtggagacacagacttagagtggtaatggatcacgatccgaataccgcttcacaaaaagtgggagtacttaaataattttagttcaaaaataaataggaataggaccggaccctaatccgatttgatccttaaaa

SEQ ID NO: 155185 - DNA, 845 bp, Zea Mays
agtcacagatatgatgaatgagtattaatttgccaccaagtggcaattgatgtgcagctttggtacgctgatgaccgcgacacttgactggaaaggcatacctgcatacgtgatcagtttggcgcggggcttcagcgccattgttgggatcggagcgaccctgctgtacccgctcgtgcactcccgggttaccacgctccggacggggctgtggtccatctggatgcagtggtgctgcctgctgctgtgcgtggcctccgtctgggcggccaccggcgtggcgtccgcctggatgctcatggccggcgtggcgacctcgcgcctgggcctctggacgttcgacctcgccgtgctgcagctgatgcaggacggcgtgcccgaccacgagcggtgcgtcgtgggcggtgtgcagaatgcgctgcagtccgtgttcgatctgctcacctacgtcgtggccatcgtcatctccgacccaaaggatttcagcaagatgatcgtgctctccttctcccttgttacctgcgccgcagtcatgtacacggtgcacgcctaccgagcacagaaagcagcgtgcacctcttccacctcgacatgacgtgatcctggaaaagaagtgcgagactgcaaggtgtagggatgaaaactgagcggcttatgtatgattgattgcctgcatggttttatcctagaccactgtatgtgttaattttatctgaacctatgtttggttacttgtacgtggagacacagacttagagtggtaatggatcacgatccgaataccgcttcacaaaaagtgggagtacttaaataattttagttcaaaaataaataggaataggacc

SEQ ID NO: 155186 - DNA, 2172 bp, Zea Mays
ggctgttcccgggcaaactcgccaccaattgccacgctgggtgatgctagcttagcagcttttttgtatcttcccagttgtttgaactatatggccgctcctctcctccatgttccatgccgcctcggctgcaaggatcataaacaaacttattcactttttatccgataataaatacgaccgacggctgcatgcgtgagaagagatcaagccaccgctagtcgtcgcggtactcaagtgagatcgagccgggggattcgggatcaggccggtacggggggcgaccgaggaccgccgatggccgcggctccagacatggacgaacaagatgcggcaatcgagggagggcagctcgtcgtgcctcttctcggaagccgaagtgcaagcaccgccacgggctcgccgtcgcaggacgcgtcctcgctccgccgcctctacgccggccacgccctcgccagatggggcgccaggatgtgggagttctcagttgggctgtacatgatccgcatctggccaggctcgctgctcttcactgcgatttacggcgtcgtcgagtcgtcctccgtcgcggtgtttggtcccacagttggcacactggtcgataacctcacgtaccttcaggttcttggcctatggcttctagtccaaagcctgtccttcattgtcgccggagcctcagtaaccgccctgcttgtttacgacgacctgaaagccacaagcttccctgttttcatggcgctggtcatcatgaccaacgtggcaggtgcgctagcagcgctctcaacgcttgccggaaccatactgatcgagagagaatgggtggtggtgatctccagcaggcacccacctgcagtgctgacggggatcaactcggtggtccggcggatcgacctgagctgcaagctgctggcccctgtcttctccggcctcgtcatcagcttcgtgtcggcgcaggcctccgcggcggctctggcgttgtggaacgtcgcctcggtggggctggagtactggctcttcgtttctgtgtacaatggcgtgccagcgctcgctgagagcagccggctgagaacagctggtgcaaatgcaagtgaggccatggtgctgccatcgtcgtcgtcgtcggagaacgtggtgccggccgataaggagctggattggagggttaggatgacggagcagctatccatcataccatgctgggagtcatgggtggtgtacctgaggcaggacgtggcgctcccaggcgtcgccctcgccttcctctactttagcgttctgagcttcggcacgctgatgacggcgaccctggactgggaaggcatacctgcgtacgtcatcagtttggcaaggggcttcagcgccatcgttggcatcggcgcaacgctgctgtaccctgtggtgcactcatgggtgtccacactacggacaggactgtggtccatttggatgcaatggtgctgcctgctggtgtgcgtcgcttccatctgggcggcgagcgacgtggcgtcggcgtggatgctgatggccggcgtcgccgcgtcgcgcctagggctctggatgttcgacctcgccgtgatgcagctgatgcaggatggcgtgcccgaccacgagcgctgcgtcgtgggcggggtgcagaattcgctgcagtccgtgttcgatctgctcacctatatcatgggcatcatcatctccgaccccagggatttcagcgagctggtcgtgttgtccttcttcctggtgacctgcgctgcagccatgtacacgctgcacgtctaccgcgtgcgcaagcacctcttccacttcgacaagatcctagccaagatcagctggtgagcaacctggcaccatatatatttctttgctcttggcgactggaaattgctgatttgacactgggtttgaaacaaccagcacggagtatactggttgctcttgtaaacagttgtgttttttccatcttctggtgtttagaaaattgtgtaatctaggaacatttttaccaagtatccacaagtatccactgtaggtgaactggaatttcctaaaccaacaggagttgagactgaagggttctaacccaaggtggtgtggttggatcagggcttttgtgaaaatgtggactttaaagttataatgagaaaatgagttaaaacaacaagatgatcctttatc

SEQ ID NO: 155187 - DNA, 249 bp, Zea Mays
cagaaatggtagagatgctactttgcatgaaagattgggaactaggagaagctagaggccaacactctacacaggacgaagaccttgaagaagcatttgaaggactttatcctgatgacccttaggcctagggccctacactttgtaatctcctactattcttcctattcctactctattctagtgatctggacatctggtgatgtaaactgtactcttagacatgaacttattaaatcagagctgggc

SEQ ID NO: 155188 - DNA, 653 bp, Zea Mays
gtagtgctgcccctattaacttagaggagggtgctgctaccaacaatggtactggagatgcaaatacttcagaaaatgttgatggtaagaagcataaaagaatttgcacatctaaagtgtggcaggattttgaaccactataccacactgtagacggcaagaggatcaggtatggtggtaagtgtcactggtgcaaatgtacattgactgctgtgtctactagtggtactggtcatttgcttaggcatcaacgtgattgcaaagttaagctttctaagcagggcaagcagtcagtccttaagtttaaccctgatggttccatgcgtaactgggattactgtcctgatcgtgctagaactcagatgtgtaggttgattgctaggcttgatcttccacttaattttgctgagtcacctgcttttgaggagtatattagactatctcataatcctgtctttaagaaagtatctcatcaaactactgctagggactttgtcaagttctttaatgatcgtcgtaagatagttgttgagtgcttgcaatctgtttcttctattgcaattacatctgatatttggagtggtaatgctaaggaagactatcttagtgtggttgctcattatgtttctaaggactgggcattagaaaagagg

SEQ ID NO: 155189 - DNA, 100 bp, Zea Mays
ggagagggcaaccgaaagcagagagacacctgacatcatcattactagctaccatgataagatcatcatataaacctagctacactgtcgtacctaccat

SEQ ID NO: 155190 - DNA, 1065 bp, Zea Mays
atggatggtgcagcggcggcggcgactggaagcggcggcggccaccgcgtcgtgggctcgaggaacgaggagcacgggaagtacctgtcggagtcgagctgctgccccacggactggctggggctgccggcgggggtcaagttcgacccgacggatcaggagctgattgagcacctgcaggccaaggtccggcctgcctcggcagcggcgccgtcgcaccctctgatcgacgagttcatacccaccattgaaggggaggacggcatatgctacacccatcctgagaggctgccaggtttgacgaaggacggcctgagcaggcacttcttccaccggccatccaaggcttacactaccggcactcgcaagcgccgtaagatccagccgcccgtagccgatgcctcatcatcctccgccctgcccgcgcagcagcagcatcagcagcagcagcggagcgagacgcggtggcacaagaccggcaagacgcggccggtggtcgtcgccgggcggcagcgcgggtgcaagaagatcctggtgctctacacgaacttcggcaagaaccgcaagcccgacaagaccaactgggtgatgcaccagtaccacctcggcgacaaagaggaggagcgcgagggcgagctcgtcgtgtccaagatcttctaccagacgcagccgaggcagtgtggcgtcgcggcggagcctgccgccacagccgcctcctctgacacggtggaggaggctgctgacccgccggcgccggagggcttggtagtgccgccaccaccagatgtagccggtgccttccaaggcgccgctggcattgatgagttcagctttgcgcagttcaggagcagcttcgaggaggaggaggatgagcagctacaccaacaacctcaaaattttgatgggcgacggtcgacttctgggctcgaagaggttattatgggatgtagttcgaggaggtccaaaagagcggaagcatctggcccaggtggaaacaaggagagcagaggatggcagtacccatccttctggccatctggcagccaacaggatcatcatgggtag

SEQ ID NO: 155191 - DNA, 672 bp, Zea Mays
atggcatttaggggtatcttgagttctctccttgtcacgtactattatgtctggttgctcatgggattagcatatagaagaaaatgtctgagaatagaaagaaggttaagaaatagagagcgtaggatggagaatttaaatgaactcattcgtgagagtgatagaaaatgtattagtgagcttcgtatggatagaagaactttctttattttgtgtgagatgcttagagatgttggtgggctaaaggacacacgcaatatgaccctagaggagatagtggctcattttttgtatacgttggctcatcatttgaagaaccgaacaattggaaggtttttctttcgaagcggcgagacggttagtaggcagttcaacttatgccttctagctgttctaaagttgcaacatttgcttcttaagacccctgagccaattccagagaatagcattgataatacttggaaaaactttaagaattgtttgggtgcattagacggaaccgctatcaaggtaactgtgccaacacatctaaaaggaagatataggtcaaggaaagcggacattgtgacaaatgtattgggtgtttgtgcacccgatatgcaattcatctatatgctacctggttgggagggttcagcgcatgatggtcgtgtgctgcgtgatgctatctcg

SEQ ID NO: 155192 - DNA, 885 bp, Zea Mays
atgggtctattaggttggtttgtaactttgtatcaaaacatgtacttttttgttgcaaaagaacacacatattgggatgaaattggcatagcttacaatggaggataatccaaactattttcaggcgccttttgcaattgccttctaccagaaggcttgcggcttgagtcaactgaaacaaagcatcttggagactgtcgtttctcagatggttccaataccaccagcaacgataactctgacgaagatgaattggaagataaacacctgcttccgactacttctgttggtgaagacacaattgtaaaagaaattcacagatgaatttctggtgaagccttgcagtgatttctctatgtattctaaaatgtaatgggtttcaatactcattgtgcagcttgtcgttcattatgtatattgtcattgtattttaaaatgtcatgtgctctttctgttgtgctctgaaattttgtgtacatttggtgggtagtctgtatttatggttgagttcatttcacttgttgaatgattgaataggtggatgaatgagagaataaaaattcttatgtagaagcactcttgacttgattttcaaattttaacccaaagacatcaaaagctctaaaaggggtcaaatcaagaatacttcaatcaaatgtcgtttggttgttccaaacaaattcttggggagattatgatctatcaggccaaaataaacttgatttggactttggaaagtacgaggaaaaaacaaacgggaggcacaagagtagagcggtggcgccactcaaatgttttggcattgttgggacgcgacagatctccccatccaggtaccaagtaaggcttgagtattttctctataattctgatctctaaagtggg

SEQ ID NO: 155193 - DNA, 1526 bp, Zea Mays
ccatggactcactttgcagatacacacctatattctattgctattcggaccacattctcctgaccccaccgttcagtcaatgtaccgtgaacctctcccggaacacgctctcgatccgctcggttggtcgtcgtgtcgactggttcgtctccatccgcctctcgtccccttctgctccatcgaaggtccctcgcgatctcgcctcgagtagctagtgcctcgcgcgccgggggcgactgcgcgcgcggtcagtcagtcttcggcgtgcggggcgcgcgcgagatctcctcagaggtaggggagaaaatcggtgagggtcggcgggcctgatgggcggggcggtctccggtggcgcggcggttggggatgcggcgggggcggcaacttacccggtggttctcaacgtgtacgacctgacgccggtcaacaactacctccactggggcgggcttggcatcttccactctgccgtcgaagttcatggatcggagtacagttttggagcacatgatcacccatcgagtggagtttttgaggtggaaccaaagagctgcccagggttcatatacagatgtacggttttcataggccacacaactctgaattccttggaatttcgagaattcattcagaggatggcctcagaataccatggagatacctaccacctcatttccaagaactgtaaccactttacagatgatcttagcaccagattaacaggaaaatcaattcctggttgggtcaatcgacttgcaaggctaggcgccttttgcaattgccttctaccagaaggcttgcggcttgagtcaactgaaacaaagcatcttggagactgtcgtttctcagatggttccaataccaccagcaacgataactctgacgaagatgaattggaagataaacacctgcttccgactacttctgttggtgaagacacaattgtaaaagaaattcacagatgaatttctggtgaagccttgcagtgatttctctatgtattctaaaatgtaatgggtttcaatactcattgtgcagcttgtcgttcattatgtatattgtcattgtattttaaaatgtcatgtgctctttctgttgtgctctgaaattttgtgtacatttggtgggtagtctgtatttatggttgagttcatttcacttgttgaatgattgaataggtggatgaatgagagaataaaaattcttatgtagaagcactcttgacttgattttcaaattttaacccaaagacatcaaaagctctaaaaggggtcaaatcaagaatacttcaatcaaatgtcgtttggttgttccaaacaaattcttggggagattatgatctatcaggccaaaataaacttgatttggactttggaaagtacgaggaaaaaacaaacgggaggcacaagagtagagcggtggcgccactcaaatgttttggcattgttgggacgcgacagatctccccatccaggtaccaagtaaggcttgagtattttctctataattctgatctctaaagtggg

SEQ ID NO: 155194 - DNA, 359 bp, Zea Mays
tttctctccatttcttccattagggtaatgaatgtgattttcatcacaatgagggtgcccggatgaaccctatgaactattggtactggttgaatggcagatgtttgaatcccaagtgtgcattttgccatcctctatttactatcaaatttataactatttgtctatcttttctattaacattattttctcaacttttttttgcttcctttgtcttctccaaccaattgatggtctctttggtgccccaacttttgcactacctccggtttctgcgcactttggtgtctataacttgggcaagcagatggtctgaggttgttacttctagaaagggaactccttgaaaggtgatagat

SEQ ID NO: 155195 - DNA, 112 bp, Zea Mays
aaaatatactaatacctataagtttaaatatacatatggtagatgttgttatattttttatcttatatcactagtaataggagacaattacaaaattatcacattaattctc

SEQ ID NO: 155196 - DNA, 3355 bp, Zea Mays
aaatacttggccagctggtatattgaccttctggacatcaatttgcatattgttccttgttcttgagattaccacgttacccaagcagccacaccttactaagaaggtagggtttgaaatcatggatttgtttacaattgactcggatagtgagtcatatactgggaccagtgacagtgaagaccaagaatgtgaatttacatatagtgaccatgcccaaaacatcttgtccagtctggatgagagcattggcaagattgataattttttgacttttgaaagggggtttctgcatggggatatagtctgccctgtttctgatccctcaggtcagctgggacgtgttgttggtgttgcaatgtttgttgacttggagacaagctcaggtgacataattaaagatgtaaacagcaagaagctatcaagagtgagatcttttgtttccggtgactgcgttgttatggggccatggattggacgagtgataagagcatttgatcttgtcacacttttattcagtgatggagcaaagtgtgaaatcctgttaagggattcggatgtactgaagcccattcctcctgttctttttgaagatgcaccttacttttattatcctggccaacgtgtgaggatagtcgatccgtcagtttccaagtcagcaacatggttatgtggatcatggaggcccagtagagatgatggtattgtctctcatgtcgatgtagggctggtgcatgtgaactggatcacatctgtaaccaatgtttggggagataaatcatcaagtcctccaaacattcaggacccaaagaagctcaccttgctgtcatgtttcccttacgctaattggcaactaggtgattggtgtgctcttatgactgacaacaatggatgcctctggatggattctggcaagtcttgtattcttagtgaagaccagaagtgtgactcttatgcacacatgtattttgaaagttatggttcagattgttctcaaacatttgttgttgccaagacaaagagcactgttgatgttctgtggcagaatggaactgtatctcttggtctagaaccccaggcattactccctgtgagtacccttggtgaccatgatttttggccaggtcaatttgtcctagaaaaactgactgtagaagatgctgcaagatgtccgcgaacggcaatagtgagtgatgtggatgcactggagcgaacagtaaatgtaaaatggattggtccagcacatagtgacattgtcagctatggaagtgaccctgcagtggagactgtaagtgtttatgagctagtagagcacccagatttctccttctgcactggcgaggtcgttatcaggtcagctatgaacatagacaagtctgaagcagatcccacaaatgggtcattggcaagcaaagaatcattggttacctcctctggcttcttatcatgcaccggaaatgtacttgggtacaaggacaatggaattgaagtgcaatgggctaatggtgttatatccaaggtgcaacattttgagataattggattggacaagcttcttgataatagttctgtagaatcaatgaatgaggaacatacaattggtgattcattagacgaggctgagcaggaggaattgaaccatgagattgctctggagtctactgaagactgcactggctccttgtgcaaagccactgcttttctatttcccaagacagcttttgacttcctgacaaatgtggctgctagtttgtttggtattcatggttctccatctccaagctcagttttggtagatcctcaatatgaaattgtgaagatggcagaaatgcagccatgtgcagaagaaacaccaaaagaagaacagatagtgaagtttgtggcgcagattgacaagccaattctctcttcagaagatgccatctcaaaaagattcgatgtagtcactgactgtttggatcatcattttgtgaaggaaaatggccatgaaagtgttacaagaggttggttgaagaaggtgcgactggaatggaacatcctgcaaaatgacctaccagatggtattcatgtgagagtttatgaggaaaggatggatcttctgagggcttgcatcgttggggcacctggaacaccttaccatgacaatctttttttcttcgatattttctttcctcctgattacccccatgaaccaccttctgttcactatcactctggtggtctccgcctgaatccaaatctgtatgagtcgggaaaagtgtgcctcagcctcctgaagacatggacaggcactggtaacgaagtgtggaatgctgagagctcaactgttcttcagctgctgttatcgcttcaggcccttgttctcaacgaaaaaccttacttcaacgaggcgggatacgacaaatttgtgggcaaggctgatggagagaagaactccatcacgtacaatgagaatgccttccttctgtcatgcaaatccatgatgtatgttttacgcaagcctccaaagcattttgagacgttggtcaaggagcatttcacctgccgtgccccgcacatcctggatgcctgcgaggcttatcttgggggcgatctcgtcggacacgcgcacgacaaagcatacgtagcagaggacggcaacaagaactgctcaaccggtttcaagataatgcttggtaagcttctgccgaagctcgttactgccttctgtgaggccggtatcaccagcgaccggtaaaaccagcgcaagcctgctctctgctgcatcagcaatggaattgggaccctttattatattgcgcgtgtatattcgatgcttgtgtattccaaataaaatggcgcctggtttgtgtgttacttgtgcctgtcttgtaaatgtgaaacagtatatacagatgattgctgaactgatatgcttggtcttgtaaatgcggaacggtatgtacgcatgattgctggtgtttatgttgctaagctgaaggcagctaaacactcaagtgtttgggtttgggctgtcttctgcggtcagtgtgaaataaaatgtaaatgtgtgttgttcaatcgttttggactattggcatagcagctgtgtattcatatatttgctcatattgcaatctgaaatacgaaggcaaggggatccattgttgccgtgctgtttatcttgtatatggatgtgctggattgatttttatttttattttttaatacaatttattgcgcaaattacataaatatctcgaaaattcacactaccgaaaaccataggttgtcatggggctaaataacattttggggaaaaacaccataaataagtgaaataggtaatgtttaatttttaacatctatttcaaaa

SEQ ID NO: 155197 - DNA, 582 bp, Zea Mays
atgcctccggtgaattcgttcgtcctcatgcctctgctggatttgtttgtcctcatacatccgtttgttgtgtttttggtgaggggctgtggtgaccctgagagcgagtttgagagtctgaggagggactgggaggtgctgtgtagtgataagctgggcctgagtctcgagttgggttcatttgcagctggagtaatgatatcaacaacagaccttgcgcaacatactcttgaacaaatcgaacctatccgcaacttattcgctgctcttttccttgccagcattgggatgctaattaatgtccatttcttgtggaaccatgtggatatactccttgcagcggtaattttggtgatcaccgtaaagacatttattgttgctattgtcgtaaaagggtttgggtatagcaacaaaacatctcttcttgtaagtctgtttttcatgtctttctgaatgcactcacatctgccggtgctcttaaaatcacattaaccgtgtttttctccataggtcggcatgtctcttgcacaaataggagagtttgcttttgttctcctaagccgtgcttcaagtatccatctc

SEQ ID NO: 155198 - DNA, 112 bp, Zea Mays
cggaaaggaaacatggaatgagaatgggcagaacacggaatggcagcctaccccttactgccttaataagtagtagagatatagttgagggacattcttaaggaagtgtaag

SEQ ID NO: 155199 - DNA, 204 bp, Zea Mays
atggagcaaatatccaacttgtcaataagtatcctcccacccgccggatcaacgagacggaacaatgagctgataagtgttgattttccacttcctgtcctccctacaaccccaatcttgttcccagcagcaaaagtgcaagtgattcctttgaggacaagcggcgcatttggacggtatcttatctgctcatggagtacatga

SEQ ID NO: 155200 - DNA, 1920 bp, Zea Mays
ggagaaacctgtagaacaacgccgcctacggccctagtctctctcatgtgcatctctgttgcaatgtccgtgcctgattgctgctgccatgccagtttcaggcccttctttttttaaaaaaaaatcggtatctagttatctacaacgtttgacacctcctcccggacctcaagatgaccggcaacgcgtcttatcagcatctgggactgggagtcgacgccacgatgcgcagctgcttcgccagcggcgacggcagtgttatcagcagcgccgacgcgcccttcttccacgtcccggagtacacactgcacggcggcggcggctttgggtttggcgaacccgcagcggacgtcgccgcctcgagcttcttggcggatggttcggtgctgctcgccggccagctgctccgtgccaccgcactgcagagcgtgtcgccggaggagaggcacggtgcctactacggcgtcacgggcgggtcgtcgtcgtacggcccgtcgccctgggatgtcaccgttgctcacgcgcccagcaggatgaccaagcagcctgtcgctggagagccggaaggcggctggatccacgagtcttcgtactactgcccggcgacgtggttctctggcgacggcttccgggacccgttcgccggggcggcggcgagcgagttgtcgctcaggctgcgcgctgggtcctccccgacggcaggtgcggcgagcgtgagcctgccggatcagtcctcggaggtgagctgctccggcttgacgcattggagtagcggcggcggccccggcatgttccagcttccttgcggcggcgccggacaggtggcggtggcggcacgtccgggccccatgcacttctcgcaggtcctgtcgcggtggtccgggtacgcggacgtcacgcagcaggtgttggacgagttcgtcatccgcctgctgcaagacgtggccgggttcgccggcggcggtgaggcgagctgcccgctgccatcgtcaagttattgctccaagacgacgtcatccaacccgaacccgtcggtgtttgttagctcggaagagcaccacaatgagctcaagaacgacttccagaaactgctacagataatggaccaacggtgcaagcaatgcctggacgagatccagaatgcggcgtcgaagtacggcagccttgtgcgcccgggcggcggcggcggcgccctctcgacgctgtttgcgcagcgcgcggtgtcagcgacgcaccggaggctcagggcgcggatcaccggcgagatcgcggcggccacgcggggaggtaatcagccgtcgtcgtcgtcgtcgctgtcgctggccgacagggagcgcagctgggagtcggccttcatccagaagcactgggcgctgcggcagctcaggcgcggcgaccagcaatcgtggcgcccgcagcgcggcctgccggagaagtccgtggccgtgctcaaagcctggatgttcgagaacttcctccgcccgtacccgagagacaaggagaaggagatgttagcagccaggagcggactgagcaggagccaggtctccaactggttcatcaacgcccgcgttcggctgtggaagccgatgatagaggagatgtacgaggatctcaagaaggcctccgcaggaataatggaggcctgaacaattaagtcagcagcagggatgcaggtatataaagataagatggctgtttccagatacaagcatcgctgcatgccaccctgcgatctacccatatatatttgtaatctccctggcgtgtttatatagaactgccggagtctgaatcccgtgccggtagtgaagccggatcatcgccagttcatttaatttggcgcttgcatgctgttggtcgagtggaactaagatttcttgttatttatttaaccttaaaattccgatcaaatgactc

SEQ ID NO: 155201 - DNA, 2262 bp, Zea Mays
ccgcatccacacccacacctcaccccccaccacacgcacgcacgcacgcaccaacataggcaaaccattcgttctccctgctgccgttttattaggaaactctcccctttccgttttagcttagtgtccagctgcaaacttctccccccagcttctcttgctcagtgtgcatctctctttgtatttcactgtgctggcctgctttgttccttcgttctggttactattggttgctgcttccaagtgacgtaccagagtggtggttggcgtttcagtatgatttgataaggttacctttgcgtataggagtatttttctttggtggggaggtgcgggtaggacgagcaatcttctgaccttgtccggaccggtgttcatgtcgccactatttattcattcattcatccatccattttattctaatcgcgccgctgcgttcagtttcaggcccttctttttttaaaaaaaaatcggtatctagttatctacaacgtttgacacctcctcccggacctcaagatgaccggcaacgcgtcttatcagcatctgggactgggagtcgacgccacgatgcgcagctgcttcgccagcggcgacggcagtgttatcagcagcgccgacgcgcccttcttccacgtcccggagtacacactgcacggcggcggcggctttgggtttggcgaacccgcagcggacgtcgccgcctcgagcttcttggcggatggttcggtgctgctcgccggccagctgctccgtgccaccgcactgcagagcgtgtcgccggaggagaggcacggtgcctactacggcgtcacgggcgggtcgtcgtcgtacggcccgtcgccctgggatgtcaccgttgctcacgcgcccagcaggatgaccaagcagcctgtcgctggagagccggaaggcggctggatccacgagtcttcgtactactgcccggcgacgtggttctctggcgacggcttccgggacccgttcgccggggcggcggcgagcgagttgtcgctcaggctgcgcgctgggtcctccccgacggcaggtgcggcgagcgtgagcctgccggatcagtcctcggaggtgagctgctccggcttgacgcattggagtagcggcggcggccccggcatgttccagcttccttgcggcggcgccggacaggtggcggtggcggcacgtccgggccccatgcacttctcgcaggtcctgtcgcggtggtccgggtacgcggacgtcacgcagcaggtgttggacgagttcgtcatccgcctgctgcaagacgtggccgggttcgccggcggcggtgaggcgagctgcccgctgccatcgtcaagttattgctccaagacgacgtcatccaacccgaacccgtcggtgtttgttagctcggaagagcaccacaatgagctcaagaacgacttccagaaactgctacagataatggaccaacggtgcaagcaatgcctggacgagatccagaatgcggcgtcgaagtacggcagccttgtgcgcccgggcggcggcggcggcgccctctcgacgctgtttgcgcagcgcgcggtgtcagcgacgcaccggaggctcagggcgcggatcaccggcgagatcgcggcggccacgcggggaggtaatcagccgtcgtcgtcgtcgtcgctgtcgctggccgacagggagcgcagctgggagtcggccttcatccagaagcactgggcgctgcggcagctcaggcgcggcgaccagcaatcgtggcgcccgcagcgcggcctgccggagaagtccgtggccgtgctcaaagcctggatgttcgagaacttcctccgcccgtacccgagagacaaggagaaggagatgttagcagccaggagcggactgagcaggagccaggtacagtctccaactggttcatcaacgcccgcgttcggctgtggaagccgatgatagaggagatgtacgaggatctcaagaaggcctccgcaggaataatggaggcctgaacaattaagtcagcagcagggatgcaggtatataaagataagatggctgtttccagatacaagcatcgctgcatgccaccctgcgatctacccatatatatttgtaatctccctggcgtgtttatatagaactgccggagtctgaatcccgtgccggtagtgaagccggatcatcgccagttcatttaatttggcgcttgcatgctgttggtcgagtggaactaagatttcttgttatttatttaaccttaaaattccgatc

SEQ ID NO: 155202 - DNA, 1741 bp, Zea Mays
ccgcatccacacccacacctcaccccccaccacacgcacgcacgcacgcaccaacataggcaaaccattcgttctccctgctgccgttttattaggaaactctcccctttccgttttagcttagtgtccagctgcaaacttctccccccagcttctcttgctcagtgtgcatctctctttgtatttcactgtgctggcctgctttgttccttcgttctggttactattggttgctgcttccaagtgacgtaccagagtggtggttggcgtttcagtatgatttgataagcatctgggactgggagtcgacgccacgatgcgcagctgcttcgccagcggcgacggcagtgttatcagcagcgccgacgcgcccttcttccacgtcccggagtacacactgcacggcggcggcggctttgggtttggcgaacccgcagcggacgtcgccgcctcgagcttcttggcggatggttcggtgctgctcgccggccagctgctccgtgccaccgcactgcagagcgtgtcgccggaggagaggcacggtgcctactacggcgtcacgggcgggtcgtcgtcgtacggcccgtcgccctgggatgtcaccgttgctcacgcgcccagcaggatgaccaagcagcctgtcgctggagagccggaaggcggctggatccacgagtcttcgtactactgcccggcgacgtggttctctggcgacggcttccgggacccgttcgccggggcggcggcgagcgagttgtcgctcaggctgcgcgctgggtcctccccgacggcaggtgcggcgagcgtgagcctgccggatcagtcctcggaggtgagctgctccggcttgacgcattggagtagcggcggcggccccggcatgttccagcttccttgcggcggcgccggacaggtggcggtggcggcacgtccgggccccatgcacttctcgcaggtcctgtcgcggtggtccgggtacgcggacgtcacgcagcaggtgttggacgagttcgtcatccgcctgctgcaagacgtggccgggttcgccggcggcggtgaggcgagctgcccgctgccatcgtcaagttattgctccaagacgacgtcatccaacccgaacccgtcggtgtttgttagctcggaagagcaccacaatgagctcaagaacgacttccagaaactgctacagataatggaccaacggtgcaagcaatgcctggacgagatccagaatgcggcgtcgaagtacggcagccttgtgcgcccgggcggcggcggcggcgccctctcgacgctgtttgcgcagcgcgcggtgtcagcgacgcaccggaggctcagggcgcggatcaccggcgagatcgcggcggccacgcggggaggtaatcagccgtcgtcgtcgtcgtcgctgtcgctggccgacagggagcgcagctgggagtcggccttcatccagaagcactgggcgctgcggcagctcaggcgcggcgaccagcaatcgtggcgcccgcagcgcggcctgccggagaagtccgtggccgtgctcaaagcctggatgttcgagaacttcctccgcccgtacccgagagacaaggagaaggagatgttagcagccaggagcggactgagcaggagccaggtctccaactggttcatcaacgcccgcgttcggctgtggaagccgatgatagaggagatgtacgaggatctcaagaaggcctccgcaggaataatggaggcctga

SEQ ID NO: 155203 - DNA, 2334 bp, Zea Mays
atggccggctctggagagtcgccggcgatggaaggagatggcgttcgtcttgatccagagatagagggaggagttgatggtaactcactggtcataccacctcctgctctattgggtcctgtgatcgccgagatgagcataggggaagaaggagaacaaaaggttcgacctcctatgtccaatattagctctagggagatggatacgcctcaaatactgcattcacataaatacagagagaagacattcagtaagtggataaattgctcacgtgaagctgcaaaaattgaactggtaaacttggagcataaccatgagttcataactgacgaagcagagaaacaacatttacgttgcaacaaaagtagggatgttgagttcataaattttgttgatgcaatgcatgatagccgagtgccgcagcattgcatagttgattttatatcagaaatgcatgatgggccggagaacgtaccgctagacaatgatgggaaaatagtgagtattttttggtcacacgcaagtatgcagggggaatatgcagattatggtgatgctgtgacatttgatataacacacaagacaaatatatatgataaaccactgggcatgtttgttggagctaacaaccatctgcagtgtacagtgtttggatttgttttgttgggagatgaaacagtacagacttttgaatgggctttcaattcattcaaaacatgtatgggatccgagggtccaagagttatgcttacagatcaagatcctgcaatgccaattgctctaagaactgtatttccaaaaacagttcacagaatgtgtttatggcatatacagaacagatttatgccattcctaaatgagatatatgcaaggtttgctgttaaggattttaaaacaacattccagtctattatacatcatccattaactcctcatgagtttgaatgtgcctgggaaatgatgctagaggagttcaatcttcatgaagatatgactctacgcaaattatatgaaataagaaaagaatggatacctgcattttttaaaaacgacttctgtggggtaatggtatctacacaacgaagtgagaacatgaacagattagtgaagcaatcacatgtagatgcgaacaccccactgcatgagttcgctaaacaaatgatgaaaatgttgcacagcaggaaaatgaaagaatcaaaggaggcattggtgagcaagggaccaaggacaacagatacattgtataggttcgaagtgagagtctctagagcatacaccagagctgttatgaatagatttgaggaatcaatgaaatacgccactgcatacaaaatattaaaggacgcagacggttgtgataatgattggatcgtacagcatacaaaaaggtctaataaaattgtgtggggacaacatcaattcaagataacaacggacatagaagctagggagtatacatgcgagtgcaaacagtgggaacatacaggtctattgtgtgttcatcttttaagagccttcatgcatcttcaagttgaaaagataccttcaaagtatatattgcaaaggtacactgtctcatcaagaaaagatgttccatttgaaagaattgataagagcttcaggggaaaggatggagttactaaatcatacagacagaaaatgttgttaacgaaaacaatgaaagtagtttgccaggcgtgtatgtcaaaagcagggtacgataaggcgatgtatgtgttggatgagctcgatgtcgttctatgccgattagagccagatattggatgtaatgagtcaacagatgttagtgatgatgaggaagacaaggaagtagaattgaataaaaataatgctggcgatgggatggaagatgacaatacaattacatgccataaaatggatgagcataacaccatgactggatgtgaacacgcattaacattaataacaactggtaaacagaggttgaattttaatgtggatgttataaatctgagtatgccggatcgtgcaagaccaaaaggacggacaataaaaaattcagaagataggattatgagactaggtgcaaaaggagagaaaaagaagaataggagatgccaattgtgtggtatagcagatggacataacagcgaaacgtgtctgtctgtggaagagaacagggcaaggctagcaaaactggctaatcgaaagagaggacgaccagccggatcaagactaaacaataaaacaactgctccacagtggaatgaaacatcgactgctaaaaaacatcgtattgatgaagaagtggaaaatgaagaagccgatgagcatatggaattgggcgaataa

SEQ ID NO: 155204 - DNA, 1257 bp, Zea Mays
ccttttggcatattgatatgtttcataacatgttctttttccttaacagaaactgtacaggcgttatgttgtgaagaggaatcaacgcaaacgccagagagaggaagatctaaagaaagaagagaagaaatcctcagagaagcgatccaagaccatgcatgagactataattgaaagtgttgataacctaggaggcagcgttgaagtgacaaaagaggatgaagaaaagatgagcaaagatcaatcagcaaatgttcatgctgaactgccaaaagagggtcagataaaacttggcacagatcatccaattgttaaccatggcgaaccagcaaaagagggtgatgaaaatatgaacactgatcattcagaagctgttctcgataaacctgcagctgatgcaaatatggcagaggaagatcctgaatacgaggaagatcctgaagaaatagaaatatatgaagatgatgaggacatggatgatgctcatgctggagcacagaatggagaacagaatgagaacacaaatgacagagatgttaagccagaagtagcgacagcagatggtggaaataacagaagttcaacacaacctgaagtaggaaatattactaatacccatgaaagagctgcttcaatggaggacaaactgtctgtggcagagaaaggagattctgtggaaggtggagaaaaggtagttagtaaggaggttaagccagcaaaagatgaggtggtcgacaaggacctgttgcaggcctttaggtactttgacataaatagagcaggatatctcaagatggatgatttaaaatgtattcttcacaacttgggcaagtttttatcaagcagggacgtgaaggacttggttcaagttgctcttgttgagagcaattctgcaagggacactcgcataatctatcctaagcttgtgaagatagttgacctgtaatctggcactgcttggcccatgtgagccccttgaagttaactacgctatcatcgatgagtcagttatgaaaaactattttctttatttataaatggcttcactgtcattttttggttacctgttcgtactattatgttgtacggagctacttttgctttcttgttgaatatttttttattgtaattgtggagtcattaacttggcaaccaatgcttattgtaagcatcaaggattatcacatttcataaatgagggcacttgaaaaaggcgacgaacattgtattaaaaaccaaacatccaaaaaataaaaa

SEQ ID NO: 155205 - DNA, 1334 bp, Zea Mays
ccttttggcatattgatatgtttcataacatgttctttttccttaacagaaactgtacaggcgttatgttgtgaagaggaatcaacgcaaacgccagagagaggaagatctaaagaaagaagagaagaaatcctcagagaagcgatccaagaccatgcatgagactataattgaaagtgttgataacctaggaggcagcgttgaagtgacaaaagaggatgaagaaaagatgagcaaagatcaatcagcaaatgttcatgctgaactgccaaaagagggtcagataaaacttggcacagatcatccaattgttaaccatggcgaaccagcaaaagagggtgatgaaaatatgaacactgatcattcagaagctgttctcgataaacctgcagctgatgcaaatatggcagaggaagatcctgaatacgaggaagatcctgaagaaatagaaatatatgaagatgatgaggacatggatgatgctcatgctggagcacagaatggagaacagaatgagaacacaaatgacagagatgttaagccagaagtagcgacagcagatggtggaaataacagaagttcaacacaacctgaagtaggaaatattactaatacccatgaaagagctgcttcaatggaggacaaactgtctgtggcagagaaaggagattctgtggaaggtggagaaaaggtagttagtaaggaggttaagccagcaaaagatgaggtggtcgacaaggacctgttgcaggcctttaggtactttgacataaatagagcaggatatctcaagatggatgatttaaaatgtattcttcacaacttgggcaagtttttatcaagcagggacgtgaaggacttggttcaagttgctcttgttgagagcaattctgcaagggacactcgcataatctatcctaagcttgtgaagatagttgacctgtaatctggcactgcttggcccatgtgagccccttgaagttaactacgctatcatcgatgagtcagttatgaaaaactattttctttatttataaatggcttcactgtcattttttggttacctgttcgtactattatgttgtacggagctacttttgctttcttgttgaatatttttttattgtaattgtggagtcattaacttggcaaccaatgcttattgtaagcatcaaggattatcacatttcataaatgagggcacttgaaaaaggcgacgaacattgtattaatgcttattggtcttgtcgtttagctaacgaagctgaataagaaattcgatattttgtaaacgttgtgcattgatacaatgtgatgcggggacattttgcttt

SEQ ID NO: 155206 - DNA, 1668 bp, Zea Mays
caggttcatgatcatatggagcagagttcatcaatgcgccaccagcagctcctgaaaggtcagctgcagcccggatctgatacaagacaagccgattactttgcaggaagatctgctccagcccatcaagcatcccaggaaattggtgtatatggaagagttgaagctgataatcgcaacatatccattcttgggaatgctccatatggaagacagcaatcagcctcattgttggaaggagctccaaggacaaacatcgacagcctctatggacaaggatcgtcaggcactggttttggtgcaggtcttcctcctggacgtgattatgcctcagtgaaaggcctgccccatccatcttcagaccctgatcaccgagatagcatcttaccccgtgtacatccagccgtctcaatggttgatgatcgtagagttgatcgaattggttatcgtcgtgaactggatctaagagatgaggaacgcagaagggacctaatactggaaagagagaaggaacttgaacgggaacgggaacgagaacgggaacgtgagttacgggactttcgagatcgtgaaagggaaagagaacgtgaaagggaaagggatcatgaaagactactaagagaacgtgaaagagaaagggaacgcgaacgcgaacgtgaaagagagcgcgaaagagaacgccttcgtgagcgccgggagaaggagagagagcgggataggaagcacagaactgatccaaggcgggagcacactccacctagaggccctggtgatcggcggcggtcttcttctgttagatctgagaagcctgtacggcgaatttcccctcgacgtgatgctgtgcataggcatcgttcacctgttaaagaaataaagagagaatatatttgcaaggtttttccatttcgcttcgtggatgatgagagggattatctgtgcttgacaaaacggtatcccagacttgcagttactccagaattttctaagattgtcttgaactgggctaaagaaaacttaaatcttcctctcgatacaccagtgagtttggagcatgatatccatgattcagatgataatgctgatgaaggagcaattatctccactgagaaaacaccaagcttcaatactccagccaccatttggaatgcaaaggtactattgatgagtggcatgagcaaaggtgcctttgctgacataacttcattgagaagtactgaggaacgagttgtgcacttgaacaatatattaaaatttgctttattcaagaaggatcgttctctatttgcaattggaggcccttggaatgcagcaatagatggtggtgacccctcagttgactgttcttgcttgattcaaactgccatcagatgtgttaaagaaatggttcaagttgatctatctagttgcacccactggaaccgttttgtcgaggtacattacaatagaataggcaaagatggactcttcagtcataaagaaattactgttctgtttgtgccaaacttgtctgaatgcttgccttcagtggatatatggaagaataactggattctgtacaaaaaatcaaaggcagaaagggaagaactcactgttaaaaaggaaaagagtcctggtgattcgaaagagcagatgcaagtttcaggggagctgaataagggtaaaagttta

SEQ ID NO: 155207 - DNA, 984 bp, Zea Mays
gcgcgcgagtgaccagtaatataacacacactaatcaaacaccacatatatcttgcgctctccaaatccctcgccgaaagcccgaaacccttccagtggtcttcttctgttagatctgagaagcctgtacggcgaatttcccctcgacgtgatgctgtgcataggcatcgttcacctgttaaagaaataaagagagaatatatttgcaaggtttttccatttcgcttcgtggatgatgagagggattatctgtgcttgacaaaacggtatcccagacttgcagttactccagaattttctaagattgtcttgaactgggctaaagaaaacttaaatcttcctctcgatacaccagtgagtttggagcatgatatccatgattcagatgataatgctgatgaaggagcaattatctccactgagaaaacaccaagcttcaatactccagccaccatttggaatgcaaaggtactattgatgagtggcatgagcaaaggtgcctttgctgacataacttcattgagaagtactgaggaacgagttgtgcacttgaacaatatattaaaatttgctttattcaagaaggatcgttctctatttgcaattggaggcccttggaatgcagcaatagatggtggtgacccctcagttgactgttcttgcttgattcaaactgccatcagatgtgttaaagaaatggttcaagttgatctatctagttgcacccactggaaccgttttgtcgaggtacattacaatagaataggcaaagatggactcttcagtcataaagaaattactgttctgtttgtgccaaacttgtctgaatgcttgccttcagtggatatatggaagaataactggattctgtacaaaaaatcaaaggcagaaagggaagaactcactgttaaaaaggaaaagagtcctggtgattcgaaagagcagatgcaagtttcaggggagctgaataagggtaaaagttta

SEQ ID NO: 155208 - DNA, 1316 bp, Zea Mays
ggagcatcttggagacaggaagaaggggtggtagtaggtgaaaccggaggcggcaggatagggagagggagcgagagtagaggccacgcctgcttgacagcaaggcccgtgcgctcggcggcggcggcggcggatatgggcgactctggcggctctgttgtgtcggtggacgtcgagcgcatctccttcggcggcaaggaatgttgtcatgtggggactcaagtatgcccggcgccgtacggctagggatgtatggcgggtggctgagcgtgcggcacaggtacaagccgagaaaagcaacacgctggaagcaaccggcctggttggataggaacatcatatacaaaccaaccatggatctgtatctgttgccatatatggtgaacatgataagcctgctcttattacctacccagatattgctttgaaccatatgtcttgcttccaagggctactcttctgtcctgaagcagcttcattgctgcttcataatttttgcatttaccatatcagccccccaggacatgagttaggagctgctccgattttgccgagcacacctgtggcatctcctgatgacttagcagatcaaatcgcagacatacttgatttttttggactggattcggttatgtgcttaggtgtcactgcgggcgcatacattcttactctgtttgcaacgaagtatagggagcgagtactaggacttattctcgtttcacctctatgtaaagctccctcatggtctgagtggttttataataaggtaatgtcaaatttactgtattattatggcatgtgtaatgtcgtgaaggatattttgttgcagcgctactttggaaagggagtacgtggaggctcagctgaacctgaatcagatattgtgcaggcttgcagaagttttctagatcaacggcagtgtgtgaacgtgtggcgatttatccaaactatcaacgagagaaaagacttgacagagaacctgaagcagctacagtgcaggacactaatttttgttggtgagaattcccagttccatgctgaagctgttcacatgactgcaaagcttgataggcgatatagcgctcttgtggagtacaaagcttgtggctcggttgtgacagaggagcaacctcatgcaatgctgataccaatggagtactttctcatgggatatggactgtacaggccaagccagataaactgtagccctcgtagccctctgaatccgttttgtatatcaccagagctccctctctcctgagagcatgggggtttaagctaagcccattcaagaacgcgaggctaaccttaatgca

SEQ ID NO: 155209 - DNA, 143 bp, Zea Mays
ttcaaatgtgatttttccgaagaaattcaaataaacgaactaaatctactagctattgaaaacactgttataattgtcccaaaacggtacatgtaggtctacatagtgtaggaacataccacaaaaagtttggtggccaaaat

SEQ ID NO: 155210 - DNA, 1578 bp, Zea Mays
ctggaacaaatccacgtgccgcctcacgcggctgagcacgccgcccccgccgcctcgtccctgtctcgccgtcgccgcctcgttcccgtcctgccatcatcgtctcgtccctgcttctcgatcgtacgccgtgagcaataggagttccgtccggcgctggagctgagcctggagattgtccctactcttgtgagagtcgcgaggacaagctttccccctcttgagatccggtgtctaatccatttttcaagataagatgtttagaggttctcctaagatagtagctttacctaaagctgctcaaaagaaggcttctcctaaagctgcaaaatcaaagaaatgtggcggtggtgttgagagagctgcatggaatgttgaattagagaagagtcttgttgacttgttgtttgaacacaatatgcctccacatagggctcaaaatggatggagtccagatgcttggaataaaatagtttctaaattccacaagaagcatgaatatgttacattcaacaagatccaaattcaagaaaaggagagagaattaaaaagggaatacaagatattgaaggaggcaagaaaacaaagtggagtttcttggaatgaaaaaagatgcatgatcattgctgaaccaacgatatgggacaacattatcactgtaagaagcatatgctttacccagacatttcctagagctaagaagttccgcaataagtcttttccaatctttgatgccttgggtgaattatatgatggtcacattgcacaagggacttggaacattacatctactcaaccactacaaaattctgatgatggagagaaatttaaaaccatagaagtggaatatgaagatactaatgaaccacaagtagatgcgagaatagaacaagatgaagatatagtaattgttgaaagggttgaacataggttacctaaaaggtcaggtgcaccaactgtcaatcaagagaaggagacaaagagagtaaggaaagatgcactagaagggctgatagggaggtaccttgatgtgaaaacaaagcaagttgcagatgaggctacacaatcaacaaaagagaaggaagttgctcaagataatgatttttctatcaagaggtgtatttctgttcttaagactatggatatcacaagagatgagaagatcaaagcagcggaggtgtttaacacaccaaattacagagaaacatttatttgttttaatgatgatgagccagaagtcgctctcctttggccaagggggaagatggataaactctaaagggtccaaggataaagatattatcaacatctctagaggaagagaaagtcaagtcacatcttcagtctgtgcaggctgtttattcagtttcagtcaataaggcttagcttgtagtgtgtggtctaaatcttgcatgtgcatgtagagactgtttcttcggtctgtgcaggctgtgcagttttcagcttgtttcttcagtcgtttcagacagttttttcagttttctgtgcagacatgtgctcgtctctactttgtcaaaaaaaagatagaattattcagactgcagttttcagcttgtt

SEQ ID NO: 155211 - DNA, 1554 bp, Zea Mays
ctggaacaaatccacgtgccgcctcacgcggctgagcacgccgcccccgccgcctcgtccctgtctcgccgtcgccgcctcgttcccgtcctgccatcatcgtctcgtccctgcttctcgatcgtacgccgtgagcaataggagttccgtccggcgctggagctgagcctggagattgtccctactcttgtgagagtcgcgaggacaagctttccccctcttgagatccggtgtctaatccatttttcaagataagatgtttagaggttctcctaagatagtagctttacctaaagctgctcaaaagaaggcttctcctaaagctgcaaaatcaaagaaatgtggcggtggtgttgagagagctgcatggaatgttgaattagagaagagtcttgttgacttgttgtttgaacacaatatgcctccacatagggctcaaaatggatggagtccagatgcttggaataaaatagtttctaaattccacaagaagcatgaatatgttacattcaacaagatccaaattcaagaaaaggagagagaattaaaaagggaatacaagatattgaaggaggcaagaaaacaaagtggagtttcttggaatgaaaaaagatgcatgatcattgctgaaccaacgatatgggacaacattatcactacatttcctagagctaagaagttccgcaataagtcttttccaatctttgatgccttgggtgaattatatgatggtcacattgcacaagggacttggaacattacatctactcaaccactacaaaattctgatgatggagagaaatttaaaaccatagaagtggaatatgaagatactaatgaaccacaagtagatgcgagaatagaacaagatgaagatatagtaattgttgaaagggttgaacataggttacctaaaaggtcaggtgcaccaactgtcaatcaagagaaggagacaaagagagtaaggaaagatgcactagaagggctgatagggaggtaccttgatgtgaaaacaaagcaagttgcagatgaggctacacaatcaacaaaagagaaggaagttgctcaagataatgatttttctatcaagaggtgtatttctgttcttaagactatggatatcacaagagatgagaagatcaaagcagcggaggtgtttaacacaccaaattacagagaaacatttatttgttttaatgatgatgagccagaagtcgctctcctttggccaagggggaagatggataaactctaaagggtccaaggataaagatattatcaacatctctagaggaagagaaagtcaagtcacatcttcagtctgtgcaggctgtttattcagtttcagtcaataaggcttagcttgtagtgtgtggtctaaatcttgcatgtgcatgtagagactgtttcttcggtctgtgcaggctgtgcagttttcagcttgtttcttcagtcgtttcagacagttttttcagttttctgtgcagacatgtgctcgtctctactttgtcaaaaaaaagatagaattattcagactgcagttttcagcttgtt

SEQ ID NO: 155212 - DNA, 113 bp, Zea Mays
gtaatagtcttttaatttggtaacagtttggtgttcattattgtatctattttcagattgtccctactcttgtgagagtcgcgaggacaagctttccccctcttgagatccgg

SEQ ID NO: 155213 - DNA, 1919 bp, Zea Mays
atggagctgctgcgaccacgcggcgatggttgttgcccgcgcgtgctctcggtttctctgctgctcctcgccgccctgctgtggaagcacgtctctgcggcggcgattaccaggggtgatttcccggaggggttcgtcttcggcgccggcgcatcggcttaccaggatattcgattgaccgtgatactggagatgtggctgcggaccagtatcaccattacaaggcatggccagcatttccttttaagttcgattatatatactgattgcttacgaatccgtagtcagtcatgtgctagctggactgacgattttcaggaagatgtgaagctaatgcatgacatgggcttggacgcgtacaggttctcgattgcctggtcaaggcttattccaggaatacagccgcacgtgaccatctatcacttcgaccttccccaggctctccaggatgaatacaacggcctgctcagtccgagaatcatatggccatggcatgaatggatccccctgaccgccgtgcgtaccgtacgcagcgatgattttaccgcttacgcagacgtgtgcttccggagcttcggcgacagggtgaagcactggatcacggtgaacgagcccaacatcgagcccatcggcggctacgaccaaggctacctcccgccgcgccgctgctcctacccgtttggactgggcgtcacctgcacccacggcaactccacgacggagccgtacgccgtcgcccaccacctcctgctcgcgcatgcgtcggctgtgtccctctacagacgcaagtaccagggcgagcaaggaggacggattggactgacgttgctggcctggtggtatgagccagcgacgcagaagcccgaggatgtagaagcagctgccagagcaaatgacttctcgcttggatggttcatgcatcccctggtgtacggcgactatccgcccgtgatgaagaggaacgtgggggcaaggctgccgtcgctgacggcccgagactcggccatggtgcgcggctcgctcgatttcgttgggatcaaccagtacggcgcgatcctggtcgaagcagacctgggccagctcgatcgggacctcagagactactacggcgacatggctaccaacttcgtcacggtaccgtttgagagcacagtaacgaggaaccagcaggtgcctcgacttgggctgcggaaccatgaggcgccgtgggctctgagcaaattgctggaacacctgcagacgcactacgggaaccctccggtgatgatccacgagaacggtgaggccggccaagcgcgcgcgctctctctctctcgtttcagctgccgcgcacatgcacggttcctttcatcccctgagctgatggttccaccaccaccaccaccaccaggagctgggcacgagcccgacccgtccggcgggttcctgtacgacgacgagttcagggcccatttcctgcgggtctacgtcgaggcggcgctcgcttccgtccggaacggctccgacctgcgcggctacttcgtctggtccttcatggacgtgttcgagtttctcttctcctacaggttccgcttcggtctctacggcgtggacttcgccgccgacaaccggacgaggtacgctcggcgctccgcgcgatggtacgccggcttcctccgcggcggcgcggcgacctcacgcccgcctctgtttcaacgcggacacacggctccacctattcggagtgaaaatcagccgcacgtgtctgtgttatagattcatcgcgagtgaacaagtacatgatggatgttcttcaccctcatccatgtctgtcgtatgcggcattttcccgtcagttgtgtatttgtttgcatttgaggaataaattcagttctgtagtaggctgtcggcagatcttggcgattaaaagtatctctaac

SEQ ID NO: 155214 - DNA, 1931 bp, Zea Mays
acacttcgctggggagacgaagctgctagccgatcaggggagaattcttttgtaatggagctgctgcgaccacgcggcgatggttgttgcccgcgcgtgctctcggtttctctgctgctcctcgccgccctgctgtggaagcacgtctctgcggcggcgattaccaggggtgatttcccggaggggttcgtcttcggcgccggcgcatcggcttaccagatcgaaggcgcatgggcagaggacgggaagaagcccagcatctgggacacatacacgcacagtggatattcgattgaccgtgatactggagatgtggctgcggaccagtatcaccattacaaggttctcgattgcctggtcaaggcttattccaggtgctagctagtagagtcctagacacagaggagaggatctttttttccctctgtttatcagtgtacttagccatcctatcgtattgttttcgcatgtctgatgatatgccacgtgtttgtagatgggcgtggagctgtgaacccaaaggggttggagtactacaacagcctcatagatgagctcctcagatatggaatacagccgcacgtgaccatctatcacttcgaccttccccaggctctccaggatgaatacaacggcctgctcagtccgagaatcatcgatgattttaccgcttacgcagacgtgtgcttccggagcttcggcgacagggtgaagcactggatcacggtgaacgagcccaacatcgagcccatcggcggctacgaccaaggctacctcccgccgcgccgctgctcctacccgtttggactgggcgtcacctgcacccacggcaactccacgacggagccgtacgccgtcgcccaccacctcctgctcgcgcatgcgtcggctgtgtccctctacagacgcaagtaccagggcgagcaaggaggacggattggactgacgttgctggcctggtggtatgagccagcgacgcagaagcccgaggatgtagaagcagctgccagagcaaatgacttctcgcttggatggttcatgcatcccctggtgtacggcgactatccgcccgtgatgaagaggaacgtgggggcaaggctgccgtcgctgacggcccgagactcggccatggtgcgcggctcgctcgatttcgttgggatcaaccagtacggcgcgatcctggtcgaagcagacctgggccagctcgatcgggacctcagagactactacggcgacatggctaccaacttcgtcacggtaccgtttgagagcacagtaacgaggaaccagcaggtgcctcgacttgggctgcggaaccatgaggcgccgtgggctctgagcaaattgctggaacacctgcagacgcactacgggaaccctccggtgatgatccacgagaacggagctgggcacgagcccgacccgtccggcgggttcctgtacgacgacgagttcagggcccatttcctgcgggtctacgtcgaggcggcgctcgcttccgtccggaacggctccgacctgcgcggctacttcgtctggtccttcatggacgtgttcgagtttctcttctcctacaggttccgcttcggtctctacggcgtggacttcgccgccgacaaccggacgaggtacgctcggcgctccgcgcgatggtacgccggcttcctccgcggcggcgcggcgacctcacgcccgcctctgtttcaacgcggacacacggctccacctattcggagtgaaaatcagccgcacgtgtctgtgttatagattcatcgcgagtgaacaagtacatgatggatgttcttcaccctcatccatgtctgtcgtatgcggcattttcccgtcagttgtgtatttgtttgcatttgaggaataaattcagttctgtagtaggctgtcggcagatcttggcgattaaaagtatctctaac

SEQ ID NO: 155215 - DNA, 2032 bp, Zea Mays
gtgcgttgcggcagcgcacttatattagcctggtcagtacacccaccgtagcctcacacttcgctggggagacgaagctgctagccgatcaggggagaattcttttgtaatggagctgctgcgaccacgcggcgatggttgttgcccgcgcgtgctctcggtttctctgctgctcctcgccgccctgctgtggaagcacgtctctgcggcggcgattaccaggggtgatttcccggaggggttcgtcttcggcgccggcgcatcggcttaccagatcgaaggcgcatgggcagaggacgggaagaagcccagcatctgggacacatacacgcacagtggtcagcgagcgagctagtagctcctcccatttctctcgctcagctccatatggtttggaaatccaagtcctgtatcgtctggtttttgtgcttgcgttgtgtaggatattcgattgaccgtgatactggagatgtggctgcggaccagtatcaccattacaaggcatggccagcatttccttttaagttcgattatatatactgattgcttacgaatccgtagtcagtcatgtgctagctggactgacgattttcaggaagatgtgaagctaatgcatgacatgggcttggacgcgtacaggttctcgattgcctggtcaaggcttattccaggaatacagccgcacgtgaccatctatcacttcgaccttccccaggctctccaggatgaatacaacggcctgctcagtccgagaatcatatggccatggcatgaatggatccccctgaccgccgtgcgtaccgtacgcagcgatgattttaccgcttacgcagacgtgtgcttccggagcttcggcgacagggtgaagcactggatcacggtgaacgagcccaacatcgagcccatcggcggctacgaccaaggctacctcccgccgcgccgctgctcctacccgtttggactgggcgtcacctgcacccacggcaactccacgacggagccgtacgccgtcgcccaccacctcctgctcgcgcatgcgtcggctgtgtccctctacagacgcaagtaccagggcgagcaaggaggacggattggactgacgttgctggcctggtggtatgagccagcgacgcagaagcccgaggatgtagaagcagctgccagagcaaatgacttctcgcttggatggttcatgcatcccctggtgtacggcgactatccgcccgtgatgaagaggaacgtgggggcaaggctgccgtcgctgacggcccgagactcggccatggtgcgcggctcgctcgatttcgttgggatcaaccagtacggcgcgatcctggtcgaagcagacctgggccagctcgatcgggacctcagagactactacggcgacatggctaccaacttcgtcacggtaccgtttgagagcacagtaacgaggaaccagcaggtgcctcgacttgggctgcggaaccatgaggcgccgtgggctctgagcaaattgctggaacacctgcagacgcactacgggaaccctccggtgatgatccacgagaacggtgaggccggccaagcgcgcgcgctctctctctctcgtttcagctgccgcgcacatgcacggttcctttcatcccctgagctgatggttccaccaccaccaccaccaccaggagctgggcacgagcccgacccgtccggcgggttcctgtacgacgacgagttcagggcccatttcctgcgggtctacgtcgaggcggcgctcgcttccgtccggaacggctccgacctgcgcggctacttcgtctggtccttcatggacgtgttcgagtttctcttctcctacaggttccgcttcggtctctacggcgtggacttcgccgccgacaaccggacgaggtacgctcggcgctccgcgcgatggtacgccggcttcctccgcggcggcgcggcgacctcacgcccgcctctgtttcaacgcggacacacggctccacctattcggagtgaaaatcagccgcacgtgtctgtgttatag

SEQ ID NO: 155216 - DNA, 1707 bp, Zea Mays
gtgcgttgcggcagcgcacttatattagcctggtcagtacacccaccgtagcctcacacttcgctggggagacgaagctgctagccgatcaggggagaattcttttgtaatggagctgctgcgaccacgcggcgatggttgttgcccgcgcgtgctctcggtttctctgctgctcctcgccgccctgctgtggaagcacgtctctgcggcggcgattaccaggggtgatttcccggaggggttcgtcttcggcgccggcgcatcggcttaccagatcgaaggcgcatgggcagaggacgggaagaagcccagcatctgggacacatacacgcacagtggatattcgattgaccgtgatactggagatgtggctgcggaccagtatcaccattacaaggaagatgtgaagctaatgcatgacatgggcttggacgcgtacaggttctcgattgcctggtcaaggcttattccagatgggcgtggagctgtgaacccaaaggggttggagtactacaacagcctcatagatgagctcctcagatatggtcgtcatttgccgcacgtgaccatctatcacttcgaccttccccaggctctccaggatgaatacaacggcctgctcagtccgagaatcatcgatgattttaccgcttacgcagacgtgtgcttccggagcttcggcgacagggtgaagcactggatcacggtgaacgagcccaacatcgagcccatcggcggctacgaccaaggctacctcccgccgcgccgctgctcctacccgtttggactgggcgtcacctgcacccacggcaactccacgacggagccgtacgccgtcgcccaccacctcctgctcgcgcatgcgtcggctgtgtccctctacagacgcaagtaccagggcgagcaaggaggacggattggactgacgttgctggcctggtggtatgagccagcgacgcagaagcccgaggatgtagaagcagctgccagagcaaatgacttctcgcttggatggttcatgcatcccctggtgtacggcgactatccgcccgtgatgaagaggaacgtgggggcaaggctgccgtcgctgacggcccgagactcggccatggtgcgcggctcgctcgatttcgttgggatcaaccagtacggcgcgatcctggtcgaagcagacctgggccagctcgatcgggacctcagagactactacggcgacatggctaccaacttcacgaacaatctcttgtggtgcacgtgcaaggtgcctcgacttgggctgcggaaccatgaggcgccgtgggctctgagcaaattgctggaacacctgcagacgcactacgggaaccctccggtgatgatccacgagaacggagctgggcacgagcccgacccgtccggcgggttcctgtacgacgacgagttcagggcccatttcctgcgggtctacgtcgaggcggcgctcgcttccgtccggaacggctccgacctgcgcggctacttcgtctggtccttcatggacgtgttcgagtttctcttctcctacaggttccgcttcggtctctacggcgtggacttcgccgccgacaaccggacgaggtacgctcggcgctccgcgcgatggtacgccggcttcctccgcggcggcgcggcgacctcacgcccgcctctgtttcaacgcggacacacggctccacctattcggagtga

SEQ ID NO: 155217 - DNA, 1704 bp, Zea Mays
gtgcgttgcggcagcgcacttatattagcctggtcagtacacccaccgtagcctcacacttcgctggggagacgaagctgctagccgatcaggggagaattcttttgtaatggagctgctgcgaccacgcggcgatggttgttgcccgcgcgtgctctcggtttctctgctgctcctcgccgccctgctgtggaagcacgtctctgcggcggcgattaccaggggtgatttcccggaggggttcgtcttcggcgccggcgcatcggcttaccagatcgaaggcgcatgggcagaggacgggaagaagcccagcatctgggacacatacacgcacagtggatattcgattgaccgtgatactggagatgtggctgcggaccagtatcaccattacaaggaagatgtgaagctaatgcatgacatgggcttggacgcgtacaggttctcgattgcctggtcaaggcttattccagatgggcgtggagctgtgaacccaaaggggttggagtactacaacagcctcatagatgagctcctcagatatggaatacagccgcacgtgaccatctatcacttcgaccttccccaggctctccaggatgaatacaacggcctgctcagtccgagaatcatcgatgattttaccgcttacgcagacgtgtgcttccggagcttcggcgacagggtgaagcactggatcacggtgaacgagcccaacatcgagcccatcggcggctacgaccaaggctacctcccgccgcgccgctgctcctacccgtttggactgggcgtcacctgcacccacggcaactccacgacggagccgtacgccgtcgcccaccacctcctgctcgcgcatgcgtcggctgtgtccctctacagacgcaagtaccagggcgagcaaggaggacggattggactgacgttgctggcctggtggtatgagccagcgacgcagaagcccgaggatgtagaagcagctgccagagcaaatgacttctcgcttggatggttcatgcatcccctggtgtacggcgactatccgcccgtgatgaagaggaacgtgggggcaaggctgccgtcgctgacggcccgagactcggccatggtgcgcggctcgctcgatttcgttgggatcaaccagtacggcgcgatcctggtcgaagcagacctgggccagctcgatcgggacctcagagactactacggcgacatggctaccaacttcacgaacaatctcttgtggtgcacgtgcaaggtgcctcgacttgggctgcggaaccatgaggcgccgtgggctctgagcaaattgctggaacacctgcagacgcactacgggaaccctccggtgatgatccacgagaacggagctgggcacgagcccgacccgtccggcgggttcctgtacgacgacgagttcagggcccatttcctgcgggtctacgtcgaggcggcgctcgcttccgtccggaacggctccgacctgcgcggctacttcgtctggtccttcatggacgtgttcgagtttctcttctcctacaggttccgcttcggtctctacggcgtggacttcgccgccgacaaccggacgaggtacgctcggcgctccgcgcgatggtacgccggcttcctccgcggcggcgcggcgacctcacgcccgcctctgtttcaacgcggacacacggctccacctattcggagtga

SEQ ID NO: 155218 - DNA, 1797 bp, Zea Mays
gtgcgttgcggcagcgcacttatattagcctggtcagtacacccaccgtagcctcacacttcgctggggagacgaagctgctagccgatcaggggagaattcttttgtaatggagctgctgcgaccacgcggcgatggttgttgcccgcgcgtgctctcggtttctctgctgctcctcgccgccctgctgtggaagcacgtctctgcggcggcgattaccaggggtgatttcccggaggggttcgtcttcggcgccggcgcatcggcttaccagatcgaaggcgcatgggcagaggacgggaagaagcccagcatctgggacacatacacgcacagtggatattcgattgaccgtgatactggagatgtggctgcggaccagtatcaccattacaaggaagatgtgaagctaatgcatgacatgggcttggacgcgtacaggttctcgattgcctggtcaaggcttattccagatgggcgtggagctgtgaacccaaaggggttggagtactacaacagcctcatagatgagctcctcagatatggtcgtcatttggtacttcattaattgcaacgttaattaacggcgcctgattccgaatggttttatttccgcgcgtgtaattaacgtgtggcaggaatacagccgcacgtgaccatctatcacttcgaccttccccaggctctccaggatgaatacaacggcctgctcagtccgagaatcatcgatgattttaccgcttacgcagacgtgtgcttccggagcttcggcgacagggtgaagcactggatcacggtgaacgagcccaacatcgagcccatcggcggctacgaccaaggctacctcccgccgcgccgctgctcctacccgtttggactgggcgtcacctgcacccacggcaactccacgacggagccgtacgccgtcgcccaccacctcctgctcgcgcatgcgtcggctgtgtccctctacagacgcaagtaccagggcgagcaaggaggacggattggactgacgttgctggcctggtggtatgagccagcgacgcagaagcccgaggatgtagaagcagctgccagagcaaatgacttctcgcttggatggttcatgcatcccctggtgtacggcgactatccgcccgtgatgaagaggaacgtgggggcaaggctgccgtcgctgacggcccgagactcggccatggtgcgcggctcgctcgatttcgttgggatcaaccagtacggcgcgatcctggtcgaagcagacctgggccagctcgatcgggacctcagagactactacggcgacatggctaccaacttcacgaacaatctcttgtggtgcacgtgcaaggtgcctcgacttgggctgcggaaccatgaggcgccgtgggctctgagcaaattgctggaacacctgcagacgcactacgggaaccctccggtgatgatccacgagaacggagctgggcacgagcccgacccgtccggcgggttcctgtacgacgacgagttcagggcccatttcctgcgggtctacgtcgaggcggcgctcgcttccgtccggaacggctccgacctgcgcggctacttcgtctggtccttcatggacgtgttcgagtttctcttctcctacaggttccgcttcggtctctacggcgtggacttcgccgccgacaaccggacgaggtacgctcggcgctccgcgcgatggtacgccggcttcctccgcggcggcgcggcgacctcacgcccgcctctgtttcaacgcggacacacggctccacctattcggagtga

SEQ ID NO: 155219 - DNA, 1921 bp, Zea Mays
gtgcgttgcggcagcgcacttatattagcctggtcagtacacccaccgtagcctcacacttcgctggggagacgaagctgctagccgatcaggggagaattcttttgtaatggagctgctgcgaccacgcggcgatggttgttgcccgcgcgtgctctcggtttctctgctgctcctcgccgccctgctgtggaagcacgtctctgcggcggcgattaccaggggtgatttcccggaggggttcgtcttcggcgccggcgcatcggcttaccaggtaggataggagcagtgtgggctacgggcagtgagtggcgcgcgaggcagagaggcaggtaggtggtgttgagatgaatcgtctggtttgtgcagatcgaaggcgcatgggcagaggacgggaagaagcccagcatctgggacacatacacgcacagtggatattcgattgaccgtgatactggagatgtggctgcggaccagtatcaccattacaaggaagatgtgaagctaatgcatgacatgggcttggacgcgtacaggttctcgattgcctggtcaaggcttattccaggtgctagctagtagagtcctagacacagaggagaggatctttttttccctctgtttatcagtgtacttagccatcctatcgtattgttttcgcatgtctgatgatatgccacgtgtttgtagatgggcgtggagctgtgaacccaaaggggttggagtactacaacagcctcatagatgagctcctcagatatggaatacagccgcacgtgaccatctatcacttcgaccttccccaggctctccaggatgaatacaacggcctgctcagtccgagaatcatcgatgattttaccgcttacgcagacgtgtgcttccggagcttcggcgacagggtgaagcactggatcacggtgaacgagcccaacatcgagcccatcggcggctacgaccaaggctacctcccgccgcgccgctgctcctacccgtttggactgggcgtcacctgcacccacggcaactccacgacggagccgtacgccgtcgcccaccacctcctgctcgcgcatgcgtcggctgtgtccctctacagacgcaagtaccagggcgagcaaggaggacggattggactgacgttgctggcctggtggtatgagccagcgacgcagaagcccgaggatgtagaagcagctgccagagcaaatgacttctcgcttggatggttcatgcatcccctggtgtacggcgactatccgcccgtgatgaagaggaacgtgggggcaaggctgccgtcgctgacggcccgagactcggccatggtgcgcggctcgctcgatttcgttgggatcaaccagtacggcgcgatcctggtcgaagcagacctgggccagctcgatcgggacctcagagactactacggcgacatggctaccaacttcacgaacaatctcttgtggtgcacgtgcaaggtgcctcgacttgggctgcggaaccatgaggcgccgtgggctctgagcaaattgctggaacacctgcagacgcactacgggaaccctccggtgatgatccacgagaacggagctgggcacgagcccgacccgtccggcgggttcctgtacgacgacgagttcagggcccatttcctgcgggtctacgtcgaggcggcgctcgcttccgtccggaacggctccgacctgcgcggctacttcgtctggtccttcatggacgtgttcgagtttctcttctcctacaggttccgcttcggtctctacggcgtggacttcgccgccgacaaccggacgaggtacgctcggcgctccgcgcgatggtacgccggcttcctccgcggcggcgcggcgacctcacgcccgcctctgtttcaacgcggacacacggctccacctattcggagtga

SEQ ID NO: 155220 - DNA, 1903 bp, Zea Mays
gtgcgttgcggcagcgcacttatattagcctggtcagtacacccaccgtagcctcacacttcgctggggagacgaagctgctagccgatcaggggagaattcttttgtaatggagctgctgcgaccacgcggcgatggttgttgcccgcgcgtgctctcggtttctctgctgctcctcgccgccctgctgtggaagcacgtctctgcggcggcgattaccaggggtgatttcccggaggggttcgtcttcggcgccggcgcatcggcttaccaggtaggataggagcagtgtgggctacgggcagtgagtggcgcgcgaggcagagaggcaggtaggtggtgttgagatgaatcgtctggtttgtgcagatcgaaggcgcatgggcagaggacgggaagaagcccagcatctgggacacatacacgcacagtggtcagcgagcgagctagtagctcctcccatttctctcgctcagctccatatggtttggaaatccaagtcctgtatcgtctggtttttgtgcttgcgttgtgtaggatattcgattgaccgtgatactggagatgtggctgcggaccagtatcaccattacaaggaagatgtgaagctaatgcatgacatgggcttggacgcgtacaggttctcgattgcctggtcaaggcttattccagatgggcgtggagctgtgaacccaaaggggttggagtactacaacagcctcatagatgagctcctcagatatggaatacagccgcacgtgaccatctatcacttcgaccttccccaggctctccaggatgaatacaacggcctgctcagtccgagaatcatcgatgattttaccgcttacgcagacgtgtgcttccggagcttcggcgacagggtgaagcactggatcacggtgaacgagcccaacatcgagcccatcggcggctacgaccaaggctacctcccgccgcgccgctgctcctacccgtttggactgggcgtcacctgcacccacggcaactccacgacggagccgtacgccgtcgcccaccacctcctgctcgcgcatgcgtcggctgtgtccctctacagacgcaagtaccagggcgagcaaggaggacggattggactgacgttgctggcctggtggtatgagccagcgacgcagaagcccgaggatgtagaagcagctgccagagcaaatgacttctcgcttggatggttcatgcatcccctggtgtacggcgactatccgcccgtgatgaagaggaacgtgggggcaaggctgccgtcgctgacggcccgagactcggccatggtgcgcggctcgctcgatttcgttgggatcaaccagtacggcgcgatcctggtcgaagcagacctgggccagctcgatcgggacctcagagactactacggcgacatggctaccaacttcacgaacaatctcttgtggtgcacgtgcaaggtgcctcgacttgggctgcggaaccatgaggcgccgtgggctctgagcaaattgctggaacacctgcagacgcactacgggaaccctccggtgatgatccacgagaacggagctgggcacgagcccgacccgtccggcgggttcctgtacgacgacgagttcagggcccatttcctgcgggtctacgtcgaggcggcgctcgcttccgtccggaacggctccgacctgcgcggctacttcgtctggtccttcatggacgtgttcgagtttctcttctcctacaggttccgcttcggtctctacggcgtggacttcgccgccgacaaccggacgaggtacgctcggcgctccgcgcgatggtacgccggcttcctccgcggcggcgcggcgacctcacgcccgcctctgtttcaacgcggacacacggctccacctattcggagtga

SEQ ID NO: 155221 - DNA, 1859 bp, Zea Mays
gtgcgttgcggcagcgcacttatattagcctggtcagtacacccaccgtagcctcacacttcgctggggagacgaagctgctagccgatcaggggagaattcttttgtaatggagctgctgcgaccacgcggcgatggttgttgcccgcgcgtgctctcggtttctctgctgctcctcgccgccctgctgtggaagcacgtctctgcggcggcgattaccaggggtgatttcccggaggggttcgtcttcggcgccggcgcatcggcttaccaggtaggataggagcagtgtgggctacgggcagtgagtggcgcgcgaggcagagaggcaggtaggtggtgttgagatgaatcgtctggtttgtgcagatcgaaggcgcatgggcagaggacgggaagaagcccagcatctgggacacatacacgcacagtggtcagcgagcgagctagtagctcctcccatttctctcgctcagctccatatggtttggaaatccaagtcctgtatcgtctggtttttgtgcttgcgttgtgtaggatattcgattgaccgtgatactggagatgtggctgcggaccagtatcaccattacaaggaagatgtgaagctaatgcatgacatgggcttggacgcgtacaggttctcgattgcctggtcaaggcttattccagatgggcgtggagctgtgaacccaaaggggttggagtactacaacagcctcatagatgagctcctcagatatggctctccaggatgaatacaacggcctgctcagtccgagaatcatcgatgattttaccgcttacgcagacgtgtgcttccggagcttcggcgacagggtgaagcactggatcacggtgaacgagcccaacatcgagcccatcggcggctacgaccaaggctacctcccgccgcgccgctgctcctacccgtttggactgggcgtcacctgcacccacggcaactccacgacggagccgtacgccgtcgcccaccacctcctgctcgcgcatgcgtcggctgtgtccctctacagacgcaagtaccagggcgagcaaggaggacggattggactgacgttgctggcctggtggtatgagccagcgacgcagaagcccgaggatgtagaagcagctgccagagcaaatgacttctcgcttggatggttcatgcatcccctggtgtacggcgactatccgcccgtgatgaagaggaacgtgggggcaaggctgccgtcgctgacggcccgagactcggccatggtgcgcggctcgctcgatttcgttgggatcaaccagtacggcgcgatcctggtcgaagcagacctgggccagctcgatcgggacctcagagactactacggcgacatggctaccaacttcacgaacaatctcttgtggtgcacgtgcaaggtgcctcgacttgggctgcggaaccatgaggcgccgtgggctctgagcaaattgctggaacacctgcagacgcactacgggaaccctccggtgatgatccacgagaacggagctgggcacgagcccgacccgtccggcgggttcctgtacgacgacgagttcagggcccatttcctgcgggtctacgtcgaggcggcgctcgcttccgtccggaacggctccgacctgcgcggctacttcgtctggtccttcatggacgtgttcgagtttctcttctcctacaggttccgcttcggtctctacggcgtggacttcgccgccgacaaccggacgaggtacgctcggcgctccgcgcgatggtacgccggcttcctccgcggcggcgcggcgacctcacgcccgcctctgtttcaacgcggacacacggctccacctattcggagtga

SEQ ID NO: 155222 - DNA, 1826 bp, Zea Mays
gtgcgttgcggcagcgcacttatattagcctggtcagtacacccaccgtagcctcacacttcgctggggagacgaagctgctagccgatcaggggagaattcttttgtaatggagctgctgcgaccacgcggcgatggttgttgcccgcgcgtgctctcggtttctctgctgctcctcgccgccctgctgtggaagcacgtctctgcggcggcgattaccaggggtgatttcccggaggggttcgtcttcggcgccggcgcatcggcttaccagatcgaaggcgcatgggcagaggacgggaagaagcccagcatctgggacacatacacgcacagtggatattcgattgaccgtgatactggagatgtggctgcggaccagtatcaccattacaaggaagatgtgaagctaatgcatgacatgggcttggacgcgtacaggttctcgattgcctggtcaaggcttattccaggtgctagctagtagagtcctagacacagaggagaggatctttttttccctctgtttatcagtgtacttagccatcctatcgtattgttttcgcatgtctgatgatatgccacgtgtttgtagatgggcgtggagctgtgaacccaaaggggttggagtactacaacagcctcatagatgagctcctcagatatggaatacagccgcacgtgaccatctatcacttcgaccttccccaggctctccaggatgaatacaacggcctgctcagtccgagaatcatcgatgattttaccgcttacgcagacgtgtgcttccggagcttcggcgacagggtgaagcactggatcacggtgaacgagcccaacatcgagcccatcggcggctacgaccaaggctacctcccgccgcgccgctgctcctacccgtttggactgggcgtcacctgcacccacggcaactccacgacggagccgtacgccgtcgcccaccacctcctgctcgcgcatgcgtcggctgtgtccctctacagacgcaagtaccagggcgagcaaggaggacggattggactgacgttgctggcctggtggtatgagccagcgacgcagaagcccgaggatgtagaagcagctgccagagcaaatgacttctcgcttggatggttcatgcatcccctggtgtacggcgactatccgcccgtgatgaagaggaacgtgggggcaaggctgccgtcgctgacggcccgagactcggccatggtgcgcggctcgctcgatttcgttgggatcaaccagtacggcgcgatcctggtcgaagcagacctgggccagctcgatcgggacctcagagactactacggcgacatggctaccaacttcacgaacaatctcttgtggtgcacgtgcaaggtgcctcgacttgggctgcggaaccatgaggcgccgtgggctctgagcaaattgctggaacacctgcagacgcactacgggaaccctccggtgatgatccacgagaacggagctgggcacgagcccgacccgtccggcgggttcctgtacgacgacgagttcagggcccatttcctgcgggtctacgtcgaggcggcgctcgcttccgtccggaacggctccgacctgcgcggctacttcgtctggtccttcatggacgtgttcgagtttctcttctcctacaggttccgcttcggtctctacggcgtggacttcgccgccgacaaccggacgaggtacgctcggcgctccgcgcgatggtacgccggcttcctccgcggcggcgcggcgacctcacgcccgcctctgtttcaacgcggacacacggctccacctattcggagtga

SEQ ID NO: 155223 - DNA, 1828 bp, Zea Mays
tgcgtatcttgcggattgacaagagagaaagagcatagcaactaggattaggaagctgggatcatatcatcaatggagatggcaggcgccgcaggaacggaagcatggttgccgtacgtgaccacggtggcgtcctgcgccgtcggcgtcttcttcctgctctacttctacgcgccacactggcggatcagggacgtgccggggccgccggccttgcccgtcgtggggcacctcccgctgctcgcccgacacggacctgacgtcttcggcctcctcgccaagaaatatggcccgatcttcaggttccatttggggaggcagcctctggtgatcgtcgctgacccagagctctgcagggaggttggcgtcaggcagttcaagctcatccccaacaggagcttgccggcgccgatcgccggctcccctctccaccagaagggcctcttcttcactagggatgaacggtggtcggcgatgaggaatacaatcatctcgctgtaccagccatcgcacctcgccggcctcgtccccaccatgcagcactgcatcgagcgcgccgcggacgccataccggcgatggtagttcaggagaacgggctggtcgatttctccgacctctcgctcaagctggccacggacatcatcggtgaggcggcgttcggcgtggatttcggcctcacggcgagcggtcccggctgcgaggccgcggagttcatcagggagcacgtgcactccacaacctccctgaagatggacctgtccgcgccgctctccgtagtgctcggcctcgtcgcgcccgcgctgcagggcccggtacggcacctgctgagccgtgtcccggggaccgccgactggagggtcgcgcggaccaacgcgcggctgcgcgcgcgggtggacgagattgtggtgtcacgggcgcgcgggcgcggccagcacggcgaaaggaggaaggacttcctgtcagcggtgctggacgcccgggaccgcagtgcggcgctgcgggagctgctcacgccggaccacgtgagcgcgctcacctacgagcacctcctcgccgggtctgccaccacggcgttcacgctctcgtcggcagtgtacctagtcgccggccacccggaggttgaggccaagctgctggcggaggtcgacgctttcgggccgcgcggcgccgtgccgaccgccgacgacctgcagcaccggttcccctaccttgatcaggtcataaaggaggccatgagattctacacagtctcgccactgatcgccagagtgacgtctcgacaaacagagcttggaggccacactctcccaaagggcacgtggctgtggatggctccgggcgtcctgtcccgcgacgccgctaacttcgaggaccccggtgcattccggccggagcggttcgacccggccagcgaggagcagcgccggcggcacccgtgcgcgcacatccccttcggcatcggcccgcgggcgtgcgtggggcagcggttcgcgctgcaggaggtgaagctctctatgttgcacctgtaccggcgtttcctcttccggcggtcgccacggatggagtcgccgccggagctccagttcgggatcgtgctcaatttcaagaagggcgtcaaactcgtagcagttgagcggtgcgctgccatgccgttgtagcgtgtacggacggatggcaagggcttgagggtgtacggtgtaccagtggtcacttggacggttagtccggtgtaaacagataaaatgtgttccattgcttgcagtcagtgataacacatctaggcatcttgaatctcgagaagaacaataataatgttggtttgaatcc

SEQ ID NO: 155224 - DNA, 1908 bp, Zea Mays
tgcgtatcttgcggattgacaagagagaaagagcatagcaactaggattaggaagctgggatcatatcatcaatggagatggcaggcgccgcaggaacggaagcatggttgccgtacgtgaccacggtggcgtcctgcgccgtcggcgtcttcttcctgctctacttctacgcgccacactggcggatcagggacgtgccggggccgccggccttgcccgtcgtggggcacctcccgctgctcgcccgacacggacctgacgtcttcggcctcctcgccaagaaatatggcccgatcttcaggttccatttggggaggcagcctctggtgatcgtcgctgacccagagctctgcagggaggttggcgtcaggcagttcaagctcatccccaacaggagcttgccggcgccgatcgccggctcccctctccaccagaagggcctcttcttcactaggtgacttttagttcgttcgttttcctctacgcatttggatccacgagcaggtgcgccacatagcattgcgatctcgtcagggatgaacggtggtcggcgatgaggaatacaatcatctcgctgtaccagccatcgcacctcgccggcctcgtccccaccatgcagcactgcatcgagcgcgccgcggacgccataccggcgatggtagttcaggagaacgggctggtcgatttctccgacctctcgctcaagctggccacggacatcatcggtgaggcggcgttcggcgtggatttcggcctcacggcgagcggtcccggctgcgaggccgcggagttcatcagggagcacgtgcactccacaacctccctgaagatggacctgtccgcgccgctctccgtagtgctcggcctcgtcgcgcccgcgctgcagggcccggtacggcacctgctgagccgtgtcccggggaccgccgactggagggtcgcgcggaccaacgcgcggctgcgcgcgcgggtggacgagattgtggtgtcacgggcgcgcgggcgcggccagcacggcgaaaggaggaaggacttcctgtcagcggtgctggacgcccgggaccgcagtgcggcgctgcgggagctgctcacgccggaccacgtgagcgcgctcacctacgagcacctcctcgccgggtctgccaccacggcgttcacgctctcgtcggcagtgtacctagtcgccggccacccggaggttgaggccaagctgctggcggaggtcgacgctttcgggccgcgcggcgccgtgccgaccgccgacgacctgcagcaccggttcccctaccttgatcaggtcataaaggaggccatgagattctacacagtctcgccactgatcgccagagtgacgtctcgacaaacagagcttggaggccacactctcccaaagggcacgtggctgtggatggctccgggcgtcctgtcccgcgacgccgctaacttcgaggaccccggtgcattccggccggagcggttcgacccggccagcgaggagcagcgccggcggcacccgtgcgcgcacatccccttcggcatcggcccgcgggcgtgcgtggggcagcggttcgcgctgcaggaggtgaagctctctatgttgcacctgtaccggcgtttcctcttccggcggtcgccacggatggagtcgccgccggagctccagttcgggatcgtgctcaatttcaagaagggcgtcaaactcgtagcagttgagcggtgcgctgccatgccgttgtagcgtgtacggacggatggcaagggcttgagggtgtacggtgtaccagtggtcacttggacggttagtccggtgtaaacagataaaatgtgttccattgcttgcagtcagtgataacacatctaggcatcttgaatctcgagaagaacaataataatgttggtttgaatcc

SEQ ID NO: 155225 - DNA, 638 bp, Zea Mays
cggccgtgaggagctcgtggcgcgccatgggagcttcacgagcgagatcggagcagggggagaaggggcgaccgagcgccgtctcccgcggcgagcaccgacgagcagcacggcacggccatggatggagccgggttggagctggagggagctcggctgggactggtcagagggtcgcggctcgcgcaaggagcaaggaggaagacgcggtagaggggatgagcagcggacgcggctggagcagagctgggaaacgcagagctcacgcgcagaaaaaaaatggagcgccatggcaccactcgactggaagcataccagagagagaaaaaggagtggctgcgcgctagaggagagatcgagcgaccgggcgacgaggaacagggacgccgtggccaggaaaagcagggggcagagcgagcttgcggccatggcaggggctccaaatcctgcgcagagaaaaacaggacaggggcagggaagaagacgcctggaatccgagcaagggcttggccgggacgcgtcaagtgaagcttcagggcccgcgtgcttgatttttatgcttgagttgagcggcggctggataagcgcgcagggaaaagaaaatccagagccacgtacagagaagggatgtgaacgag

SEQ ID NO: 155226 - DNA, 486 bp, Zea Mays
atggaaaacgcgagcacgcacgaagcccgatggatgaagagcgaatgtgtcgcagtgacaacgagcaggcacgtgagcgctaacacaagccaggggcaagcacgagtgctgggtacaacagaacccggcgaggcacgcagcagagacgacagtggggatcgagctcgcggcgtggtcaccaagggcgaggtggtggacggcgcacaggagatggaccacggccacaggggtcgccgaccggagcagtttcgcgcgcacggctaccagaaaaacagggagcagcgtgcagccaacagagaagctttgcgcgcgccatggaagagctggagatggccggcggccgtcgcgcaggaaactggacgcagaactcggacaggcgggcacgctagggaagtcagcatggcggccaaggcgagggaggagctcggcgcgcagagctccacggcgcagtggccatggccgagcacaggggcgagatccgagtag

SEQ ID NO: 155227 - DNA, 802 bp, Zea Mays
tgcgactgcttccaaattataaaaataaacacatcacattcattgaactacttcaataattaagctaacggaaattttgaatcggcttaccattctaaatttgacgcgctaacaacgaacacgacaaggattctggtacagctcttgtgtcgagcatttggggaataccacgctgctagcttcgtcttcatccgattcttgggattccttgatgacgcacgaaatgatgacgaccttcgatcgaagtcttcgactgagcacttgataagcgatgcacagggacctcgcttatttttctctaaagtccgggcttcggggttcgatgagatcaagcagggaagaacgaggttcgacgggctcaacgacgatacgaagctatcactagtgacgatactacgatggcgacatgggcgagcgcgacaaggaaacggcaaggctgagctgcgcgcggcaaggagactcgactagggagggaaatccgagctggaggaacaaggagcaggggactggaatcgagcgcaagcgagcaagcgacgacgcgatttctggaaatcgacgacgaggcaagccagcgcgagggagaccgaatccgagcgcggcgcgcaggcacgagcgagcagaacaggcagctggggctcggccggcgagtcaagagctgcacgactggatgttgctgccagcaagaagggaaagagtttccccggcgagcagcgagggacgccgagcagagggcgctccggccaagaagaaacagggcgctgtcgaggagaggctccgcgagctagaggagcaagggaggtag

SEQ ID NO: 155228 - DNA, 1986 bp, Zea Mays
atgggcctcaactttgtgcagcccatgtcacttttgtatagttatcgctggatcaacggtgaagggtgcagattagctgactgctctctgacgttgtctagtctgaatcccacgaccccaccccacgcccgtcttcctcgcctcaacgccgccacccaatccaaccgcctggacgccacaaccccgccccacctcggcgccgccgctccatccaactacctcgacgccgccatccatccaaccgcctcggtgtctgctcctcaatacctggccgtgttcaacatgccccctggaaggatggatggggcaaggacatgcagagaccttggtgaggtgccaattactgagtatgaaaaggagagggctttaaatgtgatgaggaacaacaaaatgttgagtagccttggtataactggattaacatcacttattcgatcaagtagtacaaggaagaactctatcgctcgtgaagactttgatccattgtatgaacctgatcatagtgaggacaatgatcatcatgtggctaatcaggatgatcctttctacattgaaagaaggaacaccaacatgtctactggttttggaggaacaaaaggatccaagagagtggtagcacctaatgtagaagaccaagttggtagagtaactaggcagaagacaaaggaactatccttagttgagaaagatatacatggtttgactgcaaatacagatgagcacacattgatttctgccaattttcctgcacaccatgatgacgagattcagatgtgtgatgaagataaatggataaggggaaaaagtatgggtagacaattggaaaggataagtcgaggcctaaacactaagatcccattggtcatcactgaagggaatagacgtcctgaggttcctatgcaagctgcaatgcttgcatcagaaggaggaattgtaattaggcaacatatgccaatcctaacacactggaaggaatacaagaatgacaaatcctatttggaagacttcgtcggtagaattggtggtcaatttgccatagacaccaaaaacaaagatgtcaaatatgcatgtgctgatttgatgaggtgtaatcagcgacaaatgagatataagctcaagaaggcttactttaatggtgtggcagctgacaaagtgagaacaacatcaccgttgagtactatgacagatgagcaatggatgcaactagtcaatatgtggtctaccccaaagcacaaggacacaatggaagcacttgtggctgagcctggagtagaagggaaagaatctaagacccctacagaagcagttgctcaagtgttgtcttcatcaaaatttctttataatattggtcttgtacctgccacaaagaaaagctgcaatggtggtgatcctacacgcgtggcagaacttgaggctgaacttgaatcagagaagcaaaactcattagaagttagagctcagttagatgccctaaagaagaaggtagaagaatcagaagaagcaagggctaaggagttagaaaagattaatgatctgcaaaaaggagcagatgagaccaatgctctccttcgtcgtctctttagcctcaataagtagttggtcgattgtgccctgattttgctgtcctatttgtactttgctttgcactctacttgatgctggtgacaaaacatgatgatagttttaattttgatatgtccttttggtactgtccttagcacactactagatgctggtgtgatgaaacatggtgacaattttgaaaaatttgaaggatttggttgttgataaatgatatctatgataatatgttgctaagtatatgtgttgattgtttattggtgtttaattacaatggattttgcttatggtacattgtgaaacaaaatgtttgggttctactggaacccggcgcttctagcagctatgtttctacgctgtgttctgtgctcttgactgcaggtttaaaaataaaaaagcaaaaaa

SEQ ID NO: 155229 - DNA, 2034 bp, Zea Mays
atgggcctcaactttgtgcagcccatgtcacttttgtatagttatcgctggatcaacggtgaagggtgcagattagctgactgctctctgacgttgtctagtctgaatcccacgaccccaccccacgcccgtcttcctcgcctcaacgccgccacccaatccaaccgcctggacgccacaaccccgccccacctcggcgccgccgctccatccaactacctcgacgccgccatccatccaaccgcctcggtgtctgctcctcaatacctggccgtgttcaacatgccccctggaaggatggatggggcaaggacatgcagagaccttggtgaggtgccaattactgagtatgaaaaggagagggctttaaatgtgatgaggaacaacaaaatgttgagtagccttggtataactggattaacatcacttattcgatcaagtagtacaaggaagaactctatcgctcgtgaagactttgatccattgtatgaacctgatcatagtgaggacaatgatcatcatgtggctaatcaggatgatcctttctacattgaaagaaggaacaccaacatgtctactggttttggaggaacaaaaggatccaagagagtggtagcacctaatgtagaagaccaagttggtagagtaactaggcagaagacaaaggaactatccttagttgagaaagatatacatggtttgactgcaaatacagatgagcacacattgatttctgccaattttcctgcacaccatgatgacgagattcagatgtgtgatgaagataaatggataaggggaaaaagtatgggtagacaattggaaaggataagtcgaggcctaaacactaagatcccattggtcatcactgaagggaatagacgtcctgaggttcctatgcaagctgcaatgcttgcatcagaaggaggaattgtaattaggcaacatatgccaatcctaacacactggaaggaatacaagaatgacaaatcctatttggaagacttcgtcggtagaattggtggtcaatttgccatagacaccaaaaacaaagatgtcaaatatgcatgtgctgatttgatgaggtgtaatcagcgacaaatgagatataagctcaagaaggcttactttaatggtgtggcagctgacaaagtgagaacaacatcaccgttgagtactatgacagatgagcaatggatgcaactagtcaatatgtggtctaccccaaagcacaaggaaaaatgtgtgaacaacaaagtgatccgtggaaaagttcggttccagcaaaagacaggatctcggagttacattgcacatatgcatgccgtgaagcaagccaaatatggagatgcaccaccaagtgcgattgatctttttaaagagtgccattgtagtaggaagactggttttgctgagcctgtaaaggaagcaattgacacaatggaagcacttgtggctgagcctggagtagaagggaaagaatctaagacccctacagaagcagttgctcaagtgttgtcttcatcaaaatttctttataatattggtcttgtacctgccacaaagaaaagctgcaatggtggtgatcctacacgcgtggcagaacttgaggctgaacttgaatcagagaagcaaaactcattagaagttagagctcagttagatgccctaaagaagaaggtagaagaatcagaagaagcaagggctaaggagttagaaaagattaatgatctgcaaaaaggagcagatgagaccaatgctctccttcgtcgtctctttagcctcaataagtagttggtcgattgtgccctgattttgctgtcctatttgtactttgctttgcactctacttgatgctggtgacaaaacatgatgatagttttaattttgatatgtccttttggtactgtccttagcacactactagatgctggtgtgatgaaacatggtgacaattttgaaaaatttgaaggatttggttgttgataaatgatatctatgataatatgttgctaagtatatgtgttgattgtt

SEQ ID NO: 155230 - DNA, 1746 bp, Zea Mays
atgggcctcaactttgtgcagcccatgtcacttttgtatagttatcgctggatcaacggtgaagggtgcagattagctgactgctctctgacgttgtctagtctgaatcccacgaccccaccccacgcccgtcttcctcgcctcaacgccgccacccaatccaaccgcctggacgccacaaccccgccccacctcggcgccgccgctccatccaactacctcgacgccgccatccatccaaccgcctcggtgtctgctcctcaatacctggccgtgttcaacatgccccctggaaggatggatggggcaaggacatgcagagaccttggtgaggtgccaattactgagtatgaaaaggagagggctttaaatgtgatgaggaacaacaaaatgttgagtagccttggtataactggattaacatcacttattcgatcaagtagtacaaggaagaactctatcgctcgtgaagactttgatccattgtatgaacctgatcatagtgaggacaatgatcatcatgtggctaatcaggatgatcctttctacattgaaagaaggaacaccaacatgtctactggttttggaggaacaaaaggatccaagagagtggtagcacctaatgtagaagaccaagttggtagagtaactaggcagaagacaaaggaactatccttagttgagaaagatatacatggtttgactgcaaatacagatgagcacacattgatttctgccaattttcctgcacaccatgatgacgagattcagatgtgtgatgaagggaatagacgtcctgaggttcctatgcaagctgcaatgcttgcatcagaaggaggaattgtaattaggcaacatatgccaatcctaacacactggaaggaatacaagaatgacaaatcctatttggaagacttcgtcggtagaattggtggtcaatttgccatagacaccaaaaacaaagatgtcaaatatgcatgtgctgatttgatgaggtgtaatcagcgacaaatgagatataagctcaagaaggcttactttaatggtgtggcagctgacaaagtgagaacaacatcaccgttgagtactatgacagatgagcaatggatgcaactagtcaatatgtggtctaccccaaagcacaaggacacaatggaagcacttgtggctgagcctggagtagaagggaaagaatctaagacccctacagaagcagttgctcaagtgttgtcttcatcaaaatttctttataatattggtcttgtacctgccacaaagaaaagctgcaatggtggtgatcctacacgcgtggcagaacttgaggctgaacttgaatcagagaagcaaaactcattagaagttagagctcagttagatgccctaaagaagaaggtagaagaatcagaagaagcaagggctaaggagttagaaaagattaatgatctgcaaaaaggagcagatgagaccaatgctctccttcgtcgtctctttagcctcaataagtagttggtcgattgtgccctgattttgctgtcctatttgtactttgctttgcactctacttgatgctggtgacaaaacatgatgatagttttaattttgatatgtccttttggtactgtccttagcacactactagatgctggtgtgatgaaacatggtgacaattttgaaaaatttgaaggatttggttgttgataaatgatatctatgataatatgttgctaagtatatgtgttgattgtt

SEQ ID NO: 155231 - DNA, 2569 bp, Zea Mays
atgggcctactcattcctggcccagaatgcccaggaaaggattttgatgtctttatggaacaactcattgaagagttattggagctttggaaaggtgtcactacttgggatgcattgagtggaaacaattttgaactacatgctgcagttatatggtgcattcacgactatccagctttgagcacattgtcaggtcgggtcacaaaaggctattacgcttgtgtgcattgtgacaaaaatccttgctccaaaagaataaggaacaagatatgctatgtttatcatcgacgtttccttccaaaagatcatctatggaggagaaataaaacttttgatggtcatagtgaacaacgtgagaagccagaggaatttaccatagatgagttgatgcaacaattggagagggtaaaagatgtaagaccaggaaaacatactaaaagcaaaaagagaaagagggaagtagaaggtcaatgttggaaacgaagatcatgtctatgggatttgccatattggtcaagtttgaagttgcgccacaatcttgatgtaatgcacattgaaaaaaatatatgtgagtactttcttggtacatttcttggcattgttggaaagacaaaggacaccattaatgctaggcttgatttggaggacatgggcataaggagacatttacacttaaagcataatggtgactcatacaattttcctcatgcaccatacacaatgaataaaacacagaaggttgctttttgtgactttttgagaagtgtgaaattccccgatggctatgtttctaacttagcaacatgttttagtactgatggatgcaacctccaagcattgaaaactcatgattgtcatttccttcttcaaagaattttacctgctgctattagaggaatcatgagtaaggacatatatgaagcacttgctgaattaggtattttctttcagcacatatgtgctaagacattgaagttggatgttttacaaagaatgaaagttgaaatcccaatcattttgtgcaagcttgagaaaatatttcctcctttctttgatgtgatgctgcacttggctattcatttacctgacgaggcaatcctaagaggaccagtgcaatatgggtggatgtatccaattgaaagaaggttgtatacattgaaacgttttgtaagaaatatggctagacctgaaggatccattgcagaagcatatgttgctaatgagtgcttgacagcttgctcgaggtacttcgatgatgttgacacacgacacaatcgagagggtaggaacaaagagcgtgttgatttgagcagaggcaaattttatgtttttcagcatggagttgaacttcttggagtgccaagaattacatacctctaagattattatgataagatggtttggtatgtcctaaacaattgttcggaggtcgagccatatataaagtatgcatttccttatatgtttgccatttttatatgaattgttattatcgcctctaatatataccatatcacgatgtataaggaagagttagagaatgaagggattgttaatgtggaaaaaactattgagaagcacttttcctcctggtttaagaagcatattgcaagtttgcgttttgtcgatggagaagacattgatgatgacctatatgcattggcatgcgaacctgatttgcgagttcgaattttttctgcatgtcttgttgatggtgtccggtaccacaccattgaccgtgagagaaatagaagaacccaaaatagtggagtcatggttgaaggcactcataataatgaatgcattgatttttatggctgcttaaagaaatatcgagttgcagtataactcagatttgatggagcatcggacaattgttcttttccggtgtgattggtttgacactcatagcaagaaagttagtatgaaatatgatggatatttagaagtataaaccatagtagttgttggtacaaaaatgatacttttattttagcagcacaagcaactaaggtattttatttgcaagacatcaagaattctggaaactggaagattgttcaaaaatttacacataggcacttgtggagtgtggctgaaaatgacattgatgaaagacctagttcctcaggactatcataccaagatgatacatgtgttggttctgaagtgcaagttaatgaaggagatatggagatacctggacatcaggatgctgacgaatctgttaatgtcaatgcaagtgtggttgatgaatttcgggtgcaacgagaagaggaagtggaagagtatgagacaagcgacaatgaagatgaaactggatggcaatatgctagtgacaacgaagaatcaataactattgtcaatgacgatgatgatttcagtgataacgagtagcatgttttttgtttgatctgagagaagtgaactctatgctgtattttgtttgatttttaagaagtgaactagctactgttatttgagaaaagtgaactgtatgctgtaatttgtttgatttttaagaagtgaactcgctacggttatttgagaggagtgaactttatgcaat

SEQ ID NO: 155232 - DNA, 456 bp, Zea Mays
atggacaaatcttggatcaatgcaacactatttagcaagccacacctagaaggagttagtgagttcatgaagcttgtaatagagcgatttaatgcgaatgaagagatactttgtccatgccgcaagtgtttgaatcggcttagtggacatagaggacaggtggaggaccacttatatcttcatgggatagctagtacatacactaggtggatatatcatggagaagccatggatgacataattaatgaaaatggtgattacgaggatgaacatgtgagtttcaatgatgatgctggtatgaatcaagatgaagaagatcctgatgataggattaatggtatggtagaggagttatacacagccgaagatcaaggtaaaaggaaatctatgtttggagatatactagaggagatgaaacaagaactttatcctggtgcaacttatacaagattttcg

SEQ ID NO: 155233 - DNA, 1373 bp, Zea Mays
cctctctgtccctcgcatcttcttcccccgtgcgcagcttcccccagcttggaccgcaccctggttcccgctccctcttgctcagctctccagcgcgcgccctgcttcctcctcgccggccaccaggaagctctctccgctgcagcaccgtgcgtgcaggacgttctcctctcgacctcctcccgcgctcggctcctggatcggatctccgggtcgtgtgctccagtgccggcgcgcgcccgtctcctatggcgctcctctctgctgccgcacctatctccctgctcgccctctacatcgtcatgcccctccttgctcctcccaggtccgactgctgtcctccctattccacctcttcaagctcgcctccacctcggttctggtgcatgctcggccaccacgatgtcccagcgccggtgaaggtccgtcctgcagcagcaccgtggtggccttcgacttggagcactgcgacgactccatgccgtgcccatctgcttcctccatgcccgagtccaagatcctcctccggctggttcatcacggacacgggcacaaagcctgtacgcttggagtgctgacctcaacgtgccgctcggcttgggcactggccccctcggacccagccatcgcttgccgctaaaccaccgtcggattggcttccagctccccctcgcgcggctcccaggagctaagtccgtccgccgtgctatgtgcctcggtctctagtcaaagaacaccagtgtcctctgccccttgctcacctccctggtcgtgctcgctgggacattattctctagccaactgctgttgcgagctcgcccggacaccccgcctcctcatcgtatcatgcaccatccccgagtaacgtgtgcacgtcacgtccctgcccttccttgccagtcttgtttggcttcagcgcccgcctcttggattccttgtcgtttgttcctgcttcgactcctttgtggtgggcgaggactgccacccgggggctcaaccatgcctaggctgccggacgcccgaacccggggtcgccacgccatcattttcgtcgaatagaatcggcgtgccaacacgttgatgtcgtcatttacctccgcactattgctggtcggcgatcttgctatcgccgtgcttgctccgactctgcctctacgtgctcgccttcgatcactgctacaatcttgggagtttaagtgaagtagtgaaacccacggggcgcttgccagggactcgacaacaagaatcatcaacgtttgcttggagttctagttaattcggtaatcattctctagtttgctatttttattaattgattgggtcgatggattgaatagatatattaatcacgatgattatcttgattgaagcat

SEQ ID NO: 155234 - DNA, 1651 bp, Zea Mays
ctctccttcatccgtccagccacgcgatatttcctatgtctcagccattcttatctctgcagtcgatcctcatcgtcgcgcacagcaaaaaaaaggaaaatctgcccccgcccccattccctggatattttctcgcggtgcttatccccttccacgcgtgcaagcttcttcccccggtcgcccctcctctctctatcttcagcacctctctctccctcgcgtcttgtccccccgcgcgcatcttcccccagctcggaccacgccctagttcccgctccctcctgctcagctctccagcacgcgccctgcttcctcctcgccggccaccaagaagctctctccgctgcagcaccatgcgcgtagcggcgtaggacgttctcctctcgacctcctcccacgctcggctcctggatcggatctccgggccgtgtgctccagtgctggcgcgcgcccgtctcccatggcgctcctctctgctgccacgcccatctccctgctcgccctctccatcgccgtgaccctccttgctcctcccaggtccaactgttgtcctccctattccacctcttcaagctcgcctccacctcggctctggtgcatgctcggccaccacgatgtcccagcgccgatgaaggtccgtcttgcagcagcaccgtggtggccttcgacttggagcactgcgatgactccatgccgtgcccctctgcttcctccatgcccgagtccgagatcctcctgcggctcgttcatcgcggacatgggcacagagcctgtacgctcggagtgctgacctcaacatgctgctcggcttgggcaatgaccccctcagacccagccatcgcttgccactgaaccaccatcggattggcttccagctccccctcgcacgtctcccaggagctaagtccgtccgccgtgctatgtgcctcggtctctggtcgaaggacatcggtgccctctgcccttgctcacctctctgatcgtgctcgtcgggacattattctctagccaactgctgctgcgagctcgcccggacacctcgcctccttgtcgtatcatgcgccatcctcgagcaacgtgtgcacgccgcgtccctgctcttccttgccggtcttgtttggcttcaacgtccgcctcttggattccttgccgtttgttcctgcttcgactcctttgtggtgggcgaggaccgccactcaggtgctcagccatgcctagactgctagacgcccgaacccggggtcgccacgccatcattttcgtcgaatagaatcggtgtgccaacacgtcgatgtcgtcatttgcctccgcactattgctggtaggcgatcttgctgtcgtcgtgctcgctccgactctgtctctacgtgctcgccttcgatcaccgctgtaatcttggaagtttgagtgaagtagtggaacccacggggcgcttgctagggactcgacaggaggcaggaacaagaatcatcaatgtttgcttggagttctagttaattcagtaatcgttctctagttcgctatttttattaattgattgggtcgatggattgaacagatatattaatcacaatgattatcttgattgaagcataaaaatgtcgtagttatattagatggttgtcaaaatatcttgttgcatgtgaggaca

SEQ ID NO: 155235 - DNA, 345 bp, Zea Mays
atgaagaaggaggcggtgaacatgaggcctacggataccatgacgacggccagcgtcgggtaccactccaccggcacggggctcgagattgccttcgccgcctgcgacacgaatcccctgggtcagcacagcgggctcccaagcagaaccctggatctacgcaagagaaggcagtggagagttcaccattccgtgagatctgctgccgctgtagtcgccgcccgctccgcctgcctcgtcgcccccttgtcgccgccgcgatgcacaaacaactttgtgacgaccagagccaaatggatccgtccgggacgatcgcaagttttagtgggcttcggatccgaataa

SEQ ID NO: 155236 - DNA, 246 bp, Zea Mays
atggccaggaggaggtgccgcggtggcaggcgtctgcgtctgcccactcgcccaggtgagagccgggaggcatggcaggctggccggctggcggccgtcgggcctgcggcctgcaactctgcgagtgagagacagtggatggcattggaaggtggctgcgacgtggagtgccagactgccggtgccaaagtgggcgacgagctgacgacggtagacggcagaggcgcagacggcactgggcactag

SEQ ID NO: 155237 - DNA, 2153 bp, Zea Mays
atgggaaaaaatctaaaaagaaaaatggcaagcgcaagaggaaacaataagggtggctcatataatgagtatgagcaacaaaagcttgaaaatattgaaaggaacaaaaggaggttagaagaattcaacatccctgcaatcatcaactctttggggcagcaacaaaatcgatctaggaaaacttcaaagaaagttcagaacagaaatactgtatcaactgaacgtccaaacttgcgaccaagactacaaagaaacaattgtcagtttgatgaagaacatgtgcttgctgatttggagccagtaggagatttccttagtaacaatgaagacctacagattggtgaccaaagcaatggtacagtgagaaagaaaggaaggggaataacgaagaaagatgacatattctcaaggacaccaaatatgcctaaactcaaaatatctcttaatgattatggacagccaattggtgaaaacgctaggcaactttcaagtgttatagggtgtcaagttagaaagaagatatcaattgcttgtgtagattggaggcttgttgatgttaaaaagaagtacgagctgtggactgaaataaagtcatactttgatattgatgacgctgccttaaattgggttacacgcactgctgggaggaaatggaaagaatttaaggcaaatatcaaggagctgtattttgatcctgagctgactatagatgatgttggggaatgtccagacaaaagaattagtgatgatgattggaaatttctctataactattggaagacttctgaatttcagactctctcgaaagtgggaaaagcaaaccggcaaaaactgcagctgcaccatactactggaagtgtgaactatgcttgctcacaacataaattggctatcaaactaggacgtcccccacgaagagatgaaacttttatcaaaacccatacaaggaaaaatggtgttccttcaacctctgcagagccaataatggcgaaacttaaagatcttattgaaatctacccagacttgaaagagcggacaattcaggaaggtgatgcatatgctgttctttgtggactgaaagagccaaaaggatatgtccgtcttatgggtctaggctcgactcctcaagatgttggtactccaggattaaagtgttatgcaccaacaagacttcaaatggaggttatggctcgaaagaaagctgaaagtgacagggatgctctagagcaacgtgtttttgagttgcaggctcaaatggagcaaagggcacaacaagatagggcaagtcccatgtcacaacacggttccacatcacgtctacatttggatgcaaggttgaatgaaactggtgatgctggactagatgaaggggaggaagattatgtttctgaagatgatgttgatgacaacttacatgaccaggtgcatggtttaacctcatcaagaacaacagcacacaaaacaaccgcaccaaggagtaatgaaacttctcgctctcaacatgatgctcttgttggaaaagatgtcatattatatgccttgttgagatcagatcaacctgtggctaaatgaacaataatttcaactaaaccaaacactattcttgcgggccagtcccttgggagacaatgttgtgaagttattgtgtcttgtgtgttgaaaagagatgcacatttgcctcgtccctatgccaatatggaaactatgggtgatgccaacaagatgtcaattgcatggccatacaatagagtaataagctaaacttaacttactattttgaatgatatatatgacaaattagtgatgaattcttatttggacaactaaagattacgaacaaggcatcaacaccacctgcagtttgaggtaatgcatggtgtaaaaagctagctacttgaggacaagctgacatgcttcgaggacaagctgacatgcttcttttggtttcaagttcttttgtgggcaactttgtatctaatagtcatgcaatgttgcgcagatcgaataggcatgatggaaagcttttgtaatgtctaacccatatactgtctctgatgaccaattgggtatatttaggaatatttgtagcttatgactacaactcaattgtggatgtttaagtgctgtcgatgaatctatgattatttgaacct

SEQ ID NO: 155238 - DNA, 294 bp, Zea Mays
atggcgttcatggtcctagaactaagcgtgatggtctcctcaggcattggcttcgtgggtcacaattggtccaaccgtccaagcaatgtccaatgtgagagcgtggaattccatggaccaaagcaaattagcaaggaaaagggcttggtagtagaggtggaggacaatggcgttcatggtcctagaactaagcgtgatggtctcctcaggcattggcttcgtgggtggctggttcttcccgtcatagatcagaagaagcctcgagttgtcaaaaagttcatcagcgttgcttga

SEQ ID NO: 155239 - DNA, 1254 bp, Zea Mays
atgcacacaagatgatgcaagaattggtcccaaatttccacttcccggcagccatggttgactgcagacgcacgcaggacacagattgggatccatgcaactctacctcgaagcactataaatagggactcaaatcgaagctgccgcgcagagagaccttacggcttaagcaagtagcttcattcaccgagcgtgcaggcacaggcagcagcttgccatggcgtctcccaccttgatgcaatgcctggtcgccgtttccctcctctcctgtgtcgcccacgcacagctctcgcccacgttctatgcgtcctcctgccccaacctgcagagcatcgttcgggcggcgatgacccaggccgtcgcaagtgagcagaggatgggcgcctctctgctcaggctcttcttccacgactgcttcgttcaaggctgcgacggatcgatccttctcgacgccggaggggagaagaccgccgggccgaacctgaactcggtgcgcggctttgaggtcatcgacaccatcaagcggaacgtcgaggccgcgtgccccggcgtcgtgtcgtgcgccgacatcctcgcgcttgccgcgcgcgacggaaccaaccttctcggcgggccgacctggagcgtgccgctcgggcggcgggactcgacgacggccagcgcctcgctcgccaacagcaacctcccgcccccgacggccagcctcggcacgctcatctccctgttcggcaggcagggcctgtcgccgcgcgacatgacggcgctgtcgggcgcgcacaccatcgggcaggcccggtgcaccaccttccgcggccgcatctacggcgacaccgacatcaacgcctccttcgcggcgctgcggcagcagacgtgcccgcggtccggcggcgacggcaacctggcgcccatcgacgtgcagacgccggtgaggttcgacacggcctacttcaccaacctgctgtcgcggaggggcctgttccactcggaccaggagctcttcaacggcgggtcgcaggacgcgctggtgaggcagtacagcgccagcgcctcgctcttcaacgccgacttcgtggcagccatgattaggatgggcaacgttggggtgctcaccggcaccgctggacagatcaggcgcaactgccgggtcgtcaacagctagagatacgcatcggattcgatcgatatacttgtagctatatagctagtcgtgtcacgtgttctcaactggaaagaacgagacaaactggaagtatt

SEQ ID NO: 155240 - DNA, 1397 bp, Zea Mays
gcactataaatagggactcaaatcgaagctgccgcgcagagagaccttacggcttaagcaagtagcttcattcaccgagcgtgcaggcacaggcagcagcttgccatggcgtctcccaccttgatgcaatgcctggtcgccgtttccctcctctcctgtgtcgcccacgcacagctctcgcccacgttctatgcgtcctcctgccccaacctgcagagcatcgttcgggcggcgatgacccaggccgtcgcaagtgagcagaggatgggcgcctctctgctcaggctcttcttccacgactgcttcgttcaaggctgcgacggatcgatccttctcgacgccggaggggagaagaccgccgggccgaacctgaactcggtgcgcggctttgaggtcatcgacaccatcaagcggaacgtcgaggccgcgtgccccggcgtcgtgtcgtgcgccgacatcctcgcgcttgccgcgcgcgacggaaccaaccttctcggcgggccgacctggagcgtgccgctcgggcggcgggactcgacgacggccagcgcctcgctcgccaacagcaacctcccgcccccgacggccagcctcggcacgctcatctccctgttcggcaggcagggcctgtcgccgcgcgacatgacggcgctgtcgggcgcgcacaccatcgggcaggcccggtgcaccaccttccgcggccgcatctacggcgacaccgacatcaacgcctccttcgcggcgctgcggcagcagacgtgcccgcggtccggcggcgacggcaacctggcgcccatcgacgtgcagacgccggtgaggttcgacacggcctacttcaccaacctgctgtcgcggaggggcctgttccactcggaccaggagctcttcaacggcgggtcgcaggacgcgctggtgaggcagtacagcgccagcgcctcgctcttcaacgccgacttcgtggcagccatgattaggatgggcaacgttggggtgctcaccggcaccgctggacagatcaggcgcaactgccgggtcgtcaacagctagagatacgcatcggattcgatcgatatacttgtagctatagctagcttgctcgtcgaccgagcgcccattgatggatcgaccgacacagagctcgcttctgatgaaccccagtacgtgtactctctagtatatatacatagatatagctatagattgaacacgtcatcaataccagtagaataagtggtgaacgaccacgcaacgacaagagtgatcgaagcagtgtcacttggttaccgaaatgattcatctgacattttcgtattggattttgaacgcaactatatatatagacaccatccatgtttactctggtctcagtcatgtgttcgaaagcagtgaaggcacat

SEQ ID NO: 155241 - DNA, 1832 bp, Zea Mays
acacagcccacttgcttaacgcgagaaaccctcctcctccccccatttcctacatcttccagactaaaaccccaggcctcgcgagtcgccgccgaccgccgcaaccacgcgctacgcccccgatggctcacctccggctcctcttctcatacttgcggcggaacccgcagcgccaccgcctgctctcactcttccacttctcctccgacgccaagtccagctccgcctcgccgccgcctcctcccatcaagcccgtctcctacgctccgaagccgcagcagcaggccccgcccgaggagtctgccgccccgacaaccccagacgttgcccctagggaccaatccccactgccacgacggcctcagcagccgatgccgccgcgggagtggacgcggcaggatatgcggtacgtgaaggacgcggcgcccgcgatctcgcccgtctcgtacccgtccagggtcgcgccgctgccggaggaccgtccggtcggcggcgaggtggaggaggtgcaggacggggggctgcagggggagtcggagcggatccagatgaacgcggcgcgtcccaccaggagcgtctttgggatgcacgaggaggataggctgccgtacccgacggtcatacccgtcgtcaagcggccgcagaaggtcgccattgatttaatcgacgccatccgcctagttaagactagtgcaaacgagaagaagcggaattttgttgaaactgttgaagctcatgtgatattaggtgttgatcctcgtcgtggtgaccagatggttcgtggcgccttaacattgcctcatggcactggcaagactgttagggtagcagtatttgctgaaggtcctggagcagacgaagctagagctgccggagcagatgttgttggtggtgatgagttgattgaggagatccgcacaggaggaggcaaactaagctttgacaagtgcatagcaaccccaatgttcatgccccgattgtcaaaggttgctaggatattgggtccacgtggtttgatgcctaatcctaagctaggatctgtgacgaatgatgtttctggtgcggtcaaagcggcaaaatcaggacgtgttgatttcaaaatagataaaactgctatagtgcatgttggccttgggaaggtaaactttactgaggagagtttacgtgaaaatattggtgcttttgtgcatgcacttttacttgctaagccagtgggcttaaagaaaacttcaaaatatgtcggatatgtgaagaagttcacactgagtagcacaatgggacccggacttcctgttaccataccatcactatctgtggccgccgatcactataacaaggttcaagtcagctaagtcaatacagtagaacatcgaatgtagctttctttctccaatagccgtggcctgcagatggcggtggagcttaaccagtcagcaaggttgagatttgggtggcttgctgttttgttattggggataataccttttgtggacaaggatcattcaacaaacatcataacctataactttattttatccttgtcactgcaattttgagattgcgttgctggtctacctgtgttatccagagtcttgtcatttgttgcacgaaatgtaatatcgaaatacggtagttttagggcattacttttgataataagaaatgaagtattgaaccatgattcgattcagaatccggagcgtacactcacaatcgagaataagctagctggcacgatgtctggagttattgatcagtttcttttaacttcttttcgagttatatttgatagggctggaaatggatgtctggagattcgaattattcgtatt

SEQ ID NO: 155242 - DNA, 409 bp, Zea Mays
gcagaagagaatagagcaaagtgtgtgtgtgcagaagagaattgagcaacagagacagataagattacgggagagaacgcaggactgtgagagaatattcttctacgtacatcgcttttcctattacatcctacggcaggtgcctaaattgaaaagccaactaactaatggcctcgccactgacagcacggcgctacaccgcaccacctcccacatggtgcctacaggttcctcaagcactgacgaggaagtcgcccgcaagaagatcgaatcgaagctcttctggccccctcccaagccgctaaggaggccctcgtcgcccgcgcccgggtacagactgctgctaccgttgcaagcagacgccaccgctcaggctttgttagtttacgcaaatccagctttggattag

SEQ ID NO: 155243 - DNA, 2187 bp, Zea Mays
cccctccgcccttgttctattccgtccgtagtgccccagcttcccctgtgtccattcagttccttcattcaatgcaaccccagctcgaatctcctccgtgacgtgcagctctccacacgtcctgcttctccgatgccactccaggtccaccccctcctcctgctcctcttggtcagctcgcttccctcctgcgccatctcctccggttcctcctcttgcgccggccgcgacgacgcggccatcgtcgccgccgcgttccggcacgtgcgcaacttccgggccccgaggacgaaagcatgccagccggtcagagcgctccgcctcccgtcgcggaacctcaccggcgcggtgtcgtgggcggcgctggcaaacctgtccgcgctcgccgcggttgacctctcgggcaacgcgctccagggcgccatcccgggcgggttctggcgcgcgccatcgctccgcgcggttgacgtctcccgcaaccagctcggtggcgcgctccgggtggagcccaacccgcagctccagtcgctcaacgtatccggcaaccgcttcaccggcgtcgacggggtggaagggctctcggggctcgtcgcgcttgacgtgtcaacgaacaggatccgggcggtgccgcggggtctgcggcgtctgacacggttgaagcggctcgacctgtcctcgaacgggatgcgggggtggttccccggcgacttgccgccgctcggtggggtgcgttcgttgaacgtctcgtacaacaagttctccggcgtggtggacacgggcgccgtcacgaagttcggccactcggcgttcgttcacgccggcaatgcgtcgctggtgttctcgggccactcgacagagccacggcggccacggccatcacctcctcatggaaaaagcaaaaagaacggtggttcggccgggacgtcgacggagagcaaggcgacgaggagtagcaagaagaggaagcatctgagcatcgtggcggtggcggtgatctgcggggtggtgtccctggccatgctgctctgcctggtcgggtgcgtggcgtgcggcgtgctgaagtccaggcagaagggaggaaaagacgacgacgagaagaagccacaatggggcgagaagggcgaggaggagaaggaggaggacgtggtggtcgcggcggccaggggtgcatcggcagcgcccgtggtgctgttcgagcggccgctgatgcagctcacgctggccaacctggccgcggccacgtcgggcttcggccgcgagtcgcagctcgcggagcgcggcggccgcagcggcgcagcgtacagggccgtgctccccggcgaccagcacgtcgtcgtgcgcgtcgtggagggcgccatggccgggctcggcgaggacgacaacccggcggccgctgccaccgcattccgggagctcgcgcgcctccgccaccccaacattcttccgctccttggctactgcattgcaggcaaagagaagctgctactgtacgagtacatggagaagggcgatctgcaccggtggctgcacgagctgccagcgggtcggccggacatggacgacacgggcagcggcgacatttgggaggcggcggaggtcaagcggtccatctccgactggccgacccggcaccgcatcgcgctgggggtcgcccggggcctggcgttcctgcaccagggatgggccggcgggtcggggcgcgcggcggtcgtgcacggccacctggtgccgaccaacgttctgctgtgcgacgacctggagccccggatctcagacttcgggcacaacaacgacccgccgtcggcggcgacgcccgagggcgacgtgtacgggttcggcgtgctggtgctggagctgatgacggggcaggccgggtgggacgaggcgtccgtgagctgggcgcggggcatcatccgcgacggcaaagggctggacatcgtggaccctagggtgcgggacgaggccgccggggcggaggcggaagcggagcgagagatggtggagtgcctgcgggtggggtacctctgcacggcgcacgcgccggacaagcggccgacaatgcagcaggtagtgggggtgctcaaggacatccggccggcgcctcccacacccggtccgggcagctgagccaagtgccaccagccacgccgggggggtcggactcggacggacacatgctcggggtcg

SEQ ID NO: 155244 - DNA, 1002 bp, Zea Mays
cccctccgcccttgttctattccgtccgtagtgccccagcttcccctgtgtccattcagttccttcattcaatgcaaccccagctcgaatctcctccgtgacgtgcagctctccacacgtcctgcttctccgatgccactccaggtccaccccctcctcctgctcctcttggtcagctcgcttccctcctgcgccatctcctccggttcctcctcttgcgccggccgcgacgacgcggccatcgtcgccgccgcgttccggcacgtgcgcaacttccgggccccgaggacgaaagcatgccagccggtcagagcgctccgcctcccgtcgcggaacctcaccggcgcggtgtcgtgggcggcgctggcaaacctgtccgcgctcgccgcggttgacctctcgggcaacgcgctccagggcgccatcccgggcgggttctggcgcgcgccatcgctccgcgcggttgacgtctcccgcaaccagctcggtggcgcgctccgggtggagcccaacccgcagctccagtcgctcaacgtatccggcaaccgcttcaccggcgtcgacggggtggaagggctctcggggctcgtcgcgcttgacgtgtcaacgaacaggatccgggcggtgccgcggggtctgcggcgtctgacacggttgaagcggctcgacctgtcctcgaacgggatgcgggggtggttccccggcgacttgccgccgctcggtggggtgcgttcgttgaacgtctcgtacaacaagttctccggcgtggtggacacgggcgccgtcacgaagttcggccactcggcgttcgttcacgccggcaatgcgtcgctggtgttctcgggccactcgacagagccacggcggccacggccatcacctcctcatggaaaaagcaaaaagaacggtggttcggccgggacgtcgacggagagcaaggcgacgaggagtagcaagaagaggaagcatctgagcaccgggctcggcgaggacgacaacccg

SEQ ID NO: 155245 - DNA, 449 bp, Zea Mays
aaatattcttaagggcgtgtttggcagggctccagctctaccaaatcaactctggagctgctgctccaccacagagcagctccatgcatggagctggactctcaatttgatgctgagaaatgtgtttggcaggaataacagctccagcttcaaaaacaaggaatttgaatggattgccctattttgccctcaggaacagaatgcgttggtctttttttctgcgcctggagacttgcatgtcgctgtttttttttctttttgccgcgccgtgcctggacgctagatggtgcatggcgttttttttaatagtgaaacgaacaagtcatgcatttgatcaaacaaacatcctatcaaatgataattgttcaaactcttagaagaatagtttgatcatcaaaacaagtcacaagaattgttcaaagcttagaaatataaaattacatattttg

SEQ ID NO: 155246 - DNA, 1764 bp, Zea Mays
atgccgcctcgtagagctcggggtagtccgcaagctcctagtggggactcgatgagtccggcggcaatgttagccgcgatgcaggccatgcagcaggagttggcccttctgaggcaagccattcctgtcgcccctgcaggtgctgctcagggagctggaggtggagaagtgcccgggggcgctgtccctgcgggtgctgttcctggcggcggggccggggtgcctcttcctgtcagtggtctttctctgatgcagtggatgggcatgaagttggattcttttgatggcagtggtactccggtcgaggcgacagattggctgacttatgtggaagataagatgaatgtcttcgagattgcttatgaagatcgggttcgctttggcactcagctgctgaagggtgaggctcagatttggtggagaggcgtgcaggcagcgcactcctcctcaccaggagtcctatcatgggatgttttcatcaggcagttcgaaaggagattctacccggtcacctttctggagaaaatgaagattgacttgcagtccttcaagcaggagaagaagtctgtcacagagtatgaggtgggcttcaacaaaatggtccgctttgtccctcatgtggcttataatgagatggagaaggcgagccaattccgtcagggtctaaagccttctatcaggcatgctctgggggcctttccgttggtggacttccgtaccacagtggagcaggcgctgggtgtggagatgcaacaccagtacaccatggagtcgcagaagtcttcgggtgttgatcaacctcgcagccaggacacgaggaggggcaacactggaggtccagctcacaagaggggcaagtctcagcatcagcgccaccatccttaccgtggcaaatcttctgactcaggtacttcaggaggaagtactcagaggtttcgggccgttcctaagcccgggttggggctggtgtgtttccgctgtggagatgcgcatcgtcgtgcagagtgtcagtggagtggcaggtgttctatctgcagtcaggaccacaaggatgtggtgtgtaggaggaatcccaatgggaagctcagatgggagccgatagcttcctcctcttctcagggcactatcaatatgatgtcaagtgctgagcagcagttttcagttcctcttcctccacagcagctttatgtgcccgggacttctcagttcgtgccgatgcaaggttttccgcagtatcaggttgtgcctactcctgcgccgtctacccctatgctgtctcagtttggagctccgcgccagcctcctccggtggctcagtggggttcttctgttaatgtcactccgggagcttcctcttctgcgggtatttctggagcttatgtgctacccgctacggatggcagggagcaaggagacgtggtgacaggtatgatttcagttgattcatttgcagcccatgctctttttgactctggcgctagctattcgtttgtttcggaggattttgtgtcgcgggctggtctttcggtgcagaggttgggtcacccaattttggtcagttctgctaatggctccattagtagctgttcagtttgtcaggggtgttccgtcattcttgctgatgaggttttttcggctaatctggtggtgatttccttggggggcattcgatgttatcttggggtatggattgattatcccagtatcgcgcggttatatcctggcttctgggaaaacatgatattgcacgcgtcgtcttgttag

SEQ ID NO: 155247 - DNA, 124 bp, Zea Mays
ccatttgtattttattgttttaccatttgggatgcatctacctgcttgttgttttggtgtcacctcgccaaatatatactacttatttaggttcagtttggttattaaagaattgaaattgtaa

SEQ ID NO: 155248 - DNA, 909 bp, Zea Mays
ccacggccctcctcgtccccagatcgccgcctctactatcccgcaaacgtcgggtctgctctccagcagaggaaatcacgtagcctcaatccaaagagaactcgcacaacacaaaatctctgcacggattttccgaccactgcgctggcgagcaccatcctctggcaaccggcgaggcagcaacaacatcaataaggggatccttgtctcgcttcgagatcgtccgccgcgctggggttgactcactcgcgccactcttcccgttccctaccgtggtgccggaaccctaatgccggcccgagtctagcctccatggactttgccagccgccacatcgtctgttgcatccgcctccgcctccgcccccgaggcggtcgctgaggagcctgagtacctcgcctggtacatcatcgtcaagcactcgtgaaggggaagttcaaccatgatgaggctctcactgccaccgacgagttcacgctcgcagtccgcaccgatgcctgcagcaagttcaagcctatgcgcttctcatccccactccgcccagggatcctcaccgaactccaccgccttcacccggtccaggactccttagacttccccatcctccatatccgtcgtcgcaccccacgagtgggcccccttcatgctcatgggaggagggtcctctgctggtggaccaagaaagggaatgcatcctcgattgtatcctaacattacctttgatcctatatctacagatttttgtgtcttgaccaacttccaatagattgaatcattctatgctttcaatagcgtctataacaattcaggcctttttggaatttatgcagtcaatttaatcttctctcccagagcataatctaaattatgtacacccgtctgttcaaacaattaatgtagctgactgat

SEQ ID NO: 155249 - DNA, 436 bp, Zea Mays
tccacgtttacagggtctcccaattatttccgaaaccgtcccgatattatggcgatgtcaatgtcaaactaaaatccataataaaatatttacgcacaatgactcaacgttttacgccaaacggtatatactatttatgcaactattatgccgtttcggttttatgccatagctttcaccatcttatgctacattttttttaccttccgcgcattacttcccatgcaagatccataaattacgcgcccacgtatcatagtaataacgtttgcatgtggaaactattccctttaattccgcgccattcccttatgtttaccgccttgccattcaaacaaccgcgtaacggcgccgtctgtcctgcatgccgcctctcagccccacgttaaacacaggcgcgcctgtcccagcgaccagacctcggaaccgacctggg

SEQ ID NO: 155250 - DNA, 135 bp, Zea Mays
gctgctcctcgccccaagcaaactctgagcaaaagacctcattttctttgacatcctgttttaacaaaaacaagttagtacatcaatcgaaatatgaatatagaatgaaatataaaataatgaaacaaagtaaaa

SEQ ID NO: 155251 - DNA, 2480 bp, Zea Mays
cagaaaatgtttagcacaactaagagagggtggctgaagtaacaccatggtaaacaagtccatccaatgggctgggatattaattaattattacaaaacagcatgcagattgtacgatgtttattattacaatatgtataatatgccaagattttccacttggacttgacaacaagagtgaatataaagaggcaggaaattacatatgcatagggaaaacagacgctgccagttcggcatttccatccaaaactgacaaaacgccaccatccggaagctgattattgcggtgcactctgcaggtgagtgaagagaagccgcctagccagtgttctgcatgccggcggcgatgcccttcatggtgaggatgagcgtgtcttccaggccgggcgggtactcgctcgccgggttcagcttgaccagtccggcgggcttgttctcgtcggcgaactccttggacagcggcggctggggcgtcaccttgaagttggggtcccttatccgcttcagcgtgtaggcctggaacacgttcagggtggtgatgtaggggttgcgcagcaccagcccctgcttcaggaatggatcgccttcaagaatatccttgtgcccagcgatctgcacaaagagaagctgctgtgtctccacgtatttgtccctgagctgcttcccaaagggcttgagttcttccgccacaagcagctcgtcatacaagccggcaatgccggggtctcccttggcgaaaaccatctccagcaggtccagggtgaccctgaagaatggccactcgttgtacatctctttgaggacctggaagttcctgacgtccttgtcgatggcgaacttgaatgcggcgccgactcccagccacacggggaggtggaacctggtctgggtccacgagaagatccaggggatggcgcgcagggtcgtgatgccgccgccgggcctcctcttggctggccggctgccgatgttcatcctcccgtactcggtctccggtcataccgatctgaagtactcgacgaagcgcgcctccttgacgacgacggagcggtactcctccgtggccacgaccgccatctcgtccatgagcttgcgccactcgggcttgggagagaccggcgggtgcatgccgtgctccagcgtggcggccgtgaagcgctgcagagtctggaagcacaggtgctcctccccgaagcagaactcgatgacctcgccctgcaccgtcacacggatggacccgttgatggtgtccggcggctgggacaggatggcaaggtgcgtgggcccgccacccctgcccacggtgcctccgcggccgtggaacaaggtgagcttgacgccgtagcgcttggccacctgcgccatctcctcctgcgccctgtacagctgccacgccgcggacaggcggccggcgtccttgccggagtcggagtagccgaccatgacctgctgcttgcccttgatccggtccatgtaccagtccaccgagaagaggcgctccacggacgcgggcgccgactgcaggtcggccagcctctcgaacagcggcaccacgggcagcggctggcgcacgccgcactcgcgctgcaggagctccacggcgagcacgtccgagggggccgtcgccatggagatgatgtaggggccgaagctgtcgggcgggagctccgcgaggacgtggaacgcgccgatgacgtcggcgatctcgtcggtctggggaaggtccgggggcagcagcgggcgcttgcctcgcagctccgacagcagccactcctgcctcttgtcctcgggccactcgcggtacgacccgatgccgaggtgcgtggtgatggcgtcgatcacgtcggtgtgccgctccgactcctgccggatgtccagcttcaccagggagagcccgaacgtgaacacctggcgcaggaggtccaggaggctcccgtccgcgatggccttgtcgccgcagtcacacagtgatttgtagcacagctcaagtggctcaaggaactgcatgcatgcacgacagtagtgattttttttgttagttgcagtgctgatgtcatactatgaatatatataatatatatacatgacgatatttacctcttcgatactggtaaatgacgattccgctgaaatttcagaaactccagaagccagcagatggcgagcacgctcgcgtgtgttgtacagcttgtcccttacatggcctagtatcacccggtagggctcgtttggaggaatttgcttccagaattctgcgccagcaaatacacttcagaaaagatgccaaaagagccctcaaattaatttgaaaacactagtggagacttttgcaaaaggctgtacggcaggcaaaaattaagcaaacataaatgcttctgtttgtggttacctatgtaatacttggtaactttggaaccagacgaactgtggagctcttcggcacgaacacgaagctcatcgttgcagcgccacataga

SEQ ID NO: 155252 - DNA, 1427 bp, Zea Mays
gcgtcacctactcacctgactcgacacctaccgcgctctccgggtggtgcgagtgcgagtgccacgagccccacgaaagcaaaggaacagacgcacgcggaccgtagcgctgtcacgttgcgtcacgcggcactatctcagccagccgtccagcacagcggaccggtccatcgatcaccgatggcctcctcgctccgccatttcgcgggcctcggctgtttctccgccgcggcgtctagctctgcctccaccagcttcctgcccggctacgcccccgacttctgcgtattcgtggcgctccgtccgatcaagccgcccgccaccgccgtagcgaaccctcccgcctctccatctccgctggaggaggagcaccggcagcaggccgccgttccatggcacagcgacgacccgccagcaccatccgttcctgcgccgctgcgggtggggatcgtcgggttcggcaactttggacagttcatcgcgggcggcgtgcagcggcagggccacaccgtgctcgcggcctccagaaccgactactctgcctactgcgcccagcatggaattcgcttcttcaggagcgtcgacgcgctgtgcgaggagcagccggacgtgctgctcatctgcagctccatcctgtccacggagagcgtcgtccgagccatccccttccacaagctccgccccgacaccatcgtcgccgacgtgctctccgtcaaggagttcccccgcaatctcctcctcgaggttctcccaccaggattcgggatcatctgcacacacccgatgttcgggccggagagtggcaaacacggctggggcaagcttcccttcgtcttcgacaaggtccgtgtcgcggacgacggggatcaggcggcaacgtgcgaccggttcttgagcatatttgagcaggagggttgtaggatggtggagatgtcgtgtgccgagcatgatcgctacgccgcggggagccagttcatcacgcacacaattgggagggttctgtcacagctgaacctcagttcaaccccaatcaacaccaagggctacgagaccctgctgcaacttacccagaacaccgtaagcgacagtttcgacctgtactacgggctcttcatgtacaatatcaatgccacagagcagctcgacaggctggaaatggcatttgagaaggtgagacagatgttgtctggcaggctccacgacttcataagaaagcagattgtggagagggcggacccttcaggaaaattggcaaatggcaggtccagttctcctgcagcgcaccacttatcgacattaacagaagaaaataagacacgtgtatcccccgctcttactctagcctctcctacgctttagttaaacttgtataaatttgaccatgttttgttaataaaaaaatattgatatatacagatctaaatgaa

SEQ ID NO: 155253 - DNA, 1649 bp, Zea Mays
gcgtcacctactcacctgactcgacacctaccgcgctctccgggtggtgcgagtgcgagtgccacgagccccacgaaagcaaaggaacagacgcacgcggaccgtagcgctgtcacgttgcgtcacgcggcactatctcagccagccgtccagcacagcggaccggtccatcgatcaccgatggcctcctcgctccgccatttcgcgggcctcggctgtttctccgccgcggcgtctagctctgcctccaccagcttcctgcccggctacgcccccgacttctgcgtattcgtggcgctccgtccgatcaagccgcccgccaccgccgtagcgaaccctcccgcctctccatctccgctggaggaggagcaccggcagcaggccgccgttccatggcacagcgacgacccgccagcaccatccgttcctgcgccgctgcgggtggggatcgtcgggttcggcaactttggacagttcatcgcgggcggcgtgcagcggcagggccacaccgtgctcgcggcctccagaaccgactactctgcctactgcgcccagcatggaattcgcttcttcaggagcgtcgacgcgctgtgcgaggagcagccggacgtgctgctcatctgcagctccatcctgtccacggagagcgtcgtccgagccatccccttccacaagctccgccccgacaccatcgtcgccgacgtgctctccgtcaaggagttcccccgcaatctcctcctcgaggactaagttttagctctacgtatccaacacccacacccttacgcctactctgtggtccagaatccgtcacttgatttcctctgaatttcctggtgatgacgaagacgtacgcttatgctggaccggccaactgcactgcactgcacttacaagggaatggtgcattgccgtgtctggaatccggaacgaggatcgttgatacactgatgaacacatcgccaatctgtcaggttctcccaccaggattcgggatcatctgcacacacccgatgttcgggccggagagtggcaaacacggctggggcaagcttcccttcgtcttcgacaaggtccgtgtcgcggacgacggggatcaggcggcaacgtgcgaccggttcttgagcatatttgagcaggaggatggtggagatgtcgtgtgccgagcatgatcgctacgccgcggggagccagttcatcacgcacacaattgggagggttctgtcacagctgaacctcagttcaaccccaatcaacaccaagggctacgagaccctgctgcaacttacccagaacaccgtaagcgacagtttcgacctgtactacgggctcttcatgtacaatatcaatgccacagagcagctcgacaggctggaaatggcatttgagaaggtgagacagatgttgtctggcaggctccacgacttcataagaaagcagattgtggagagggcggacccttcaggaaaattggcaaatggcaggtccagttctcctgcagcgcaccacttatcgacattaacagaagaaaataagacacgtgtatcccccgctcttactctagcctctcctacgctttagttaaacttgtataaatttgaccatgttttgttaataaaaaaatattgatatatacagatctaaatgaa

SEQ ID NO: 155254 - DNA, 1589 bp, Zea Mays
ctcggctcatctcatttttctatttcggcccctctactgttccaataataataaaaagattctcgattcgatttactcgccaattttcagtgagcggcggcgatcggcttcggatcggcgcagcgcggcggagcggagatggttgccgtggcggtggatggcctgatccgcggtgcggacgccgtgccggcggcggagagggaagcggtgagggcggcagctgcggaggcggcggccaagggcggtgagggggaatcggggaaggaggaggtgagggagtatgagagcgacatgaggaagctggaggagctgctttctaagctgaacccctcggcggaggagttcgtgccgcagtcccgccgccgcgtggacggcggcgctccccgcctttcggccgacgcgcccgtgttcgtgtcgccggcgatcgactactacgcgcgccaccaccagctcccgccgccgccgcttctgcagcagcagcagccgatgcacgtgctgcagtttgtgggtggcgtcggcggggttggcatgggtggcggcggggggatggactccagcagcgacggatccgccaatggtcagccgaatcgacggagaaggaacggtttcatccaggggaggagaaggatgatgggtgcccggcctcgtcgagctgacagggaggatagtgtgcggcggacagtctatgtctctgacgttgatcagcatgtaactgaacagaaacttgctgaagttttttcaacctgtggacaggtggtagattgccgtatctgtggtgatcctaactcagtgcttcgttttgcttttatcgagtttgctgatgacgttgctgcacaagcagcactagcacttggtggaaccgtgcttggcttttatcctgtcaaggttctgccatcaaagacagcaattttacctgtgaaccctaaatttcttcctcacactgatgatgagaaagaaatggtatccaggactgtgtattgtactaacattgacaagaagatcgcagaagatgaagtgaagcaattctttgagggaacatgtggtgaagtttctcgtctgaggctacttggtgattatgtgcactccacatgcatcgcttttgttgagtttgtccaagcagatagtgctattctcgctctgaactgcagtggcattgttcttggaacgcttcctgttagggtgagcccatcaaagacaccagtccgctcgcgatcgccccgtgtgacgtcatactgaattcggctcatctgaagccgtcgtccagggcagcaaatttctgggcaacaaagccctagtcgtgtggccttagagactgccgcatcgcggataagtaattgtcgttgagcagagttctcgttggttaaagtccagtctagtaggaggcgcagagacccgtctgtatggtcgctgggagatctatcttgacctcctttttctgttctttttggtcttagttatcgtggttggattctatagcagccttgacaggcattcgaacaacaatgtttatggttatcctatccgctttggactcttaagcatgttttcccagtctttaaatattaagagatagtttggtaactatattt

SEQ ID NO: 155255 - DNA, 150 bp, Zea Mays
gcggttcggcacttcggctcgtcctcctcgcggcgaaaccctagcccgcccccatggacgatccctcctccgcctccaacaagcacaagcgcaagcgggggcgcaagcccaaggcatcgccgccctcccccgaccgctcctccccctctc

SEQ ID NO: 155256 - DNA, 676 bp, Zea Mays
gctgcacgctgctcgcgtccgccgtctcctcgtcgtccttagcgatggcggcgtcgtccccagcgcggctctattaccttctcctgctggttctcttcctcgccacgccctccgtacgcgcttcctcggagctccggcgccgcgtggaggcgccggcggcgttgccacccggcgtggccgaagggcgcgcgcggcaggagttccacgtgccgccaacaaagggcccgatcagggaacaacggaggagcaggccgcgcggcggtggcaccggcgcgtggaccttctcagcgatgctgccccgggggttcgtgccgccgtcgggctcgtccgactgccacaacgacatgccggccaacgccgccgacccccaattcttcgcctgtagcggtgccgggacgccgtgacgacaaagaccggacgccgtggcgccaccttgcgtgcttggaccaagaggggtgcaaatccaagagtaaccgtgtccgttctctgaagcgcgggaatcgcgcgtctctctggtaaccttcccctgagggctctttgcaagtgtaaatgccggtgaggcctaccatgttcttgtctagttctacctcaaacattcatccatggagccttatcccaacatttgcccgtgtcacgaacgattcggtgacttggaagtcggaactcgtttgacagg

SEQ ID NO: 155257 - DNA, 928 bp, Zea Mays
atcgaatgacaagcatgataagttgacattataaatggtatagttgcaaacacgagcacttgcgagattagacacggatataagaagccaacgacggcatcacacgattacaggcgaacacaccaatcagcacaaacatcaccaaatcctttattctagtcactcagtgcagatgcagcctactgctagcagggcactgaacatcaccatcccgtcgtatggattctggtaagggaacagtatcccttcattcgatcctgccgacacaaacagggcaaataatgttagttttgtctgtaataattgcttgggtttcactgccacaaacgcctgaaactaaagggagagatcacggtcaagtttgcagctgtgtatgtactcacttgtcgcagtcgatgtcgggggtgatgttgtaggacagcgagaggccgcagtcgccgggcagctcctgcgccgcggagagcacagcgtggacctgaacgtaggccgccttgaggcaccggcacgtggcctgcctgtcgggcctggtgtccgccgccgcgtacagggtcctcacgccgtcgcagcactggttgttgctctcgctgggtttggctgccttgccctgcaggaagggcaggcacggcgacaggtcgttgagcacgtcggagcacgagatgtcggccaccgcggactggactgccagcatcgccaccaggaggacgactgcaatgcccgagctagtagtcttcatggctgcgcttttctctttcagcgagatggctggccggggcccgggtgatagcagtgggaggagctagctagctggtcctgcttgttgattagtgtgtgatgcttctgctattggctcatcagcatggtattaatagggtgagatttcaccaggaggtttccaacagcagttgttctagttccaaagcgtgtgaat

SEQ ID NO: 155258 - DNA, 105 bp, Zea Mays
ctttattttttaaatataggtgtgataggaggggagatcatgatgtaacttggtgcatgagcagagtccagatcagatactatgtattttttaaagtgaaaaaag

SEQ ID NO: 155259 - DNA, 612 bp, Zea Mays
tggatctactgtttatggggtgaaaaacatcgatgtcccagagggtgcaagggctgctctgaatctgtcaggaaccgtgcttggatattatcctatcaatgttctgctgtcaaaaactgccattgcaccagtcaacgaaacattcctacccaggtctgacgatgaacgtgaaatgtgtgcaaggactatctactgcacaaacatagacaagaaggtttggtacctgcactcatgctactaccactagctaaaagtttgcagaaatggcaccatcaagattgatctggagaccaacaagatcatggacttcatcaagtttgacgtcggcaacgtggtcatgatgaccggcgggaggaacaccatgcgtgtaggagtgatcaagaacagggagaagcacaagggcagcttcgagaccatccacgtgctgcttggagctttttgctatgtctagttttctcctatttgttgtacaggaaaacatataatggaattcaaatttggtggccgcaaaatgtggagacttgaattcatataaagttaggcttaacattagtgcaaatagttgtattttagtttagatttagagtacacttatgtatgtgttgtttgaca

SEQ ID NO: 155260 - DNA, 1824 bp, Zea Mays
gcatagtgcccgtgctgcctgtcccttaccgcaacggtagcattcgaattctctccccaaatcgccaccctggggcacccaatgctggcagcctcccttctcgctctccgcttcctcctcgtcggcgccactgcggcggggatggggaccgggacggtgggggtgagtggtggtggccagctgtggtgcgttgcgaagaacaacgcggaggacggcgcgctgcagagcgcgattgattgggcgtgcagtgttgacggtggccgcgcggactgtgcagccatccagcagggtggcgcctgttacgatccgcccgacctccagcagcacgcctcctacgccttcaacgactacttcctccgttccggcggtgccgggagccccgccgcctgcgacttctccggcgccgccgcactcaccgcgctcaaccccagtcatgggagctgcgtgtttccttccagtgcatctccgaaaaatggtagcttcacaggaacgacaacctatggtccaaccggtgcagacttcagcagcagtttttcatggaaactcaacttctggccattgctcttgcatatatctacatctgtaacgttttgtgccactcatgtgttgtagttttttcttaaactgtgttctgcgcgtatgataaactatcaggctgcagaatgtggtttgttcgctggtctccccttgagttttctgcattgtttgggagagagaaaactgtccaatatcagctgctccctcttttaccaggcagtcctcttcagttttgtgtggccatgtgatttcatccttctgctaactgtaagtgcacgaacctgttgtcttggtgtgtgtagtgtaggtcctgaatttatgttgctctgttttcaacaatgtaaacaaagttctccataatcttaacttaataaaaatcgcgaactcctaacaactgagatgtaataaatacgctcacgtttccaacgaaagtgtatgtaaccttgtaaataaacaaatttactctgtgctaatcaacatggatcttaagcagcacaactgcacaagtgcggcttgatctcttacagctgttgagtgtggagaaactgaagtggccagtacaaacatctgtgacgggcgcgtgaggattcatcttatttgaggggaaggttgagcaagctgccggggcgtctcctggccggcgccgatctcggagggaggaccgaccctgcagcggcagagcgggcacgtcgagcgcgacgagagccacaggtcgatgcagtcgcggtggtaaacatggctgcacgcgggcagaagcttgaccatggcgccgacctggatgatgccgaggcagaccgcgcactcggtcaagcccgcgcccttgccgcagtgcctcaccagccggttgtacatgaacgtggggacggccgcggcaacggcgctcagcggcagcagctcctctggctcggcggagcctcctgaggagctcgtcgcgaggacgtccgcggtgggctgctgcggtcggcggtgcgccaggtgcctgcacagcgcgacgagagcgaaggaggcggccaccgacgccgttacggagcagaagaagaggaggttgtccggtgacattgcaaattgcatggcgcccaactcggatggagatggctcgctggctgtctggttgcgtatgcaggcaggcacgctgcctcaagtacctcttctagttctaggcttctatagcagttttcttgagctgaaatggagtttactgatgattgcagttggtgtgtcggaaggctatgaagccttaacaaacacttttgcggtggttagcatagcaactacagtattcctttc

SEQ ID NO: 155261 - DNA, 1057 bp, Zea Mays
atccaccacaagcaggtagcattcagcgccataaagaacttggatttctctgctgactgcttcagcttgataacaataacaattcattgctcgtctcgagcgcagatggatcgcgagagcgcgatgcagggcagcagtggtggcaaccccggtgctgccacgcaggaggagtggctctaccctggcggctggcagccggagcaagctgtcgtggacggcgcgttcctcatggagctgctggaggacgcgccggtggcggaccagccgccagaggacgtcgaccggctaagccgcgtcatccggtccctggaggctgagatcgatggaggtgggcagccgccctcggcggtggcagacgcaggcacggcggagcaggtcctgggagacgtccatataggcgcgctggaggactaccgcctgctgccgtaccttggtagcatccccagcccctgcgtggccgaggcgccgttggagctctggacggaggtgccggcggcggtggggcatggtatgggcggttggtacctggacggcgacggcgtcatggtcgggtacgagttcagagagcagtgcttttacggctacaacgagagcccacacgttgagcaagtgtacagccccttgtgggaatgaatgatcaaatgtgaaaccacatataactatatgaattcaagcctgaatgaatgaccaaatctgtgaaaacgaaacgaatctaaatatatgaattgaagcttaaaatgtttcggagccctttctggctttctgctttcattttatcaaaaggtattgtgaacttgacgatctttcttcaattcattatcttactaaaggcttaaccacaaggcgatgtctacacctaattttgcactcgcagttttatactgctccacattatcagtaaccttactttcttttttattcgtttacacgctctcgaaaacaaattgatgttataggatttttttatgacagaagtgttaaattgaaattattcggtccttaaatataaagtatgaaagcattaagatttgctctatcccatgtgtccttacctttt

SEQ ID NO: 155262 - DNA, 290 bp, Zea Mays
gtcttcctagccgctgcgggtctccctgcaccgcgtcccgtcgccactgcaccgacccgccacagccccaccagcctgactccaccgccaccctagaggatggaggaccgtgagtggatgtacacgggccgcgttcgacgtaatgatgtcaccccagaatggattaggaagaccgatgctttcgtggaacgggcatatggcgaagctgctaaaggagctagcctagtcccttgtccatgcagcaaatgtgacaaccggaaaagaaaaccaaagaaggccatggtagaaca

SEQ ID NO: 155263 - DNA, 1145 bp, Zea Mays
attccacggaatctctcccagctgtcctgtttttccttccatggatccccctcgctagctgagcccgctggtgctcgcggtcgcgggtggtgagcgcggcctcgccggcggcgcagcggcgatggacctcccgtggctggatctgcccttcaccttcctgacgctgctccttgccacccgcctcgcctacgactactatggcgacgtcgccgccgccttcgccggcggcttctcgatccaggtcttcctcttctactgcttcgcgcgctggtaccgctacgccatcgccggccgcgccgccgccgccgctggggcccgcgacgacccgtcgccgtcggcgcggccgccgccgcagcaggaggaggacgcggacgccccgcccgtcctgacaccgctgctggggtcgccggacggcgcgcggccgtcgacgctggccaaccgttgcttcgccgtcgtgttcatggtcttcgtgccgctggtcatcgtcgtcttcgagcggagccaggccgacgtcgtggcctacgcgctctgcctcgccaacatcatcgtcatggtcgtctggctctcgccggacaccgggtcaacggtctcggccgccaagtcgctcctgcgtctcagcgacgacgaggatgaaggcagcgggggcagctccggcgcagaggacaagtgctgcgtctgcctcgccggcatgcgggaggaccaggcgcttcgggcgctgccgcggtgcggccacagcttccacgacaagtgcatcggcaagtggctcaaggcgcacccaacgtgccctgtgtgccgggccaccgccgtgccgccgccgctccacagcgggggcggcgatccgctagatgacgatattagccccgtctagctagcttcccctcagtgattcatccatcttatcttatctaacgaatttgtggacatttgttgggaaatttggtgaaaacctgtatagtaatccaaaacgttgtcaagctcaattcaacatgtcagtagtgatttgtacatacggtcccgtttgtgcactctgagaaaagcaaagccatgtctctcttgcttcatgacaatcattgaacattttgttcgagaaggggaggaaaactgtatggttttcttgaggagtacaagccgtcggtggatcacaa

SEQ ID NO: 155264 - DNA, 226 bp, Zea Mays
atgcaagggctgggtggcagtcccctcgacctgggagataagacccagggcacctacgcccctccttcttatccttcgtgcaagactcatcgaaaccgccacaagagagagagtcgggagagctgtcgccgccgcatagcccgtgcggcttgagagagaggcgtcgtgctgggcgaaccgccactgttaggctcgaccaattgggtcagtgggattcggcaacgct

SEQ ID NO: 155265 - DNA, 843 bp, Zea Mays
actcggaaaccgtaagccgtgcaaacaacaggcgacgcaccggcgccgcgcgcgcacgcctatttctagctcgatcgtgtcctctcgccgctccggagtcctcaatccacacgcttgggcgagcaagccttgttccggaagcgcgcggacgacatgctgatgctgcacccgaggttggtgtcgtcgagcgccgtggacgacgaggaccactgcgagagctgcgcctgctactgcgccatggtgtcctgcgtctcgctgctgctcttcatcgtgctggctgccgcggtcagcatcccgagggcctgcgccatcgccggcgtcatgctgctcctgctggggctcgtcggctggctcgtgcccacggggaatggagccggtccggcggcgcagcagcagcagcagcagggccaggctgctgccgatcctggggcgcggcggctggtggtgcaccaccggtgcgcgtgcgggctaacggacgccgctatcgccgcgctgccggcggcgttcacgtactacgaggcgcccgcggtgaagaatggagtggggagcgaggacgacaagcagccgcgcggcagctccttgctgtgcgcggtttgcctggacgacgtgcggggcggcgagatggtgcggcagctgccggcgtgccgccacctgtttcacgtcgactgcgtcgacgcctggttgcgcgctcaccggacgtgcccgctctgccgctgccagctctccccgaggaacgacgtcagcacaaagcgggccgccgcggtcgtcggggagtcatccatcgacgcgttgccgccggtgtgagtgttactcactcatcaatcctccgaagctggccggcgc

SEQ ID NO: 155266 - DNA, 552 bp, Zea Mays
atggaggtcgaccgcgcggctccaaagcacggcggacgaggaacacaacagtgctttaaggcggattcccgtgacagtgacttggcatgctggcgtaggggaggattgagacgctatggggcgagttcggcgagcccatggcgagctgagagcagtgttcgacgacccggcagctgcacggcgacaggggtgagcagagacagcgataccgcgcagcgaggtcgaggaaccgaggggcgctggacgaggagacgagcgccagggaggctggtgttgttacttggacagagttgccgaagagccgacaatgagacacgacgaggtggtcgcagagcgagcgtggctggtgagtgtagccggaggccggagctcggtccgagcgaacgccgaccaccagggaaacatggacaagcactggtgcggtccggtgatgcaaagaaccacagaccgagcgcagacagaggaggtgcgcgtgggcggccaccatggctaacgagctccaaaccaacgtccagggcagaaggaacaaggacgatggttgaacctagatga

SEQ ID NO: 155267 - DNA, 168 bp, Zea Mays
atggaccataaggagcacgcacgcggcagcggccttgaggcccgcctcgttgcagattccaagggcacgcgtgcggcggcggccccccgagacgcgcaagatggaagggaggtgggagcggatacagcgtcggacgctagagtcccacatgcaatagtggctccatga

SEQ ID NO: 155268 - DNA, 910 bp, Zea Mays
gccaattctacagcacatcacaacgcaagaaagtcgatcgaacctgcgctagcctatatataggtcttggttgacaccgcctggtctccgagtccaagaggggaagcagcggctctggacctctgatcaatctagcttagctttcttcgagttcagacttcagagcgcatatggccatggaagttcagggcaccaggcggccgcaggatgccggcgtgaaggtcaagttcatcgagacgcagttcattagctccgacgccgccagcttcaaggccgtcgtgcagcgcctcaccggcaagtccccagccgcctcgtcgcagacgactcagccgccggcgcatcctcagccacaaagcctgcgcccgtgccggccgaccttcattggcgctgggcagcagcagaccactggatggacagatctacaggctgccggcggctacctggcgacgatgccggcgccgaagcaagagcacctcgcggcggcgcctcggctggaggacatgaacgagctctgcgactttgcagacctgttctacaccaccgccgcgagcaatcggcccgacggcggcgccagcgtctttccttactgaaaccacggtgcgtggtgtgtccttgcgccttggtggtgttttcggaatgcatgaatgaatgatgaagcgcggatacttgaagtttgccattgccaatttgccagccacgtcgcagtcgcagcgagttgggctgggcacattgatgaccaagagctaggtgtgcaaggagacagatcgagatggattgtctgtcaaccgctgtactgttgattcatgtagctgcatactcacgccacgagttctctcaacgacagttaaatgctgccgtgtcaaatttgtaatgggctaaacacagatcatgtgtgcaatatgcatagata

SEQ ID NO: 155269 - DNA, 687 bp, Zea Mays
agactcctcaatcctcaacccgacgcggcggtgtgcccccctgcttttttttggcctctcctctccgttggcgacgcatacatccggcgagggagcggaagaagtcagtaaattctgtcgctccaatccggacgaggagatgccgcggatccctctgatcaagttccccaagcggaatctgaaagccccatccgcgccagtgccgtcgcaacccgcagatcagcacgcgaccctcatgtcccggttgggggctaaagcagaggcaccatcttctggagggattaaaaattaccgctttagttcagatgtgccttccccaccgtcgcatactgctgtaggaggtcaagcttcactccttcctaagcgtaaacctctgactgaagaagagattgaggctattatgctgggtggctccatctgatatcacctcatatgaattggaatttctaggaacatcaataagatcgcatacccggacttattgccttcgacctctgttattgaagtcatgttgatacagaattgggttttttttttctaattctctgcaagtcagttgtggagacattaatttccagtattctgcacatgtaactgaccaaatcgtgaacacattgaggtccttgaggaagaagtgttgatcatggaatgtttttgcatctgattattttgtattgatgtcttgaa

SEQ ID NO: 155270 - DNA, 1126 bp, Zea Mays
ttaggcaaacaaaccagccacccctgctctctgctcactcaccttccttactactgctcactagtcactacacaccaaccaaaggaaggcccctcgcacctcttctgtggttgtcgtcgtttgcctttccgtccgttagccaagccatgggcaactgcctcaacacggcctccaagcggagtcaccggggcatgcttttgccggaggaggaagagagcctctcggagataagaaggataagccagctgcttcgggaggaggaggaggacggctacgaggtggtgggtatgcactccgtctccgagcagctggtgcaggaggtggtggccgtggctccgggggtgacggcgcccgcagagggccctcaaggtgaagatcgtgctgacgcgcggcgagctggagtggctcatggcgcagctcaagagcggcgagcagcgcctcgaggacgtgctccagcacatgcaggctgctaagggagctggcggcggcggtggctccttcgctggcgacaacaaggccggctggcggccgcgcctcgagagcatcctcgagagctcggagacccaaagctgataccggcctgagcatgtcctcgctggaccggctccttgaattcagatcttgtccatgcctgtaggtttgtcgcttgctttcttgatgtttggtctggatcggtggagatggaggccgtcgatggatcggagtcagggagaggcttaaattcttgttgtgtttttttaacaagggactggccttgttacaactctgctactaggctggagcctggagggagggacgatgatccatcagatgggctatgttactctgtagatcatcgagatgttaattaggtctcttgtgcagtgcagctcagccaattagcatcttctttcactttttgcctttttgcgctgttacttagatcataatctttcgtaaatagcggtgcgaatgagatggcatctgaagccctctgtgtctgtaataatctcctctgactaggtcctgaatctgattgattcttcctaagtaggaggagcaccctgctcgctagatgtcaagacttgggacagtgctttcacttcggtttggaaccgtgagtaacgttctaatgaagatgaatatg

SEQ ID NO: 155271 - DNA, 1715 bp, Zea Mays
gcagcatctccaacgccacgaatggtggcaaaaataattatatataaaataaaagatgataaaatgaagaacggctagcaggtatggcacggtgaaaagattcctgctgccacctatttaagggcctccccacacgctcatcagtcatcacccactacctccattccggtgcgccatcgctctcgtcctcgccgatcgatccaagagactgggaccttcaaagagcaataggactcatggaggttggagacgcaagaaacggttctgcagcagcggcactgacaaagggaggtgcggatgatgccgcccgcaaaccgctccctccttgctgcgtcaaggccaaggcgcgggtgcctgaaaccgaggccaactgccatgatactgtggtttcagggtggttcacggaacccagatcgcgttttggtaaaacaagcaaagtgcagtacttcaataacccgatgtggcctggagaggcccattcattgaaagtggagaagatcttgtttcaagggaaatcgccttaccaagaaattttagtttttgagtcttcaacctatggaaatgttcttgtgcttgatggtatagttcagttgactgacaaggatgaatgcgcataccaggaaatggttactcaccttccactgtgctcaattcctgcaccgaagaatgttttggttgttggaggtggtgatggtggtgtactgcgcgaaatagccagacatgattcagtggaaactattgatatatgtgagattgatcaactagttattgatgtttccaaagaattctttccaaacttatccattggattcaaagatcctcgtgtccgacttcatgttggtgatgctgttgatttcctgaggaattctcccgaaggaaaatatgatgctattattgtagattcatcagatccaattgggccagcacaggcactcgtggagaaaccgtttattcagacaattgctagagctttgaagcctggtggtgttctttgtaatcttgctgagagcatgtggctgcacacacatctaatccaggatatgcttgctatctgtcgacagacattcaaaggtgctgtgcactatgcctggacaagtgttccaacatatcccagtggtgtcattggatttttgctatgtgcaaaagaaggtcgtgcagtgaacttcttgactcctgcgaatccaattgagaaaatagaaggagcagcaaaagctggaagggaactcagattttacaattccgagatccatagggctgcttttgttctgccaacatttgtaagaagagaactggaagcatataccactcctattagttctgctgaaaacgagaaaccgaaagaatcagtgtcagaaccgcagaagataaagatattgtcaaacaacgccattcttacagcttcctagccctgagccgtactcaatcttgctcggtatagttgtattctcacagaataaatcagtcactggcttttgctgacaccgcacgagcagctttagtatagaatgatgatcgattgaataagagggtggatattgaactgatgtaatgcctctgccgaaacaatatgtctccctatcttgttaggcgtgttgtgtgttgtgcacgatttcagctgtagcttgtaaattgtacgacccgttgatgtaatgtataccctgcgtttgtgctgagaaatcacttcttttgcccgtctgcagtaatagggatgaaaa

SEQ ID NO: 155272 - DNA, 1648 bp, Zea Mays
gcagcatctccaacgccacgaatggtggcaaaaataattatatataaaataaaagatgataaaatgaagaacggctagcaggtatggcacggtgaaaagattcctgctgccacctatttaagggcctccccacacgctcatcagtcatcacccactacctccattccggtgcgccatcgctctcgtcctcgccgatcgatccaagagactgggaccttcaaagagcaataggactcatggaggttggagacgcaagaaacggttctgcagcagcggcactgacaaagggaggtgcggatgatgccgcccgcaaaccgctccctccttgctgcgtcaaggccaaggcgcgggtgcctgaaaccgaggccaactgccatgatactgtggtttcagggtggttcacggaacccagatcgcgttttggagaggcccattcattgaaagtggagaagatcttgtttcaagggaaatcgccttaccaagaaattttagtttttgagtcttcaacctatggaaatgttcttgtgcttgatggtatagttcagttgactgacaaggatgaatgcgcataccaggaaatggttactcaccttccactgtgctcaattcctgcaccgaagaatgttttggttgttggaggtggtgatggtggtgtactgcgcgaaatagccagacatgattcagtggaaactattgatatatgtgagattgatcaactagttattgatgtttccaaagaattctttccaaacttatccattggattcaaagatcctcgtgtccgacttcatgttggtgatgctgttgatttcctgaggaattctcccgaaggaaaatatgatgctattattgtagattcatcagatccaattgggccagcacaggcactcgtggagaaaccgtttattcagacaattgctagagctttgaagcctggtggtgttctttgtaatcttgctgagagcatgtggctgcacacacatctaatccaggatatgcttgctatctgtcgacagacattcaaaggtgctgtgcactatgcctggacaagtgttccaacatatcccagtggtgtcattggatttttgctatgtgcaaaagaaggtcgtgcagtgaacttcttgactcctgcgaatccaattgagaaaatagaaggagcagcaaaagctggaagggaactcagattttacaattccgagatccatagggctgcttttgttctgccaacatttgtaagaagagaactggaagcatataccactcctattagttctgctgaaaacgagaaaccgaaagaatcagtgtcagaaccgcagaagataaagatattgtcaaacaacgccattcttacagcttcctagccctgagccgtactcaatcttgctcggtatagttgtattctcacagaataaatcagtcactggcttttgctgacaccgcacgagcagctttagtatagaatgatgatcgattgaataagagggtggatattgaactgatgtaatgcctctgccgaaacaatatgtctccctatcttgttaggcgtgttgtgtgttgtgcacgatttcagctgtagcttgtaaattgtacgacccgttgatgtaatgtataccctgcgtttgtgctgagaaatcacttcttttgcccg

SEQ ID NO: 155273 - DNA, 144 bp, Zea Mays
tttgtttaccatccagctgaaatgttttaatgtcattattcttcctcatttgtatgaacatgtacaagagttttttgtgattagttgtgacaatcagccgagttcttgttgcatttccagcgagttacaagcatgtaaaatatt

SEQ ID NO: 155274 - DNA, 165 bp, Zea Mays
atgatgcttgtcgacgaacttcgcttcatcgattcctcgccttcggttcggctctcgtatggacgccgaacgcgttcaccgcttgaccctgtgtcgctagagctcatgacctcgctgtcgtcagagtcctccctggattcgtgtcctcgccagagctcgcgctaa

SEQ ID NO: 155275 - DNA, 1434 bp, Zea Mays
aaaacagaaaataagaggaggcgaggcatcgaaattcatgttggaagttctgctgtccagctatatgcaaaggaatcaagcaagatgatgttggaagttctgagaaaaggcccaaggactactgcagaattggaggcacctgtagctgatacatctcttgtgtctgctgatgcacctcgtgtgcttgctgatactgtactggatatatctggtggggagcgtgcttttattgaggcagatgaagcaaaggaactgcttagtccacttaccaaaccagggaattcatataaaagaatttgctttagcaacaggagctttggtattggtgctgctaatgttgctggtccaattcttgattcagttaagaaccagctcacagaggttgacatctcagattttgtggcaggaaggtctgaggatgaagcccttgatgtgatgcgcatattctccaaagcattagagggttctgtcctgagatatctgaacatctctgacaatgctttgggtgagaagggtgtcagggcattcagtgagctcctgaaatcacaggaatccctggaagaactatatgtgatgaatgatggcatatcagaggaagctgcgaaagctctatctgagcttattcctgcaactgagaagcttaaggttctccacttccacaacaacatgacgggagatgaaggtaacattaggcagcccaaatacgggcacctgaaagacctccacgacctgatcaggtccatggagaaaatccttgtccatgggaagtacaatgacacaagttatggcaagaatgccattgtgaccaagtacacgtatggtggttcttcagtttgcttcatcaacaaccagttcgtcgacagggatgtgaaggtgaccctcggcggcggaactcacctcgttccggcatggtccgtcagcatcttgcccgactgcaagactgttgcctacaacactgcaaagatcaagacgcagacatcggtgatggtgaagaaggccaactcggtggagaaggaactggaggccttgcgatggtcgtggatgcccgagaacctcaagcccttcatgacggaccaccgtgacagcttcagacagtcgcaactcttggagcagatcgcaacatccactgatcagagcgactacttgtggtacaggacaagccttgagcacaagggagagggaagttacacgctgtacgtgaacacaagtggccatgagatgtacgtttttgtaaacggaaggcttgttgggcaaaactactcggccgatggagcgttcgtcttccagctccagtctccggtgaagctccactccggaaagaactacgtttctctcctcagcggcacagtcggactcaagagcgcaaagacattggtcattgttgcggagaatcctgataagttcagagttgttgctttttctgctcgcttctag

SEQ ID NO: 155276 - DNA, 222 bp, Zea Mays
atggcggtacagtgggtggggttatggaggcgagggggtggaaggacaacaggaagatttgggggaatggccaaggtttaccacatcgattcaaagaacgaggatggagtggagcgattcctttgcggcttgggggaagacgacactgcagtgcatgaagatctactgcgtcgttgcttctccaggatggggaaacaaacctcgtcgacgccggtggagtag

SEQ ID NO: 155277 - DNA, 1503 bp, Zea Mays
ctctcctaccctaccgttggacgttggttccttcaccaagcttaaggcagagagacaaatattctgtactagcttgctcttgtagtactttactatacgtgctagctagagcaatcatcacatggcggaggcactgtgcgatcagctcttctccgacatcgacggcgacctgatgcggcagcacacttccgataccgacgacctcttgggcatcctcgagtcgtgggaggattgcgtcagtggcggcgttgcgactactccctgcggcgctgaggtcccgcagacgactgcagctgacggtgccgcaaaacgccggcggcaagggtgccgggacgtcgacgcggtgccggcagctccaaagaggcaaaagtgctcgccggtgtcctcggccgcgagtgaagatggtgcggtaaataagacctcgcacatcacagtggagcgcaaccggaggaagcaaatgaacgagcacatcgccgtgcttcgctcgctcatgccctgtttctacgtcaagcgaggagaccaggcatccatcattggaggggtggtggactacatcaaggagctgcagcaggtgctgcagtcgctggaggccaagaagcagcgcaaggcctacaccgagcaggtgctcagcccacggccaccggcgtgctgcagcccgcgccctccgctcagcccacgcccgcacatgctgccactcaagtccacgccgcctattagcccgcggcccgccgtgccgatcagcccgaggacgccgccggcacccagcagcccgtacaaaccctgcaggctaccgccaccgggctcgtcggcctacgcgtccccggcgatgacgacaacccgggagccaacggcagccacctacctgccgtcactggacaccattgctgccgacctctgcgcctacgccgccaacaaaaacaagcagctgcaggcgctggcagcagcggccggtggtgacgtcgtcctcccggacgtgaaggtggagttctcaggcgccaacctggtggtgaagacggtgtcgcaccgcgcgcctgggcagactgtcaaggtcatcgccgcgctggaggggcggtcactcgagatcctcgacgccaagatcaacaccatcaacgacactgcagtgaactcctacactatcaagattggaataaagtgcgagctcagcgctgaagagctggtgcaagagattcaggaagcgttctcgtcgtaatgcatgttcgtgtgtccaattcgtcggcaggattcatgtgtcgctcacttggaagctgcagttaatcaggtgtggtagcctaagaggtctgtgaatagacaaccgggatcatgcatgtaggtcaaagacatttactgaaatagttagcaagcaaataaagtagcttgccagaccagtagaccgatgatcatgttactgcaggccaaattcgttactatctactgttcgcagccgacgatatgtagtatgcgcatctcattaattatctcaagatgcagaggccacaagttttt

SEQ ID NO: 155278 - DNA, 107 bp, Zea Mays
ctagctttcaataggatccgtgtgaacccaatccactatcatttcttcttaagttgtctccctaaaatgaaagaactatagacattgacttaggaagcatgaagagg

SEQ ID NO: 155279 - DNA, 624 bp, Zea Mays
tcgtctctctctctccatgtcgctccctttcctctctcttccctccctccctctccctctctttcctctctcttccctttccccctctctcctctctctctctccccctccactctccttcctatatatacactccctctccctcctctctcttctctctctctccctccctccactctctttcctctctcttccctttccccctctctcctctctctctctccccctccactctccttcctatatatacactccctctccctcctctctcttctctctctctccctcccctccactctctttcctctctcttccctttccctctctctcctctctctctctctctccctccactctctttcctatatatacactccctctccctcctctctcttctctctctctccctccctccactctctttcctctctcttccctttccctctctctcctctcctctctcttccctctccctcctctatcttctctccctctctctcactctctgcagagacgcgcgcaggggtctccctctcttccctcgtcctcctctctcttccctctcactctctcactcttcctaggcttagggtttagccgcgcggcggcggcgcgtgcacggcg

SEQ ID NO: 155280 - DNA, 801 bp, Zea Mays
atggctccagggaggatgggatctcgatgcaaaagggatgccctagcagaaaccactcctactgaatatgagaaacagagggcagcacatgtgatgaggaacaaccaaatgttccaacggcttgggattaatcagctgcgcacaataatgactgctacaagagtaaggagcaaagatgattgttcagaggaatctgggtctttgtatgacggtgaggacagtgaaggctctgagcaagaggaggatttccaggttgcaaaagtttcattttacacgcagaacaattgtgtcaagaacaaacttaatcgtgagaagaggcaagaaaaatataaagatatggaacctagtgcaattgatcttttcaaggagatgcattgcagcaagaagaaaggatttagtgaggccgttcagaaagctataggtgatatggaagcaatggtggcaacaccagttgaagatggacagcatgtgctgtcttcgacagaagttgtttccaatgtgctaccgggttcaagtaaatttcttcacaatgctggccttttacttgcctccaagagaagcaatacaaggactatctcgacaaggatgcaagagcttcagactcaattggacactgagaggcaagaaaaaaatggatttcgagaagaaatggaaaccttaaaggcccagtcacaagcatctgaggcaaccattgctaatcaatcgactgagattgcagatttgaagaagtccttatcagaaaataacagtctccttcgacaaatattaagcatcaatcgtggccagatgactcctccttaa

SEQ ID NO: 155281 - DNA, 213 bp, Zea Mays
tgagcgaatggaagaaaaatgacacgaagctagatatgagtagatgtttttggtcgaaaacgtctttcattcacaatgaaacagaatggtctcgctcgatgcgtcattttatgatgtgtattttcatattaagagttcttaaaagaactcaacttaaagcccaaccgtcaaaaggatgctacaatgttcgaaattatcaacttaacacgcccc

SEQ ID NO: 155282 - DNA, 1149 bp, Zea Mays
gatcgaatcaatggccaggataggaatgttccctgagaagagggcagggcagagaagaaggccgagtagaaatacctccgatctcgattcctttcatgttttggtgccgctagccatcattcctcgtttctcgagaatctccgttgatgtcgtttctagagaatggcttaagtgttgaacttctaaaaaccatggccttatccaaataaactggtgaaagcaccatccttatctagagaaaataagtgacttgattgacccgtttcctttctgggtctggtgatggtttagcttccggtgtcccaggatgtggtagtatttattggtccccaaccaaccatgccttgcgcctaacttgactctgcagcccttgcttcaaagtagccagccgacgaaaccaatgttagagcctgtaacttaggacagaacagccttgcctttcttaaacaaaacagggaactgcctttcctttctcaaacaaacctgtactgggtgaatgaaaaaaaggaaatagctggttacttttgagagtacagctgccgaaatagcttcttcctgtaggcgttagccgatttagtatcagaggagtacctgtgaagtcaaacttttgtctgtagctcaacaagttccgttttcttgtaataatagaagttcattgctgtctccagaacaaagataagtttttcctttacaatgttttttattaccatactacagtacaacagtaagttctttcttctgaccagccagcgctttaactagttctactctcccagccagctatccttcttcaaactagagagagagctatccatattcctattcttgtgacctatccttatatctcgagcactacttctatcaccgatttcttacttctctcccaactttgcctaacaacccgaatctctttcctgtagctagtcgctgatagtcagtctatctcctttccttgcaaactctctaagctttaggtagttcgccatgcgatgggcctgaggatctattccaaagggtgatgggtcgtgggtacgactcttcagaaggtgcttttgccaaccaccgagcaccaacaaatgaagagagttaccacaagtatgagaccactaaaactacttcgcctgctttgaatcagagcaaactgctttt

SEQ ID NO: 155283 - DNA, 272 bp, Zea Mays
ggaacacgtatgccgatccgaccgaggcagtccaggcaaatgcatgaagttgaaaaacaggatcgacgaatgtaagcttctcgacacaccacctagcctatgaaatccctacctaccattccaagacccaagtctataattcctactgccgtgctccatttggaaaacaggccttataacgctagttactcgactgtgccttcaaggaaggtctggaacctgagaggtgatttctgagaagccaaccgcattcattggttttgaaaaagaag

SEQ ID NO: 155284 - DNA, 376 bp, Zea Mays
ccccagtactactcctttggctgcagagtaccacctcttcctcaactggatctggtattcttcctcgaaccagtgcttcctcggaggatggttctacttactgtcccctctactttaggtttggagttcagctacaccttttggctttgcatgaatgccattttcctctgtgtctctttcctgcgggtgcttggtcttttgctaaacttgttatttggctctcttctttgtccctagctcctgtttcatgccgagtttctataacagtacttgcatcctgccttttagcttatccgtggaccagtgctctttctttccgctttgaacggacgcctacaactagataatttgtcggatgacaatacaatactacaag

SEQ ID NO: 155285 - DNA, 110 bp, Zea Mays
cattcaattctaactttgggattccagaacattcaagaaagaaaggtcaaaggactcaggctttaatgccaaagtacttgggcagagcgtacttacctacttagacaaga

SEQ ID NO: 155286 - DNA, 1352 bp, Zea Mays
gtagtaggggaagttaattttcttcttttttcgaagctatcggttcatcctagtttttggtgagtacttcaatatctttaccatcctttcccttcgccagtcttagttcttagaaaatcaagtaaaccactgcccaggatttctttctggggctcgccccatcctataatgcttcacacaccagaaaaaatcagaacgaagcaagcttcatgcgtggtacgagatagatgtcatcaaagacagatcactaattcggagactacctaatagtatgatctatatcatccaggtggagtatgcatgaaagagtcagatgcttcttctattctttcctcctcgccttgtgccaaatagcgaatcgaatatagaagaaaagttcttctgcttcctgctcaacaacttaataataaggaaatatctatatacgcaacataagctccttcgtacccaacaacttaatataggagaaatccaaagtcctagtttgaaacatcaagaaaatgcatattctttctataccagtggacaagaagagatggaatgttccattcctggacgtaagaccatgctgtagtaagctttctttttctcaggaaagtgggtcatttcagataccacggtttggagaataataagaattctcataggcaaagaagtaagtcagcactagtcaagtaggaaaaaacaagtaggaatagctagaagtacttactatagctatagtagttggcatgccaagctctatacataataggttttttcatagcttcgaaggctgggtcagtcacaagtttactttcaaaaggaatagaaagacgggatggcaagtataggtaattatagtcaagaaagtagaagtaaaaacctacaagaagcaatggtatttcaggttggatatatgcaagaaaacaactagtagaaatgctaggggtatatgggaaggtagacaagatatgcctatttcaaagttattgggtaaagtaatgtaagggataagtaaagtaagaagagaaagatagtcaaagttgacatcttgaaatcgactcgcatgggccaagtaagtgcttataaaaggaggctaaagcataaaacaataatgaaaaatataggcatgttggatcatatatagtcctagaatatgtaggacctggaaaatgaatccgagcgagcgacaatgcccttataaggaagcctctctttttagactagtcaacctatgcacgccttttccaatatgctagagcaggcgattgttcaagggtaagttacttcctcctttatgcagatgaaatacttgcttaagcgtgaggcttagcaaaagtgctttgacacagtaggaaaggtcagtactt

SEQ ID NO: 155287 - DNA, 598 bp, Zea Mays
cccacagttctaaagtcgtgtgacctatattctccatttcatacataattacttactaattccttggttattttcaataggatgggagagtgtcggatgcttcttcatatactatttcttggtccgtcaaatctgcttgacccaaatgcaagttttgctcaaatgtggcaaaaataattgtctcaccaattgtcagcgcgcctgcttccagcaaagtttcagagaaggaaaagatggaatgtaactcaaattttgctggccgcacaagtgtggagacttgaattcatatatacttagttaggctcaatattagtgcaaacagttgataaccaagtttttcaattagtatttagttttggctttacagtacacttatgtatgagttatttgacaatatttatttatgagatattgaatggtacttatctatattatattagttacgatgttattaaatatatgtgtatgtatatttctctttcaaattattataatgtggtatctaaaaatgagtataaattgaagaatgtactgccatgtaagtcatttcgtttaaatcttaataagacacttcccaaaacgtctaatatcagtctcc

SEQ ID NO: 155288 - DNA, 473 bp, Zea Mays
ccgccatcggttcgccattgctgcctccaccgcccccgctccgaggagggccacgaagagaggacagtgcagtggcaatgacattagctcacagcaagcaagaagaggaagcgaagaagctcatggatagcacagacaaaattaagaaaaggttggcagccaaagaagttgaggtgcaggaggccaagagcaccctcgacgccaaggtcatgacgatttgcaacatcgtgtatgagtctatgccattcagtgacgacgaggcaaacaataaaattgtacgggcatttggagagaagagagtagaggataatttgaagaaccatgtggacctttgcaggatgcttgatattgtcgcattggaaaaggtattgcttgtgttaagcatgtttcaaagttattacaaacctgactatggagagacggacggtggtgggcccatccgtgatccggcaaagaagtggttgcacgattga

SEQ ID NO: 155289 - DNA, 1833 bp, Zea Mays
ctagtgcaaagcctgccgctccttgttggcagcttcggctcgccttcactaccaggcggccaggcgggaccccacataattccatagtctaacctgccaaccacttccaccgccaccgccgagcgcggtggcaccgacacgacacacgtagctgcagacctgcagtgccagcacggctgccaatccctgctggcgctgttcccggctccgagatcatttggactcggcactcggcagggatggggatggggacggaatggccgccgacgcctgcgcagcagaggaaagcggtggtgagcgccgggtcggcgctgaagctggtactgttcgtgattctcgcgggcctcgcactgcggctgctggtggggcccccagcctacctcctgccgcccaccgccgcgccagagggggccgctcgtcttttcgcggtgccggagagggaaagaaccgccggcggcggcggcggcgggataccttccgtcgaaacggatgatgcggtttttactttgaccgattcagaacctctaacagctttaggcaagaaggaaggttccacaaaaccagaagaaagttgtgatcttttccatggcgagtgggttcccaattcatcaggaccagcttatactaatgcaagctgccgcttcattgagtctcctcagaactgtatgacaaatggaagacctgacacagattatctcaattggagatggaagccatatggttgtgaggtatcaccatttgacggcaagaagtttttggatggcatgaaaggcaagcattgggcactcattggtgattccatccttcgcaaccacgtccagtcattgctttgtcttctttccaaggtcgaagatgctactgaggtttaccacgacgatacattcagatccagaagatggcacttcccttcgtacaattttacgatctcccttgtctgggcaccattcctggtcaaagctaaaatatttgaggacgacgatggagtttctactgctgatctccagctgcaccttgacgttctcgagacagactggactagtcaatgggagaagttcgattacgcggtgatatccacgggccaatggttcttcaagactgcagtgtactgggagaatggagctgcgattggctgccactcctgccagaacaaaaccctggaagagaggcctccggagtactccttccgcagggcactcagggtggccttccagttcatcacatcctcacctcacaagccagtagtcttctacagaacgtgggctccctcgcattttgagaacggcgagtggttcagcggcgggacttgcaacaggacggccccattcaagccaggggaggccggtgacagagaatgggacaatagtatgtggaggattgagagagaagagtttcacaacgcggtgcctatcggtggtgaccgtctgaaactgctcgatacatttgagctctctctcctcaggcctgatggtcatccagggccttatagagcataccatccttacgagaagggcgtgacagccaaagtccagaatgactgcctccactggtgcttgcctgggcctattgatgcgtggaacgatgtaattatgaagatggtggcaaaggactgaagcattatcaggtggtagtgtggtaccctaggcatggcatctgatctgaacaccagtattgtctcaagtctcattttcatacatatgtatgtttctgggcattgcatggcgtctcctctatctggtgtcaagaaactcaagtagattcggacttctcttcatggtgggtatgatttttttttatgttaacaaaattcaattaaatcttggaaaaatcataaaa

SEQ ID NO: 155290 - DNA, 1860 bp, Zea Mays
ctagtgcaaagcctgccgctccttgttggcagcttcggctcgccttcactaccaggcggccaggcgggaccccacataattccatagtctaacctgccaaccacttccaccgccaccgccgagcgcggtggcaccgacacgacacacgtagctgcagacctgcagtgccagcacggctgccaatccctgctggcgctgttcccggctccgagatcatttggactcggcactcggcagggatggggatggggacggaatggccgccgacgcctgcgcagcagaggaaagcggtggtgagcgccgggtcggcgctgaagctggtactgttcgtgattctcgcgggcctcgcactgcggctgctggtggggcccccagcctacctcctgccgcccaccgccgcgccagagggggccgctcgtcttttcgcggtgccggagagggaaagaaccgccggcggcggcggcggcgggataccttccgtcgaaacggatgatgcggtttttactttgaccgattcagaacctctaacagctttaggcaagaaggaaggttccacaaaaccagaagaaagttgtgatcttttccatggcgagtgggttcccaattcatcaggaccagcttatactaatgcaagctgccgcttcattgagtctcctcagaactgtatgacaaatggaagacctgacacagattatctcaattggagatggaagccatatggttgtgaggtatcaccatttgacggcaagaagtttttggatggcatgaaaggcaagcattgggcactcattggtgattccatccttcgcaaccacgtccagtcattgctttgtcttctttccaaggtcgaagatgctactgaggtttaccacgacgatacattcagatccagaagatggcacttcccttcgtacaattttacgatctcccttgtctgggcaccattcctggtcaaagctaaaatatttgaggacgacgatggagtttctactgctgatctccagctgcaccttgacgttctcgagacagactggactagtcaatgggagaagttcgattacgcggtgatatccacgggccaatggttcttcaagactgcagtgtactgggagaatggagctgcgattggctgccactcctgccagaacaaaaccctggaagagaggcctccggagtactccttccgcagggcactcagggtggccttccagttcatcacatcctcacctcacaagccagtagtcttctacagaacgtgggctccctcgcattttgagaacggcgagtggttcagcggcgggacttgcaacaggacggccccattcaagccaggggaggccggtgacagagaatgggacaatagtatgtggaggattgagagagaagagtttcacaacgcggtgcctatcggtggtgaccgtctgaaactgctcgatacatttgagctctctctcctcaggcctgatggtcatccagggccttatagagcataccatccttacgagaagggcgtgacagccaaagtccagaatgactgcctccactggtgcttgcctgggcctattgatgcgtggaacgatgtaattatgaagatggtggcaaaggactgaagcattatcaggtggtagtgtggtaccctaggcatggcatctgatctgaacaccagtattgtctcaagtctcattttcatacatatgtatgtttctgggcattgcatggcgtctcctctatctggtgtcaagaaactcaagtagattcggacttctcttcatggtgggtatgatttttttttatgttaacagctttttaaaactttttctaaatgtaacataagaggtttttttttaaaaaaaactaata

SEQ ID NO: 155291 - DNA, 1835 bp, Zea Mays
aactgtcatgtgtctttctctgaactctctttaccactgagtacttcaacacggtgaaagcccctgggggcgcctagtgcaaagcctgccgctccttgttggcagcttcggctcgccttcactaccaggcggccaggcgggaccccacataattccatagtctaacctgccaaccacttccaccgccaccgccgagcgcggtggcaccgacacgacacacgtagctgcagacctgcagtgccagcacggctgccaatccctgctggcgctgttcccggctccgagatcatttggactcggcactcggcagggatggggatggggacggaatggccgccgacgcctgcgcagcagaggaaagcggtggtgagcgccgggtcggcgctgaagctggtactgttcgtgattctcgcgggcctcgcactgcggctgctggtggggcccccagcctacctcctgccgcccaccgccgcgccagagggggccgctcgtcttttcgcggtgccggagagggaaagaaccgccggcggcggcggcggcgggataccttccgtcgaaagttgtgatcttttccatggcgagtgggttcccaattcatcaggaccagcttatactaatgcaagctgccgcttcattgagtctcctcagaactgtatgacaaatggaagacctgacacagattatctcaattggagatggaagccatatggttgtgaggtatcaccatttgacggcaagaagtttttggatggcatgaaaggcaagcattgggcactcattggtgattccatccttcgcaaccacgtccagtcattgctttgtcttctttccaaggtcgaagatgctactgaggtttaccacgacgatacattcagatccagaagatggcacttcccttcgtacaattttacgatctcccttgtctgggcaccattcctggtcaaagctaaaatatttgaggacgacgatggagtttctactgctgatctccagctgcaccttgacgttctcgagacagactggactagtcaatgggagaagttcgattacgcggtgatatccacgggccaatggttcttcaagactgcagtgtactgggagaatggagctgcgattggctgccactcctgccagaacaaaaccctggaagagaggcctccggagtactccttccgcagggcactcagggtggccttccagttcatcacatcctcacctcacaagccagtagtcttctacagaacgtgggctccctcgcattttgagaacggcgagtggttcagcggcgggacttgcaacaggacggccccattcaagccaggggaggccggtgacagagaatgggacaatagtatgtggaggattgagagagaagagtttcacaacgcggtgcctatcggtggtgaccgtctgaaactgctcgatacatttgagctctctctcctcaggcctgatggtcatccagggccttatagagcataccatccttacgagaagggcgtgacagccaaagtccagaatgactgcctccactggtgcttgcctgggcctattgatgcgtggaacgatgtaattatgaagatggtggcaaaggactgaagcattatcaggtggtagtgtggtaccctaggcatggcatctgatctgaacaccagtattgtctcaagtctcattttcatacatatgtatgtttctgggcattgcatggcgtctcctctatctggtgtcaagaaactcaagtagattcggacttctcttcatggtgggtatgatttttttttatgttaacagctttttaaaactttttctaaatgtaacataagaggttttttttt

SEQ ID NO: 155292 - DNA, 493 bp, Zea Mays
cggccacctgcttcagctcgcgcccagggcctctgctcgctggtgccctcgactctggctcccttcaccgccctcccctggtctgcgctctagaccctcccgtcctgatcctctcggccagctgctcgcgtgcgctgcgcgacatcgggtctaagacgggcacgcaagaaagacacgaagaagacgctgcatgtgcttgtgttgagctccacagcaccttgtcgtgcctccatcgcacctgcagtgtgtttacagcgctgtcgagtctacgtgtgagcttgctgtcaggctacgctatcgcatgatcgctgtgctgtcgtgctctggccgcgcaacatatgcttgctcggtctcttctccagcgacactctcttggtgctcgacaaagtgcctgaacccgagttgcatcgacgttcgtacaattatcgtgtcgattcggtcatggtacgctggtttattatttatgttatttgggtttatgagtggattaatt

SEQ ID NO: 155293 - DNA, 711 bp, Zea Mays
atggcctccgctgcgacacctgcgcctttgctccccgtgatcagcacgactgctagcggcggctccgcgccgtcctccgccacgggcctctccgacgcggcgctcgccacaccggccttccgcctcttcgtgagccggctggccgaggcgacgcggcgctcgctcgcggaccggcgcccatggacggagctgctggaccgattggccttctcccgccatggatctcgcgccgtgccatcttggacccgcgccgcgccgtcgcttgtagcgaagcctacggcggccaagtccgcctggtcggacaaggggaagcaggccccaagtctcacgccggcctccagttccccgttggacgactccctccgcctcaccgacgcgcacggctgcttctgcgagctccgcgacgccctggtcgcgctccaggccgaggcccacgccgcgctgcgcagggtggtgctggctcgcctggcgttggccacgcgcgctatgccgtggtaccagcgagccgggtttcaacttaaggatttcacacacaaaaagaatcctctcactgtgcctccagctgacaaacagtggcagtttgccgacccagattttaaggcggacccacgttcagctcagcggggcacggcccccactcaatttttggattttagtggagtttttatcttatttaccatagttacaaagttagtagagtatgattttcag

SEQ ID NO: 155294 - DNA, 2718 bp, Zea Mays
ctgacgtacacatctcctcgccgaggttgctccgtccggtggccagaccgtggttcttggcgctcttggttggtcggggtccttggcaaccggacgtctggtgttcctgtttcgaccttgaacttcttgggggtggggttttgggggcgtcacctccctgtttgtttcttgggttgatgtggcggcggcgcttcctgtgaccggaggggccaaggaggtgggactttttcggtgaagggaaaactgcgggaatggaaggcgaggcagcggcggccgaggcggtggcgcggatacggctggtgcggtgccccaagtgcgacaagttcttgccagagctgcccgcctactccgtctacgtctgcggcggatgcggcgccactctccaagcaaagaagaagaattcagcccaatcttcagatgatgctgacaatggaaatgtgaaataccttgaagtactggagtgtattccacaggcatctgcaagaaaacatggagctagtactactgataagtcagaaaccagtaagattgcagatgtacatagcaaaccagtttatggcaatcatgataggattcagacagggccaagtccctcaaatctgaacacttctattagagatgatggcaaggaggcaaagtaccgacacattcgttattgcgagaatggtgaaatggggcaatcattgagagtaagagacatgtccccgaagtctccaatcaatcacatttcagacaataatcggagtgagtaccacttgaagcagaggtacagctattctactaaggaatgccctggtgaaagaaacttggatggtccaagcaaagtcaggggacttgagaaagaccgcgctgagatcttgaggatgcttgatgagttgagagaccaggtacagcaatcttgcaatgcgactaatggggcaagtggaattgccccatctactgcagcagcagattccaacagttcacatggtacttctgaccggttgagtcaattgaggcaggttgcaccacaattgcatcagaatggttcacatcactccccatccttgaatgttggaagtcctagcgtttctcgtgtttatgctccgctgcctgcacaacaagattgtgtcagatatgcagagcctatttcacatgctcgagcctctagctatcctgccagcctctatccatggagaaattttgataattatttctttggacagcatgatcccgatcctcttctctcttgccgccatgatggcttctatcaccaagctgcctgttcttgcttgcactgttgccaccaagaattcttgcctatacagggaaatcacataggcttccatgatcaaagggcaccatatcttctgaacaattatggggcttatcctgtggacagtcccttacttggtcagcaaagatacagtgcaagagttaccaatactaccttgcagcagaatcacatgagggtcaacgttagcaagaaggctgcacagacttgtgagccagtcgcaggtggtgctccattcaccatatgctgcaattgctacgaagttctacagataccaaggaaacagtccctgtcagggaacgagtataaattgcgttgtggatcatgctcacatgcaattatagtcaagcttgatggaaacaggctcaatgtatcagaatttgcactatgtacacgtttatctgatggacaggaaaatgacatgggaaccgatgggcaaactcaagacaataggtccattccagcttaccatttatctgttggaagtcctgcatctcaagaacgagatctgcactcaaatttgagcgagtcagagaacaatcatacccctctaggaactgactcagagggcacttccctgtccagggatcttcctgctgaagacagtgcagtttcccatgtaccaaatttaccacatcacagtcattctggatcatctccaactgaacattttggagtgggaagtagaagtacccattctgaacctgaaaaagttatactattaactgaaagttccaagcagacctcagttagaggtatatgtgtaacaaacaagatgcaatctccaaacaatgagtttgatgttcctgaatacacagatgatacattaaatgaccaacaagatactgaccaccctagaacaacaaaggccagtgattcctttctcactaatctgataaaaaggagcttcaaaattaataatggattgcgcaacagaagagcaagggtttatgtaaatggctttcctatctctgatcatgtggtccgaaaggctgagaagctagcaggatcaatctgccctggcaattattggtatgactaccatgctggcttctggggcgttatgggacatccctgccttggcatgataccgccttatattcctgagttcaatttccccatgcccaagaactgtgctggtggaaacaccagcatatttgttaatggaagagagcttcaccagaaggatttggatttacttgtcactagaggactctctgattcccctggtagatcttatgtagttgaaaattctggaaaggtttcagatgaagtatctggtgaagagctttatggccttggaaagcttgcaccaaccggtctattggtaggcgagaagtgggggagaacagatttatgcgctttgcatgtgatgacatgacacacgaggcacgatacacgacacatgaaactcgtgctttaaagaagtagagattaagagcccg

SEQ ID NO: 155295 - DNA, 390 bp, Zea Mays
atgggctcaattgttctgtacattcaggttcaaaagcatctgttactcgggcattgcaaagagctgagaggctctcctcttgttcgatttattgaagcatttggaactgcattttctagaacaacattttgtgttccgatcagtgagcaaatcagaacattcatccagatgaggactaacctgaaggtggtcgataactccggggccaagcagaatcaacaaatacccataaagggaaacctcgccaaaattagaagagaaaccaaatgtatccctgatcttatttttcagattgaggattatgagaagtatttaatacagctaagcaaactaactaagaggaaaaacaatagagaaaatactactgggagattagaactgtacttttat

SEQ ID NO: 155296 - DNA, 359 bp, Zea Mays
cacccggcttcgtgcccttcccccgctactgcggtggcgaggtggaggaggagaagcggcagtggtcgtcggtggctgtcagcgacgacgacgaccgcgaacgctgccgctacaggcaccagcaccgccgcctgcgcagcgacgacgacgaccgccagccgatccagcctgctcccaagttctatgaagtacttattgcttcactttgttttgctatctttgcacatggcttcaggcatacaatttcatcttgtcgattgaaagaactgaaccaaagaaaaattaaagacaggagcacttctccagattcaatgccaattaatgatttgaaggtatggtctctttcttccaagttctaa

SEQ ID NO: 155297 - DNA, 731 bp, Zea Mays
agcaagcgagaagagagagggtgagtgccgccattgccgacctttgcgctcgtcgcttggtccgccgccgccgtagatgcttgtctgcactgaagcttggcgaccgtgggtggcggtgtgagctcgcgggtgtgtgtgggtcgcttgcatgccctcctcctacgaatatgtgcaccagagccctcccaattcctcgtcgatgtacgggtgctgtcgcagatccgcattgcgccatggacaacgcggtcgacaccgtaatcctcgtcaccggtggggccaacactgcgggggatggtggcgccagcatgcccaatcggctaggaaggaagatgatgtgtgcgccgtccatctcttattgaacggtggagattagagcgttcagtggattgatctcgatcgtcggatcttgatccgatggcggtctctacggtgagagcgtaatataatccgtggcgtagaactcagatcctgcggcagcgtaggtgcaccagcgctgttactgtcgttagtgacgacgatggagtggtgaggctagccgcacacaactacggatctgtagatctccaccgacaacttctcgtcatacccatggcaagcatgagatattgacgtggctcaatcatcggttccctcactgtcggagcacctactacacgcctccgcgtcagacccacgcccactcaaacgaaaccgtttctgcattcctgtcgcgctttctcgtttgtccgatt

SEQ ID NO: 155298 - DNA, 3321 bp, Zea Mays
attgcgcctcgctccctcccctctgcccgatcggtgtccatggcgtcgtccctcctcgtgtgcctcgtctttctgtccgcggctgcggccgccggcgctgtgaccccccgccggtccctcgcggcacaggcgagatcaggcgacattgcgtccctggcggctgggagcccgatggtggcagggctcatgaacgaacggctcaaggccctcaccacctcctttgcgcagcagatgggcagggagttccactactgcatcaagaacatggaccgggagtggaacactgccttcaatttctcttccgatcccgccttcctgacagcctgcatgaaggaaaccgacggtgacctaccgcagcgcgtgtgcacggccgcagagatgaagttctacttcgagagcttcctcgaaggcaacggaaggaagaactacgtgagaccgaacaagaactgcaaccttacttcatggatcgacgggtgtgagcctggatggtcctgcagcgccggcaaggaccaggaggtcaacttaaaagacgccgtcaacatcccgtccagaacccttgactgccgaggttgctgtgctggcttcttttgccctcatgggctcacttgcatgataccatgtcctctgggagcctactgccctcagtccactctgaataaaacaactggaatctgtgatccctaccactatcaaccacctgccgggaagccgaatcacacgtgtggcggtgctgatagatgggcggacgtcgttagcaccgacgatgttttctgtccacctggctactactgtccaagcacagtgaagaaactcgattgtagtagtgggttctattgtcggaagggttcaattttgaaaaccaaatgcttccacaaaggaagctgtaaaccaaactccacaaatcaggacatcaccatattcggtgcgctgcttgtgggtgctctgagtttggtgctgttgatcatttacaacttctccggacaactcctgatgaaccgggagaagaagcaagcaaaatctcgggaggctgctgtgagacacgctagagagaccgccgtggcccgtgagagatggaaaacagccaaagacatcgcaaagaagcacgccgcaggcctgcagtcgtcgctgtcccgcacgttctcacgcaagagaagtcttaggacacacgagtcgagcaaaggaggcaccggtgctggtctgccttcaacaagcggtgaccagacgacgacgaacgaagcaggagggaagaaggaggatagccatactgacatggcgcgttcgactgaagacaaccctgaaaagggcgaaggagtcagtgtgcaagtggggggaggagagaaaaagaagaccaaagggaagcatgcgcatacccagagccagattttcaagtatgcgtacgggcagattgaaaaggaaaagatgatggaacaggaggcccagaaccttacgttttcaggagtgatatcgatggccaccgatgaagatatcaagaaaaggcccacggttgagatcgctttcaaagacctcaccctgacactgaaggggagcaagaagaagcttctgaggtcagtgacgggaaaactcatggctggaagggtggctgccgtgatgggcccatcaggcgccggaaagaccacgttcctgagtgcgattgccggcaaggcaacaggatgcgaaacgacagggatgatactcataaatggcaagacggaacccatccgcgcgtacaagagaataatcggctttgtcccgcaggacgacatcgtgcatgggaacttgacagttcaggagaacctctggttcaatgcaagatgcaggctctccgctgacatgttaaaggccgataaggttcttgtcgtggagagagtgatcgagtccttggggctgcaagcagtccgtgattccttggtgggaactgtcgagcagcgaggcatctcgggcggccagcgcaaacgagtgaacgtcgggctagagatggtcatggaaccctcggtcttgatcttagacgagccgacatcaggcctggacagcgcctcgtccttgcttttacttcgtgccctacgcagggaagctctcgagggtgtcaacatctctatggtcgtccatcagcccagctacacactgtacaggatgtttgacgatctgatacttctggcgaaaggcggcatgactgtgtaccacgggcctgtgaagaaagtggaggagtactttgcaggactgagcattgtggtgccggaccgcgtgaacccaccggactactatatcgacatcttggaaggaatcgtgaagccggacgcaaaggaaccagtcaatgtgaaggatctccccatcagatggatgctgcacaatgggtatgaagtcccccgggacatgctgcagagtgcctctgactcagaatcatctctcagaggggaaagaggccatgcctcgggaagtgacgctggccaatctattgctggtgaagtgtggggtaatgtcagggacatagttgggcagaagaaggatgagtatgattacaacaaaacttctgaaaacctgtcgaatcgacgtactcctggcatccttaggcaatacaaatactacctggggaggtgtggcaagcagcggcttcgagaggctcgaatacaaggtgttgactatctcatacttggccttgccggtatatgtctgggcacactcgctaaagtgagcgatgagacatttggagcgcttggctacacgtacactgtcattgctgtgtctctgctgtgcaagattggggccttgagatcgttctcgctggagaagatacactactggagggagagagcgtccggcatgagctcgctggcatacttcctgtccaaagacacgatagatcacttcaacacgataatcaagcccatcgtctacctctccatgttttacttcttcaacaacccaaggtcatcgatctgggagaactatgtcgtccttcttgcgctcgtctactgcgtgacggggattggatacaccttcgccatcttcttccagccaagttctgcgcagctgtggtcggcgctccttccggttgttctaaccctgatagcaacccagcaaaaggacaccttcttcgcaaacctgtgctacacaaagtgggctctggaagcatttgtgattgcaaatgcgcagaagtattccggcgtctggctcataacacgctgcggctcgctgttgaatagtggctacgacatcaacgacagaatcctctgcatagtggttcttgttgccaatggtgtgatattccggtgcgtggcattcttctgcatggtcatcttccagaaagactgatggatgagcgct

SEQ ID NO: 155299 - DNA, 625 bp, Zea Mays
gtgggcccgggtcgacagacgtttccctctccttcgccgctcgaatcggaggaactcaaccatgcacgcttctcaggatccgttgttgttgcctacaaactagcctctggcggccacaaaaggggttgccgagtcctccccttccctctcccttctggatcgcgcagcaacagaaaactatggccggggtagctatgggggaggaagaagatccgccgccattggggaattcacatcgggctccatcgacggtatcgagcgagtggcaggtccgctcggggaaagctctggcattcgtcaaccgctaacgcgggcatggccaggatgctcgtccatggcgcatctatggcgggcgacaaccagagagagtgagggagagaaacaaatcgtcggcgctgatcctcgcggtcaccgctacctgggactccatgatggaatccgggtgctcacgggtgtcctctgcatgcgaccttggcctcacatggccgaatcgacaggcggtggggaaggaatttctcgttggcgcagcacggtcacctcagatccgccgtgcgccgtggtcctgcacctccaccatcgttcgggggatgcgaccgggtcatggtggtgcgccagcatgcgttga

SEQ ID NO: 155300 - DNA, 625 bp, Zea Mays
gagtcatagatcaaaaacatttttttaatctatctgcatgattgagcatctctagctttttataaaacaggtgacaaggtatggtaatcaattctttcaaggaatggtaatgcatcaagtgtttaatcaattaactcctatcacctaatgcatcatataagtgataaaaattttataaatacaaggaaggtagtaaatgcaccggggcttgccttattgcaatagaagatcccaaaattcttctactctggtaagtagttagatgaaactccaccactgggtattcaggtaccgtagcaaatttctctttgatgtacacttcttcacggagctcggagatggcagcggcttgacgctggtgctgctgcagcttgaggaggggatgcatgagggacatgcgtgcgaagtcgcagcgaggacgacgcgtgctggtggagctcacagcagcgcacgacggcacggtggtgcaggatgcccagacaagaccgagcgggcacgggcgccacggcggggtgaagatggcacaagaccaggcgcggctaggaaccaaagcctagacgcgagagggaggtgatggcacaggacgctgctgccacaggaaagcgatgccgagagggctggagct

SEQ ID NO: 155301 - DNA, 450 bp, Zea Mays
ccttattgcagaagaagatcctgaaacccttctactctggtaagtagttagataaaactccaccattaggtattcagataccggagcaaatttctcttcgatgtacacttctttacggagcttggagatggcagtggcttcaagtggggggatgttggtgctgctgcagcttgaggaggggaggcgtgagggacaggcgtgcgaagtcgcagcgaggacggcgcgtgctggtggagctcacagcagcgcgcgacggcacggtggcgcaggatgcctaggcaagaccgagcgggcgcgggcgccacggcggggtgaagatggcacaagaccaggcgcggctaggaaccaaagcctagacgcgagagggaggtgacggcacaggacgctgctccgcaggaaagcgatgccgagagggctggagctgctccagcgaactgctgctacatcttc

SEQ ID NO: 155302 - DNA, 302 bp, Zea Mays
aaaggtagattttctgattggttagtttgggagtgaaagcattcttccgattgtgtctgctaaagggatttcttttttctcccaattgtttctagatacaaatggatacaccatctggtgtgaagggttctattcctgcatgcatcaagtttttgtgcaggttccaggtgaaataccatacaatggtatatattatgacccacctgaagagatggaagagactttgtgcaaataaactaaggttaaacatatcccatctattggacgcaccatcaatagctgcaataaacaaaactcagagg

SEQ ID NO: 155303 - DNA, 107 bp, Zea Mays
ggttcagttgcaagtgcaagcactcaactgaaaattgtctattgggttcgtgatgcacgccttattttagatttaactgtagtctttcgtgtcctcatttttcactt

SEQ ID NO: 155304 - DNA, 1143 bp, Zea Mays
atggcatacatcgcgttcgtgttgcctactcagatcagaggcgggcctcgagcgaaccagctgagattgcaagaagtagagcagcggccgccgccaagggccatggtgaagccgggaaagagaacgagcagggggcgccagaaaattgagatccgccgcatcgacaacaaggagagccgccaagtcacccagtgcaagcgcaagggcgggctcctaaagaaggcctcggagctccatctcctctgtggtgcccaagtcgccatcatcgtcttcaagagaagggaccccgaaagaaaggaggtgcccgttccgccccgcggccaacgcgacgacggcggccttgccttcgcgatgggcaccccctccgtcgaccacgtcctccaccgctgtggcctgctccacgccgacgagggcctcaccgcgatccaggatgtgggcgccatcgccgcagagcgtgccgttatggaggcgagagcggggcagaccgagcagaccagggcgctcgtggaggcggagaaggcgcggaatgacgccatcgggcagaaggtgctgcaggccgtggaggtgaccgggaggcggttctggtgggaagtggacgtcggggtgctcggcgaggccgagcttccggtctttacttcgcagctccagcgcctcagggacagcgtgcggctccaagccaacaaatcgcggacctctgctaccccggccggggtggcggcgccgtggcttccgctgggataggtcagccgcatcgatttgctaatgcaattcaattttacggttcctgctgcagtgtttacttaatttggtcgtacgtgtagttaattcctctatgtaatagttgcattgatgctatatgcggcatctacggcatccgacggcatgaatatggggaaaaaatgtatgggcatgcccaaggacctccatctagggttaatgcatcatgatgtttagagtctgcaagaagaaaagaaggctagtaggtgaaaacaggccttgccagatgtgtgaaccggctagttcggtctctgtaacacactaacacctatgttttaggatcccgctaagccggtttttagtctaaaatcggttagatttcaatgtagttccggtttgtgttttgatgtgggaatttttagatta

SEQ ID NO: 155305 - DNA, 231 bp, Zea Mays
gaatagcaattgcaatgcacaagcaacagttacatacaatgaatctctacctctctccatgttccggagcttaaatactgggaacaagctacatactacattgctacaaacagtgcatttaatgccgactaaattgaaaagaaaccatggacatgttgagcatcagactatcaacatcctaaactctaggcttagtaactttgctttagctacaattcacagccaatgggc

SEQ ID NO: 155306 - DNA, 1587 bp, Zea Mays
aaataaagtggtcaatgcccccttgtcttcatcagataatatgaatgttcttatatgtgctgtgcagactgcctctgtatccaatcatggagagttgaaggaagatgatgaaaatgttgataaagatgatattgacactgctaatatgatcttatggttggaatcatttgaaaatcaggagtggttatcatggataggaggcacaagccaggatgcagtggcgtcaaatatcatagttgcagctgctttggtcgtttggtatccaagtgtcgtgaaagctaaactttcaagtttagttgttagtcaactaatcaagttagttatgtcgatgaatgatcgatatagttcaactgcagctgaacttctagcagagggaatggaaaacacttggaaggcatgcttgggtgctgagatcactcattttatgagtgatatccttttccaaattgagtgcctaagcactgcaccttctagcaatgctatcaataaaactgcagtggccattacaatgcgagaagcattggttggcacccttttaccaagcttggctatggctgatgtaacaggattttttggtgtaatagagagccaaatttgggctacttcgtctgattcacctgttcatgtcgcttcaatcaaaaccattatccgtgtagttcgaggtgcgccgaagtccttggtcccatacctcgacaaggcaatcaactacattctacacactatggatccaagcaatctaataatgcgaaaagcttgtattatcagttcaatgatggctctaagagaaatggcacgtgtatttccgatggttgctctcaatgagtcaatgacaaagctagctgttggtgatgctattggagagatttatgatggtacaattcgagtctatgacatagaaagtgtcacaaagataagaattcttgatgcaagtggaccaccaggccttccaagcttacttgcaggatcatcgaatagaacaacaaccatactgatatcagttctgagtttctcaccggatggagagggtctggttgccttctctgagaacggattgatgataagatggtggtccttaggtagtgcctggtgggagaggctgagcagaagccttactcctattcaatgcacaaagcttatctatgttcctccatgggaaggattttcacctaactctgctcgcttgagtataatttctagcattttagatgataaacctggaaggtcagagaaggaactaggcgaggcggataatctgaagttattgcttcataatcttgacctttcataccgtcttcactggattggtggaaagactatcaaacttacgaggcatggccaggatttgggtacatttcagttgtgatgggcttacccatgaatattgagttgctttgtagtgttgaaagacagctaattcgatggctggcaagtctaacaagaatcaccagtacattcatatgtcatgtgaggtaccttgatgtttctttgactgttaaaagcattgtctggtacagttcataaattggatccctatgtatggtaaataaaaaaactgaatgcaatttgattccatgttacaagactgct

SEQ ID NO: 155307 - DNA, 1580 bp, Zea Mays
aaataaagtggtcaatgcccccttgtcttcatcagataatatgaatgttcttatatgtgctgtgcagactgcctctgtatccaatcatggagagttgaaggaagatgatgaaaatgttgataaagatgatattgacactgctaatatgatcttatggttggaatcatttgaaaatcaggagtggttatcatggataggaggcacaagccaggatgcagtggcgtcaaatatcatagttgcagctgctttggtcgtttggtatccaagtgtcgtgaaagctaaactttcaagtttagttgttagtcaactaatcaagttagttatgtcgatgaatgatcgatatagttcaactgcagctgaacttctagcagagggaatggaaaacacttggaaggcatgcttgggtgctgagatcactcattttatgagtgatatccttttccaaattgagtgcctaagcactgcaccttctagcaatgctatcaataaaactgcagtggccattacaatgcgagaagcattggttggcacccttttaccaagcttggctatggctgatgtaacaggattttttggtgtaatagagagccaaatttgggctacttcgtctgattcacctgttcatgtcgcttcaatcaaaaccattatccgtgtagttcgaggtgcgccgaagtccttggtcccatacctcgacaaggcaatcaactacattctacacactatggatccaagcaatctaataatgcgaaaagcttgtattatcagttcaatgatggctctaagagaaatggcacgtgtatttccgatggttgctctcaatgagtcaatgacaaagctagctgttggtgatgctattggagagatttatgatggtacaattcgagtctatgacatagaaagtgtcacaaagataagaattcttgatgcaagtggaccaccaggccttccaagcttacttgcaggatcatcgaatagaacaacaaccatactgatatcagttctgagtttctcaccggatggagagggtctggttgccttctctgagaacggattgatgataagatggtggtccttaggtagtgcctggtgggagaggctgagcagaagccttactcctattcaatgcacaaagcttatctatgttcctccatgggaaggattttcacctaactctgctcgcttgagtataatttctagcattttagatgataaacctggaagaaggaactaggcgaggcggataatctgaagttattgcttcataatcttgacctttcataccgtcttcactggattggtggaaagactatcaaacttacgaggcatggccaggatttgggtacatttcagttgtgatgggcttacccatgaatattgagttgctttgtagtgttgaaagacagctaattcgatggctggcaagtctaacaagaatcaccagtacattcatatgtcatgtgaggtaccttgatgtttctttgactgttaaaagcattgtctggtacagttcataaattggatccctatgtatggtaaataaaaaaactgaatgcaatttgattccatgttacaagactgct

SEQ ID NO: 155308 - DNA, 2721 bp, Zea Mays
atgaagtgccactctgtggccgcgctctggtcgccgttgccgccgtcacaccacgtcaccgccgctgccacaaccccggtcgcgctcttcaccggcgccgccgacggcaccgtcctccactggccactggcgctcgcctcagcttccccatctccgcgcccgtcttccctcctctgcgcccacgctgctgccatcacctccctctgcccactcccctcaccggcctcccttcttgtcgcctgcaccgcgggagtgctctccctcttctccacctacgcacccctccgctgcctccgccgccgctccctcccgctctgggtcggctcaccctccctcatcgcctcgctcccgtccatcacctccgccgaccctcgagtcgcgatcctctgccacgctcccgacgacggccaccgtcacgtttcagcactcgtagtcgtcgacgcacgcaccctcgccgtcctctacaccgtcttccatgggattctctcggtcgggactccgaatgcgatcgcggttagtggcggcggtgatgatgcagtcagcgttgtgttggctgacgcgcagggtcgggtgcaggtgatgcccgttgccgagggcgcggctgtcgaagtggacccacccaggcgtctcatcgtgagctcggtggccagcgtcgcgtcggcggagttggcggacgagagggtggaagccgtggcgttgtctcatgatgggaagaacgtggcgttggtgctgaagactagatgtttgttgaaatgtgtcactgagggggttgtgctcggtgaggtatctctgctgggtacttctctttgcaaggacaaaaacacagtagacaaggtatgcactgctggagcttttttcctcagcagtgatgaatgggatgctcatgtttcagacgatggcgttgtggttaggaatttggtgttgtggagtaacaatggtgctgtcacaatgtacaggattgctcttggtagctcatactttgactctgagatagtgtgtgaaattcctagcaacttatctatgcaaggagagggactagaagttaaattttgctggtcaaatcagcatcttgttagggtggaatgttgctcctataaggtagctgggtcattgttgtggaaaccaacagtcgccatttggtgtatggatcagttcgaactgagtaaaacagtgaatacacaaaaaccacctatgaggaaaatgcttggagaaggtggtcttcagggagaagaatttagaccagagccttctcattctcaatacaatatcaaccgagggtcggaagtgatttcacagatgtgctcattagaaaggtatagagggacagtgtcttcgtcaatgttactttctgaggattcttatgctccatatgctgtagtttatggtttccataatggtgacatagaagttatccgatttctgaacttgtcacctgctgctgcaaaatttggtggtcgagggctttacccacatatttccgagaggttatttttggggcacaagggagcaattctttgtttggctgcacattacatgcatgcacaccctgactctagaaacttccaccgagcactcatatcagggagtttagattgtacagttcgtgtctgggatctagatgctggcactcttctttctgtgatgcatcatcatgttggctcagttaagcaaatcgtactaccacctccatggacataccacccttgggatgactgcttcctttctgttggagaagatggccttgtggcgcttgtttcacttcaaaccatgcgggttgagaggatgtttcctggccatccggattatgcatcattggtagcttgggatggagtaaaagggtacatagcttgtttatgcaagaatctccactcttgcaatgatgcaggtagtggattatatatttgggatctgaaaacgggtgctcgagaacgtgttatcaatggcactgcttctcagttagcgtttgagcacttctgcaggggtatatcgaaaaacacagttactggtagcatcttaggaggaacaacttcagcgtcttccttacttgttccaatttttgaagacatgagccacattcggtctcatgcagataaaaatggtcatgacatttcatccgtgtcaaccaaccttcacaatggatgtacagattctgtgactgtaaatgcccctacaacatatgattttaagggaaagacgccagctccagatgaagctcatgaattccatggagataattctgtatacaattcaggaaaggctgtttcttcccacagtatccataataaaaaaataaagtgccctataaagtgctcttgcccctatcctggcattgcaagtctgaggtttgacctcacggcaatcatgtccacacaaggcatgacaaacagcaatagtgataggcatttgaaagatcatctccatagtgagaatcctaaagaaatgttgcagcctggaactttagacagtccttctcgtgttcatgaaatggatagcccctctagagagtcattggaagggtgtttacttcgatttagcctctgttttttgcatttatgggatgttgattgcgagctagacaaattacttgtagatgagatgcaagtttgcaagccagaaggctgccatatagcaactggggtggtaggagacaaaggctcatttacattgatgttcccaggcaaagaagccactcttgagttgtggcaaaatttggcaaattaa

SEQ ID NO: 155309 - DNA, 94 bp, Zea Mays
gatttcgaatcgaatcaaatcatgtcaccaatacggtcgacccattttatatcactaaaaatcttgattccaaaatatgagtgattctctttat

SEQ ID NO: 155310 - DNA, 522 bp, Zea Mays
atgactgagagtgtgattcgtgcagtttttggtcagtatgggaaggttgagcaagtccatgtattggaggcatcagatcaggctcttgcgcgagtcatgttctattccaagcacgatgcagcaaatgcctttgggaagttgcatggtcgatatgtgtataatggctgttgtcagctcgacatcgagcggggatcattttcagatagtgtagccaatcaggatgtgaggtactgcaacaacacatcaaactcatttttggacatgctccaagattctaccacatccactatttccatggaggtcgttgtggacaaggacatggttgttggggttgtggcgacaatcgatgttgattctgatgtctttgatgatgagccgcccactacctattcaaggttgggccttgacgtcaacacctgtgtcaaccaagcggcagccacattcttgcttgttgaggccatgtctgagcacattctggcaccgaaggactccacacatgcatcatctccacacatgttctaa

SEQ ID NO: 155311 - DNA, 115 bp, Zea Mays
ggtcagttttgtggaaaacatacaatatgtgtgacaccccagtgtcacctagggtttctcttaaaaagccaaaccaagaaccattattttatgtgaaccaaagtaagcatgagca

SEQ ID NO: 155312 - DNA, 1315 bp, Zea Mays
ccctagatccttccacgccgccctccctcagctcattccctgccgccgctcatctgctggccttatctcactgccgcccaaccattttcctccctcaaactagcacacagcctcaactcctctcccacctcacgcacgtctctcccagtcgttccttcatttctctggctcgtccttctccatgaggtcgcgccctgctgcgccgtcgtgctggtcgccggctgagcccccttcagtgcctgacgccgcatctccctggtgctcacctctgtttccccctgcgttggtcgacctcgcactccctccctgctccagatttctccatggccgcccctttccttgccccaggtggcgagctcgcccctgcattcctgctcgcctaatctccacttccctgttccagccacctcccatggacgccagccctcagccatggatgccgaaccccctctctttagtgcctttctttgcagcccctgcgtccccgtgcgtgtaaggtgtttgtataaatgctcaagaggagtgtcgtgtcgtggccaacccttttggcgtcgtcggatgtttgatgttttgcgcatcccgtctacgacgccgtcgaccatcggtgaggattcgttcttgctttgtcatttcatcgatcgacgtctatttgctaatgtgaattgtgtttatgtgcctatgtgtgttgaggagcgaaatccgtgaaatctaggtgaagaagagacggagcacgtcgtcgccatggttgcagctttgcttttgtcgtcgtggagcctccaccagtgccgtgtagcattcaggaacaatggaaccaaaatacatgacattttcctacttcacgtctggatgccatccaattaatatcttctctgcgatattgcaatggaaggtgtagatagatgcaagtatacattcaatgttcttataatagaggaaaggcatagctgcagatgggtttgatgttttatcttttcattcatgcatttcatcccatgcgcataaacaatttccaagtagcttgtgtatccaaacttggttcttttgttcactcagccaggttgtactgtctcattcagaattcggatttttcagccattaacccacattttctattggatcgttttagattcatttgttttatctattagaccgtactctatattgtttcatttgaggacatttcaaatggttgttgcaggtcaatatgtgatagatgactagaagaaaattataaaaggatgttgaataagattgtgcttattttctcgtgacgaaggttttttctatgcttagggactgctcttatgtgttattg

SEQ ID NO: 155313 - DNA, 99 bp, Zea Mays
cagtgttgtccccagttgtccctcaaaattggagggacgagagaggatgccaggggacgtccctgtactgactgtcccgcaaccaaacgcacccttaat

SEQ ID NO: 155314 - DNA, 255 bp, Zea Mays
atgaaggatgagcacatgaagggaaacgacgatgctgtcgcacacagcgcgaaggtgaacgataacgacatggatagtgctggacatggccgaatccgttcagagcttcaaaatgacggcaaccagattgacatcgggactcgacggcattgcaacaccaccacaagacagaggcgaactcgcaacgacggcctagaacgggtgcggaggctgacagcatcgaactccgcaatgggcagcgaggctcgacgatga

SEQ ID NO: 155315 - DNA, 1294 bp, Zea Mays
gattgatacgtgtcaatgtcaataagtggatgagtgttgttaaagacaatgtttgttcctcttctttgaaacgattttgatgaatctcgaaatgatactgattggcctgaaatcctcgacggtgttggcatcttttttctttgggaggagagtgatggatgcctgggttagcctccaaacataaaggccattgctatgaaagagctgcaagagagaaagcagttgcgggtggatgatgtcccagaaggcttggattacacagattctaccagaggatgttgagatgctcccattgcaactcactgatggagaagaactggagagctcagctagagctggaggaggtggtagtaccagttccctactggtaccagtggtggcttgatcacttcaaattggagggactattgggccaaattcccatactgtaaaaaaaggttttttttcttcctggtggtggttttgtgtttcggtgaataataggaagaggccgccaaggcgcggagcgatgagtatagcccattaggagtaggagaacctgttaagaaagccggagcagaaatccaagcttctggtaatttattcaattacttgtacttgaactgttttttctttctttgttgaattatttatttctcttttggtatgttggttatctaaaagcatctgtgacttgttttagtactttcgtcacaactatggcattggcatgggcctttgctaaactagactatcagagctcgatcatggcaaacgaaggaactcagacccgatctagacaacttgaggagcaagttagagctatgagagaatccatggataagatccaagcagatctagccgaacggatgcaacaacagagtgaagagtttcaagctcaaaaacaattacaacaacaacagtttgagaagcaagtagttgagtctattttttaaatacagagagaggttagtggcttcaacctctcacaaagagggatagaggcaacaccttttgacgccctccaatttagactcacactgcaggggcaatagaacaatttagaatatgcggtagtgttagtagttttttacatctattaggcatttttgcaaatacatggattttgtgtgtgtaaccaagacaatacacctcaacgtcatcttatcgaacacataaaggggactggcctctttcactaagacaacaattatggccgtgtagatgcagtattcgatgtttcacaaaacaaagacagaggaggttgtaagagagaccttgtcagtgcgaaggagaggaaaggcgtgtcgagaag

SEQ ID NO: 155316 - DNA, 190 bp, Zea Mays
ctgccgagctacaagtcctacgacacaggagcgggattctctaaaaagccaaggtcgtgggtgggccaagagggcccacttggagacttgggatctcagcaggaaatgtgaaggttgcttaaagccggccgataggcgaaagagaatccaaaagttttgttctgatctgagtaggctcaacatagggaat

SEQ ID NO: 155317 - DNA, 290 bp, Zea Mays
ggcctatggcccgcgacctagaaggaagtgtgctgcgttccttcatctcgtacatggatgaataccagattttcccttactaattctgattatgaaagcatctcctcttctcgaagcagatagaagaactattttgggttggcccggaacttacttctagtgatctctatgcctttaccccagactatcaagtagagcttagagcgcttttatccctaaagcattcgtgctagcaatcatgccagaactcacttccatggactgagctatttcatgaaaaaagaaagata

SEQ ID NO: 155318 - DNA, 107 bp, Zea Mays
taagcactcatgcttccacttcactccagaaaggaagctaagctcatttctgccatagaaacaaactcatttcggggcggggttcttccctaattggatgctgaacc

SEQ ID NO: 155319 - DNA, 185 bp, Zea Mays
ggagtcggtagcttcgtcttctgcctcaggtttaaaatcacttattcctagccgcctatcctatccatgcgccgcaatagaggaaagagcagcaaagaaatcaaaagcgtgaaaatgtctcgatatcgatatgttagatggagctcaatcaataggtgccggatttcttatttctcagagctgag

SEQ ID NO: 155320 - DNA, 145 bp, Zea Mays
cctctttttactcaaatatatccatagcttcattccttccttgcaaggttctttttcaacacaggatttcgtcttgctttccgtttctatcccctcggaatactgcttagatcaggctgtaggtaccgggctcactcactcaacc

SEQ ID NO: 155321 - DNA, 248 bp, Zea Mays
gtcgtattatcgttctgggaaacgcagagttgttgttgatggcattggctatttgcagtagaaatgggggaagcaagcagttcttggattggcctaacccccacagggctttccttcaaacttcactagacgactccccatattctactgtgcagtcaactcgtttcattttctttcatttcaccccatctaagtaagggcttattttccctctgaaaaacaaacaagaaaaaccatcaaaaacgatg

SEQ ID NO: 155322 - DNA, 110 bp, Zea Mays
ctcagttgtgagaacagtctttcgtttcgaacaagtgaatacggacttccggattgggagatcggaactgtcctttggggtagtgcgccagaagatacccggcctttttt

SEQ ID NO: 155323 - DNA, 813 bp, Zea Mays
ctttttttttgggagagtatgccaatatgatcttaatgaggtgcggggctttgcatctgacattcgttgggctttcctctgcgtcccggcctttttgtgcaataaacccctccggccgaagactagtgataggtggtcccgcggagctttcggagaagggtagcctagtgtgtaagcacagcaatgaaccgcggcgaaccctcagacgacccttctaagataaggggggagaccctcagtagtggtgaccctttgactcttccactgacttatatatgtaccgaatgctcatacgggaaagtgaactcctgggtctgggggttgctccgagaaaaaatcctttctttctcgtccactccagggggtgcggacacacctgcgcggattacaggtgacggttacaagaatggcggggaagtgaagagtacccgacgacattcagggatgaatgtagacccatcgggcagggataatcattccggtcctgggagaggtggcgacaccagtctgagctgagggaagccagccaattgagtcactgaaacgaccgcaggaggcgcaccctaagcccagcttctaggagctgctattgcgaaatacggcttccttaatatacaaatttccacaagggggctgggctgctcgccttcatagaaaggcgaccgagcctagattagatgttcgcctttttatagaatagaaagagaaggtaaaggggggctttattggtaatggctgaggtccatgaaagaatcgctggagcacatcaagcgggcagaagaatgagatggctgatacacagatatgggtttt

SEQ ID NO: 155324 - DNA, 407 bp, Zea Mays
ggtggacttccggatcgtacttaggaatttgcccaaacatccggtgaaggcacctgatctttgctttgggaaagaagggatgtagcagcatggccaccacacctttaaataaaggaaccactgcttaataatgatgttaaacagggagggtcaagtctaggggattattacattctaatctttcatggtagttgaactatttagtttggtgggctgagttgtctatcttttgtctggtcatgaatgttcatttctactgttgcatttcaattatactatgtcaattatctttcttttacatcctgtataaactctatgtttcccttgttatgcttctttcaagggaggtgctgtcggattttgcaatactttctttctctatgtgttgcataagtcatgtaggaagg

SEQ ID NO: 155325 - DNA, 108 bp, Zea Mays
caaaatcaagatataacacaagagtatcaaaaaattctcgtctgtgtgtcacagattttttgctctaatttcaatagattgtttgaaaactttagatacctcaaacgc

SEQ ID NO: 155326 - DNA, 187 bp, Zea Mays
gaatccaaaatcatcacaatgatactaaatggggttgtacaagggaattaaacgaacaccacacatcaaactatggaatgttcagatttaaggtaccagctgaaatcacaacattgcatatagtgacatgaattcaaaacatagctaaggcagtgtccaattcttggtaaactagatgtaaaatcta

SEQ ID NO: 155327 - DNA, 369 bp, Zea Mays
atgcggagagagagagagccgcagcggggcaaaccccgaaacatcgacgctggtgcctcgggtgccggccctggtgcctcaccggacaaaacggatgattgcgctcgggaatcaccctctttcgatgccgatcgagccaccacacctgggacccgtccctcaccgactcccaatcttggaggattggtcggggctcttcgtcaaagcacgctggtgcgagacggcacctcgtcaggcataattgatggaaagaggaaagggaattcttcgtcagaaccggacatcgcaatggagccaccacgcgccatcgccagagcattgccactacctggtagcggcaagtctggcatacccgagttcgctagctag

SEQ ID NO: 155328 - DNA, 3824 bp, Zea Mays
tcccgcggacttcactcccgtctcttccctgtcctctactctactcctgatttcagcttctcggcggctcacctcacttcctcgcatcacagcacagccgaagaagcctccaagaaaaagaaagagagaaaatgtctggccccaccacctgctgccacccctttcacctgctgctcgtcctgctcctcttcctcctcgccggcgagggccgctcccagcccgccgccgccgccagtaccagcgaccgcgacacgctgctcgccgtcaaaaaggactggggcagccccccgcagctcaagacctgggaccccgccgctcccaaccactgcaattggactggcgtcacgtgcgccactggcggcggcggggtcgtaagcgggcttaccttgtccagcatgaaactcaccggctccgtccctgcatcggtgtgcgcgctcaagagtctcacccacctcgacctctcctacgacaacctcaccggcgacttccccggcgccgcgctgtacgcctgcgcggggctcactttcctggacctctccaacaaccagttctcggggcccctcccgctcgacatcgaccgcctctcgccggcgatggagcacctcaacctctccaccaacagcttcgccggagaggtgccgcccgcggtgggagggttcccggcgctcaggtccctgctgctcgacaccaacagcttcacgggcgcgtaccctgcggccgagataagcaagctcaccggtctccagatgctcacgctggccgacaacgagttcgcgccggcgccggtgcccactgagttctccaagctgaccaacctgacatatctctggatgggtggcatgaacctcaccggagagatcccagaggccttctctagcctcaaagagcttactctatttagcatggcttccaaccaactcaccggatccatcccggcatgggtatggcagcatcagaagctccagtacatctacctgttcgacaatgccctctctggcgagctcacgcgcagcgtgacggcgttgaacttgctccagatcgatttgtcaacgaatcagctcaccggagatatacctgaagatttcggcaatctcaagaacctcacaatactgtttctgtacaacaaccagctcagcggcaccatcccggcaagcatcgggctgctaccacagctcaaggatatccgcttgttccaaaaccagctgtccggagagctcccgccggagctgggcaagcactcgccgttgggcaacctcgaggtatccatcaacaacctctccggcccgctgcgagagtcgctctgcgccaacgggaagctcttcgacatcgtcgccttcaacaacagcttctcaggcgagctccccgcggaactcggggactgcatcactataaacaacctgatgctccacaacaacaacttctcaggcgacttcccggagaagatatggtcgttcccgaatctgaccttggtgatggtccagaacaacagtttcaccggcaccctgccggcccagatatcccccaaaatggcacggattgagataggcaacaacaggttctccggctccttcccggcctctgcaccagcgctcaaggtgctccatgcggagaacaaccggctgggcggcgagttgccgcctgacatgagcaagctcgccaaccttactgatttgtcagtgcccggcaaccagatctctggctccatcccaacatcgatcaagctgctgcagaaactgaattcactcgacatgagaggcaaccggctgtccagtgccatacctcctgggagcatcgggcttctcccagcactgacgatgcttgacctgtccgacaatgagatcaccggcaacatcccgtcagacgtaagcaacgtgttcaacttgcttaacttgtcatcaaaccagctcaccggcgaggtgccggcgcagctgcagagtgcagcctacgaccagagcttcctcggcaaccggctctgcgccagggcggactcaggcacgaacctcccaatgtgtccagccggatgccgagggtgccacgacgagctttccaagggcctgatcatcctcttcgcgatgctcgctgccatcgtcctcgtcggcagcatcggcattgcctggctgctgttccggcgccggaaggagagccaggaggtgacggactggaagatgacggcgttcacgcagctcaacttctctgaatcggacgtgctcagcaacatccgcgaggagaacgtgatcggcagcggcgggtccggaaaggtgtaccggatccatctcggcaacggtaatgccagccacagcgaggagcgcggcatcggcggcgacggcaggatggtcgccgtcaagaggatatggaactcaaggaaggtcgacgagaagctggacaaggagttcgaatcggaggtgaaagtgctgggcaacatcaggcacaacaacatcgtgaagctgctctgctgcatctcgagtcaggaagccaagttgctggtgtacgagtacatggagaacggcagcctggaccggtggctgcaccaccgagaccgggagggcgcgcccgcgccgctggactggccgaccaggctcgccatcgccgtcgacgcggccaaggggctcagctacatgcaccacgactgcgctcccccgatcgtgcaccgcgacgtcaagtccagcaacatcctgctggacccggacttccaggccaagatcgccgactttgggctcgcccggattctcgtcaagtccggcgagccccagtcagtgtcagccatcggcgggacattcgggtacatggctccagaatatgggtacaggccgaaggtaagcgagaaggtggacgtctacagcttcggcgtcgtcctgctagaacttacaaccggcaaggtcgcaaacgacagcggcgcggacctgtgcctggcagaatgggcatggcggcggtaccaaagaggcccgctactcgacgacgtcgtcgacgaagccatccgggagccggcctacatgcaagatatcctgtgggtgttcaccctcggcgtgatctgcacgggggagaacccgctgacgcggccgtcgatgaaagaggtcctgcaccagctcatcaggtgcgaacagatcgccgctgaggcagaggcgtgccaggcgagctaccagggcggcggaggcggcggcacgccgctcctcgagtcgaggaagaaaggcagccggcgacggagcatgtctgactccggacggtggaacgacgacgacgaggaggacagcggcaacttcgttgtgcacgtggtgtagtcggttcggacagtatacagctactggcctcctgctgcaagctcatccatggaggaatttcgtagaggcgccggaggccggcctctgcggagcaggcgcctgaagatggccgatccggcatgagcgcaagaacaaacaaccaagtgtagtatatagatgaatgaacgaagaggtaaggctgttggaggttcttggaggtgttggatcgcgatcgcacttagcaatctccaatcacacaagaaggaggttcttggaggtgttggatcgcgatcgcacttagcaagtgtcaatactgcgtgtaataacaagtgccagttttgggcacttttgggtttcagaaaactgaagaccacaaaatctcaggaaatgccaatgggtcatgagtgggtcgcttatctgcaattgtctgtgcttcgtactgcaggctgaaagaatgtgtcagggcttactccagcaggtcgcgcaaagcgtcccggacgcgcaattttcgtggtcggacgcgggcgccaaaatgaggaggctgcgcaaaacgaagcgtattcttctgta

SEQ ID NO: 155329 - DNA, 1782 bp, Zea Mays
attccctctcaagtctcgagacccaccaccgcaccccgcgctcggcggactcttttgctgctgcacctgccatcgtcacgcaccggtgtgtggagcgaagccagcgagcgagaagtagccacagagcggcctcagagagacgtgcagatcgagagagagacgaacagagagagcgattcatggtaggtgcgatgcgcggcggagccatggagttggaggaccgcctggccacccttcctcgcttccgcggcgatcacgatgacgacggcaaggaaaggaggacagggacggtatggacggcaacggcgcacatcatcacggcggtgatcggctccggcgtgctgtcgctggcgtgggcgatggcgcagctggggtgggtggccgggccgttgaccctggtgctcttcgcggcgatcaccttctacacctgcggcctcctcgcagactgctaccgcgttggcgaccccgtgacgggcaagcgcaactacacctacaccgaggccgtcaagagcaacctgggcggctggtacgtctggttctgcggcttctgccagtacgtcaacatgttcggcacaggcatcggctacaccatcacagcctccatcagtgcagcggccatcaacaagtccaactgcttccactggcacggccacgatgccgactgcagccagaacaccagcgcctacatcatcggcttcggcgtggtgcaggtcatcttcagccagctccacaacttccacaagctgtggtggctctccatcatcgccgccatcatgtccttctcctactccgccatcgccgtgggcctctccctggcgcagatcgtcatgggccccacggggaagaccaccatgaccggcaccctggtcggggtggacgtggacgctgcgcagaaggtgtggatgacgttccaggcgctgggcaacgtggccttcgcgtactcgtacgccatcatcctcatcgagatccaggacacgctgcgctccccgcccgccgagaacaagaccatgcgccgcgccaccatgatgggcatctccaccaccaccggcttctacatgttgtgcggctgcctcggctacgccgcgttcggcaacgccgcgtcggggaacatcctcaccggcttcggcttctacgagcccttctggctcgtcgacttcgccaacgcctgcatcgtcgtgcacctcgtcggcggcttccaggtcttctgccagccgctgttcgcggccgtcgagggcgccgtggcggcgcggtaccccgggtcgacgcgcgagtacggcgccgcgggcctcaacgtcttccgcctcgtgtggcgcacggcgttcgtggctgtcatcacgctgctggccatcctcatgcccttcttcaacagcatcctgggcatcctcggcagcatcgccttctggccgctcaccgtcttcttccccgtcgagatgtacatccggcagcggcaggtgcgaaggttcagcaccaagtggatagcgctgcagagcctcagcttcgtctgtttcctcgtcaccgccgcctcctgcgcggcctccgtgcagggcgtggtcgactcgctcaagacctacgtgccgttcaagacgaggtcgtgagctcctgctgcttagttattatacatgtagcatacatactactcgtgcctcctttgtagtggcaccgaaacaaactgagcaaactcagccaaattagttatgcgggagtttaattttgaactactagtatgttgctgtcgaatgcaacaaaactaataacgtttacagtttttctatttggcatcaa

SEQ ID NO: 155330 - DNA, 216 bp, Zea Mays
tattctagttggacgtcaaatttggtctatgatggtgatatctgatatgattgttcttcaaggccaggagaagaatttcctagctgcatccaaggagtcttctgtagatgttaatcatgagtacacaaagatcacattcacacacacgcagtctgatcggtttgttttagcattccgtacatggctaagaaaatttgtcaatagccaacttgagtg

SEQ ID NO: 155331 - DNA, 117 bp, Zea Mays
aaaaagataattctaagttcccacatggagataatcttaagtccccacatgaaaatgttaaagtctattattttgatataaatttagacattatttcaatgattttggcctaaagat

SEQ ID NO: 155332 - DNA, 1556 bp, Zea Mays
cctgacctcgggggctggctttggacaaaaaacacagaatcccaccccaaatatcttctctgtattgttctcctcatctcgaccatccctatccgagattgttgtaactggccctcgatcgcccagaaaccacgctggccgttcttggacttggcccggaatctgggcgcccctagggatgtatatttgaggccacggcctccctccactcatccgtctgtgccaaagccgagtgcatcatgtgagcagagaggagaagaaagagagaacaacgctgctaccgtcgatctcgtcccgcactatctctcgaggaacagctgaatcactcgacagagttcctcgagcgccgctcgtaggctccttgcagcgtattctctgagtagcagcgaggttaacgagtcacttgaagaccaagttggtgaaatacctaggaatcttgagtctaaggcaagttgtgcccttgatcacttttctctttacccaataatgttccaattaatcactatgacatgctcaggttaattttatgggacctaataggttccctagatttgtttatcccacaccttgtttaccactgaacttttgggtagttttgctattgctctacctggttttgggattaatgttacattatgatcctgttcccagttatgctgttgttttaattattgttcatgacaagatcattgtgttgattggaacatccgaacatggagcttaacttgagatatccatgataccacaagggtggaatgggacgcccttggtcgactaattaggaaagctagtggagcactaccttaaccaaaaggggcaagggcgatagaggagctgtgtatagggaggttctcgggtcgatcatgctgcgatggcttttcggacgagggattcctatattgcccttcttagaaaccgtagcgggttttctaaagctagtggaactttgtaaaggcctcatagtggatccctagccattcacctcggaagtgtctaagagccttgaaaccctggctagacgggatacacgacttgtgggtaaagggcgcaacctctgcagagtgtaaaactggtatatcagccatgctcacggtcaagagcgactcaggactctcgcatgattaacttatggaactaaacttaatctgttagatgcattgcgtcgtgggtgttattatcaattgtgatcttttatttaattgggttggtatctacttatgcatagtaaatgctaataaaattctgaccaactctaaaagcaatgcttagctttaaccatctcctttggtaagccttacacttcacatgagatcccaccttcgatgagttcatgcacattattccccacaacttgttgagcgatgaacgtatgtgagctcacccttgctgtactcagatccccccaggtcaagaataggtaccgtaggatgaggcgcatgaaggatgctgtgatgagttcatgagtggtctaggccatcgtctcccagtcaactttggttgctggatcgttgtcttcgtatgatgtaattacttaactattttgtatagaactccat

SEQ ID NO: 155333 - DNA, 471 bp, Zea Mays
cctgacctcgggggctggctttggacaaaaaacacagaatcccaccccaaatatcttctctgtattgttctcctcatctcgaccatccctatccgagattgttgtaactggccctcgatcgcccagaaaccacgctggccgttcttggacttggcccggaatctgggcgcccctagggatgtatatttgaggccacggcctccctccactcatccgtctgtgccaaagccgagtgcatcatgtgagcagagaggagaagaaagagagaacaacgctgctaccgtcgatctcgtcccgcactatctctcgaggaacagctgaatcactcgacagagttcctcgagcgccgctcgtaggctccttgcagcgtattctctgagtagcagcgaggttaacgagtcacttgaagaccaagttggtgaaatacctaggaatcttgagtctaaggcaagttgtgcccttgatcacttt

SEQ ID NO: 155334 - DNA, 1332 bp, Zea Mays
atgcccccaggtgcctatcttccggtccctcaatgtccatttgcattaaagcttgagtccgtcggccaggtcgttgacgacctccgtgccgccaccgctgggctcctctcgcatgccaacaaggccctccgtatacaggctctactgagtgcaccaaatccagatgaccctctctccgataacactgcaaagcactggaaatccaatgaggtagaagctgttgaaacaggagaaaacaggattggattctggagtgccatgacttcgaatcttatgaatcaatcgcggaatgtttacagcaagaaaattctcgccgataaagagctcctgccgcggatagcatcacttccattgaatttcgtgcagcttatattccctttcgtagacctcgacatcaaatattttgacctcgggcttccacaccgtgatgctaccgacgacaaagtcacagtggaggctgcggaggccacactcaagtacaatgtggctatcaagtgtgccaccattacaccagatgaagcaagggtaaaggagtttggcttgaaggctatgtggaagagcccaaatggcacaattaggaatattctgaatggcaatgtgttcagagaaccaatcatctgcagaaacatcccacagcttgttccagggtggacaaagcccatttgcatcgggaggcatgcattcggcgatcagtaccgggcaactgatgcagttatcaaggggccagggaagcttaaattagtttttgagggaaaagaagagcaagttgagctagaggtgttcaacttcactggtgcaggaggagttgccttatcaatgtacaacactgacgagtccatccatgcctttgctgacgcttctatggccactgcttatgaaaagaaatggccattgtatcttagcaccaaaaacaatattttgaagaaatatgatggcatgttcaaggacattttccaggaggtgtatgaagctggttggaaaccaaatttgaagctgccggcatatggtatagtttcaaatcccgtttcatatcccatctttttctttaataaggtgtatgagcaccgccttatcgatgacatggtagcatacacacttaagagtgaaggagggttttggctcattgggtttgatgacttcggtactgctacaaagcagaagttgcgttttgagggagattcgtacaagaaggcattggcggagttcctgcaggctgtgccagcgtttctgggcggtaaatacagctgcctgcgatgtgagagtcctcgtgatgattcagtgatacaggcaggggaagggagcaagaagcagccccgcttggtcagcgtatga

SEQ ID NO: 155335 - DNA, 1812 bp, Zea Mays
ctcgagcgggctttcttcttcgagtcaataggaaccaaaatcccccaaccgccccagcgcacggcccggccgtctcaggcgtccgcggagatgacgcagcaggacgtggagatggcggcgcgccacgggaccggcgccgacggagcgggattctaccctcagccgcggaacggcgccggcggcgagacgctcgacgacgacggcaagaagaagcgcacgggaacggtatggacggcaagcgcgcacatcatcacagccgtcatcggctccggcgtgctctccctcgcctggtcgactgcacagctgggctgggtcgtggggccgctcaccctgatgatctttgccttgatcacgtactacacctctagccttcttgctgactgctaccgcagcggcgatcagctcaccggcaagaggaactacacctacatggacgctgttgccgcgtacctgggtcgatggcaagtcctgtcctgtggtgttttccagtatgttaacttggttggaactgccgttgggtatacaattacagcgtccatcagtgcagcggccgtgcacaaggcaaactgcttccacaacaagggccacgcggccgactgcagcacctacgacaccatgtacatggtcgtatttgggatcgttcagatcttcttctctcagctccctaacttcagcgacctttcgtggctgtccatcgtcgccgccatcatgtcgttctcttactccagcatcgccgtcggcctctcgttggcgcggaccatttcaggccgtagtggtacgaccactctgaccggcactgagatcggagtcgacgttgattcagcccagaaggtctggctcgcgcttcaagctcttggcaacatcgcgttcgcttactcctactccatgattctcatcgaaatccaagacacggtgaagtctcctccagccgagaacaagacgatgaagaaggcgacgctgatgggcgtgacgaccaccacggcgttctacatgcttgctggctgcctcgggtactcggcattcgggaacgcggcgccagggaacatcctgaccgggttcggcttctacgagccctactggctgatcgacttcgccaacgtctgcatcgtggtgcacctggtgggcgcgtaccaggtcttctcccagcccatcttcgcggccttggagacggcggccgccaagcgctggccgaacgccaggttcgtcacgcgcgagcaccccctcgtggccggcaggttccacgtcaacctgctcaggctgacgtggaggacggcgttcgtggtggtgagcacggtgctcgccatcgtgttgcccttcttcaacgatatcctgggcttcctcggcgccatcggcttctggccgctcaccgtgtactacccagtggagatgtacatccggcagcggcgtatacagaagtacaccagcaggtgggtggcgctgcagctgctcagcttcctgtgcttcctggtctcgctcgcctcggcggtcgcgtccatcgagggagtcaccgagtcgctcaaacactacgttccctttaagaccaagtcgtgatgactgactgagcttcaattctccggtccctgtacaatgcaatggcctaccaccttgcagtggtcgctaagggttatatagtccacatgaaaaactgatgtacatagaaaatcctgaccttcaaaaacagatttggtgtgtgattgttttgcaccgttatatctgattttgaagactaggattttatatgtgtacgtgtataccaaactttcatgtgtaccaaataccatgggctaatgaaaaactgatacaattgagtcc

SEQ ID NO: 155336 - DNA, 1924 bp, Zea Mays
cgccctactcgagcgggctttcttcttcgagtcaataggaaccaaaatcccccaaccgccccagcgcacggcccggccgtctcaggcgtccgcggagatgacgcagcaggacgtggagatggcggcgcgccacgggaccggcgccgacggagcgggattctaccctcagccgcggaacggcgccggcggcgagacgctcgacgacgacggcaagaagaagcgcacgggaacggtatggacggcaagcgcgcacatcatcacagccgtcatcggctccggcgtgctctccctcgcctggtcgactgcacagctgggctgggtcgtggggccgctcaccctgatgatctttgccttgatcacgtactacacctctagccttcttgctgactgctaccgcagcggcgatcagctcaccggcaagaggaactacacctacatggacgctgttgccgcgtacctgggtactacgtactttctttgtgctcccgtcatgtcatctcagataagcaaacggttcgttttctgaatttcgacagtgaagatgatgcatgtcgatcgcgtatgatgcaggtcgatggcaagtcctgtcctgtggtgttttccagtatgttaacttggttggaactgccgttgggtatacaattacagcgtccatcagtgcagcgtgagtaattcttgcataaaaaaaggctcatttagtagtgaatgttttggcagattcagtctcatcgtcgattgagaaaccccttttggctgaatggcgatgagcagggccgtgcacaaggcaaactgcttccacaacaagggccacgcggccgactgcagcacctacgacaccatgtacatggtcgtatttgggatcgttcagatcttcttctctcagctccctaacttcagcgacctttcgtggctgtccatcgtcgccgccatcatgtcgttctcttactccagcatcgccgtcggcctctcgttggcgcggaccatttcaggccgtagtggtacgaccactctgaccggcactgagatcggagtcgacgttgattcagcccagaaggtctggctcgcgcttcaagctcttggcaacatcgcgttcgcttactcctactccatgattctcatcgaaatccaagacacggtgaagtctcctccagccgagaacaagacgatgaagaaggcgacgctgatgggcgtgacgaccaccacggcgttctacatgcttgctggctgcctcgggtactcggcattcgggaacgcggcgccagggaacatcctgaccgggttcggcttctacgagccctactggctgatcgacttcgccaacgtctgcatcgtggtgcacctggtgggcgcgtaccaggtcttctcccagcccatcttcgcggccttggagacggcggccgccaagcgctggccgaacgccaggttcgtcacgcgcgagcaccccctcgtggccggcaggttccacgtcaacctgctcaggctgacgtggaggacggcgttcgtggtggtgagcacggtgctcgccatcgtgttgcccttcttcaacgatatcctgggcttcctcggcgccatcggcttctggccgctcaccgtgtactacccagtggagatgtacatccggcagcggcgtatacagaagtacaccagcaggtgggtggcgctgcagctgctcagcttcctgtgcttcctggtctcgctcgcctcggcggtcgcgtccatcgagggagtcaccgagtcgctcaaacactacgttccctttaagaccaagtcgtgatgactgactgagcttcaattctccggtccctgtacaatgcaatggcctaccaccttgcagtggtcgctaagggttatatagtccacatgaaaaactgatgtacatagaaaatcctgaccttcaaaaacagatttggtgtgtgattgtttt

SEQ ID NO: 155337 - DNA, 522 bp, Zea Mays
atggtgactgttctttatagatgtactattagcaaaggatttagtgtgccagaaggaaagttttatctagtagatggtggttatgcaaatacatcatccttcattgcaccatatagaggggttcgatatcatctcaatgagtttaggaggcgtcgttcatcacaaagtggttatgcgaactacagagagttgttcaaccaccaccatgcaatcctccgtaaccatatagagagggccatcggtgttctaaagaaaaggttcccaattctaaaagtaggcacatttcatcccatggagaaccaaattaagatcacagctgcaactgttgcatttcacaacataattagagggcaaaatggagacgaaagatggcttgacaaccaaccagattacatctctccaagtcaatatgttgatgttccagagggagatatcaactatctcaatgacacagaatcaagtgatggaagtgctctaagagatcagatcgcacttcagatgtgggctgcctacaatagctag

SEQ ID NO: 155338 - DNA, 3921 bp, Zea Mays
ggttggtgcaacaacccgacctcgcggcgatggcgcgacccgatcagcccagatttgcgaacgcccacgacgtgttcgccgaaatgccaggccaaaggtttctactttttcccagcttggctctggcactgttctgggcacgatttgcatggggcgggctggtctttgctgcagatactggggctggacatctgcgcggacaccatcgtcggcgaccagatgcagcgggggatctccggtggccagaagaagcgtgtcaccacaggagagatgattgttggcccgaccaaggtgctattcatggacgagatatcaactgggctggacagctccacgacattccaaatcgtcaaatgtctccagcagattgtccacttgggcgaggccaccatcctcatgtccctcctccagcctgcccccgagaccttcgacctattcgatgacatcatcctactgtcagaaggccagattgtttaccagggaccccgcgaacacgtccttgagttcttcgaatcttgcggattcagctgccccgagcgcaagggtactgcagactttcttcaggaggtaacatcaaggaaggatcaggagcagtactgggctgacaagcagaggccttacagatacatttcggtgccagaatttgcacagcggtttcaacggttccatgtcgggctgcagcttgagaaccacctctcacttccgtttgacaagagccgtagccatcaggctgcccttgtattctcaaagcattctgtgtcaacaacagaactcctcaaggcatcttttgacaaggagtggctcctcatcaagcgcaattcattcgtgtacatcttcaagaccttacagcttatcattgtagccctcgttgcttcaacggtgtttctgagaactcacatgcatacgaggaatctagatgatggctttgtctacattggagcactgctctttactctgattgtgaacatgttcaatggttttgctgagctctccttggccataacaaggttgccggtgttcttcaagcaccgggacctgctcttctatcctgcttgggtcttcacactaccgaacgtcattcttaggatcccattctccattattgaatctatagtctgggttcttgtcacatattataccatagggttttctccagaggctgacaggtttttcaagcacttgctgctcgtgttcttgatccagcagatggcaggtgggcttttcagagcaatcgctggactttgcaggtccatgatcattgctcacactggtggagcactatctcttcttctcttctttgttcttggaggctttctcctgccaaaagctttcatccctaaatggtggatttggggatactggatttcacctttaatgtatggatacaatgctctagcagtcaatgaattctattctcctcggtggatgaataagtttgtactggatcaaaatggtgttccaaaaagactggggatagctatgcttgaaggtgccaacatctttgttgacaaaaattggtactggattggagcagcagggctcttgggtttcaccatctttttcaatgttcttttcacattgtcactcatgtacctgaaccctcttggcaagccacaagctattatatcagaagaaactgcaaaagaagcggaagggaatgggcatgcaaaagggacaataagaaatggaagcacgaaatcgaaggacggtagccatgataaggaaatgaaggagatgagattgaatgcgcgtttgagcagcagttcatctaatggggtttcacgagtcatgtccattggcagcaatgaagccgctctgtcaagaggcatggttcttccattcaaccctcttgccatgtcttttgataatgtgaattactatgtcgacatgcctgcggaaatgaaacagcaaggagtgcaggatgaccgactccaattgttgcgtgaggttacgggatcattcaggcctggagtgctgacagcacttatgggtgtcagtggagctggaaagactactcttatggatgttttagctggaagaaagactgggggttatattgaaggagatatcagaattgcaggctatcccaagaaccaagcaacatttgcaaggatttctggatactgcgagcaaaatgatatccattctcctcaggtcacagttcgggagtctttgatatactctgcctttttgcgccttcctgaaaagattggagataaagaaataactgatgatataaagattcaatttgtggatgaagttatggaactagtggaactcaacaatctgagcgacgctatagttgggctaccaggaatcacagggctttcaacagagcaaagaaaaaggttgacaatagccgtggagcttgttgccaatccatcaatcatatttatggatgaaccaacatcaggacttgatgcaagagctgcggcaattgtcatgagaaccgtgcgaaacacagttgacaccggacggacagttgtttgcacaatccatcagccaagcattgacatctttgaggcttttgatgagttgctattgttaaaaagaggaggccaggtgatctactctgggaaattgggtcgcaactcccagaaaatggttgagtattttgaggcaattcctggagtgcctaaaattaaagataagtacaatcctgcaacgtggatgctggaggtcagttcagttgcagctgaagtgcgactaaagatggattttgctgagtactataaaacatcagatctcaacatgcaaaacaaggtactggtgaaccagctgagtcaaccagaaccaggaacatcagatctttatttccctacagagtactcacaatccacagtaggacagttcaaagcctgcctctggaagcaatggctgacctattggcgcagcccggattacaaccttgttagattttccttcactttgttagttgccttgctgctcggctccattttctggaggataggcaccaacatgggagattcaaccactctcaggatggttattggatcaatgtacactgctgtgatgtttgtcggcatcaacaattgttcaactgtgcagccaattgtttcaattgagaggacggtcttctacagagagagggctgctgggatgtactctgcaatgccatatgccattgctcaggttgtcatagagataccatatgtgtttgtccaaacaacgtattacaccctcatcgtatacgccatgatgagtttccaatggacagctgccaagttcttctggttcttcttcatttcctacttctccttcctctacttcacctactatggcatgatgactgtctcaatctccccaaaccatgaggttgcatccatcttcgccgcagctttctattctctgttcaacctcttctcaggctttttcattccaagaccgagaattcctagatggtggatctggtactactggatttgcccattggcatggacagtgtatgggctcatcgtgacacaatacggagacctgcaagaccccatcacagtccctggcgaaagcaaccagacgattagctactatataacacatcattttggataccatagggattttatgccagtcgttgcgccagttctcgtgctctttgcagtattcttcgctttcatgtacgcagtctgcatcaagaagttgaactttcagcaacgataggaacaagatatggcagaaaagctcttgagagtattttttctttttttggaaaatacttccttttctcctttcatttttgagtccctttaatatattgcaatgtatatagggtgtagcttcggtattccacacatcgtcaaatgtggcgaggtcttatacagatttctagccgtttaactgtggaacattgtaatttgtaagagcacatctatgagaaagttttgttcatgcccaattcatttc

SEQ ID NO: 155339 - DNA, 402 bp, Zea Mays
gagaggctgacggtgcaggccaagtgccacgtgggcagccgcgcgctgccgacgctgctgaacacggcgcgcaacatcgcggagggcgccctgggcctgtgcggcgtgcggctggggcggcaggccaggctcaccatcctcggggacgtgtccggcgccgtccgcccctcgcggatgacgctgctgctgggcccgccgtcgtcggggaagaccacgctgctgctcgccctcgccggcaagctggaccccgcgctcacgcgcgccggcgaggtcacctacaacggcttccgcctcgacgagttcgtgccgcagaagacggcggcgtacatcagccagacggacgtgcacgtcggcgagatgacggtcaaggagacgctcgacttctccgccaggtgccagggc

SEQ ID NO: 155340 - DNA, 555 bp, Zea Mays
atgaaccctctaagggtcaccatcgacaatacctcatgtccaagtgctacagttattcatgtggacaacaccaacaagtatggcatactgttggaggtagtgcaggtcctcactgacctcaagctcatagtcacgaaggcatacatatcctcagacggaggatggttcatggacgctcagtatgaaggctgcattggaaaggtttggtggttgaaagaagctggtggtagtattattggtggaaccatcaagacaaattcaggagatgagcaagaatccaaaaccacccagggatgctgtttccttgcatttgtttatggtggtgatccactgacagacctatcacttcatgctctccttgacaaattaatggaaaataaaccaaaagggagctgcatagctgaaggaagatggcacagtggaacacaaattgccctagctaaaaaggttggccctttttacttggattctcttgactctgggagtcgttttcctatatctggatttgtagatgaccttattactcttccctccaatcacactagatgctcttga

SEQ ID NO: 155341 - DNA, 652 bp, Zea Mays
ccctgctcgtgctcgacacgccagatcgacagccgccaatccctgcgttcggcctccttccactgctcggtcatggtgtccgagttctgggccggggttgtgcgcgtggcctcgtcggtggtcgcgaactcgccaaactagcaccctagccaccaacctccgttcacctcgacgacggaacgtgtcactgctccatccatggctgcgagtctacctccgccgagctgccagtctctagctcctccggctattctgctcgctcgacaactcgtcaccactgggtctacgccatcggctcctcgtctggctttaacttcgtcgtggccagcagcttcaattctgtgagcgtccaacgccgccccctggttcactctctccgtacgcacatcgcccttgtcccctgtccgtgtagcatatctccgcgctctgcgtcatcgccgtcgttgcttttggagttcgtcatgacgcgctgtcgatgatctgagtataacgggtgatctttgcaagttcacctagcttcgtggtaattaattttgatggcgatctgcgttacttagcgctatgtttgtttcctttgtgtgtttgtgtttcgatgttgaagccgaagccagcgtgatgcttctcagttatctatactatacttaaagcatca

SEQ ID NO: 155342 - DNA, 478 bp, Zea Mays
cagctacttccaatggccgcagtgcgtcctgttcgccctccagcgctgcgccctgctcccagctcccttgccgtggagctctctgcgcgccctgcctcttctacgcgcgcagcttcctcggctggccgcggtgctcctccagcctccctcccatggcgtgcagttctctcttccctctccacggccgcgcctccctctagtcttcagcaagccgcggcagcagcacccagtctccatcttcctccccatcacatcccgctccctcgttaccaggtacacgcgcgcggtctcctgctcgccgggatggccctcctgctgcccgcccatggcgcccagccgaggcccctccctcggtcgtgctcgccctggtcacggcggcgtcgtcagcatccgaccaggatcggccatggcgagccccctcccgtccctgctccagtccttgtccttgccaccgattctccgtgacgcagcaccctat

SEQ ID NO: 155343 - DNA, 1646 bp, Zea Mays
ctcaatcgacaaccactcactcccatcttgttcggagctagagaaggtgtggccttcgccgtcacgaaactaggctctgtgcggcgccctcctctcggttgtggaggcgaacccctcaaatttgggggccattgcttggcttgctctgacgagtcggtggagcaggtatgaccgggttgttgttgtccaagtgcaagagagaagagggcaattagacagggacgacatagactctcaacgagccagatgacgactcgacaaggtggatctatcggggcactacaacgccgagacggcggaggactctgtgatgccagtacctagatctgttgtgacaaaaggaggtgttcaccagagcagggctgttccgtcagcatcgattcatcatcacccactacaaggaggcataggatggactctgagtcttcaaacttgttaccccagtatggggatttcccatgtcgaacttcagttcaacaaaatgcacaaccaccaaatgtttcaactcagctacgagatattgtcgaaggaccacaatcaactgtccaagtgaaaagaaggccagtggcgaggagaaaacttgcaaatttctgtaccaaggaggattgcaggttgtcccagtgttggctagcaataaaatgtgaccctgttgtcaacactggacaaaaacaacaaggattatggaataggctcaccgaggcatacaaccatcgacggggcaacatgcctgaaagatcaactaagtcacttatgagtagatgggataccataaaaacacaatgctcactattttctggctacatggcaaatgtcctacgagagaactctagtgggttgtccgacgctgataagacatctctagcagcttctcgatttgctactatggagaagcgcccattcactcttttgcattgttggtctattctaaaggatgaaccaaagtggatggatcatagttccaataagcaagttcgaattattgaagttgcaccaattggatcgaacatcatcgacctagaccctaaagactcttttcttggtagcacaacatcaaagcaacatctaggtcaagatgcaagcaagggaaaaactaaaaaggctcgatcaagctcaatcactgtaagctcatcggatgaatatcttgccaaaatggatgatctttctctacaaaggttgtcggtttaccaaacaactatggcatttgagcagcaaaaggcagagagggatgatcaatttcgtaaacaacaattggagattgagcaacaaaagttggccattgaacgagagcgtttggaacgccagaaaaggattgatgagaaggcagaagaggagcgtatcctagcaattgacatgtccatttgcaatcctgctcagcgtgcatactataagaagttgcagcaacagatcctatctaagatacaagccgatatgtccaatattgaatgaggtttccatggagttttagcatgccaaaaccataaaatttatatactttgttgtgttcagtttccttacaagtttggtattggtatttctttgattttctttcatgcattagttcatcaaatttcttgtaataagagcatgtgtctgatgttgttgtgataatagaaatgttaaaagccagtcatgtggtttgacattaa

SEQ ID NO: 155344 - DNA, 944 bp, Zea Mays
gaggcagaaatattccagcgaggaaccgcacgtgaatgagccgaggcatcaagaaggacagtgtcggcaatagctcttcagtgtcgatatgctccggctccggcgacggcctactgattaagaaatgtgcactctttctataactattgttagttggtgcaagaatctcaatggtttgggaaacaatattgtatgttgcagtctgcagcttctcaattaaggatgcaaactttgatcatgagtgtgcaccttgtatccgtttcagtagtccacagacttgttcgagatctatacgtttacttgacgttattttcatttttgaagtttccttgaccatggtctacagttttcgcttgacatatattttatatgcatttataatgagcacaaatattcattctgcatttgaaatcataaccacaatatctcacaatgctctcctctcctttgttgcagtgatttagatgccgcatcatcagttgaagactatttcatatacattgatggtcttccagtgagtgagaaggtatgttcatggttggccaaagtttatgttttttcccagtagtttgtaaacctaaattgcactctgatctaggaggaagcagagaaggtggcgggtccattcctagatgttttatccttttaggagaagactattcagtttcgtacatgggtatgcatagctccttttgcagtaattgatctagactggccatccattttgtttgaggcaggggtatcaagtgcaccagaagaagctcctttctgtagctgcatttgaagaggtcaggcactagaagatgaattgccttttcacgtttgcttattggttgttcttttggtcttagcaacattaccagatactatatggttctcatgcagtgctagcgtgtttgagctgcttcgaattattagtttatattgatataggcctctcatta

SEQ ID NO: 155345 - DNA, 1062 bp, Zea Mays
ctcgctcctcttcatcgccattataggttgcttcactccgccgcaattctcaccctcgcacagtcgtcttctcctactgcactcaacgcatccgggcttttggtccacccccgccactacatacatagccgatagccccaagctcttgccgtgccgtgccactgccagaaacgaggaaccacctctcgatggagtccaacaccaccccgttcgccgcggttggcacggccgccgaggaggcatcgacgcggcgcgtggccaaccgcatcatccgcgccctgcagcaccagctccggctgctgcaccgcgccggcgccgagttcttcgtgctcggcgtcacgggcaacgtgtacacggtgacgctgtccaccacgccggcgtgcacgtgtccggacccagccgtgccctgcaagcacatcctcttcgtgctgctccgcgttcttggcctctccctcgacgaggcctgcgtttggaggcagactctgcacccgtgccaggtcgcgcggctcgtcggcacgcccacgtacccggacgtgctcgctggtgcgcgcgcccgggagaggttccaccagctgtggtcggcccgtccagccaacaatgttgctgacgacaggcaggaggcgtcgtcccacaggccgctcgacggcgcggcatgcccagtgtgcctcgaggagatggcgccggcacaaccgtcacagggcagcggggccaccgcacaggcgatcctgacgtgtaggacgtgccggaatgcggtgcacgccgagtgcttcacgcgctggaagcgaagccgctcgcggcgggccgcgacgtgtgtcgtttgccgctcgcggtggaagaagccaaaccgggagcatgagcatgagcagtacatgaacctcgccgcctatatgaacgacgacggcgacgtcaccatgctgagcgccgacggctggctgtgtgcggggtagttgcaggctttcgattattcaacaggctaattgtcacataactgtgcctgtacagaatatagaaccattgtgatctctgactctcaactctagtttatatatactctttctcttc

SEQ ID NO: 155346 - DNA, 1215 bp, Zea Mays
accattactaaaccccccctcctcttcgcttcgcattcaaatcaacacccatctccgagctggaccaagtcttctagcctagctcttacggcaccaagcaggcctgcacagcatttccgttgcccgcgcgcgcacacactgcaggcctcacttcttggtggcactggcagtggcactggcggcaatgccggactcggatgtccccagcccagcatcgtcgccgcttggcagcgtgcagaagattgccaggggtcggaaaagcaggcgcggcggcgggcggagcccggcgtaccgcggcgtgcggatgcgggcgtgggggaagtgggtgtccgagatccgcgagccgcgcaagaagtcccgcatctggctcggcaccttcccgacggccgagatggcggcgcgcgcccacgacgccgccgcgctagtggtcaagggccgcggcgcggtgctcaacttccctgagatggcggcgtccctgccgcgcccggcttccgccgcgccgcgcgacgtgcaggccgcggccgcgcgcgccgccgccatggacgttcccgtgggcgcggcggagccgctgccgtcctcgtcgccgcagcaggtgctggggcagccgttagttgtaggcgaccccgatgtggagctcctggaggagatcgtggagctaccgttgatcgacgaggatgtcatggcgtcggacgacgtgttctgctggacggcgtcgttccacgactgtgccgccgacgacccgctgtcgtacgagccgaacgcgtggatgcaggcaggcggcagcattgcggcgcaggtcgcggagatgatggtgcccgggaccgggctcgccacggaccagctctggacggcgcagccagacggcattatgccttcggagctcggtgcgttcttatggaacccctgtagttaactacgcaactagctaatcgatctgcccgtctctctctttgctctctttgcagtatatataaatataaatcgcatgctttgttaatagctcagaaagcatctgcatcgaacgacggcttgctacgtacgtaccgttggcacggcagtagcaaacatacggacgcatctgggtacctttccaattctgctgcgctcttctccttctctacggtcttttatgtgcatgcgaagcctgattgcgatcgcgtcaatggaagacagataggcggttgtgggagaacgacgcaagcaactaaagggtac

SEQ ID NO: 155347 - DNA, 680 bp, Zea Mays
cttcctcttccagttggtattctttatctgaaacatagtacagaggaggagaggagaacgagaagtacgcctacagcacgcagcaggttcaggactgcatcgccgtcgcgctcacttccaaggccgccgccgtcgcgcaggccgccatgttcaagaaggccaactacgcctgcagctactagctaggcctcgcgcatcatcagcgtataacgtacgcacgcaatgttcgttatataattccatacgtatatgggtgtgcaaggtccagaccgaccagctgtatgtcttcatcgttgccttcgtttctgcgtcgtcctcccatgcatgtttatgcatgatgccgtgccgtctcgttgtcagctggttcagtagtgatgcttactttcttgtcgttgttgctaatgtaagaaataagacgatgcgttgactgcttaatttgcttgtgaaattctatagtccgtggccttacgaaacgcacgggcactcgggcgcaataccgcaacagagtccttttgaggagtgccgcaggctcgataatactcggcaaatgctttgtcatcgagtgtagcactcaacaaagaggttttgatgaactagttatcggcaagggtctctttgccgagtattttatgtcgagcattccacaaagaaaagtcgtcgtaaagatgattaagcctttg

SEQ ID NO: 155348 - DNA, 1196 bp, Zea Mays
gtgcacactcgcttgagcatatagtgtgctcttctcttcctcttccagttggtattctttatctgaaacatagtacagaggaggagaggagaacgagagctaagaagatgaccggcaaggttctccttgtggccgtccttatcttggtgggcgtggcctctcgatgctcgggcagtaggggcctgcagggcgatcacgttgctgaacagaagttcggtggcggtggctatggaggtggcggtgggtacggaggctacggcggcggtggaggaggaggtggtggtgggtatggcggtggcggcggcggcggcggcggtgggtacggaggcggtggcggctacacacccggctactctggcaccggcacctgcgactactggaagagccacccggacgccatcatctcgtgcatcgggtcgctgggcagcatcctcggctccttcggcgacgtgtgcagcgccttcttcgggagcaagctgcagacgctgcaggacgcgctgtgcaacacccgcaccgactgctacggcgacctcctccgcgagggcgccgcggcctacctcaactccatcgccgccgagaagtacgcctacagcacgcagcaggttcaggactgcatcgccgtcgcgctcacttccaaggccgccgccgtcgcgcaggccgccatgttcaagaaggccaactacgcctgcagctactagctaggcctcgcgcatcatcagcgtataacgtacgcacgcaatgttcgttatataattccatacgtatatgggtgtgcaaggtccagaccgaccagctgtatgtcttcatcgttgccttcgtttctgcgtcgtcctcccatgcatgtttatgcatgatgccgtgccgtctcgttgtcagctggttcagtagtgatgcttactttcttgtcgttgttgctaatgtaagaaataagacgatgcgttgactgcttaatttgcttgtgaaattctatagtccgtggccttacgaaacgcacgggcactcgggcgcaataccgcaacagagtccttttgaggagtgccgcaggctcgataatactcggcaaatgctttgtcatcgagtgtagcactcaacaaagaggttttgatgaactagttatcggcaagggtctctttgccgagtattttatgtcgagcattccacaaagaaaagtcgtcgtaaagatgattaagcctttg

SEQ ID NO: 155349 - DNA, 998 bp, Zea Mays
gtgcacactcgcttgagcatatagtgtgctcttctcttcctcttccagttggtattctttatctgaaacatagtacagaggaggagaggagaacgagagctaagaagatgaccggcaaggttctccttgtggccgtccttatcttggtgggcgtggcctctcgatgctcgggcagtaggggcctgcagggcgatcacgttgctgaacagaagtgtacgtgttgtgtctcacggcggcggtggaggaggaggtggtggtgggtatggcggtggcggcggcggcggcggcggtgggtacggaggcggtggcggctacacacccggctactctggcaccggcacctgcgactactggaagagccacccggacgccatcatctcgtgcatcgggtcgctgggcagcatcctcggctccttcggcgacgtgtgcagcgccttcttcgggagcaagctgcagacgctgcaggacgcgctgtgcaacacccgcaccgactgctacggcgacctcctccgcgagggcgccgcggcctacctcaactccatcgccgccgagaagtacgcctacagcacgcagcaggttcaggactgcatcgccgtcgcgctcacttccaaggccgccgccgtcgcgcaggccgccatgttcaagaaggccaactacgcctgcagctactagctaggcctcgcgcatcatcagcgtataacgtacgcacgcaatgttcgttatataattccatacgtatatgggtgtgcaaggtccagaccgaccagctgtatgtcttcatcgttgccttcgtttctgcgtcgtcctcccatgcatgtttatgcatgatgccgtgccgtctcgttgtcagctggttcagtagtgatgcttactttcttgtcgttgttgctaatgtaagaaataagacgatgcgttgactgcttaatttgcttgtgaaattctatagtccgtggccttacgaaacgcacgggcactcgggcgcaataccgcaacagagt

SEQ ID NO: 155350 - DNA, 982 bp, Zea Mays
gtgcacactcgcttgagcatatagtgtgctcttctcttcctcttccagttggtattctttatctgaaacatagtacagaggaggagaggagaacgagagctaagaagatgaccggcaaggttctccttgtggccgtccttatcttggtgggcgtggcctctcgatgctcgggcagtaggggcctgcagggcgatcacgttgctgaacagaagtacggcggcggtggaggaggaggtggtggtgggtatggcggtggcggcggcggcggcggcggtgggtacggaggcggtggcggctacacacccggctactctggcaccggcacctgcgactactggaagagccacccggacgccatcatctcgtgcatcgggtcgctgggcagcatcctcggctccttcggcgacgtgtgcagcgccttcttcgggagcaagctgcagacgctgcaggacgcgctgtgcaacacccgcaccgactgctacggcgacctcctccgcgagggcgccgcggcctacctcaactccatcgccgccgagaagtacgcctacagcacgcagcaggttcaggactgcatcgccgtcgcgctcacttccaaggccgccgccgtcgcgcaggccgccatgttcaagaaggccaactacgcctgcagctactagctaggcctcgcgcatcatcagcgtataacgtacgcacgcaatgttcgttatataattccatacgtatatgggtgtgcaaggtccagaccgaccagctgtatgtcttcatcgttgccttcgtttctgcgtcgtcctcccatgcatgtttatgcatgatgccgtgccgtctcgttgtcagctggttcagtagtgatgcttactttcttgtcgttgttgctaatgtaagaaataagacgatgcgttgactgcttaatttgcttgtgaaattctatagtccgtggccttacgaaacgcacgggcactcgggcgcaataccgcaacagagt

SEQ ID NO: 155351 - DNA, 970 bp, Zea Mays
gtgcacactcgcttgagcatatagtgtgctcttctcttcctcttccagttggtattctttatctgaaacatagtacagaggaggagaggagaacgagagctaagaagatgaccggcaaggttctccttgtggccgtccttatcttggtgggcgtggcctctcgatgctcgggcagtaggggcctgcagggcgatcacgttgctgaacagaagtgtacgtgttgtgtctctgggtatggcggtggcggcggcggcggcggcggtgggtacggaggcggtggcggctacacacccggctactctggcaccggcacctgcgactactggaagagccacccggacgccatcatctcgtgcatcgggtcgctgggcagcatcctcggctccttcggcgacgtgtgcagcgccttcttcgggagcaagctgcagacgctgcaggacgcgctgtgcaacacccgcaccgactgctacggcgacctcctccgcgagggcgccgcggcctacctcaactccatcgccgccgagaagtacgcctacagcacgcagcaggttcaggactgcatcgccgtcgcgctcacttccaaggccgccgccgtcgcgcaggccgccatgttcaagaaggccaactacgcctgcagctactagctaggcctcgcgcatcatcagcgtataacgtacgcacgcaatgttcgttatataattccatacgtatatgggtgtgcaaggtccagaccgaccagctgtatgtcttcatcgttgccttcgtttctgcgtcgtcctcccatgcatgtttatgcatgatgccgtgccgtctcgttgtcagctggttcagtagtgatgcttactttcttgtcgttgttgctaatgtaagaaataagacgatgcgttgactgcttaatttgcttgtgaaattctatagtccgtggccttacgaaacgcacgggcactcgggcgcaataccgcaacagagt

SEQ ID NO: 155352 - DNA, 628 bp, Zea Mays
gtgcacactcgcttgagcatatagtgtgctcttctcttcctcttccagttggtattctttatctgaaacatagtacagaggaggagaggagaacgagagctaagaagatgaccggcaaggttctccttgtggccgtccttatcttggtgggcgtggcctctcgatgctcgggcagtaggggcctgcagggcgatcacgttgctgaacagaagttcggtggcggtggctatggaggtggcggctccatcgccgccgagaagtacgcctacagcacgcagcaggttcaggactgcatcgccgtcgcgctcacttccaaggccgccgccgtcgcgcaggccgccatgttcaagaaggccaactacgcctgcagctactagctaggcctcgcgcatcatcagcgtataacgtacgcacgcaatgttcgttatataattccatacgtatatgggtgtgcaaggtccagaccgaccagctgtatgtcttcatcgttgccttcgtttctgcgtcgtcctcccatgcatgtttatgcatgatgccgtgccgtctcgttgtcagctggttcagtagtgatgcttactttcttgtcgttgttgctaatgtaagaaataagacgatgcgttgactgctt

SEQ ID NO: 155353 - DNA, 1741 bp, Zea Mays
agaaaagggctaaataatagcgatgccaattttccagctgcgtatccgcaggagattgaaatattagtgctgctgcactggtcatgtacaacatcaaacctactcatattgggaacttcgaaggtcacactccatgacagtatatccccttatttttagatctcgacgcagtagtcgctccccgcccatatagatccacgaaaagcagcatcagacacacatcctatccatgtagcagggatagaacttaacatcattatcatccatcccctgccatgcttccatgtgacggctgccgccgctcagcgcaatggcattggcaggaagctcgacagcagcataagcgggccaagctgctgacaatggcggcgcctgctcgtcattcagtaccccgcgtccacgccgaacgcaaacgagaacccgcctccgcgggacccagcggcagcatccacggcaacatcgccgaacgcaccgccgccgctgtagaacccggcgaagtcgacggcctcgggaccgagcgccaccatgctgtcaccgtcgagcagcagcctggcccgcttctcgccgacctccgcggcgggcggctcggcggcaccgccggaggcgaacccgttatctggcacgggggcgtcgccgacgaggcggtgcagcctgtcgcggtcgccgacgaccttgaggaggaacgcgagcatctgcttgggcctgcgctccgtctcctgcacgcggcgccacatggaggcgacgcggtcgtcgatggcgcgctgctcttgcttgaggcgcaccacctccgtggccaccatggtcatgtcgtccccggaggccagctccgtggggctggcgtccttcctctttccgcctccggcaccggcggcgctgctgccgcggcggacgatgttgcgcaggaggtgcgtctggccgcgcaggaacgacgcgtgggcgaactcccaccggtccggatcaaccttgcggaagccctgaaaataccaagtcagggcaagggaagtactagtactagctgtgcagctcttggctctcgcgatttataaagttctcacggcggtgtgttcggttcttgcagaaatccataggtaaattgcgcaaaaaaaccaatttttctccgtgcatatattcaccgaactgtctgcagaatttcgttgcatatatatacgcggctccatctctgtccatatgtttgtctacgaattttgaatggtcgatctccaaagatgttttgaagaatttcgtcgctgcaggtagcaagcttacatatttcctttttttttctccaacaaaaaccaatttacaaatttgtgttggtacagcacagcaagagcattcggtacacacgccaaagtttatacagatccagcgctctcccaagagcagggttcagctcgtagaagagagacggcaatcaatttagctagctggagtgtgtgatttaactgacataggtgttgagctggcggacgaagctggagaagttgttgtgcttgaagtgcgcggggagcagcgtctgcgagaagacgaaggggtcggcgacgacgaagctgttgttgccgctgccccagccgatcacccctgccgtcccggggtcctccaccatcgtgtacgtcttccacacgaacggcgccggcgagccgcctccgccgcccgccgccatcagttgccttgccttgtccttcctcccttccgctacgctaagcacagcttcacactagtccactgaggaaacactact

SEQ ID NO: 155354 - DNA, 978 bp, Zea Mays
atgcttccatgtgacggctgccgccgctcagcgcaatggcattggcaggaagctcgacagcagcataagcgggccaagctgctgacaatggcggcgcctgctcgtcattcagtaccccgcgtccacgccgaacgcaaacgagaacccgcctccgcgggacccagcggcagcatccacggcaacatcgccgaacgcaccgccgccgctgtagaacccggcgaagtcgacggcctcgggaccgagcgccaccatgctgtcaccgtcgagcagcagcctggcccgcttctcgccgacctccgcggcgggcggctcggcggcaccgccggaggcgaacccgttatctggcacgggggcgtcgccgacgaggcggtgcagcctgtcgcggtcgccgacgaccttgaggaggaacgcgagcatctgcttgggcctgcgctccgtctcctgcacgcggcgccacatggaggcgacgcggtcgtcgatggcgcgctgctcttgcttgaggcgcaccacctccgtggccaccatggtcatgtcgtccccggaggccagctccgtggggctggcgtccttcctctttccgcctccggcaccggcggcgctgctgccgcggcggacgatgttgcgcaggaggtgcgtctggccgcgcaggaacgacgcgtgggcgaactcccaccggtccggatcaaccttgcggaagccctaggtgttgagctggcggacgaagctggagaagttgttgtgcttgaagtgcgcggggagcagcgtctgcgagaagacgaaggggtcggcgacgacgaagctgttgttgccgctgccccagccgatcacccctgccgtcccggggtcctccaccatcgtgtacgtcttccacacgaacggcgccggcgagccgcctccgccgcccgccgccatcagttgccttgccttgtccttcctcccttccgctacgctaagcacagcttcacactagtccactga

SEQ ID NO: 155355 - DNA, 1891 bp, Zea Mays
ggcatcagcacagctccgccagcctcggccacggccagcctcgctcctcactcactcccccagccagcgttacaataggaaggagggaggagcaacctagcggcagccacagcagcagcgtagctgtagccacagcagagcagcggcggctgcgttcagacgaccactacttgttcctcctcctcctcctgctccttcccccaaattccacccccctcaaataataaacaaatcaaagcaagcgaggaggtgagcagcgtccgcaagggaacagggaccgcgggggttgcaggcttgcagccgtgggggaggggagcagatccgcgagatccggcgcgccgccgatgacgagcggcgccgggggagccgcggccgggatcgggggcaccagggtgcccacgtggagggagcgcgagaacaaccgccgcagggagcgccggcgccgcgcgatcgccgccaagatcttcgccggcctcagggcctacggcaactacaacctgcccaagcactgcgacaacaacgaggtgctcaaggcgctctgcaacgaggccggctggaccgtcgagcccgacggcaccacctaccgcaagggatgtaaacctctggcaacagagcgtccagatccaattgggaggtctgcatcaccaagcccctgctcttcatatcaaccaagtccgcgagcctcatacaacccaagcgcggcatcctcctcgttcccaagctctgggtcctcctcccacattactcttggcgggagcaacttcatgggaggcgtcgagggcagctcccttatcccgtggctaaagaacctctcgtcgagctcctcgttcgcctcctcctccaagttcccgcagcttcaccacctctacttcaacggcggttccatcagcgcgccggtgacgcctccatccagctctccaacccgcacgcctcgcatcaagactgactgggagaacccgagtgttcagccaccgtgggctggggcgaactacgcgtctcttcccaactcccagccgccgagccctgggcaccaggttgctccggacccggcgtggctagccgggttccagatttcgtctgctggcccttcgtctccaacttacagccttgtggctccgaatccgtttggtatcttcaaggagaccatcgtcagcacctcaagaatgtgcacccctgggcagagtggaacgtgctctcctgtaatgggcggtgcgccgatccatcacgatgtccagatggctgatggtgccccagatgacttcgccttcgggagcagcagcaacggcaacaacgagtcgcctggtctcgtgaaggcatgggagggggaacggatacacgaggagtgcgcctcggacgagcatgagctggagctcacccttgggagctcaaagactcgtgcagatccttcctgatcatgctgcaagagacaagtcttcacctgttttttttttttactttcatctttattcggacggtgctcctctgctttatgagttcaatgtttgtagaaagagggaagggattcagagaccttatcctgctcctctggagatgatatccatcctctttcaaggatatgaactttattctagcttaagcaaattgttaacttatttatttcattttttcttcatatcctttttttttgtctccctcaagaaacgaaaaggaaaaaaatgcaagggaaaagagtgcttgcaggaaccttttagacaagtcgcagaacttgtcatctgtcagcagtagctgagattcctgtggcattcctgtggccttgtaaaaattagctccagttgtcattgatatgactattatcgttgtacttgtgtcgaaagtgtgtacattgtatggatcatttaggtcttgttgtcattgatatgactattatcgt

SEQ ID NO: 155356 - DNA, 288 bp, Zea Mays
ctcggattatggtgacggacgcgcggttcatggcgcaaggcggagaaacgtgcccccgcgggatctcttgtcgccgacgagcaatccagagggccaacaccaccgcctgcgcccgatgaggtccccagcaaccccaagcgcgccccggcgaaggcctcggatccaaaatcgtgtgcctgactctggtggtccgggattcccccaacggcggaggttatcctccccggatgtggcgatagcgccaagcgcgttcctcggttttggtgatgtagggacttttggctcgga

SEQ ID NO: 155357 - DNA, 104 bp, Zea Mays
actaagttgtgtaataagatgtctgatggttggttaaatggtttaatggtttgctatattgagatggaaatattcaaaggacttgatctttaaaaaaattaaaa

SEQ ID NO: 155358 - DNA, 141 bp, Zea Mays
atggcgacaagcgaacagaggggaggggcgctggggaagagagcggcgttgtgggacgggcgccagatctcccccgagatggccggcggcgctggggacaagacctctactggctgggtggagcaaaggttacagggttag

SEQ ID NO: 155359 - DNA, 626 bp, Zea Mays
acacgaaatgagatgcctctataagcattttatgtgccattataatataaaaagaaaacaaaggaagggagatccttccaaagacgcttcagaggatcagcaaccggtacgactactgatctcgaagtcgtcacacaatgtgcctatgctaaggacaagaaaaatcattgtggctatataactatccaatttgattaactgaaatactaaattggctcaccacgatcgaatcgatttgataaccgcgagggagacaacggttctcaatttagacatccaatcgagctcctggcaattgttgcacagacttctctcatagtttcatccaactctaggatcactctccgaaagacgaagtcgacgatgagccccatggagtaaacgatgatgttgctgcacccaccacatggagacgaatgacggcaacgccataacggcacgagcagaaaggcttggccggggcggagtccgaacaggttgacggtgagctaggccgcgatagatcaaggttgaggtgcagtaattccaaattaaattaggaggagactggcaagctgatggcgctggttcttggaatcggcgacgaggcgagccagcagggagccgggatgagaccactccaaatt

SEQ ID NO: 155360 - DNA, 322 bp, Zea Mays
tctttggcctactgtcatgctacaatctactctaattttgttctctgtgtgttcccactattgtagcattgtactagaatgtaaaactatgtgacgtaacttgttgtaaacatgtaattatgttttatcaactatggtacacgctggacaataataatgtgatgctttgatctttcttggaccatcacattacgttgcaatttgtggaattttcttcatgaaaaaaatcttggatcattcagaggatgcgctttggcaaatcttacactgttgcactagtggtccatatataggtgtgatttagactgacttcaagatctgg

SEQ ID NO: 155361 - DNA, 570 bp, Zea Mays
atggacggagaacaggagctcgtctgccagcacactagagataaccaagcaggggaaaaggggcagcgctgggacagggagcgcgtcctacgcaacatggcgaggttggcctcttggctcaatgacggccggcaaagggaaagacccaggcgacctgctgcagaccagggcgaacgccagggtgctcagtcggcgcgcaggaagaaacaggggaagagagatccgcgcgccagggaagagggaggagcagggagcttggcgcggcttggggatgagagagagaggcgcggtggccagggagcaggcgatgccgcggctggggagggctcggtgagcaccaaaaggaaggtggcggcggcgtccaccatggccgagggcgagctcacagtgaaggtcgagcagagcccggacgctgggaggaacagaagtgagggcgccgtgggaggtgggcagaactggggccgggaccaagggcgcggcgggcagccgagcaccgggagggagaaagcagcgttgaggaagataagccaagcaatggcagctcagtacggaggctatcggccaggataa

SEQ ID NO: 155362 - DNA, 441 bp, Zea Mays
atggcgacatgggcgagcgcggatcggtgccagagaagtcgagcgcatggtgtcaacaacaaaggaggtggacgcgagctgggcaccatgagtgagatgttcggccaccagcgagggagtatgctgagcgaggaaaatacacagggcgcgcacgagctgagcgacggtaggacggacagatcgacgccatgggcgagatccgagctagaacagcaacacaccggcgagctcgcgcgcacagagattgagctaaaggctgggcgcagggacacgacgaccacggcaagggagctccacgagctgggcgagcgcaggaaggaactcgcggggaagagacctcggcacggcagccatggccgagcaggagggagctgggaaccgcagcgagggagctcggcacagggccgtccccggaaaattcgagaccctgtacaaaactaa

SEQ ID NO: 155363 - DNA, 128 bp, Zea Mays
cagaattcaatgtaaatcaacatcaaacagtttccagaaaaacaaagtgtggaccatactgtattgttcaacagcgtgaaatgctgactggaccagaaataatatagtcaaacaagaaaacaactaaa

SEQ ID NO: 155364 - DNA, 84 bp, Zea Mays
gtcgatagtgagactcgacaaagtattctttgtcaaatgcccaagattttgcactcggcaaactctaagtactcaataaggaac

SEQ ID NO: 155365 - DNA, 569 bp, Zea Mays
ctcagaaattccctaatagtgctccaccacgtggacgactcgtcttcaaccatggcgcgacatctcccccacgtcgtcctcgactctcggcctcaaccacctggcgacgctcagctaggacgccactgtgatcgtctccgttcgcccagatgtcgagctccgctcccagccatggccggatcccacaccccttttctgtttcgggccctggctaggagaatcagcacagcaaccggccagctcccacctcgtctcctctccatcaccccctctcttccagtttcctgtagtgctcaggattcacctcctcatggacgcgcaacatcttcctccggctgctccctcgccatttcccccatgcccaatacgtgctcgacgtaatgctcagtcgattagttgttagtatggtggagattggtctggattacgagttatgtgaagaatgtcgtgataaacctgtttgcgatgaatggttttttagtgacacgacgaagggacatcgtaggtatcgcctgtgtcattgcgagctggaataatttatgtttgtgcggtaaaattagaaaggcaaa

SEQ ID NO: 155366 - DNA, 2023 bp, Zea Mays
cataagtagccacagctgcaggctagctcattcgagaagcagcacagctgaaccaattttcatttccttggcaagctaataaagagttcatcgtcgatcagtcccgctgcatggtttcctctccgcaagcaaataaatttcctctccgcaagcaaatttcctcgccctcctcttcgtgcatgactcctcatgtgctattagtcctagtgattctcctgtacctcgtcagaaccctcaggccgtggcggagccggaggaacagcacatgctgcaccccttcgctcccgccggggcctgtgccatggcccgtcgttggcaacctgccggagatgatgctgagcgacaagccggcgttccactggatccaccatatcatgaaggaggcgggaaccgacatcgcctgcatcaaactgggcggtgtccacgtcatccccatcagctgccccaagatcgcgctcgaggtgctaagcaaccaggatgccaacttcgcttctcgcccgctcaccttcgcctccaagaccttcagcacaggctacagggacgctgcaatgtcccactgcggcgaccactggaagaagatgggccgcgtgctggcctccgagatcgtctgcccctcccgtcacaggtggctccacgacaagcgtgccgacgaggcagacaacctcacccggtacgtctacaacctcgcgacgaaggcggggtcgtccggcgccgttgacgttaggcatattgcgcgccactactgcgggaatgtcgtccgccgcctcatgttcaacacgcgctactttggcaagccacagcctgacagtgggcctggtccactggaggtacagcatgtggacgccgtctttacctccctcggccttctctactccttctgtgtctccgactatctcccgtggctgctgggcctcgacctagacggccacgagaagatggtcaaggaggccaatgagagggtgaccaggctgcacgacgcggtcatcgacgagcggtggaggctgtggaagagcggcgagaggcgggagctcgaggacttcctagacgtgctcatcatgctcaaggacgccgaggccggcagaccggtgctcagcatcgaggaggtcaaagctctgctaatggatatcacgttcgcgtccatggacaacccgtcgaatgcagtggagtgggctctggccgagatggtgaacaacccgacgatgcttaagaaggcagtggacgagatcgacagcgtcgttggccaggaacggctagtgcaggagcacgacatcccacggctaaactacaccaaggcctgcatccgcgaggcgttccgcctgcaccctgtagcgcctttcaacgtcccccacgtcgctgtcgcggacgccaccgttgccggctaccgcatccccaagggcagccacgtcatcctcagtcgcactggcctcggacgcaaccctgatgtatgggacgaccctcttcgcttcgaccccgaacgccacatccctttgagccccgagatggaggtctcactcgttgagcgtgatctacggtttatctccttcagcactggtcgtcgcggctgcatcgctgcagctcttggcactgatatgaccatcatgctcttcgctaggctcctgcaggggttctcttggagcaagatgaccggggtggcggccatcgaccttagcgagtccaggcacaacactttcatggcacggccactcgtgctacaggctaagccacggcttccagcgcacctctaccccgggatcttgctttgtaagtagtcccaaataacggctgagcatgtagaaaatttcaccacttatacatgcttaaaatcgaggaatgagagaaagcgcgagaggaatagaaaaatagatgtgtactgctggttttctgaacggttatatttaagatgtaatgaatactattcatcgcctgaaaaaaaatctgtaaatcaggcatctgaaaaatagcagctcaaaaatttctctacccattattattttttcaatctgacttgctggaggttgccata

SEQ ID NO: 155367 - DNA, 107 bp, Zea Mays
ctaaccagtgcccgaatcacctcaatctctatacacgatttgtagattatacatcaaggaagatattttgtgcagcaaccaaggtccgattccaaaaggaaaatacc

SEQ ID NO: 155368 - DNA, 442 bp, Zea Mays
ggaagaatccaaggtggtggacttccggatcgtacttagggatttgcccaaacttccggtgaaggcacctgatttctgctttgggaaaagagggatgtagcagcacggccactacacctttaataaaggaaccactgcttaataatgttgttaatcagggagggtcaagtctagggaattaatatgttctagcttttcatggtggttgagctgtttttggggtgggctgagttacctatccttttatttggtcatgaatgtgtttcaccacttttgcatttagattctactacgtgaattatctgtcttttatatcctgtatgaactccatgttccccctgttatgcttctttcaagggaggtgctgccggattttgcaatactttctctctctattccatttcttgtgttgcataagttttgtgggaagggtaattggtaa

SEQ ID NO: 155369 - DNA, 943 bp, Zea Mays
aaagaaacaacaatgacaaatatgaagtctcaccacaagacaacaatgaataccgacctcttccaaagagaaaggatgagactttgtgccctttggatgacaaatgatcctaaatatctttggccacggcggccaggtgagccgtccagccctggtagcccacggtggaggactcgagggagctaatcgacgccatggggctggggtggtggtggtgctatgcgcaggctgttaaggaggcaccacgctcatcaacattgctgtcaagatcaactgtaatgaaagctggtccacaacaagtcctgtattcactgtttaaaattcctgaaacacgcacgtatgagccaagttctatggactggaaaaaggtagtaaagaaactgcaaacaatcaattatacagctgcatcaaacaatcacgaaaggcctaaggatggggatggctatcgtgagctccgtggtgttgctgcaaggcattacaataaaatgaaagaatactatcagaaagctacctttgcatattcgaagggtgacatgtcatatgcttcttaccttgctgaggaggggaaacattatcgagaactgggtcgcatagaagacgagaaggccaacaggaatatatttgaagccagaaataagcatataacgaacacagtaaccatcgacttgcatggccaacatgtccaacatgctatgaaccttctcaaaattcacatgatgatttgtatttgcattccatgtgagtaccatacaagattcggtgctgtagtctctgctagtgctttaattcacaccactcaattgtctgtgttttatctcatgccttattgtgccttttttgtgtgtgtgttttatgcctttgttccttaaacaactgtcttattgagggtaattaccggttgtggttcagaaggtacaaggaagggaaaaataaagcgctcggt

SEQ ID NO: 155370 - DNA, 1682 bp, Zea Mays
ccacacagcagcacagatcgctccttccagtgtcccagccagtcctccggaatgcagtccttgcttgcaggaatccccgcgggcggtgccgcggcggcggcagccgtcggtgggctggtcgcggccgccgcgcttgccgagagggccgaccagaagaaccgcctcaacttgcccccagctgttcctggtttacctatcattgggaaccttcatcagctgaaagaaaaaaagcctcatcagacatttgcaagatggtctgaagaatatgggccaatatacagtataagaactggtgcttcttctgtggtggttgtcaattctgcagaagttgccaaagaggctatggttgcaaaatattcatccataaatactcggaagctacctaaggcactttcagtgctcacacgagacaaaaagatcgttgctatgagcgaccagggtgagctttacaaaatggtgaagcgctatattatggtgagcatgttgggtgctgctgcccagaaacagtttcgtgacacaaggaacacgatgattgacaacatgttgagcacttttcacgcattggtggccgatgacccaaaggctcctctcaacttccgggatgtattccagaatgagctattcggcctatccatgactcaggctttaagcgaggacgtaagttccgtctatgtagaagagtttgggaaggctttatcgagggaggaaatctaccagactgctgtggctgacatgatgatgtgtgcaatcgaggtcgactggagggatttcttcccatacctgggctggatcccaaacaggagctttgaaacaagagtattgactacggaagccaggagaactgcacttatgcaagccctgatcaatcagcaaaaggaaaggatcgcacgtggagagagtaggatgtcgtacgtggacttcctgctggctgagaatacactgacggatgaacaattgctaatgctggtgtgggaagcagtcatagaagctgctgatactaccttggtcaccaccgagtgggccatgtatgagattgcgaagcacccagaaaaacaggaatacctttatcaagaaatccgaaaagtctgcggcaacaagacagtcaccgaggatcacctgccagagttaccgtacttgaacgcggtgttccatgagaccctaaggcggcactctccagttccgctggtgcctccaagacttgtccatgagagtaccaacttggctggctacgaagttccagccgggacacagatgatcataaatctgtacggatgcaacatgaacaagagcgactgggacgcgcccgaggaatggaggccagagaggtttctggacgggagcttcgaagtcgcagatatgtacaagaccatggcattcggcggaggaaggagggcctgtgcgggaagcatccaggcagtgaacatcgcgtgcacagccatcgcgaggttcgtgcaagagtttgcgtggacgctcaaggaaggcgacgaggacaaggacgacaccatccagcttacaaccaacaggctttacccgttgcatgtgtacctcacacctagaggaaggaaatgagcatcacatttatttggtctctggtctgtgagcatatgatcgaataacaatttattttaaatgaaagcagatccggtcgtctcggcgtacatgtcgcgtttaatattaacaca

SEQ ID NO: 155371 - DNA, 105 bp, Zea Mays
cacactcagtaaaataataaaatcaactgtgcttagacaacggataaatttttatccgagttcaactaaaccagtgctgtctcaaataatgtatctgatatccag

SEQ ID NO: 155372 - DNA, 799 bp, Zea Mays
cggctgcctccgttcatctccctccagccccaacgccgagccgccgcccctgggttcttcaaaaaaaaatctgccgccgccgcctcccttaaagatttttccactgcatctctctctccttatcttcttcagcaccacggcttcctctcccagcctgccctccacctccctctctactcggcggaccgcacagctccggcgcgcgcacagccgagcggcttcccgcgcacgctgctccctgcgctcgcctggctcgccgcgcgcccaagccctcttcttcctccctcctcccagcgcgctctactcctcttccccagccgcgaagttccatggcgcgccggctccctgctcggctccttcctctctgctccctgttcaccgtccacgctctatcggtctccagctcgtcgccatggcacgtctctctcccagcgtaagctcttggacgccgcatcctcccggtcatggagttcaccggtagtcgccgtcgtcgaagctccctgcgcgcgcgcatctccctactccagtccagccgctgctccttgctcgcccgaattcgatctccgccctgcccatcacccctacgcgcgctctgcttcctcgtgcggctttctgctcgcctggccacgccctgcttccatggtcgcgtgcccatcttcctccctctctgcttgccgcgtgcgcagctccctggcgcgtcttcttccctattggtgcccgcccagccgctccctcctctctccccttggcaaacctccctcaatttcccgcgccgtccatcgcgcccggctttagctcg

SEQ ID NO: 155373 - DNA, 1921 bp, Zea Mays
cgcgccgcgctgtccctcatctccagtctccctctccactctgcggcccggtcgatccccattccgatccatcgcacgggcagcgcccagtccggttcactcatggagtctctagtggctgcgctccccgcgggcggcgctgcggcggcggcggccttcggtgggctggtggccgctgccgcgctcgccggaaaggtcggccttgtcgggtccaagaaacacctcaacgcgcccccagctgtctctggtttacccctgattgggaatcttcatcagttgaaagagaagaaacctcaccagacctttacaaagtgggcagaaatttatgggccaatttacactataaggaccggttcttctactgtagttgtgctcaattcagcccaagtagccaaggaggcaatgattgcaaaattctcatcaatatctactcgaaagctatcgaaggcattgtcagcgctcacccgtgacaaaactatggttgctacaagtgactatggtgacttccacaaaatgattaagcgttatatcatgacattcatgttgggtacttctggccagaaacaatttagggacacaagaaacatgatggttgacaacatgttgaacactttccatacattgttgatggatgatccaaattctcctctgaacttccgggaagttttcaagaatgaattatttcgcttatccctggttcaggctttaggcgaggatgtgagttcaatctatgtggaagagtatggaaaggttatatcaaaggaggaaatctacaaggccactgtggttgacatgatgatgtgtgcaattgaggtcgactggagggatttcttcccgtacctcagctggattccaaataggaccttcgaaacaagagtactgactaccgaagcgaggagaactaccgtgatgcaagccttgatcaagcagcaaaaggaaagaattgcacgtggggagactaggatatcctacctggacttcctgctggcagagaatacactgactgatgaacaattactaatgctggtgtgggaagcagtcatagaagctgctgatactactttggtcacgaccgagtgggctatgtatgagattgcgaagcacccagaaaaacaggaatacctttatcaagaaatccaaaaagtctgcggcaataagacagttaccgaggatcacctgccagagttaccgtacttgaacgcggtgttccatgagaccatgaggcggcattctccagttccattagtgcctccaagattggtccatgagaataccaacttggctggctatgaggttccagccggcacagagataatcatcaatctgtacgggtgcaacatgaacaaaaacgactgggccgagcctgaggaatggaagccagagaggtttctggacgggaggtttgaagcagtggatatgcacaagaccatggcctttggcgcaggaaggagggcctgtgctggcagcatgcaggcgatgaacatctcgtgcaccgccatcggcaggtttgtgcaagagtttgcctggaggctcgaggaaggcgacgaggacaaggttgacaccatccagcttacaaccaacaggctttacccactgcatgtgtacctcgcacctagaggaaggaaatgagcctctactgtaaacgggtttcactgtactaatttaaaaaaataatttgctgttgcctgtgtatgacttttggatgatctctatgctgtgaagttgttggtctgaaattgggttaacaatacgaagtgcatatcatacaggacatgaacaccaacttgcagcatctactactgatactgactaccatataggcaggggcggatccaaggggtgggcaaggtgggccatggcctcacctcaatttttttaaccccttatacctaggtttaggtacacaccaaaataaaacaaa

SEQ ID NO: 155374 - DNA, 1662 bp, Zea Mays
tgttcttatccaatattacatattttatgtcagggcaaaagaaccaaaccctcgagttattttatttcttttcatgcagctgtctctggtttacccctgattgggaatcttcatcagttgaaagagaagaaacctcaccagacctttacaaagtgggcagaaatttatgggccaatttacactataaggaccggttcttctactgtagttgtgctcaattcagcccaagtagccaaggaggcaatgattgcaaaattctcatcaatatctactcgaaagctatcgaaggcattgtcagcgctcacccgtgacaaaactatggttgctacaagtgactatggtgacttccacaaaatgattaagcgttatatcatgacattcatgttgggtacttctggccagaaacaatttagggacacaagaaacatgatggttgacaacatgttgaacactttccatacattgttgatggatgatccaaattctcctctgaacttccgggaagttttcaagaatgaattatttcgcttatccctggttcaggctttaggcgaggatgtgagttcaatctatgtggaagagtatggaaaggttatatcaaaggaggaaatctacaaggccactgtggttgacatgatgatgtgtgcaattgaggtcgactggagggatttcttcccgtacctcagctggattccaaataggaccttcgaaacaagagtactgactaccgaagcgaggagaactaccgtgatgcaagccttgatcaagcagcaaaaggaaagaattgcacgtggggagactaggatatcctacctggacttcctgctggcagagaatacactgactgatgaacaattactaatgctggtgtgggaagcagtcatagaagctgctgatactactttggtcacgaccgagtgggctatgtatgagattgcgaagcacccagaaaaacaggaatacctttatcaagaaatccaaaaagtctgcggcaataagacagttaccgaggatcacctgccagagttaccgtacttgaacgcggtgttccatgagaccatgaggcggcattctccagttccattagtgcctccaagattggtccatgagaataccaacttggctggctatgaggttccagccggcacagagataatcatcaatctgtacgggtgcaacatgaacaaaaacgactgggccgagcctgaggaatggaagccagagaggtttctggacgggaggtttgaagcagtggatatgcacaagaccatggcctttggcgcaggaaggagggcctgtgctggcagcatgcaggcgatgaacatctcgtgcaccgccatcggcaggtttgtgcaagagtttgcctggaggctcgaggaaggcgacgaggacaaggttgacaccatccagcttacaaccaacaggctttacccactgcatgtgtacctcgcacctagaggaaggaaatgagcctctactgtaaacgggtttcactgtactaatttaaaaaaataatttgctgttgcctgtgtatgacttttggatgatctctatgctgtgaagttgttggtctgaaattgggttaacaatacgaagtgcatatcatacaggacatgaacaccaacttgcagcatctactactgatactgactaccatatagg

SEQ ID NO: 155375 - DNA, 306 bp, Zea Mays
atgaagcactgtggctctggcatcagcgagcgctctgccacagattttggagaaggctctgaagccgtcgcgccgatggagaaaggtgtgggtggtcaaggcggcgaggaacccctgcagctctggtgttggcgagtgctccgccacaaattttggagatggtgggaggcaatggagtcgatctgggcgacgtcgacgaactgcagcatggtcactatttatcttcattattgcgccctcaaccggaagaagtggaggtcgtggagcgtgctgcgtgccagaggaatagcagggcggttgctctga

SEQ ID NO: 155376 - DNA, 97 bp, Zea Mays
acgattttggctacttggcttattggttctcctgttaaagtaactgccgaagacttgcatgaagaatctggatgtccatgtcccatgctagttgcag

SEQ ID NO: 155377 - DNA, 1490 bp, Zea Mays
cgccgaatcctctcccggcaccgcaaccgctgttcctctgcgcggaacgcgcgcgcgccacagccgatcagccaccgcaggattcctcgtccaccgcgaccattcggcttctccccaatcccggcacggcggcacgggacctctccctctctctcccgctggcgggcgatggcctcctcctcctcctcacctgcgcccgccctggccggggaggcgctacgccagaaacgcatcctctccagcaagctctacctcgaggtcccgtcctccaaggcgccggtggtttactcgccggcatacgacatctccttcctcggccttgagaagctgcacccgtttgaatccgccaaatggggccgcatctgtaggtacctcaccagggaagggtacctcgacaagaaacagatggtggagccattggaagcctgcaaggaggatttgctagtggtgcacacggaggcgtatttgaacagtctcaaatgcagcttcagagtttcctccattgtagaggtccctcctgtgtcgcttgtccctaattggattgtgcacagaaagctactacaccccttccggaagcaggtgggtgggtccattttatcagccaaacttgcatttgagagaggttgggctattaatgttggtggaggatttcaccattgttcagcagatgaagggggtggattttgtgcatacgctgacatctctctctgcatccagtttgcttttgtccgtctaaatatctcaagtgtattgatcatagacctggatgcccaccaaggaaatggacacgaaaaagattttgctaatgatggaagggtttacattttagacatgtacaatgctggaatttatccctttgatttcactgctaagcaatacattgatcaaaaagttgaattagttagtgggtcaaaaacagatgaatacttggagcaacttgacaaagctctcgagatctgcaatagtagatttgagccccagttgattgtatacaatgctggaacagacatcctcgatggcgatccgttgggcagattgaaggtaagtcctgagggtgtggttaccagagacgagaaggtatttaggttcgcaaaagatcgaaacattcctttgctcatgctgacatcaggaggctacatgaagtcaagtgctcgagtaatagctgattcgatcatcaatctgtccaataaaaacttgataggattaggcagccagctgggttgagcaagaacttgtgacagtatgcttcttatcgggaagcaatatctcgtaagagcttattcgattaggagtggattaaagaggattaaattccttgatggtcaaaattgaatagaaagatatctaatcctactcaatccacatgcaatcgaacaaggtttaaaggtgtagtttttttttttttgtgaaggataacatgtatgccacaaaaatgttctgtacataacacgggatgtttgtgaatctatacaacacaaaaacaaaaacaa

SEQ ID NO: 155378 - DNA, 959 bp, Zea Mays
agtagaagctaaacaaaaaggtctaatttataataactttttttttactgtaacctgttttttacaatagaaatcttatagctggtagagtggtaggtggctgcttttgctgcgttgagggcaaactaaagttgaaaaattatccactgccacctggttatgtacttactgcttcttttcttttttccctattctcctcctagttcctgaccaggcaagatcttgcgctaggttccttgttccatgctagcggcggcgctttcctctgcttgcgtcatcacgcatcccagccgtcgagcaccagacggtggccctctcagcgccagacgacgccctcgcaactcaggtggcagcaaccttatgtgcggttgcgctgctcttccctgcccgtgtcagcgcgtccctgttcgcaacagcgctcccttcctaggtcctggtagcgcccgacgacggaggctatcctcctggtcgacaaccctccccaacccgcgggcagtacctacaaggaaaacaatacgtagattgtctgttcgtgtgttcgattttctttttggacgcaaattcttgtgcgtacatgcttcaaattccgcgagtcaaaaatatctttgtagtctatcgtactcgaatttgtgtcacatctgttcttctagtttacttgttgatatctgtctttttataaattactagtagtctatcactttgttttctagtttcatcttcgttgtccagtagttgaagagctagcgtaatgtagatcctactactggtatgtgaaacaattccatcatagtcaaatgagtcaaaaacaattccgtgtgataatttgcaatgtgaaacatatattgcagttataacccaaaaaatggaatgtggcctataataaaaaatattttagtttctagtatctcgaactgtaagctagagctaagcaattgccaggaatgaaaatgagttgagac

SEQ ID NO: 155379 - DNA, 1730 bp, Zea Mays
atcttgcgcttaatccagtccgttcaattcttgacatccgaacaccccgccgacgcagccctagattccgcattcctctgtcacctccgcggcgccgccagcccgccatcacataacttcggcttctatcccttcgtaaacccttctctcttcttcccgcggcctgctcgttctatctgtccagcagacttgaggttccgagcggccggaaaccagcggcaaccgtcggcatggcgctcgtattgcattctggggctggaaacaaaaatgccttcaaggcacttattgctgcagaatacagtggggtcaaggttgagttgaccaaggattttgagatgggtgtctccaacaagacccctgagtttctaaagatgaacccccttgggaaggttcctgttctggagactcctgatggccctgtttttgagagtaatgctattgcgcgctatgttgctcgcttgaaggatgacaaccctcttttcgggtcttcccgtattgaacaagcccacgttgagcagtggatggactttgctgcaacagaagttgatcctggtgttggatggtacttgtatccaaggcttgggtacatcccttatgctcacacgactgaggaaacagctattgcttcattgaagagatcccttggtgctctgaacacacatcttgccttgaacacataccttgttggacattctgttactctagctgacattgtattgacatgcaacctctaccatggaattgcacggatcttgaccaaaagcttcacttctgatttccctcatgttgagaggtatttctggaccatggttaaccaacctaatttcaagaaggtcattggtgaggtcaagcaggcagagtctgtacctcctgttcttaaaaagggtgttcctcctaaggagtcaaaggcaaaggatgtgaagaaagaaactccaaaggaggcccccaagccaaaggtggttgaggtaccagcagaagaggaagcaccaaagccaaagccaaagaatcctcttgacttgctgccaccaagcaagatggtccttgatgactggaagaggctatactcaaacacaaagaccaacttccgggaggttgccatcaaaggtttctgggacatgtatgacccagagggctactctctgtggttctgtgactacaagtacaatgacgagaacaccgtctcctttgtgaccctgaacaaggttggtggattcctgcagcggatggacctgtgccgcaagtacgcctttggcaagatgctcgtggtaggttctgagccacccttcaagctgaagggcctttggctcttccgtggccaggaggttcccaagtttgtaatggatgaggtctatgacatggagctctacgagtggaccaaggtggacatctctgatgaggcccagaaggagcgtgtcaatgccatgatcgaggaccaggaacccttcgagggcgaggccttgcttgacgcgaaatgcttcaagtgagtgtgctgtatccagagctgtttagccctctaattggatgtctatgttgatctggtatatcttgctatgaactggttaaagtttgtgctggtttgagaatttttgtttaccttgtcatcatttaagtgtttcgccgtaacaattttggtcatgtttttgaatgcctgtttgtattcgcgtcgtagttggggctatttatgcagactatccgatttaagtagattcaagtggcattattctctagta

SEQ ID NO: 155380 - DNA, 1671 bp, Zea Mays
cagtctctgggatgttgctgcatttgcatgtgcattttttctctaatagtgaaatacatgtgttttgtggattatgttctggttctatcacttaggtattggtgtagatgtcattgcctgtttgcatgcgtactattgaattaccatgcacaaacagaggtatttcagtttgtaatacaatatgtctatttttttattccataggtattgcattctggggctggaaacaaaaatgccttcaaggcacttattgctgcagaatacagtggggtcaaggttgagttgaccaaggattttgagatgggtgtctccaacaagacccctgagtttctaaagatgaacccccttgggaaggttcctgttctggagactcctgatggccctgtttttgagagtaatgctattgcgcgctatgttgctcgcttgaaggatgacaaccctcttttcgggtcttcccgtattgaacaagcccacgttgagcagtggatggactttgctgcaacagaagttgatcctggtgttggatggtacttgtatccaaggcttgggtacatcccttatgctcacacgactgaggaaacagctattgcttcattgaagagatcccttggtgctctgaacacacatcttgccttgaacacataccttgttggacattctgttactctagctgacattgtattgacatgcaacctctaccatggaattgcacggatcttgaccaaaagcttcacttctgatttccctcatgttgagaggtatttctggaccatggttaaccaacctaatttcaagaaggtcattggtgaggtcaagcaggcagagtctgtacctcctgttcttaaaaagggtgttcctcctaaggagtcaaaggcaaaggatgtgaagaaagaaactccaaaggaggcccccaagccaaaggtggttgaggtaccagcagaagaggaagcaccaaagccaaagccaaagaatcctcttgacttgctgccaccaagcaagatggtccttgatgactggaagaggctatactcaaacacaaagaccaacttccgggaggttgccatcaaaggtttctgggacatgtatgacccagagggctactctctgtggttctgtgactacaagtacaatgacgagaacaccgtctcctttgtgaccctgaacaaggttggtggattcctgcagcggatggacctgtgccgcaagtacgcctttggcaagatgctcgtggtaggttctgagccacccttcaagctgaagggcctttggctcttccgtggccaggaggttcccaagtttgtaatggatgaggtctatgacatggagctctacgagtggaccaaggtggacatctctgatgaggcccagaaggagcgtgtcaatgccatgatcgaggaccaggaacccttcgagggcgaggccttgcttgacgcgaaatgcttcaagtgagtgtgctgtatccagagctgtttagccctctaattggatgtctatgttgatctggtatatcttgctatgaactggttaaagtttgtgctggtttgagaatttttgtttaccttgtcatcatttaagtgtttcgccgtaacaattttggtcatgtttttgaatgcctgtttgtattcgcgtcgtagttggggctatttatgcagactatccgatttaagtaga

SEQ ID NO: 155381 - DNA, 583 bp, Zea Mays
ttttgttatgcgcggcagtttggtttatagggttttgtgattcatgtaatttaacttgatctgattgttgatgcgcgctgccgaggtgatgtttttctgttggatggggatttcttgagttatagcgtcataggtgtcagaactgtagatgcgttcggagcgtggtagtagtttagatactaagcttttctttgggcagctctatatctaaggtaactttgaactgcaggtcccttccaatttcaacatgagtacatgacccaaacttttgtcttggaaatagatcgcctgttgttatcccttgtccacaaccgtcgattcatactgagtacccgtcgattcatactgagtttgactgaatttactaatctgtatcacagtgcatgtgatgtcacttaagagttcccggcttactagtagaatggcactggaaacgacctttgacctttaatacccttgtaacattgtagtttttcaggagaactgctctaaggacaatggcaatcatataccttgtgtatttgagccattagattcaattagatgctatcatctcaagtgattttaaccatcatctcaactg

SEQ ID NO: 155382 - DNA, 396 bp, Zea Mays
atgactggcggggcagcagacgggagtgggggccatgcgggggtggtgggcgctggtgcagaatcgctggtgtggatgggggaatggaggcgaccagcgtggacggtgatggtgcggacaacgaacggaggcggctgcagggaggtgacgaaaccctacaagcgtgagaaacagagaattggaggggcggagtggcgacggctcggcagaacgagggggtgtcgacttcatgtgtccttggtagcggtaagctccactggagcacatctgcagctgcggccaggaaacgagagttcacaggagacgccgcagatgctacgtagtagtaggccggtggtagggtcaagggaccaaataccaaccacacaacactcaacagctactgcctatgagtaa

SEQ ID NO: 155383 - DNA, 1967 bp, Zea Mays
tctctcctttgtctctttataaaagggacatgcctctcccttccgtgcatgatcgctacctcgctttccctcttgatccctggctgcaaattgccattccgacataataaccactgcaccagccgcttcggttcgcctcttcctactctccatatatctcatcctgatcttcactcatcacctaaccatacgagatctgcatatatagctccatcagatcttgagcgcaaattcctctcagtgcatcccatgtctgccatctacatgagccagctctccactgccctccctctcatggagggagatcaccaagatcatcatcaccaccaccaaggccacttccaggccttcaccctgccaaaggaaacaccgatccttttcccctttgtgatcagcaatagtagcgccagcgaaggcagtttgagctatggatcggctgcagaccatcacttgttgaggcagcgtcatcaagctatgctggagccccaacatatgattggaggatcatcaactgcgactgggaatagtgtcttctcgacgccgttcccgaccgtggagagcatccgcgacgacatgatcgagcctgcctcgtacgatccatacgatatggggaagctgcaggtcggcgggtcgatggatgcttgcagctggacgccggcggcagccaagatgaggatcacgaggaaggccactgccgatcccagtgcggggaagaagccaaggagaagggcgcaagcagggtacgacgacaccatgagcggccaaccgaatttgggtgttattagggtgtgctccgactgcaacaccaccaagacacccttgtggaggagtggtccttgcggccccaagtcgctctgcaacgcgtgcggtatcaggcagcggaaggcgaggcgggcgatgatggccgccgcctccggctcggtgtcagcagttcccactgacagcggcaaggcctcgcccagcaacgccgccgtggccgcagcagcagcacaccccaaggtgaagaaggagaagagagtggacgtggaccggtcgctgccgttcaagaaacggtgcaaggtggtccagcaaggtcacggtgcggccgtcgtcgttgcagctcctgctgctgccaccgacagcgcgactgtcgtgcaggccaccgccgaggatggtgatgacgacacctgtccgagcagggatctgcttgtcgacgacattggtgggctcatcagctggagcaggagtccggcggcacccgcctcagcggctgcggccacctgcagcttccgggcgtcgccggcgttgcccgtgcagcaggacgagatcacggacgctgccatgctgctgatgacgctgtcctgcgggcttgtccggagctgatccacgatctgctacctctacgaaggacgacccagcgcaccgtaggcttttcccagctagcagctagcttgtgcctttgactgttagctagcgttactgttactgctgttaccatcgtcgtctaccgtaatacctgtagtgcttttgtttagcttcttgttgctagtgtgaccacccttgtcactgttcaagtcatgtgattcgttcgatgagtgagagagagagaagaggtctagttgagatgataggagcgacaagagcaccgtctctagctacaatagctagtaaatataatcgcatgtagtgtgaggagtttcagttttgagtgtgtacaagttctttaattccgatcctgtggctataatctggtcgctggctgctgctacatatttttttattcttccttttgcttgagtttcttttaaggaacctaaaagtgtaatgggaatgttttgagacataccgtcataccgacgatgcaaggtgtcgtgcttgtcttcctggctactcgttcatggcttttgtttctgatgcttctgtcagtatgcatacaacattcttgtacgtacgtagtctccatttcaaaatatgatgtgccttgatct

SEQ ID NO: 155384 - DNA, 249 bp, Zea Mays
atgttctgttttgccccgaaagatgaacaaacggagagaaatttcttgccaaaattgtcgctagagtttgggcgggagccaaatttcgacgaaccggtcatggaggattatggctgcgagcttagctaggggcgggctactgtgacttggctagtggcggcgctgctgcgaggctatagaggagatgagtctatgattgatggcttaaggtgttatggtggcatgtgtttatataggctatgaggtggg

SEQ ID NO: 155385 - DNA, 111 bp, Zea Mays
aaataataatattaaatttagtgggatctgtaaccacaataccactatgtggagatttgaaattcaaaatttaaaacaaggatttgaaattggttggatgtttcaaattgg

SEQ ID NO: 155386 - DNA, 332 bp, Zea Mays
cattattaagttacatgcaccaaccaattcaacccaaaaacttaagctgataggagggggtgtgcaattcacttatattatattccaatactcccctcacgttgagcatctcttgggttttagacgtggaataagaacgagcaacaattattttgtttaattgtgctagctagaattcgaactcatgacctctgtctctaatactatattaagttgcaagcaccaaccaattcaacccaaaagcttaaactgataagaggaggtgtgcaattcacttatattatattacaacacccattacatagaggtaaacagataaatacaagagggct

SEQ ID NO: 155387 - DNA, 2334 bp, Zea Mays
atgggtttgattttacgactccaagatgtgccttttacaattctgaaaaccgtaccaagttcgtgcaacatatttgtcgtgtcccggcgcaggttaacaataaaaattgcaaatcaggctcgaagtagcaagccgaacgcttctattcggattcagtcaataagtcataaagcatttgatcaaatacagagggactggctacaagacaaacaggctttgaataatctggctgatgatgagataccaaaatattctgaaaattctatttcaggctcattctctcaagtctgcagttctataagcacttcttccatcgccgttaaaagttcagaaagtcatagaagaggtttcttaggaagtttaggacgaaggacacctgggagagaaaggaacaaagattttgatgctatcggccaattgaaggaagttcattatgttgccttaagctcagttgaagagtaccaacatatagatgaagaagaaaaactgaggaaggagctgaaggatactttgatgatgtatgacagagcttgtggaaatctcgcccatgctagtaaaaagattcagttattttctagtgactgctgtgaagatgtgaataaggtgcaagacgcactacagagagaggaagtattgaaacagacggttccagatgagaaaaacaaacatttagaagcaattggagcagttgagatggcaaaaaatgcatttacacacgagacctattccaagcaccaggctgagaatgctaaggctgtggatgcccttttatcaacaggcaaaagttgcaggcggtactcgaaacatgaaatagagctcgccactgattacttttctgatgcaaagaagattggtgagggtggctatgggaatgtatacaggtgtacccttgaccacaccgaagtagctgttaaagttgttgaacaagattcgatcaacaagattgatgagttcttgagagaggtggagattctcggccaacttcaccatcccaacttggttttactgcttggcttttgtcctgaaattggatgccttgtgtatgaatacatggagaacgggagtttagaagatctacttatcaacgataaagggcagccactccattggtttcttcggttccaaattatctttgatgtggcttgtgggcttgctttcttgcatgggacgaaaccagagcccattgtccatcgtgacctaaagcctgggaacatcttgctggacaagaactacgtaagcaaaattggtgatgttggttttgcaaagcccatatcagatcttgtgccagaagggctcacagagtacagagacactgtcatcgctggcacactgtattacatggatcctgagtaccaattaactgggactgttcgaccaaaatcagatctttatgctttgggtattatcattcttcaactcctaactggcaaacgtccacctgggctggtaaatagtgtagaagaagggattaaaagggggatattatcagacatcctcgacaagtctcaacctgattggccaattgctgaggctgagatgttggcaaaacttgggttgtggtgtactgccttaaaatgcagggacagacctaaccttgagtcagtggtgcttccagagctcgaaaatatcctgagcagggttactgtttctctcaaactcgaaaatatccttgcaccaagccacttcttctgtccgatattgcaggaggtaatggaaaatccttacgttgctgcagatgggcacacctatgaacacagggcaatcaaagcttggctcgaaaaacacaagatatccccaatgacaaatcagaggcttccacatctatccataattcccaaccattccttgcatgcagcaatacagcaatggaagttacgagcatcttaaggcccgttcgttttaatcttaatctatatggattgaacgggattgagtgggtttaaatccataacgaatcaaaattctttctaatttcttccaatgtcatcttatcaacatggaatgagaataaccgaataaggcctaataaaggcatgaggtgactggtttattcgttgtatatagtttgattcattactgtctgtttgagttaagatgtaaataaagagcaatagttctataatgtagcagtgaaagaagatagtattgtaggaataagttgtgttactagtctagatttgttagagctggtttaggctactcagacaatttaagttacaacggaattaagttttgcaatgctgtatgattttgtagttatagcctacaaggcattatcttggagggtctgattacaattttcagtgtgatttctctgagatcatgtatcttggc

SEQ ID NO: 155388 - DNA, 521 bp, Zea Mays
ccgcggcccgcccgttgcttgcccgcaagaccgcagcagctcagttgagttgacctcgcgacctcccccggccggcgccgcagggatggaggagggtgcgtcctcgccgggcgacggcgggggcatgcagttccaggtcgcggtggccgtgcgcggggacggccgcgccagccgccgagccgcgcggtgggccgccgccagcctggtcccgcccggcggccgcgtcgcgctcgtccacgtcatcccgcccgtctccttcgtgccgtctccatccggggagagggtgccggtggacaagatggagccggaggtggtggagatgtacgcgcaggacaaccgcgcgctcgcgcaggagatcttcctccccttccgccgcctcgtcggccgcggcaaaagcgtggagacggtggttctggaaggggacagcgtcgccgaggcgctggtgaggtacgcggcggagtccggcgtccgcagcctcgtgctcggatccgcctccctcagctggttccggaggtgaggat

SEQ ID NO: 155389 - DNA, 638 bp, Zea Mays
taaaataaaataaaaaaaataaaaaaacagaggggggcggttgaaccggccctaggggcggttgaaccggccctaggcggggcgcgcaggggcggccgagccggggcggctgagccggcggcgggcggccgggctggcgagggcgggcggcgcagggggcggccgagccggccgagcaggggggcggggcggccgagccgctgggcgcgcaggggcgcggggcagggcgcggggcggccgagcggccgagccggccatgggggcgcgcgcggggggggggggcggccgggctggccaggcggccgagccgggggcgcgctggggggccgggggcgcggccaaggggccgagcgggcgatgggaaggggagggaggaaaagtggatttttttttttttttctttttttttgttttcttttttatttaatttttttttttttcttttttttttttttttattttttttttatttttttttttttttttttttttattcttttttttttttttttttttttttcttttttttttttttttttttttttttttttttttttttttttatataattttatttttttttcttctgtaaaatagctattataatttataaaatctctctctctatttcacctcta

SEQ ID NO: 155390 - DNA, 4873 bp, Zea Mays
atggacgcgacgacgaagcggcggcaccagcccggcggcgcgcagcccacacgccgtaaggtcgtggaggaacccttccacaccgcaccccctacacctgccgcggcgtccccctcccgcctcgtcggcgccatcgtcgagaagggctactccgccgccgcaccctcctcggcgccccgaccttccgtcctccccttccccgtcgcccgccaccgctcccacggcccccactgggttcccttggtgaaggacgcccccaaggatgagaccgcggacaacgacgacgagatggacatggatgagacagactaccatcctgtggcagctgctgcagctggtcctgtgaggaggaaggagaagaagggcatggattttagccggtggcgtgagtttgttggcgatgctccccccaagcggaggcaggggaagccagtgcaggccaagaaacagagcgatcagagaattgatgctggggctgtagcttctaaggtaggtggtgtggcagctgaggggagaggattggagggaggtgctatgcggcttgacagtggaaatgctagcgaagggccaggtcccgtgcttttggtttctgatgtcgtgtccaagaagccaatgagtcaggttgaatcgagagatgaattggtgaacacaagtgaggctaggaatttggcatcacaagcagagagtatggacctcgacggcagggagtcatctatggaagcagagatcagcgcagagaacatggctaggttggctgggatgtctgcaggggagattgcagaggcccaagcagatattgtaaataagctgaaccctgcattgctggagatgctgaggcggcggggaagggagaagtctggaggcacgaaggatgtgggtaaggacaagggtctgaaaaactcagggctgcagaagaataaaagggctacaccaggggattggttgactgctggtgaacatactgggcactcctggaaggtgtggagcgaaagagtggagcggatcaggtcttgtaggttcacattagatggagacatattggggttccaatcttctcacgagcaacaagatggcaagaagatgccttcagaaagtgttgctgagcgtgatttccttagaacagaaggtgatcctgcagctgttgggtacacaatcaatgaggcagtggcacttaccaggagcatggttccggggcagcgtgtgcttgcactgcaacttcttgcttctattctgaatagggcattgcagagccttcataagaccgatctaatggataatgttaaaggaatgaattccaaggataacattgatgactggcaagcagtttggtcctatgcccttgggcctgaaccagaattggtactctccctaaggatggctttggatgataaccatgattctgtagttttgagttgtactaaagtagttaatgttatgctgagctgtgagttcaatgaatcctattttgaattttcagagaaagtaggtaatggaaaagatatctgcacagctcctgtgtttcgtagcaaacctgacttagatggaggctttcttgaaggtgggttctggaaatacaacacaaaaccttcaaatatactcccacattgtggtgataatgacgaagacgaagctgatgagaagcatacaattcaggatgatgttgttgtgtctggccaagatgttgctgctggttttgttaggatgggaatacttccacgaatctgttttctgttggagatggatccatctcctgctttagaagattatcttgtatcggttcttgtagcactagccaggcactccccacaatctgctgatgcaatcttgaattgtccaagacttattcaaagtgttactaagctgttgataaatcaaggatcaatggaaattcgctcctcacagatcagaggggttactctcttgaaggttttgtccaaatacaacagacaaacctgcttgaattttgtgaatcatggagttttccagcaggcattgtggcactggtacagaaaagctggtactattgaggactgggtaagatctggaaaggaaaaatgcaagcttagttcagcaatgatggttgagcagctgcggttttggagaacctgcatctcctatgggttttgtatagctcactttgctgatttctttcctgttttgtgtctgtggcttagtcgtcctgattttaagaaactaagtgaacacaatgttcttgttgagtttagttccgttgctagagagtcatatcttgtcttagctgctctggcacaaaggttaccacttcttcattcagtggagcagcttgccaatcaagatctgggagtttctgccagttatattgagacatgttcttggagccatgttgtcccgatggttgacttagctttatcttggttacatcttaatgatattccctatgtatgttcactaatcagcgagcagaataggaatacagagcacatgttagagatgagttatctgattttggtgatttcttctgtgctaggcatgcttaattcaattttggaaagaatatcaccagatgtcactcctgaggataaaagttacagcttgccctggatacctgattttgtccccaaaattggcctgggcataattagtaatggttttttcagctgttcgaccactgttgctggtagaaatgcagaacatcagcctttttgctgtgcatctttggtgcagggactttgttatatgagatgccatggtaatgttgatgtatcattgtcttccattagctgccttcaaagattggtgcagctatcctggtctgtcgacagagtgatccagggagccacaaaatgttgttccgagtgtttcaatgagtctggaacaggtgaagctggcaaactactagctgaaggtatctccagtttatggcataatgatttgctacacttgctgacttcgcttttgccaatgatttcatcacaatggtccatatcacagaacatagagatgtttggtagaggaggaccagctcctggtgttgggtttggctgggggacatgtggtggagggttttggtctcttaaatgcctacttgcacaattggattcacaattggttgtagaattgatcaaatgtttctcttcagttcaaggaagtcctatcatcctcgatgaaggtgtgaagttagataatgtgactaacacagttgtgacagcttcaaattggatcagttctaccctagggttgtctctgattgctggacctggacaaatctatatgttggagaaggttttcgatatgatttttgaaccttccattctgaagtatctcaaatcatctatacataaatttacctctgacatggaattactgaaaccttttgaatgggacttaaatgaagatgaatatatgctcttcagcagtgttctcaaatcacatttcagatccagatggttagccatcaagaagaagcattcagataaatatgcaggagataatagcagcaccaagatttcaaaaacaccagagatattggagacaattcaagaagaaacagagttgtcagaagctgtaaatcaaccttgcaacacattaatggtagagtgggcgcatcagagactgcctcttcctatccactggattctaagtgcagtttgctgcattgatgatccaaaaggcacactctcaacatcagccaactatattcttgatgtctcaagggctggtcttatcttccttttaggtctggaggccatttcagctaccccgtgccttcatgctcctttgatctggaaaattcatgcactttcggtctctatccgctctagcatgcatttgctacaggaagacagaagtagggatattttctgtgctttacaggaactgtatggcctgcatctgaacaggttataccaaaaattctgtaaaccaaactctatcgaggaagttaagggcgttgtagtgggcacttcagaggaagcgatggagatcagtagccttgaaattctcaggtttcaggagaaaattcatggaagctatactacttttgttgagagcctggttgatcaatttgcagctgtctcatatggagattttgtttttggtcggcaagtggccatttatctgcatagaaaggctgagccagcagtacgtcttgcagcatggaatgcactgtctagtgcgtatgtgcttgaactgttacccccgctagacaattgcattggcaacgccccaggatacttggagcctcttgaggatgatgaaaaaattttggaatcttatgctaaatcatggacgtctggtgtcctggacaaagctttacagcgtgattccatggccttcacattggcaaagcatcacctttcaggctttgtcttccagtccagcgattctggcacaatgctgcgaaaaaaactggtcaaatcgcttatccggtgctatgcacagaagcggcatcatgaggttatgcttaagtgcttcgttcagcaaggcatcgcacaggattccaagagcagtgagcttgaccggagatttgaaatcttgaaggatgcttgtgagatgaactccaacctcgtaggtgaagtccagagactgaaggcatgtcttggccaatgaagccagatatttaagtgtgtcattaacttggcagcgttagttgttgggaaagctcgacaaagtggcccaaaatatgcaactgaggaaactcacggtcggggctagtggttacttttaattttgatgaagggaacgccgagcacgcagcaaccctgagtctaacctggctatggttaggctgctcttagcagagcatgcatatggtcatgtaaacagtagaccacactgtctattgagtgaagtttgaaatagactttatatatagcattaggcttcctttgattcc

SEQ ID NO: 155391 - DNA, 4751 bp, Zea Mays
atggacgcgacgacgaagcggcggcaccagcccggcggcgcgcagcccacacgccgtaaggtcgtggaggaacccttccacaccgcaccccctacacctgccgcggcgtccccctcccgcctcgtcggcgccatcgtcgagaagggctactccgccgccgcaccctcctcggcgccccgaccttccgtcctccccttccccgtcgcccgccaccgctcccacggcccccactgggttcccttggtgaaggacgcccccaaggatgagaccgcggacaacgacgacgagatggacatggatgagacagactaccatcctgtggcagctgctgcagctggtcctgtgaggaggaaggagaagaagggcatggattttagccggtggcgtgagtttgttggcgatgctccccccaagcggaggcaggggaagccagtgcaggccaagaaacagagcgatcagagaattgatgctggggctgtagcttctaaggtaggtggtgtggcagctgaggggagaggattggagggaggtgctatgcggcttgacagtggaaatgctagcgaagggccaggtcccgtgcttttggtttctgatgtcgtgtccaagaagccaatgagtcaggttgaatcgagagatgaattggtgaacacaagtgaggctaggaatttggcatcacaagcagagagtatggacctcgacggcagggagtcatctatggaagcagagatcagcgcagagaacatggctaggttggctgggatgtctgcaggggagattgcagaggcccaagcagatattgtaaataagctgaaccctgcattgctggagatgctgaggcggcggggaagggagaagtctggaggcacgaaggatgtgggtaaggacaagggtctgaaaaactcagggctgcagaagaataaaagggctacaccaggggattggttgactgctggtgaacatactgggcactcctggaaggtgtggagcgaaagagtggagcggatcaggtcttgtaggttcacattagatggagacatattggggttccaatcttctcacgagcaacaagatggcaagaagatgccttcagaaagtgttgctgagcgtgatttccttagaacagaaggtgatcctgcagctgttgggtacacaatcaatgaggcagtggcacttaccaggagcatgcttcctcaaattataggttccggggcagcgtgtgcttgcactgcaacttcttgcttctattctgaatagggcattgcagagccttcataagaccgatctaatggataatgttaaaggaatgaattccaaggataacattgatgactggcaagcagtttggtcctatgcccttgggcctgaaccagaattggtactctccctaaggatggctttggatgataaccatgattctgtagttttgagttgtactaaagtagttaatgttatgctgagctgtgagttcaatgaatcctattttgaattttcagagaaagtaggtaatggaaaagatatctgcacagctcctgtgtttcgtagcaaacctgacttagatggaggctttcttgaaggtgggttctggaaatacaacacaaaaccttcaaatatactcccacattgtggtgataatgacgaagacgaagctgatgagaagcatacaattcaggatgatgttgttgtgtctggccaagatgttgctgctggttttgttaggatgggaatacttccacgaatctgttttctgttggagatggatccatctcctgctttagaagattatcttgtatcggttcttgtagcactagccaggcactccccacaatctgctgatgcaatcttgaattgtccaagacttattcaaagtgttactaagctgttgataaatcaaggatcaatggaaattcgctcctcacagatcagaggggttactctcttgaaggttttgtccaaatacaacagacaaacctgcttgaattttgtgaatcatggagttttccagcaggcattgtggcactggtacagaaaagctggtactattgaggactgggtaagatctggaaaggaaaaatgcaagcttagttcagcaatgatggttgagcagctgcggttttggagaacctgcatctcctatgggttttgtatagctcactttgctgatttctttcctgttttgtgtctgtggcttagtcgtcctgattttaagaaactaagtgaacacaatgttcttgttgagtttagttccgttgctagagagtcatatcttgtcttagctgctctggcacaaaggttaccacttcttcattcagtggagcagcttgccaatcaagatctgggagtttctgccagttatattgagacatgttcttggagccatgttgtcccgatggttgacttagctttatcttggttacatcttaatgatattccctatgtatgttcactaatcagcgagcagaataggaatacagagcacatgttagagatgagttatctgattttggtgatttcttctgtgctaggcatgcttaattcaattttggaaagaatatcaccagatgtcactcctgaggataaaagttacagcttgccctggatacctgattttgtccccaaaattggcctgggcataattagtaatggttttttcagctgttcgaccactgttgctggtagaaatgcagaacatcagcctttttgctgtgcatctttggtgcagggactttgttatatgagatgccatggtaatgttgatgtatcattgtcttccattagctgccttcaaagattggtgcagctatcctggtctgtcgacagagtgatccagggagccacaaaatgttgttccgagtgtttcaatgagtctggaacaggtgaagctggcaaactactagctgaaggtatctccagtttatggcataatgatttgctacacttgctgacttcgcttttgccaatgatttcatcacaatggtccatatcacagaacatagagatgtttggtagaggaggaccagctcctggtgttgggtttggctgggggacatgtggtggagggttttggtctcttaaatgcctacttgcacaattggattcacaattggttgtagaattgatcaaatgtttctcttcagttcaaggaagtcctatcatcctcgatgaaggtgtgaagttagataatgtgactaacacagttgtgacagcttcaaattggatcagttctaccctagggttgtctctgattgctggacctggacaaatctatatgttggagaaggttttcgatatgatttttgaaccttccattctgaagtatctcaaatcatctatacataaatttacctctgacatggaattactgaaaccttttgaatgggacttaaatgaagatgaatatatgctcttcagcagtgttctcaaatcacatttcagatccagatggttagccatcaagaagaagcattcagataaatatgcaggagataatagcagcaccaagatttcaaaaacaccagagatattggagacaattcaagaagaaacagagttgtcagaagctgtaaatcaaccttgcaacacattaatggtagagtgggcgcatcagagactgcctcttcctatccactggattctaagtgcagtttgctgcattgatgatccaaaaggcacactctcaacatcagccaactatattcttgatgtctcaagggctggtcttatcttccttttaggtctggaggccatttcagctaccccgtgccttcatgctcctttgatctggaaaattcatgcactttcggtctctatccgctctagcatgcatttgctacaggaagacagaagtagggatattttctgtgctttacaggaactgtatggcctgcatctgaacaggttataccaaaaattctgtaaaccaaactctatcgaggaagttaagggcgttgtagtgggcacttcagaggaagcgatggagatcagtagccttgaaattctcaggtttcaggagaaaattcatggaagctatactacttttgttgagagcctggttgatcaatttgcagctgtctcatatggagattttgtttttggtcggcaagtggccatttatctgcatagaaaggctgagccagcagtacgtcttgcagcatggaatgcactgtctagtgcgtatgtgcttgaactgttacccccgctagacaattgcattggcaacgccccaggatacttggagcctcttgaggatgatgaaaaaattttggaatcttatgctaaatcatggacgtctggtgtcctggacaaagctttacagcgtgattccatggccttcacattggcaaagcatcacctttcaggctttgtcttccagtccagcgattctggcacaatgctgcgaaaaaaactggtcaaatcgcttatccggtgctatgcacagaagcggcatcatgaggttatgcttaagtgcttcgttcagcaaggcatcgcacaggattccaagagcagtgagcttgaccggagatttgaaatcttgaaggatgcttgtgagatgaactccaacctcgtaggtgaagtccagagactgaaggcatgtcttggccaatgaagccagatatttaagtgtgtcattaacttggcagcgttagttgttgggaaagctcgacaaagtggcccaaaatatgcaactgaggaaactcacggtcggggctagtggttacttttaattttgatgaagggaacgccgagcacgcagc

SEQ ID NO: 155392 - DNA, 876 bp, Zea Mays
cctctctatccctccccacgcagaagccgtcccctgcccctcccatggagcactagtcgcccagccgagctctcggcaccggaccccctccccacaccagccatcttccacagccgcccccagccatctccctggtggccaacctcgccactctcgccatggctgcactcgtcggcatcacttgccacgacaccctccatggccgagctcctcccctacggctcgtcttccccacgacgccctccctccattccttttcctccatggccgacgcccccatctccactagccagcgcccctccctcatcctcttcctcaagctgagctcgccctagctccaacttcaaccatggacgacgacctccccttcctgctgcacgccagcatcctccccatgccagctgcacgcgcgccgtgaccactcctctccctacagtgctgctcgccctggctctaacctctcccatagacgccacaacccatactcccaaggacatggagcagcaataaccaagaaactgctttatgtcgcgcccacgacgtgttcgacggaatatcgcagcggactacacccgatctgtgcagccctgtcgcgacctcgtcgaatcctggtgaggacccgtttctccttatattcattcctcgccagtattaatacccaaaatcaagttattagatgctaatgttatctatatatgtgtgtgtaatgtgcgagatgtgaggaattccatatttgtgtggcgaggcaagccgtgcgacaagtgctagatgtttgatgaaatgattgaatcggagagtgtcactgtttgtgtggattatcaagtcaggcaaataacggtcacttggtcgtggaagggcttcttattgcaatcatag

SEQ ID NO: 155393 - DNA, 1784 bp, Zea Mays
acttcagcacacatcacacagaggtagtgcctacccgcacggccgcacggcagttcgtcaccgtggtggcgtatccgccacaagcccactgcccacaggcccactgctgccgtctcgcctcagggctcaggctgcaggctgacgacgccaacgccgcccctcccggccttggcccaagtcgtcacctcctcgcccctcgcccacggctgcggccacattgtcgccggcttgccaacacgcccgtgtagatcggccgccgcatcgcgccacgccgccgtttcgatcccccgccagggcagcaggcaggaatctggcgatgaagagtaagaaaagtgtgcacggatcatcatgcaagaaggctaagttgtttgacggcctaattggtagacatggttctgaaatagatccatgttataaactttttcttgaacatttaagcaaagatcggaatacatatgtccttgatgtaccaaagggtgaccacggcttgcctttttctgtacgttatgaggaggactatacgtcctatggaaatactaagagcagaagtagtccaaattttcccaaccattcacggcgcacaagttggggcattccagatggcaaacagcctgatgtaaaagctgtcaaggctgccagcagaaatatgtgttgctccttttcaccaaagagatcatatgtgaagaagaagaccacgacctcactagtagatgaatcttatgagttatttctgagccttgtgaagttcaaggatggtttcatggttattgaaccagaaccaggtgtcaccattgtatatgagcgagaagaagatatgccagctggctatgatgaatggagaactggcagttccacaaatgaactgtctttggtgtctccacttgaaaacacggagggagactacaccatgcaaagatatgattatggccttgcaccggctaacaaaatttcttctgaacatgaaatggctgcaccttcttcagagaacattgctggtcaggatattatttgcacagatgagcatggccttgtactttatgctgaaccatctgatttaaatgtaagattcttttgcataatttctggtcctcttcaaatgctgctgcctgttatatagctgcctttttgcccaggcatgtgaagatgaacaagcaacacctcttgctatcagctacggtggttcatctacatttgatgaaaaactcaatgctgttttaagtcaaccatatgatcaaaacgaatacgaagagttgtggagaaaagcgactgaccggaagcctgtgagcagacaaagacacttgcgaagtgcatcaaagcgctatgttacagaggcaatcgggctgtcatatctcgattattaccctgatctagccgtacaaataaagtcatctgatcgtgataagagactgagcctactacgaaggttcttcttctggttggagaacttgtgccatgagggagcctacatgccctggatctccaaacctctagcttgcaaccccatttcaccggatggatgaatatgaaccgacgcccactctcatcctcaagacacacgaagatgagccctaggggtgagcggttagcagagatttgcttgcagcatccctgcatctctgatgctacttgactgctccttgtttcgatgcgatgcaaagctgagtctgtaatcttcagtgtctatgcagtactgcagttatttttctgcaggctaaattatacaacatggcaacaaatacagcacggatattgcaaaaatggtactgctagcgttttatcgttac

SEQ ID NO: 155394 - DNA, 2783 bp, Zea Mays
acttcagcacacatcacacagaggtagtgcctacccgcacggccgcacggcagttcgtcaccgtggtggcgtatccgccacaagcccactgcccacaggcccactgctgccgtctcgcctcagggctcaggctgcaggctgacgacgccaacgccgcccctcccggccttggcccaagtcgtcacctcctcgcccctcgcccacggctgcggccacattgtcgccggcttgccaacacgcccgtgtagatcggccgccgcatcgcgccacgccgccgtttcgatcccccgccagggcagcaggcaggaatctggcgatgaagagtaagaaaagtgtgcacggatcatcatgcaagaaggctaagttgtttgacggcctaattggtagacatggttctgaaatagatccatgttataaactttttcttgaacatttaagcaaagatcggaatacatatgtccttgatgtaccaaagggtgaccacggcttgcctttttctgtacgttatgaggaggactatacgtcctatggaaatactaagagcagaagtagtccaaattttcccaaccattcacggcgcacaagttggggcattccagatggcaaacagcctgatgtaaaagctgtcaaggctgccagcagaaatatgtgttgctccttttcaccaaagagatcatatgtgaagaagaagaccacgacctcactagtagatgaatcttatgagttatttctgagccttgtgaagttcaaggatggtttcatggttattgaaccagaaccaggtgtcaccattgtatatgagcgagaagaagatatgccagctggctatgatgaatggagaactggcagttccacaaatgaactgtctttggtgtctccacttgaaaacacggagggagactacaccatgcaaagatatgattatggccttgcaccggctaacaaaatttcttctgaacatgaaatggctgcaccttcttcagagaacattgctggtcaggatattatttgcacagatgagcatggccttgtactttatgctgaaccatctgatttaaatgcatgtgaagatgaacaagcaacacctcttgctatcagctacggtggttcatctacatttgatgaaaaactcaatgctgttttaagtcaaccatatgatcaaaacgaatacgaagagttgtggagaaaagcgactgaccggaagcctgtgagcagacaaagacacttgcgaagtgcatcaaagcgctatgttacagaggcaatcgggctgtcatatctcgattattaccctggtatagttacaaagcttggtaggggaacttgtttgtcctaacgtgttaattgaacacctttctatccatctccggccactaattcctgctatttgaatgagttgtaataagtagtcttagtttacaaaaggaaaaggcagattcctgtaatttaaccaggtggttaacaagcatttagtaaccaattgttcattttccagtgaactgcatcagccaagtgacatatgctttcatcatataactcttaccacaaaaggaaactctagaggcctcagtctttcctccatcatatgaatcctttcatccatttgaaaatgaactaagtcccacaataacatgatatatagcaaccacagagaatatgaccttgaacttttaggtagctttatcttcgtcctagttttatttaccatagtgtttttatggtatacatgtaatggagatacgagtggcctttctgctcgcaactgagatctagatttttatatatgtgatgccttggctcatgcattttgtaatgcatcatgtcatgattctatagcagtattgaaggccatgctttcaatgttgtgatgcagaactttgtattaagtttccaccaatgaaatagattgatagatttcattttagtacttctccagttgatagatttctttttagtacttctccatctagactcatctttagttaatcatgcagatctagccgtacaaataaagtcatctgatcgtgataagagactgagcctactacgaaggttcttcttctggttggaggtgatctaagtttaccatccttttttcaacttcccagtgcgtaaggactctgctggtgaatttgaaaattagtgcatctgaaattattcacatgtgcttttcttttcgagatagcaaaatgctgtgaagagatttcacccaatcagtgaaaaaatatgtttcttgctgatggctacagtggtttgaaaacaaatcgtccataatatgttggtttagtggtttgcctgcttcatggtgctgtgtaagggaggtcaggaggtgtgtgtggtcaatgcctcattctttcagatctctggtgactgacccatgaatgcctgggcagtaggcagaaccaagttaaagaaaatgtgatattctccatgcctttggactaaagttaaatttattctcattttgttctgcagaacttgtgccatgagggagcctacatgccctggatctccaaacctctagcttgcaaccccatttcaccggatggatgaatatgaaccgacgcccactctcatcctcaagacacacgaagatgagccctaggggtgagcggttagcagagatttgcttgcagcatccctgcatctctgatgctacttgactgctccttgtttcgatgcgatgcaaagctgagtctgtaatcttcagtgtctatgcagtactgcagttatttttctgcaggctaaattatacaacatggcaacaaatacagcacggatattgc

SEQ ID NO: 155395 - DNA, 1680 bp, Zea Mays
acttcagcacacatcacacagaggtagtgcctacccgcacggccgcacggcagttcgtcaccgtggtggcgtatccgccacaagcccactgcccacaggcccactgctgccgtctcgcctcagggctcaggctgcaggctgacgacgccaacgccgcccctcccggccttggcccaagtcgtcacctcctcgcccctcgcccacggctgcggccacattgtcgccggcttgccaacacgcccgtgtagatcggccgccgcatcgcgccacgccgccgtttcgatcccccgccagggcagcaggcaggaatctggcgatgaagagtaagaaaagtgtgcacggatcatcatgcaagaaggctaagttgtttgacggcctaattggtagacatggttctgaaatagatccatgttataaactttttcttgaacatttaagcaaagatcggaatacatatgtccttgatgtaccaaagggtgaccacggcttgcctttttctgtacgttatgaggaggactatacgtcctatggaaatactaagagcagaagtagtccaaattttcccaaccattcacggcgcacaagttggggcattccagatggcaaacagcctgatgtaaaagctgtcaaggctgccagcagaaatatgtgttgctccttttcaccaaagagatcatatgtgaagaagaagaccacgacctcactagtagatgaatcttatgagttatttctgagccttgtgaagttcaaggatggtttcatggttattgaaccagaaccaggtgtcaccattgtatatgagcgagaagaagatatgccagctggctatgatgaatggagaactggcagttccacaaatgaactgtctttggtgtctccacttgaaaacacggagggagactacaccatgcaaagatatgattatggccttgcaccggctaacaaaatttcttctgaacatgaaatggctgcaccttcttcagagaacattgctggtcaggatattatttgcacagatgagcatggccttgtactttatgctgaaccatctgatttaaatgcatgtgaagatgaacaagcaacacctcttgctatcagctacggtggttcatctacatttgatgaaaaactcaatgctgttttaagtcaaccatatgatcaaaacgaatacgaagagttgtggagaaaagcgactgaccggaagcctgtgagcagacaaagacacttgcgaagtgcatcaaagcgctatgttacagaggcaatcgggctgtcatatctcgattattaccctgatctagccgtacaaataaagtcatctgatcgtgataagagactgagcctactacgaaggttcttcttctggttggagaacttgtgccatgagggagcctacatgccctggatctccaaacctctagcttgcaaccccatttcaccggatggatgaatatgaaccgacgcccactctcatcctcaagacacacgaagatgagccctaggggtgagcggttagcagagatttgcttgcagcatccctgcatctctgatgctacttgactgctccttgtttcgatgcgatgcaaagctgagtctgtaatcttcagtgtctatgcagtactgcagttatttttctgcaggctaaattatacaacatggcaacaaatacagcacggatattgc

SEQ ID NO: 155396 - DNA, 2038 bp, Zea Mays
acttcagcacacatcacacagaggtagtgcctacccgcacggccgcacggcagttcgtcaccgtggtggcgtatccgccacaagcccactgcccacaggcccactgctgccgtctcgcctcagggctcaggctgcaggctgacgacgccaacgccgcccctcccggccttggcccaagtcgtcacctcctcgcccctcgcccacggctgcggccacattgtcgccggcttgccaacacgcccgtgtagatcggccgccgcatcgcgccacgccgccgtttcgatcccccgccagggcagcaggcaggcaggtgccctgctcttccagcgcccaggcagaatcacttgcatttttatcttttctcattcaagttctgatcttgcgtttctttagtgactttactatgccacctgttgacggcctcaagcgtaatgttggttaaccactgaatgcttctgtttcctacagaaatccctgtcctagaaattcatttcgtacaaacaaaataactgaaacggaaagaagtggtaacttaggttccgtttttcataatatttctatgcttaataaattcgctccaatttacctcccccagctcagggtagcatgtgtcagttatgatacattgaggtttacgttctcatcacattatttggtaacattggatcgtctgttgctgttggctaccaatatacgaatctggcgatgaagagtaagaaaagtgtgcacggatcatcatgcaagaaggctaagttgtttgacggcctaattggtagacatggttctgaaatagatccatgttataaactttttcttgaacatttaagcaaagatcggaatacatatgtccttgatgtaccaaagggtgaccacggcttgcctttttctgtacgttatgaggaggactatacgtcctatggaaatactaagagcagaagtagtccaaattttcccaaccattcacggcgcacaagttggggcattccagatggcaaacagcctgatgtaaaagctgtcaaggctgccagcagaaatatgtgttgctccttttcaccaaagagatcatatgtgaagaagaagaccacgacctcactagtagatgaatcttatgagttatttctgagccttgtgaagttcaaggatggtttcatggttattgaaccagaaccaggtgtcaccattgtatatgagcgagaagaagatatgccagctggctatgatgaatggagaactggcagttccacaaatgaactgtctttggtgtctccacttgaaaacacggagggagactacaccatgcaaagatatgattatggccttgcaccggctaacaaaatttcttctgaacatgaaatggctgcaccttcttcagagaacattgctggtcaggatattatttgcacagatgagcatggccttgtactttatgctgaaccatctgatttaaatgcatgtgaagatgaacaagcaacacctcttgctatcagctacggtggttcatctacatttgatgaaaaactcaatgctgttttaagtcaaccatatgatcaaaacgaatacgaagagttgtggagaaaagcgactgaccggaagcctgtgagcagacaaagacacttgcgaagtgcatcaaagcgctatgttacagaggcaatcgggctgtcatatctcgattattaccctgatctagccgtacaaataaagtcatctgatcgtgataagagactgagcctactacgaaggttcttcttctggttggagaacttgtgccatgagggagcctacatgccctggatctccaaacctctagcttgcaaccccatttcaccggatggatgaatatgaaccgacgcccactctcatcctcaagacacacgaagatgagccctaggggtgagcggttagcagagatttgcttgcagcatccctgcatctctgatgctacttgactgctccttgtttcgatgcgatgcaaagctgagtctgtaatcttcagtgtctatgcagtactgcagttatttttctgcaggctaaattatac

SEQ ID NO: 155397 - DNA, 930 bp, Zea Mays
atggggaagaaccaggcgtacaaggcggtgcagcgggcacgactggggtcctcgtacggcacgccgggcgccgccgacgcccccgaagacagcatggtcaagtacccggagaacttctttcttctaaggggcaaccatgaatgcgcatcagtaaatcgcatctatggtttttatgatgagtgcaaacgcagattcagtgtaaagctgtggaaaacattcacagactgttttaactgcttgctagtgtcagcattgatagatgaaaagattctctgtatgcatggtggtctatctctggagttgaacaagcttgagcaaatactcaacctgaatcgccccacagacatgtctgatactggattgctctgtgatcttctttggtctcatccttccaatgaagcaacgggctgggccatcaatgatcgaggtgtttcattcacatttggtcctgataaagtttcagaatttcttgagaagcatgatttggaccttatctgccgagcacatcaggttgttgtgttcttaaagatgggaccaagttatggttatcgaggcagagtgatgcttgcttttgaagataatggatcctcaaaaattggagtccgatttgacaagcagatccctgatggctgttatatttccacagctgaatcacttcgcccagacttttctgctggtgaagaagttgagaggctagctatgaccgagctaatagaggatgaagctctacttacagattggaagcagcagttggatcgtggtgttgaaacccttaaagccaaatcaaacattggtagcattcgcacgagagaggtaggaacaacaatggtcgttgttgctgcacaaacaaaggctattgctggtaacttttacttgttatattatttaagcatattatatagactagacatttgctactttgctttctga

SEQ ID NO: 155398 - DNA, 332 bp, Zea Mays
ttacgcgtgtgtgttctaacatatatttcatctcttctcgcagggcgtccttgttgctcggcctataagaaaaaatgatttggtccagtaattgactagatttttcataaattaaactaatgattatacaaactagttattataatttttttaccagttcatgacccacacgagcataactcttgctgccagctgcatgcgacatagtcagctttgaacggttatctttacctctgtttgaatgaacctacaacataaatatgaatctatcaaaacaataatacaaattcattcatacaatagtttaatgaaggtttatatctcaaaaaaga

SEQ ID NO: 155399 - DNA, 1914 bp, Zea Mays
gtggtccaaacaaccaaacagccgctatatagcggactaggggctcgttggagagaaaacttattacaaccgaccaacgcgctttgtaacgcctccgctgcaatcagcccccgcggcgagcttgccctgcccctgattgctagttctcgccgttacgtaaggcttcttggccttgcgtcctccgtctttcgttgctgatacatcgaggtattaaagaagctgcctggttccgggcagcagaggtcgccgccgcctgcagcaatggccgacttctcctggctcacggtgcttggcttcctattcctcaccttcaactcaggcatggcgatttatcggtccaacggtgacgccggctccgtcgctttcgtcgtggtatcttatctcgacctggtggccctgttcgcctgcttgcgctactacgagcagttggatcagcagcactcccaaaagcgcgcgagggtcaaggctggggtttggagcctcacgaccctccttactatcatgttcagttacaaggtggctgagattatgcccctgccagtcaaacttgttgtctggtcgatggcagccgctaccacctgtggcggcttctacgctttcttcgtccacagcgagaagcctgtcatgccagcggtggcgccacggcccgccgcggccaaggatgcagcctccaactaggttcgtttgccaccacaaggcgcatactgccggccttggttcggcaccgcgcgttagatcccagggccaactaggttgttctctaattcctaatttcttggccttttctcttccactctccgccattttagctgtcgcctcggttgttttagcttgccggcgtggacagactggcagatctggagctcggcgcgaccagatccggtgctgctgtgcccgatggcagaggagatctctctggtttactctgctaagagtcaaagaggagctgatgacgacaactaagcttgggttaccgataattgagcctgttctctgcacgagaagaaatttccggcctcacctagtactaataagtatgctggatagtcccccagcacgggagttaattgtatcaagagaagtggagaccaagggcagagtagaactacagaggatatctttgtatatggaggctacatgtgaacaagaaaggagaggaggaagactgtatagatctgaagaacctaaggagaaacaatcagagtacttgctggaacacatatatcttccatgataaaagttagatttcttgtttggtgctcatgcatgggttccatatgttcttcccgtcttattagaacatatctattggactaccatgcataaaaagccgtcgtttcataaactattgggactatacggcaccaatgaagctattgatgctggccggcaagctgacagcgaggtgaaagcttttcaaaacgatattccgagtggaagagaaaagaaaataaaagaaatagcaggttattttagaaaaaaatagttggcccatatgtaacgcgcggtagctttaagattattatgtccagcagcttattcatatattatacatatattcaaatttcactctgtgaatagtagtctaaaatacagtagtgttttgagtaaactatggataaactgctggacaaggtctaagataagtgctgcgtggtggcaacaaacgacacttagtcttgtttggtggcaatgatattggaggggctaaagttttttcgctcctaaacaagctcctaaacaagctcctaagaatcttacgtgttatgttgcattatggaatatctatgtatctgcaaactctctgtagtctgtatgtacctcggatgtgctctatgtggctttgtaattctgaacggaggaagtaataataagataaatggatggcgtaacaagataagttgctttgtgcaa

SEQ ID NO: 155400 - DNA, 1137 bp, Zea Mays
gtggtccaaacaaccaaacagccgctatatagcggactaggggctcgttggagagaaaacttattacaaccgaccaacgcgctttgtaacgcctccgctgcaatcagcccccgcggcgagcttgccctgcccctgattgctagttctcgccgttacgtaaggcttcttggccttgcgtcctccgtctttcgttgctgatacatcgaggtattaaagaagctgcctggttccgggcagcagaggtcgccgccgcctgcagcaatggccgacttctcctggctcacggtgcttggcttcctattcctcaccttcaactcaggcatggcgatttatcggtccaacggtgacgccggctccgtcgctttcgtcgtggtatcttatctcgacctggtggccctgttcgcctgcttgcgctactacgagcagttggatcagcagcactcccaaaagcgcgcgagggtcaaggctggggtttggagcctcacgaccctccttactatcatgttcagttacaaggtggctgagattatgcccctgccagtcaaacttgttgtctggtcgatggcagccgctaccacctgtggcggcttctacgctttcttcgtccacagcgagaagcctgtcatgccagcggtggcgccacggcccgccgcggccaaggatgcagcctccaactaggttcgtttgccaccacaaggcgcatactgccggccttggttcggcaccgcgcgttagatcccatatgtaacgcgcggtagctttaagattattatgtccagcagcttattcatatattatacatatattcaaatttcactctgtgaatagtagtctaaaatacagtagtgttttgagtaaactatggataaactgctggacaaggtctaagataagtgctgcgtggtggcaacaaacgacacttagtcttgtttggtggcaatgatattggaggggctaaagttttttcgctcctaaacaagctcctaaacaagctcctaagaatcttacgtgttatgttgcattatggaatatctatgtatctgcaaactctctgtagtctgtatgtacctcggatgtgctctatgtggctttgtaattctgaacggaggaagtaataataagataaatggatggcgt

SEQ ID NO: 155401 - DNA, 1364 bp, Zea Mays
gtggtccaaacaaccaaacagccgctatatagcggactaggggctcgttggagagaaaacttattacaaccgaccaacgcgctttgtaacgcctccgctgcaatcagcccccgcggcgagcttgccctgcccctgattgctagttctcgccgttacgtaaggcttcttggccttgcgtcctccgtctttcgttgctgatacatcgaggcatggcgatttatcggtccaacggtgacgccggctccgtcgctttcgtcgtggtatcttatctcgacctggtggccctgttcgcctgcttgcgctactacgagcagttggatcagcagcactcccaaaagcgcgcgagggtcaaggctggggtttggagcctcacgaccctccttactatcatgttcagttacaaggtggctgagattatgcccctgccagtcaaacttgttgtctggtcgatggcagccgctaccacctgtggcggcttctacgctttcttcgtccacagcgagaagcctgtcatgccagcggtggcgccacggcccgccgcggccaaggatgcagcctccaactaggttcgtttgccaccacaaggcgcatactgccggccttggttcggcaccgcgcgttagatcccagggccaactaggttgttctctaattcctaatttcttggccttttctcttccactctccgccattttagctgtcgcctcggttgttttagcttgccggcgtggacagactggcagatctggagctcggcgcgaccagatccggtgctgctgtgcccgatggcagaggagatctctctggtttactctgctaagagtcaaagaggagctgatgacgacaactaagcttgggttaccgataattgagcctgttctctgcacgagaagaaatttccggcctcacctagtactaataagtatgctggatagtcccccagcacgggagttaattgtatcaagagaagtggagaccaagggcagagtagaactacagaggatatctttgtatatggaggctacatgtgaacaagaaaggagaggaggaagactgtatagatctgaagaacctaaggagaaacaatcagagtacttgctggaacacatatatcttccatgataaaagttagatttcttgtttggtgctcatgcatgggttccatatgttcttcccgtcttattagaacatatctattggactaccatgcataaaaagccgtcgtttcataaactattgggactatacggcaccaatgaagctattgatgctggccggcaagctgacagcgaggtgaaagcttttcaaaacgatattccgagtggaagagaaaagaaaataaaagaaatagcaggttattttag

SEQ ID NO: 155402 - DNA, 2086 bp, Zea Mays
atggtcacacggcggctcccaaaccctaaacagcggtggtgcccctacgcttcagcctcgactcagtattcccccttccccgcttcgacaagtctcgtcccccgcccccttattccattacaagcaactccgccggtgccaccgctgctggtgggacaggccgccgccgccgctgctggtgggacctaccgcctcgcgctccgcatccagcgccgcctcatcccgcccaaccaccccaggatacgggacttcgtctacaggtactgccttcgccgagccccgctgtcgtgcgtccgcgctcaggacgccgtcggtcactgccagccaaacaggatcagcgcgagcagccagtgcaggcacatctcctactcctacgccccgttcccgtcggtcactgccaggaggaagggtgtcttccgcgaggacattgcacagctgatgggaagtgcggacataacagtcaagatgagctacttaaaagtgaggataattcaaaggagcgtggtatcccgagaatatgaacactccagagatgcaatatttgagtggtacttccaaacagtggccactaaccatcatggtgaggatgcatcatcagtagcagtcagaatatccatcttgcagtttttgactgaaaagaaagatttaacaattacattgatcaggaaccggattctcccattatattctttggatccttgcagcccatatttgatttcaatggctaattgggttattggtcagcttgcgatatgcctaccagaggacatgagttctagtatttatcagtccttaatgaaggcgttgaccatggagtatgtggaggacataacttgttatccggtttgtgcctctgcttctggtgctattgcagaactcatcgagaatagttatgttccacctgactggctcattcttctgcaagtggttctgaaaagaataagtactggagatgaaaatgagtctgctcttctgttcaagcttctgggcacaatagttgagggtggacaggaaaaagttgtttcatattcctgaaattgtatccaacattgcgagtactataatggagctcctgccccctgtcccagatccttggcctcaggttgttgaacagggtttcacagccctcgtagcaatggtgcaagcttgggagagctctgcaccagatgaaaacaagacacctaaaaagaggttctggcagtcaggccagtctgctattgcccaaacaatttcattactgttacaaaaagcttggttgtttcaagctgacaatatggagggctctgcattaccacctctgtcatgcgtaaacgatgcttctgtgttacttgagtttgtcatgagttctgtcacttgcatggaagaaactgaaagtctgaaggtctttgagctggtagctacatgggctaacgctgttgccaactgggactcctgggagatggaggatcagggtgttttcaacacaattaaagaagctgtcaatttccaccagagatttgacctcgacggtctcttcctgaaaacgcactttgtgagatgtcattccactaggtattcattctgtcatggttctgttttaatacacgcaggtcactcaagcagatctaaagttattcttagtccatatatggtgaggttggtcgttctttactccaaacacaatctcccttctgtatagctaaaagtttgcagaaatggcaccatcaagatcggtctggagaccaacaagatcatggacttcatcaagtttgatgtcggcaacgtggtcatgatgaccggtgggaggaacaccaggcgtgtaggagtgatcaagaacagggagaagcacaagggcaacttcgagaccatccacgtgctgcttagagctttttgctatgtctagttttctcctatttgttgtataggaaaacatagaatggaattcaaatttggtggccgcaaaatatggagacttgaattcatataaagttaggcttaacattagtgcaaacaattgtattttagtttagatttagagtacacttatgtatgtgttgtttgacaatgcttatttatgatatattgaatggtacttatttatattata

SEQ ID NO: 155403 - DNA, 1956 bp, Zea Mays
atggtcacacggcggctcccaaaccctaaacagcggtggtgcccctacgcttcagcctcgactcagtattcccccttccccgcttcgacaagtctcgtcccccgcccccttattccattacaagcaactccgccggtgccaccgctgctggtgggacaggccgccgccgccgctgctggtgggacctaccgcctcgcgctccgcatccagcgccgcctcatcccgcccaaccaccccaggatacgggacttcgtctacaggtactgccttcgccgagccccgctgtcgtgcgtccgcgctcaggacgccgtcggtcactgccagccaaacaggatcagcgcgagcagccagtgcaggcacatctcctactcctacgccccgttcccgtcggtcactgccaggaggaagggtgtcttccgcgaggacattgcacagctgatgggaagtgcggacataacagtcaagatgagctacttaaaagtgaggataattcaaaggagcgtggtatcccgagaatatgaacactccagagatgcaatatttgagtggtacttccaaacagtggccactaaccatcatggtgaggatgcatcatcagtagcagtcagaatatccatcttgcagtttttgactgaaaagaaagatttaacaattacattgatcaggaaccggattctcccattatattctttggatccttgcagcccatatttgatttcaatggctaattgggttattggtcagcttgcgatatgcctaccagaggacatgagttctagtatttatcagtccttaatgaaggcgttgaccatggagtatgtggaggacataacttgttatccggtttgtgcctctgcttctggtgctattgcagaactcatcgagaatagttatgttccacctgactggctcattcttctgcaagtggttctgaaaagaataagtactggagatgaaaatgagtctgctcttctgttcaagcttctgggcacaatagttgagggtggacaggaaaaagttgtttcatattcctgaaattgtatccaacattgcgagtactataatggagctcctgccccctgtcccagatccttggcctcaggttgttgaacagggtttcacagccctcgtagcaatggtgcaagcttgggagagctctgcaccagatgaaaacaagacacctaaaaagaggttctggcagtcaggccagtctgctattgcccaaacaatttcattactgttacaaaaagcttggttgtttcaagctgacaatatggagggctctgcattaccacctctgtcatgcgtaaacgatgcttctgtgttacttgagtttgtcatgagttctgtcacttgcatggaagaaactgaaagtctgaaggtctttgagctggtagctacatgggctaacgctgttgccaactgggactcctgggagatggaggatcagggtgttttcaacacaattaaagaagctgtcaatttccaccagagatttgacctcgacggtctcttcctgaaaacgcactttgtgagatgtcattccactagctaaaagtttgcagaaatggcaccatcaagatcggtctggagaccaacaagatcatggacttcatcaagtttgatgtcggcaacgtggtcatgatgaccggtgggaggaacaccaggcgtgtaggagtgatcaagaacagggagaagcacaagggcaacttcgagaccatccacgtgctgcttagagctttttgctatgtctagttttctcctatttgttgtataggaaaacatagaatggaattcaaatttggtggccgcaaaatatggagacttgaattcatataaagttaggcttaacattagtgcaaacaattgtattttagtttagatttagagtacacttatgtatgtgttgtttgacaatgcttatttatgatatattgaatggtacttatttatatt

SEQ ID NO: 155404 - DNA, 1409 bp, Zea Mays
atggtcacacggcggctcccaaaccctaaacagcggtggtgcccctacgcttcagcctcgactcagtattcccccttccccgcttcgacaagtctcgtcccccgcccccttattccattacaagcaactccgccggtgccaccgctgctggtgggacaggccgccgccgccgctgctggtgggacctaccgcctcgcgctccgcatccagcgccgcctcatcccgcccaaccaccccaggatacgggacttcgtctacaggtactgccttcgccgagccccgctgtcgtgcgtccgcgctcaggacgccgtcggtcactgccagccaaacaggatcagcgcgagcagccagtgcaggcacatctcctactcctacgccccgttcccgtcggtcactgccaggaggaagggtgtcttccgcgaggacattgcacagctgatgagtagtggatcaacattattcaaaattttgctcatgacgtctgatatgtggacagttgccattcaagttttactctatcatcaataggtgaagattcctgatccagaatacttgtgtaagattattaacatgttacccaataataatcttacataatttggcccaacccaaagatacgttaatttaaactccctagattattttgtggaatcccaacagagtttattcatttgcttgtactctatgaagtggaagttcttgagatgccaaaaagcagggaagtgcggacataacagtcaagatgagctacttaaaagtgaggataattcaaaggagcgtggtatcccgagaatatgaacactccagagatgcaatatttgagtggtacttccaaacagtggccactaaccatcatggtgaggatgcatcatcagtagcagtcagaattattttggtgttttgatggcatatggaggcctccaagatgaaccggattctcccattatattctttggatccttgcagcccatatttgatttcaatggctaattgggttattggtcagcttgcgatatgcctaccagaggacatgagttctagtatttatcagtccttaatgaaggcgttgaccatggagtatgtggaggacataacttgttatccggtttgtgcctctgcttctggtgctattgcagaactcatcgagaatagttatgttccacctgactggctcattcttctgcaagtggttctgaaaagaataagtactggagatgaaaatgagtctgctcttctgttcaagcttctgggcacaatagttgagggtggacaggaaaaagttgtttcatattcctgaaattgtatccaacattgcgagtactataatggagctcctgccccctgtcccagatccttggcctcaggtagtagtgcatatttcttctgtgtggtcaatattttggtacttt

SEQ ID NO: 155405 - DNA, 1393 bp, Zea Mays
atggtcacacggcggctcccaaaccctaaacagcggtggtgcccctacgcttcagcctcgactcagtattcccccttccccgcttcgacaagtctcgtcccccgcccccttattccattacaagcaactccgccggtgccaccgctgctggtgggacaggccgccgccgccgctgctggtgggacctaccgcctcgcgctccgcatccagcgccgcctcatcccgcccaaccaccccaggatacgggacttcgtctacaggtactgccttcgccgagccccgctgtcgtgcgtccgcgctcaggacgccgtcggtcactgccagccaaacaggatcagcgcgagcagccagtgcaggcacatctcctactcctacgccccgttcccgtcggtcactgccaggaggaagggtgtcttccgcgaggacattgcacagctgatgagtagtggatcaacattattcaaaattttgctcatgacgtctgatatgtggacagttgccattcaagttttactctatcatcaataggtgaagattcctgatccagaatacttgtgtaagattattaacatgttacccaataataatcttacataatttggcccaacccaaagatacgttaatttaaactccctagattattttgtggaatcccaacagagtttattcatttgcttgtactctatgaagtggaagttcttgagatgccaaaaagcagggaagtgcggacataacagtcaagatgagctacttaaaagtgaggataattcaaaggagcgtggtatcccgagaatatgaacactccagagatgcaatatttgagtggccactaaccatcatggtgaggatgcatcatcagtagcagtcagaattattttggtgttttgatggcatatggaggcctccaagatgaaccggattctcccattatattctttggatccttgcagcccatatttgatttcaatggctaattgggttattggtcagcttgcgatatgcctaccagaggacatgagttctagtatttatcagtccttaatgaaggcgttgaccatggagtatgtggaggacataacttgttatccggtttgtgcctctgcttctggtgctattgcagaactcatcgagaatagttatgttccacctgactggctcattcttctgcaagtggttctgaaaagaataagtactggagatgaaaatgagtctgctcttctgttcaagcttctgggcacaatagttgagggtggacaggaaaaagttgtttcatattcctgaaattgtatccaacattgcgagtactataatggagctcctgccccctgtcccagatccttggcctcaggtagtagtgcatatttcttctgtgtggtcaatattttggtacttt

SEQ ID NO: 155406 - DNA, 626 bp, Zea Mays
ggcgtcccacaacgggatgctggactccaccaagccgctgcccatcaccttcttctggatcgcgttccagtacctgttcctgggttccgcggacctgttcacgctggcggggctgctcgagttcttcttcagcgaggcgccgccgcggatgagatccctggcgacgtcgctgtcgtgggcgtcgctggcgctgggatattacctcagctcggtgctggtgtccatcgtcaacagcgcgacagggcgcggcgaccaccggccgtggctgcagggtgccagcctgaaccactaccacctcgagaggttctactgggtcatgtgcgtgctcagcaccatcaactacctcttcttcctgttcttggccgtcaggtacaagtacagaaacgcgggggtcatcaaaggctaatgccatcttcatatggccagtcggcgttgccattaatccccgtggtcttgagcaatgctgggtgtaactaactgtttatataggtggaaagcagagggttgaagaaaatgtaggttaattttctgcaggatgtgaggaatgatggtggtttatgaagctgtaatggatttggttgattggttcaacaagtaaatcaacaagagaatcggatgtccaaacc

SEQ ID NO: 155407 - DNA, 918 bp, Zea Mays
taaatacaccaccagcccacggctgcccagctctctctgactctctctcgcgtcgggcacgcagtcgcacaagtagtgaactcaaacgggatctcctgctctgcctccctcgtcttcctctgcccgtgcgcgtttcagagcacgtacggagagggcgagcagcagcttgcggccgggcaccatcatggaggacgtcgcgccgggtgcggagccgtgggaggggtacgtggactggaggaaccggccggcgaccaggtcccggcacggcggcatggccgccgcctccttcgtcctcgtggtggaggtgctggagaacctggcgttcctggcgaacgccagcaacctggtgacctacctgatggggttcatgcactactcgccgtcgcagtcggccacggcggtcaccaacttcatgggcacggccttcctgctcgcgctcctcggcggcttcctctccgacgccttcttcaccacctacaccatctacatcgccagcgccttcatcgagctcatggggctggtgatcctgacggtccaggcgcggacgcagtcgctgatgccgccgcagtgcgccaagccgggggctccgtgcgagcccgtgtcgggcgccaagaaggcgatgctgttcgcggggctgtacctcacggcgctgggcgtgggcgggatcaagggctccctcccctcccacggcgcggagcagttcgacgagcatgcggcgcgggggcgcaagggccgctccaccttcttcaactacttcgtcttctgcctctcctgcggcgccctcgtcgccgtcaccttcgccgtatgggtcgaggacaacaagggctggcagtgggggttcggcatctccaccatcgccatcctgctctccatcccgctcttcgtcgccggctccagccgctaccggaacaaggtgcc

SEQ ID NO: 155408 - DNA, 378 bp, Zea Mays
atgtcacaaacctttttcactttgaacgctctaaaggatatatcccatatctttatttttcaacagatgaagttcctcttcagtatacttattatcttcagacttaggtctatgaattccaccaacagtcctactgttgatcattttaaaatagaactcatccgggttcctgaatgccgccttttccttcagtttctgcaacctgctagccttctgggcattcagctcaactccttggacgcatcaacaaagagcgcatacctgcagcctgctagcttgttgggcgctggggaccggggtgctcgggcgctcggcactcggcgtctcggcggaggagggcgggcgccgatggctggaggcttggagctgggccactag

SEQ ID NO: 155409 - DNA, 547 bp, Zea Mays
ctctagttatatatcattccccattactcacattcttgtttttgtactgtacaggatgtcaatagtgtagctgcagaacattctagaggcactggacctgtggctgatggagttggttcctcgaaacaaacctttccgaatgccactagtcgaatggccatagatgaaccaaacgctcttgagagttgagcaagagggttcaaacaaattgcaggaccaaccatcgatgcacctcaagtagctaatgtcatctgtagcctgtcgattcttttgcgcaaattcattaactgtaggcaagccatgcgtggactgaagcagggagcagaagcaagtgctcgaccaagaagttgtgcatctgaaatctatattttttgcgcgtcatatttgtattaccgacagttgcaaacgatggtttaatcatgaaaaatttgtctttccacccttggcttctgcagtggaaggggttgatatcgtagtatgcatcaattatgcattttgtccattccccatccccaaatgagaagtgggtagtccccgacgggttttg

SEQ ID NO: 155410 - DNA, 962 bp, Zea Mays
gttgtcattggagatggccataaatgccgtttctggcatgacacatggcttgatggtgagacgccacgccacgccacttagcacctagtctctttgtgatgtccaggatgaaaaacggatcaggctacatggagctccgagataatcactggatcaatgcactgcgaggccgaatcaccactgcagcctagatacatgagttcgtttccctttggaacagaacccaggacactcaccttagacctagcatgagggactccattctctggagatggacgacatacggaacatactccacttgctcatcatgccgtattcagtttagaggctctttcgggcctttccggtccggcctaatctggaaagcacatgctgaaaacaagtgcaaggttttcgcatggacaatggcaagggagaaagtactcaacgcggaaaatttacaaagaaggggctggcctcaccaagatcactgcgctgtatgcaatgggtcaatggagacatgtatccatttggcattgctttgcgcttttgccaaatcagtttggagcctcaccctggcttgggtgcatttcgacgaaaatctaatcatttcgtcgaaggagcctagcaagctgatccggtggtgggaggaatcccatgccaagattccgaaaagtgagaggaggcgattcaatggggtagtgatttacactatttggaacatctggaaaggacggaacagaaggatctttattggcacttttgaaacggcagcacaagttgcccctagagcgaaagaggacatcgagcaacggataagggccttaacctgggaagtgtagattcttttattttggttttattgcgcctttgccctgttgtgagggagcttttttaatttaaccatgtatataaactctttccctatcttaattgaaaggcagagctcctgccattgcgcttaaaaaaaggacgtggcttct

SEQ ID NO: 155411 - DNA, 413 bp, Zea Mays
gacctccaacaactagaattgccattcactcatgacgaaattcggtgtaccgtcttctccatgccgtctgacaaggcaccgggtccagatggctacacgtgtgccttttttaagacatgttggggcatcatcgggaatgatttgacagccgcactcaactatctataccaacttaattcccaaggattcaagttgttaagctcagctaatattgttctactcccaaagaaaaccgaggctcttaagatcacagattttaggcctatcaaccttattcatagtattgctaaaatcctcaccaagctactggccaacagacttgctcccacctaaatgctatggtttccaactgtcagagtgccttcatcaagaaaagaaacatccacaataatttcctttatgtgcaacccacc

SEQ ID NO: 155412 - DNA, 1748 bp, Zea Mays
attccctactcaaacgcagccgccgagcgcctctcgcctctcgccctacaggaggcaccctacagaacccaaccaaaaagcgccggcggcaaacagaacccaacccaaagcgccggcggcaagcgaagagaaagcgccggcactaatccgacgatggacgcgtcggccggcggcggcggcaactccctgccgaccactggcgcggacgggtcgaagcgccgcgtctgctacttctacgacgcggaggtgggcaactactactacgggcagggccacccgatgaagccgcaccgcatccgcatgacccacgcgctgctcggccgctacggcctcctcgaccagatgcaagtgttccgccctcaccctgcccgcgaccgcgacctctgccgcttccacgccgacgattacgtctccttcctccggtccgtcacccccgaaacgcagcaggaccagatccgcgcgctcaagcgcttcaacgtcggcgaggactgccccgtcttcgacggtctctacagtttctgtcagacgtacgcggggggctctgttggcggcgccgtcaagctcaaccatggccatgatatcgccatcaactgggccggcggactccaccacgccaagaagtgcgaggcctccgggttttgctatgttaatgacattgtcctcgccatcctcgagctcctcaagtaccaccagcgcgttctgtacgtggacattgatatccaccacggggacggcgtggaggaggctttttataccacagaccgggtgatgacagtctcattccacaagtttggagattatttccctgggacaggggacattcgtgatgttgggcactcaaagggtaaatattactccctgaatgttcccctggacgatggtattgatgatgagagctaccagtcgttgttcaagccaataatgggcaaggtgatggaggtcttcaaccctggtgcagtcgtgctccagtgtggtgcggattcattgtcgggtgacaggttgggctgtttcaacctctctattaagggtcacgcagaatgtgtaagatttatgaggtccttcaacgtcccgctgttgctgcttggtggtggtgggtataccataagaaacgttgcacggtgttggtgctacgagacaggagttgcccttggtcatgagctcactgacaagatgccacctaatgagtactatgagtattttggtccagattacactctacatgtcgctccaagtaacatggagaataaaaacacacggcatcaattggatgacataaaatcaaaacttctagataatctttcaaaactccgacatgctcctagtgttcagtttcaagagcgacctcctgaggctgagttacctgagcaagatgaagacaaagagaatcctgatgaaagacatgatgctgattctgatgtggagatgaatgatgccaaacctttgcaggactctggaaggtatttgttattgttttctcatgtaatttgtagcagcaatcacttcaggtggctatattgtgtgttctattttgtgcaattttctaacataggagggggaatttaagaatgaagaaagaatctgctgagacacatgcaattggtcagatggctctctaatttaacgcgtgtttaatttaatgatgtatccatgacatttcaaatgtttttttggtatgtaaggtcatgtacaaccctatttaatacggggtttcttaaggggtctctagggtgtgaataaaaaaaatacaa

SEQ ID NO: 155413 - DNA, 1557 bp, Zea Mays
atggcgagccggcgaatgcatggtctgcctctggtcgtcggccgtcctcgctggtggcttgatctagcagggcttgccgggcgtgcaggcgagggagccggcgtagcgcgtgagcctggtgacgtaggacccgttcctgggcttgatgaggtccttcttgttgaactgcctgttgatctggccgccggtgacggtgaagtaggcgccttccatgaagaggtcgttctcggagtgccacacccagtttttccacaccgactccggcgtgtcatgctgcttggtgacctgcttcgcggcaaggttgggcggcgcgatgtagcggttgccctggctgatgatggtgggggccttgctgccgccgatggcgtacatgagccagtgcgtgtagtcgttgttgaccacgtggaagaagccccagcggcaccttggcatcctctgcacgaggcctctgccgaagtggttgaaggcgacagtgatctgcatgatctggtcctcgggatgcttgtcgctggagctgaagagcatgacatcgttgtggttggtgaggtggcagttggagatggtgacgccggtggacttggcgatgacgtcgatgaggccgtcctggcagttggagagggagaggtggtccagccacacgttggtggagccgaagacggtgatgccgtcgccgtcggagacggtgcgccagccgaagtggtccggcgagtcgcggacgtagccgccgtccttgttggaggagacgatgtcgttgatgtggatgttgtggatgatgacgttgttgacgaactgcaacgtgagctgcgcgccgttggtgatgcgcacctgcacgccgcggccgtcaatggtcttgtcgccgcggatgatgagctcctccttaagcgtgatgatcatggtcttggcgaaggtgatccacagcggctcgatctggatgacgccccaccggagcgtgccggggcgcgggttcaccacgtcgtcgtcggtgccgtccgtcaccacgtagaacttgccggccagcccgccggtggtgttgcgcccgaaccccttggcgcaccgcgccaggcgcttccggtccgtcgcccagtcctgccggcaccgccagcaccggtcgatcgggttcgtcgccctgcacggcccgctgaacttagacttcctcgtcgtcgtccccatcatctcccgcctcgtgccaatgtcctccttctcgacggatctgtggactgcacggttaagttggttggcgacctcgaccgggtcatgcttgtacgtggcctcagccgcggcgtcggccatgagcttgcgctgctgccagtattcatcgaagtcgccgatattggcctccgacagggctgcggacaggaagaagaagaccaagtacaggacgaaagagcccggtctgatccatcggaacccatccaccatggttatatagatctagctgtctatctatcgtctacctatatatatatatataataactccaatatctcctcacaaataatcccaccacgcactgcgcctcctcctaccttttatctttctatgcagagacactgctag

SEQ ID NO: 155414 - DNA, 411 bp, Zea Mays
atggtcatgcatggtagtatgtacagacctaaaaacaagggtataggactacttgctgtgcttatacaataccaaccacatgtgttcatgctcagttttgcaatcataaatgattcacaaaaaatgcccctatgtgctcatgatcaggtgcatgaattacttggtataggaatcactgggagattgtctacattccaaatcggggacggagattgtgcgcattccaaatcagggacggagactgtgcttgacattgccacaatcggcgtcgatggcggggtggagcggcgcattgccaaatctggcttccgtggtggtgcttgtgggatgtgggggagcggagtgggaggcagagtgcggtcaaggttgcggattacttgctggatccagggagttggatggggacgctga

SEQ ID NO: 155415 - DNA, 856 bp, Zea Mays
taaatagtgaacagtactcctctactgttcacggaatcctgtaactgctaacgcattattctggaattattgttctttgtcaaggcaaaggtataaatgtaaccaaacatcatgttttaatatctcaatttatattataaaatgagcaaatgatgttattcattctggatattctttaatgttttatactttatatttcatttcgcattattttatttctgattacgaaggtaggacctttgtaatttatcatccatgaccttcgtccgaagctcattaaatcctcagggaaataatgcttgagcggacgaagggctttgacatttaacattttatgttgccttgttcttaattcatagcatttgagaacaagtccccaacaatgtcttctttgtttaattacccatatagaaaaggctacatgtcaactttgtattgtagggacatgtcggtataatagttacaaaatttaaattttcatcacctctagatgactcgggctttattggtagtcctttatttcatttccgtgctttacgatgcttcctattgttcccatttttttgttcaatggacatcgtggcatatcttttcttatccctatgcctcttacattcattagcatcgaccattggtccaagcgagtatgatgaagtaccacatgagtggatatatagaaaaggaatccaaatccgtcgaatcgctcatgttatgatcttctacattctaggtctccgcgttccatcatctagcttatgttcttcatgtagcattcagatcgaatgactctatgaaattacgtcgatacttccacatattatgggtaacgtaggagacatccctattttttcccggg

SEQ ID NO: 155416 - DNA, 126 bp, Zea Mays
gttccaaattaaactatactccttaccagattataagacattttaactttagatacattacttctgctatgtatctaaatatagtgtatatctaagcttatagtaaaaactacatactaaaaaaga

SEQ ID NO: 155417 - DNA, 141 bp, Zea Mays
agcttgttcgctgcggcttgctgcggctacaatccggctgcggctgcggcttctacagtatttttctctctatggattgcagctgcagcaatccaaacagctgcaacagtgtcggcttgcagccagccgaacacgccccca

SEQ ID NO: 155418 - DNA, 2145 bp, Zea Mays
acgcaaaggttaacccacccgcccacccaggcggccaggccccagcagtacccactcacgagaccgtccaggcgtccaccgcgacgcgctctcctgcccgtgcccacctccacgactccacctccgcagcgcccgcggtaacctccccacgccacgccacatcgcgtgcgagccccaaccgtcgccggcctcccaattaagccgcccccgcggcgcgatccggtgtccaccgctgctccgccggaggagggggaaggggaagaaaagggagggggggagcacagggggatgctagaggcgaagccgccgtcgccgggctccggcgcggccggggcggcggcgcacatccacggtcaccggcggtgggcggcgccgctgctggcctcggttctgctctcgtcgctcctcatcaccgcgtcgctcttcttttcctcctcccgcgcgctgctactctccttctcgccgctcccctccgcggcctccgccgagcctctcttcgtcgaggccaagctccgccagcagatgcgggccgaggagcgccccacgcggggcgccgtgcccaggatcgcctacctcatctccggctccgcgggggacggagccgcgctgcgccggacgctcagggcgctctaccacccggtaaacacatacgtcgtgcacctcgacctcgaggcccccgccgccgagcgcgccgaactcgcctctgccatccacgcggaccccgtctacgctaggttccgcaacgtcaaggtcgtcacacgggccaacttggtcacctaccgtggcccgaccatggtggccaacacgctgcacgcggctgccatcctgctgcgcgagggcggtaattgggactggttcatcaacctctccgcctccgactatccgctcgtcacccaggacgatctattgcatgtgctttctgagttgcccaggcagcttaacttcattgagcataccagtgacatcggatggaaggagtaccagagggcgaagccagtgatcatcgaccctgggctatacagcctgcagaagtctgacgttttctggataacagagaaaaggagtgtcccaactgcattcaagctcttcaccggctcagcatggatgatgcttactcatcagttcattgaatattgtatatggggatgggacaatctcccaaggacagtcctgatgtattacgcaaattttctttcttcaccagagggttacttccacactgtcatctgcaatgtccccgagttccgcaacaccacagtcaaccatgatctacatttcatttcttgggacaacccaccaaagcaacaccctcattatctcacactcgctgacttcgatggtatggttaacagcaacgcaccctttgcaaggaagtttggaagagaggatcctgtgctggacaagattgaccaggaactgttggcccgccgacctgatggatttgtgcctggtggatggacagacctactgaacacaactgagaaagggaaacccttcacggttgagcgcgtgcaagatctccgcccaggtcctggtgtggacagattaaagaaactcgtcacaggattgctcacccaagaaggttttgatgacaagcattgcctgtgaaactcccagtaagatgattctggggcagtaggttacacgctcaaatttgaaggcatcgggccatttgctaggaatgcccctactagctgaggcagcagcacattagcgtcatgtacgcgaggatgcaacgataaggaaggtgctcttacagacaactgcttgagttgagttaccgtacagcaggagaccacggatgtagcagtcggagatgattatacagaactagtagctcattagtttattagatgattataatcagccccccaaccatgaataatgttggaatttttgacatttctgcgcccgagggttgtgcaaggtagcccattctttgtttcgaagccatggcacctggtgcaccagctggtagcgtgagacttcgttgtattgactagtggatgtttctgggtaaactgatacatttgattgcacacatgtattgatttgtttcttttctctttgatgagtatagcgaaaatgctcgtgctgttttcttgtctgttgcgatttgaacatccatctagttaccttatttca

SEQ ID NO: 155419 - DNA, 1430 bp, Zea Mays
cttttttagcttctaggtggtaccaggggaaagtcaatctaagggcgtatttctttctttaaatagagcctctcactgggtcgcctctctctttcgttttattgcaatcttgttttgttttttccttttcagtttactaccgttatggattcttctacttgttcatggtgcaaaaatgtttgtgatcaacatgcccctttgtttttctgatttgtctacctattggcagatctattgcatgtgctttctgagttgcccaggcagcttaacttcattgagcataccagtgacatcggatggaaggagtaccagagggcgaagccagtgatcatcgaccctgggctatacagcctgcagaagtctgacgttttctggataacagagaaaaggagtgtcccaactgcattcaagctcttcaccggctcagcatggatgatgcttactcatcagttcattgaatattgtatatggggatgggacaatctcccaaggacagtcctgatgtattacgcaaattttctttcttcaccagagggttacttccacactgtcatctgcaatgtccccgagttccgcaacaccacagtcaaccatgatctacatttcatttcttgggacaacccaccaaagcaacaccctcattatctcacactcgctgacttcgatggtatggttaacagcaacgcaccctttgcaaggaagtttggaagagaggatcctgtgctggacaagattgaccaggaactgttggcccgccgacctgatggatttgtgcctggtggatggacagacctactgaacacaactgagaaagggaaacccttcacggttgagcgcgtgcaagatctccgcccaggtcctggtgtggacagattaaagaaactcgtcacaggattgctcacccaagaaggttttgatgacaagcattgcctgtgaaactcccagtaagatgattctggggcagtaggttacacgctcaaatttgaaggcatcgggccatttgctaggaatgcccctactagctgaggcagcagcacattagcgtcatgtacgcgaggatgcaacgataaggaaggtgctcttacagacaactgcttgagttgagttaccgtacagcaggagaccacggatgtagcagtcggagatgattatacagaactagtagctcattagtttattagatgattataatcagccccccaaccatgaataatgttggaatttttgacatttctgcgcccgagggttgtgcaaggtagcccattctttgtttcgaagccatggcacctggtgcaccagctggtagcgtgagacttcgttgtattgactagtggatgtttctgggtaaactgatacatttgattgcacacatgtattgatttgtttcttttctctttgatgagtatagcgaaaatgctcgtgctgttttc

SEQ ID NO: 155420 - DNA, 1763 bp, Zea Mays
ttaagccgcccccgcggcgcgatccggtgtccaccgctgctggcctcggttctgctctcgtcgctcctcatcaccgcgtcgctcttcttttcctcctcccgcgcgctgctactctccttctcgccgctcccctccgcggcctccgccgagcctctcttcgtcgaggccaagctccgccagcagatgcgggccgaggagcgccccacgcggggcgccgtgcccaggatcgcctacctcatctccggctccgcgggggacggagccgcgctgcgccggacgctcagggcgctctaccacccggtaaacacatacgtcgtgcacctcgacctcgaggcccccgccgccgagcgcgccgaactcgcctctgccatccacgcggaccccgtctacgctaggttccgcaacgtcaaggtcgtcacacgggccaacttggtcacctaccgtggcccgaccatggtggccaacacgctgcacgcggctgccatcctgctgcgcgagggcggtaattgggactggttcatcaacctctccgcctccgactatccgctcgtcacccaggacgatctattgcatgtgctttctgagttgcccaggcagcttaacttcattgagcataccagtgacatcggatggaaggagtaccagagggcgaagccagtgatcatcgaccctgggctatacagcctgcagaagtctgacgttttctggataacagagaaaaggagtgtcccaactgcattcaagctcttcaccggctcagcatggatgatgcttactcatcagttcattgaatattgtatatggggatgggacaatctcccaaggacagtcctgatgtattacgcaaattttctttcttcaccagagggttacttccacactgtcatctgcaatgtccccgagttccgcaacaccacagtcaaccatgatctacatttcatttcttgggacaacccaccaaagcaacaccctcattatctcacactcgctgacttcgatggtatggttaacagcaacgcaccctttgcaaggaagtttggaagagaggatcctgtgctggacaagattgaccaggaactgttggcccgccgacctgatggatttgtgcctggtggatggacagacctactgaacacaactgagaaagggaaacccttcacggttgagcgcgtgcaagatctccgcccaggtcctggtgtggacagattaaagaaactcgtcacaggattgctcacccaagaaggttttgatgacaagcattgcctgtgaaactcccagtaagatgattctggggcagtaggttacacgctcaaatttgaaggcatcgggccatttgctaggaatgcccctactagctgaggcagcagcacattagcgtcatgtacgcgaggatgcaacgataaggaaggtgctcttacagacaactgcttgagttgagttaccgtacagcaggagaccacggatgtagcagtcggagatgattatacagaactagtagctcattagtttattagatgattataatcagccccccaaccatgaataatgttggaatttttgacatttctgcgcccgagggttgtgcaaggtagcccattctttgtttcgaagccatggcacctggtgcaccagctggtagcgtgagacttcgttgtattgactagtggatgtttctgggtaaactgatacatttgattgcacacatgtattgatttgtttcttttctctttgatgagtatagcgaaaatgctcgtgctgttttc

SEQ ID NO: 155421 - DNA, 1301 bp, Zea Mays
ggccccagcagtacccactcacgagaccgtccaggcgtccaccgcgacgcgctctcctgcccgtgcccacctccacgactccacctccgcagcgcccgcgatctattgcatgtgctttctgagttgcccaggcagcttaacttcattgagcataccagtgacatcggatggaaggagtaccagagggcgaagccagtgatcatcgaccctgggctatacagcctgcagaagtctgacgttttctggataacagagaaaaggagtgtcccaactgcattcaagctcttcaccggctcagcatggatgatgcttactcatcagttcattgaatattgtatatggggatgggacaatctcccaaggacagtcctgatgtattacgcaaattttctttcttcaccagagggttacttccacactgtcatctgcaatgtccccgagttccgcaacaccacagtcaaccatgatctacatttcatttcttgggacaacccaccaaagcaacaccctcattatctcacactcgctgacttcgatggtatggttaacagcaacgcaccctttgcaaggaagtttggaagagaggatcctgtgctggacaagattgaccaggaactgttggcccgccgacctgatggatttgtgcctggtggatggacagacctactgaacacaactgagaaagggaaacccttcacggttgagcgcgtgcaagatctccgcccaggtcctggtgtggacagattaaagaaactcgtcacaggattgctcacccaagaaggttttgatgacaagcattgcctgtgaaactcccagtaagatgattctggggcagtaggttacacgctcaaatttgaaggcatcgggccatttgctaggaatgcccctactagctgaggcagcagcacattagcgtcatgtacgcgaggatgcaacgataaggaaggtgctcttacagacaactgcttgagttgagttaccgtacagcaggagaccacggatgtagcagtcggagatgattatacagaactagtagctcattagtttattagatgattataatcagccccccaaccatgaataatgttggaatttttgacatttctgcgcccgagggttgtgcaaggtagcccattctttgtttcgaagccatggcacctggtgcaccagctggtagcgtgagacttcgttgtattgactagtggatgtttctgggtaaactgatacatttgattgcacacatgtattgatttgtttcttttctctttgatgagtatagcgaaaatgctcgtgctgttttc

SEQ ID NO: 155422 - DNA, 417 bp, Zea Mays
atggagagcgacgaggagatcaggagggtgccggaggttggcctggagctgctgaccagcccgtcgacgtccggcagggaggcgaccgctgccgcggccgctgccgggacgtcgtccgcgtcgcaggcggccagcgccagccgccgcggccgcagcccggccgacaaggagcaccgccgcctcaaaaggttgcttcggaaccgggtgtcggcgcagcaggcacgggaaaggaagaaggcgtacctgagcgagctggaggtgagggtgaaggagctggagaagaggaactcggagctggaggagaagctgtccacgctgcagaacgagaaccagatgcttagacagatactgaagaacaccactgtcaacaacagaagaggcccaggtagcagcagtgctggtggagacagccaatag

SEQ ID NO: 155423 - DNA, 216 bp, Zea Mays
aatctggcatctccattgcaaattcttgtcgatgctagcgatggtgcgtctgacaagtttggtgagcctctaattcatggatgtaccaaaacatttgggatgaggccgctaaatggggagcgacgtgaatggttgaagcctataatgttcagtggagctattgggcaaattgaccatgcacacatatcaaagggcgatacagaaattggcatgctc

SEQ ID NO: 155424 - DNA, 1050 bp, Zea Mays
ttctgatgagttcttgtatatgctgtctacacgcaggttaaatattaataacccctgcagaacccagttgcttactggaaaacaggcccagccaccacctttccatggcactggcaccggttgttgactgctctgctgcctgcacactaatggcggtctctgtccgtctacatatataacacagagggggccgctgcaggagcgggcgcggagcaacaccgtccagtccatcactgccctttgttctcctccacagtcgcagacaaagctggttcgtctcgcggagaggggaagccgggaaggtggataggcggcacccacccatcacccatggctgggttgcaaagatcggcgaccacgttcagacggtccggctcgtcgggcctggtctgggacgagcgtttcctgaccgaggccgacgccgaggcgaaggccggcgccgcggaggatgccgagcagccggagctccggcactcgaggagcgtcggcatgctgcgccgtgcgggcggcggtggagacagccgcagcaagaagggcaaggagagtaggcagaagcaggcggagtcggcgcggcgcagcaaccagcaggtgttccggaccaaggacgtggccccggacatggatcccccctcgccgagggtgtccggctgcgccttctgcgccgtcttccgcgggggctctggcggtactggccgcagggcacaggcacgccgccggtccaagcccaggaagaagtgacggcgtagcaacacgtacgtacgtgcggtacgttgttgtttgtgccatctgtaaagtccgggccatggttgttcgtgcgtgtacatgtttactatactaaatactagggtcatatatagatgagcttgctactcggtaatcggtatacgtacgccattatttagttcaggatagttcctccttttttgggtcggtcggttggtttcttgatccagatccatgcttttgaggtttgggcgacggttagatgttacttgtctactatatatgcagcagctatttatgagatctggggctgttgttcttgttctt

SEQ ID NO: 155425 - DNA, 205 bp, Zea Mays
ccaaggtgtacctgtgcactaaggaagtgaagggcagcaatctcagcatcaatagcaaggcaacctgtcacctgtcagcatcaaccttgttcgccgatgcaagctagatatgaaatcatacagacctgtcaccggccggtcagcggcgcaggggtctgctgacggcgcgcgagggggaggggccggtcagcggtgcaggggtctg

SEQ ID NO: 155426 - DNA, 1775 bp, Zea Mays
cgtcggacatccagtagcccgctgcagcacattctatcatcgagtaaactctacgtcgagtaaacgcaacaacgcgcactcgcgcagagacactgcccatcaggatttcgcaaaagcaacaaaacccactcgacgtcgagggtagaagaggcctgcaaatttccgaagagctcgcggaaatggcgacggtgctgccgcttgccgccgcctcggcctcggccacgccgaggacttgcatctccggcggcccagttcccgcgcgattcctcgggacttgcatgcgtctccgcatccacatcccaccgcggggcgttgcctgcgccctcagaaggagacccaccaagtacaagactaaaatccagagtgaggaggatgtggtggctgcagaagatgtcatggatgatgatgacgacgaggatggtgcactggaagcacttttcaagcagctggaagaagatcttgacaatgatgatttatctgtcgatgataatgatatatcagaagaagatatggcaaggtttgaaaaggagttggcagaagcaattgaagatgtcagtggtgttgatgactcagcgggggattcgttgctgagctctggcgactatggtattgatgagcaactagatggaagcgaacgggcagagctgaaaacctggcaactccggagattggctcgtgcactgaaaataggccggcgtaaaactagtattaagaatcttgcaggggagctaggcctagataggggtttggttattgaaatgctccgcaatccaccaccgaagcttctactcatgtctgattctttgcctgatgaagtcccttctaaatctgaagtgaaggaaatagaaacccctagtacgaccactgttgacgaggttgataccagtgaaatcaaaccacagttggagcttccagtgcacgtcatgagtgcagaatggtctgcaagaaaaagactgaaaaaggtgcaacttgagaccttagaaagagtctacctgcgaagcaaacggcccacgaatacaatggtcagcagcatagttcaagtgacaaaccttccgcgaaagaccattgttaagtggtttgaggatagaagggagcaagatggagtccctgaccatcgtgctgcattcaagagatccctatctgagattggtgctagttcataacttcttcagataagcctttgttacggtgtttacttggaaccattacaaacatgtaaatttgagctttgaaattatgacaagttttgcaagctcaacatgcagtatcttttagattgtagtctcagcctatcatgcttatcaaagcggtaaagcgaggagtggcaactaactaccgccttacgcatgagcgagtaaggcataagatgaggtggcaccttgtggccatgctacagtagtataggagcatgtcataccttgatgttgtcttctgtgcagcccgcagtccccagtgtgcatccaacaacacactgcttccccaaagataaactggagtgctcagtgagcacagtccacaatagtacaatactaatgcataattagttaggtacaaatactctcacaactctcaagcatcattaagtcaatagaagtcatcctctgtcaaaaaaggatctgaattgccaccgccagcagcagcttgatcatcactttcatgagcaacaataggtgcaatttcaccatagtcagcaacttccatatcatcaaccaaatattcttcaccactttcatgtgcagcttgatcgtccatgtcttcagcctcctgcagttcat

SEQ ID NO: 155427 - DNA, 303 bp, Zea Mays
atggcgagggagcagaaacggcacgctgggcatcgagcagaggccgagcagaggtgtgcgtgtaggatctccacggcgagggaaatgagcaccacagccatggagtcgaaggcaaagagcagggaccagagtcacatgatggcttgggtcagactggtggagctcggagggacctctatcagaccaagaaattcgcagatatttctaactccagattttagcgaaaaatgggtcgaattaaatgatattgatagaaataattgggacatgattttatttagtgagtacttcaggattagatga

SEQ ID NO: 155428 - DNA, 154 bp, Zea Mays
catcaaagagaaattgctccagtacttgaatacccattggaaaggttttgatgtctttggcttcattagttgcttcatgtggaggtcttcaagcttagtttgcttatgtgtatttcttatggaaaggcttcacctttccaagtattgtaattaa

SEQ ID NO: 155429 - DNA, 484 bp, Zea Mays
gttcgctctccatgtttcctagccccagcggccagcctgtccttgctcgtttccaagctgtgctctagcaagcttctctgtagttcttccccaactgctcgctctcagcctgtccggtcctgcgtacttcaacactgttctacagccgtctgagctccacctcgtcgtcgacctgttgtttcagcgtcgtatccctcgacttcatcacagcatcaccggtgctctcgtcgtcgttgagctcttggcgcgacgtgacgtcatcgtcgttttctcgccagtcatgctcgacccacagctccttcgcgtcatcgtcttcgacaacccacaacctctgctctaacctcatcgcactcgcggaatcgtcgtgaagccgctagccgtctgcctcgtcctcacacccgacaagctgtcgtgctcggtgtgttttctccgtgcggccttacgtgttcctctcgcttcatcggcttgtcgcgtgttagagcag

SEQ ID NO: 155430 - DNA, 126 bp, Zea Mays
caacgaatggcgatgggaaaacgtgttgctcccgagcggcgtggtcccggctggttctggatcccgcgaggaattgcggctgcctcggggagtacctcaccgcgcggccatggtgaccctccttgc

SEQ ID NO: 155431 - DNA, 137 bp, Zea Mays
ccctgtttgtttcaacttataggttatataatctaaattataatctagattatataatctggattattttctctggattaaataagctaggtgctgctgtttgttagctcagattatttggactcggcttattattc

SEQ ID NO: 155432 - DNA, 761 bp, Zea Mays
aataacaaggtgcatgaatttccaaacacgcaagaactgcattaagttcaatggctcgtaaagagatcgatggtacatcgtcctacaccacgtaggaacttttcacttgtacttgacctataacataagcttgcttgctcatcagaaccaccagtgcctaccacttcacttctgaaaatatgtgatggcctatccattgcatttcaaacatgttccttcaactgcacaacgatcacttctgtaaattgaagggcaactggctttagcacaaaagtagggcggccaaataattctccaaaataagtctcatgaagaacagctacaatatctggattacaaaacacaagaacagataaaaaggtatgtatcatatgtataagacgactggcaaattactgtacagacatacctgcaagtattctttgatgcaaggccagaccatgtaatcccaacgttttgtgtgtacatggaaatcagctgcaagtcctgaactagggcacatttgtatgcttttacaaaaatcgtagtagagcattgcttggtggcatggggtacagatggctttggttacaaaaaaactgaccctggacagatttattaacaagagaactgtccaagacgccttatcaaataggagatggactatcttcatctttaggaagttccctcagattttgaactgcagcccaatagggaggataagcatatctttagcattgcttcatatggcagatacaccgcaaaggctgcttataaggatc

SEQ ID NO: 155433 - DNA, 77 bp, Zea Mays
ggtgtacatttaggggaacatgttggagattgaaagaaaatccactcatgataacttttaggctgctcccaaaaacc

SEQ ID NO: 155434 - DNA, 2356 bp, Zea Mays
ccactgtgtgttcgcgtgagtttacctcccaccgatcggagttttatcataataaccccgtagtgtacatacttgcacaaagagctgttagcacccggccatggccaagagcactcccctcctcagcttcgtctacctgctgtgtattgcccatgtcacctcgattagcttcgactacaacttctccatccccggcgttctcactagcgcaaacatcaagtacatgtctaacggcagtcgaggcaccgatcggatcgacctgaccaaggacgcgatctggagcaccggccgggtggcgtacgggcagcctttgcagctctgggacgataccgccaaggtcgccagcttcacctccaacttcaccttcgctatcaagccacacaacagcaccaatcaggccgacggtatggcgttctacgtcgggccgtggcccccaaaactgccggaggactccaacggcggcttcctcggtctcttcaacaaccccatcggcacgaacattgacttcccgccgaccatcgcagtggagttcgacgcgttcaggaacgactgggaccccaacaacaccatgaaccatattggcgtggacgtcaaaagcatcacgtcccgtgcgtacacgccgctgccggacgggagcttcaacgggaccatgtcggcgtgggtcagatacgacgccaacgtgagcacgctgtcggcgacccttcggttcgacgatctgccgcagctgggcctctacaacgtcagcgcgatcgtggacttcaaggacgccgggctgccgccatacgccgcggtcggtttctcgggagccaccggtgatttcatcgaacgacaccagatcctttcttggtcgttcgagtctactctcaccggcgtcgtcgtcaacgtcaacaacaccgataacaaaagtgcgaagacgagaaagacaagcctaatagccgaagtgatggtatccactggggtcgtcgttgtactgcttgtcgtagtggtgtggcttagctatcgccgcagatgcctaaaaagacagaatgggaagcaaatacaagaggcaccagaaggcacacatattccaatcgagggagacatggacgatgagtttgagaaggggacggggcctcgtaggttcacctacagccaattgtcacgagcgacacgcggattctcagacgaggagaagctcggcgagggcggttttggatcagtctaccgtggatacctgcaggaccaggggctccatgtagccatcaagagggtctccaagacgtcgaaacaagggaggaaggagtacatctccgaggtgaccatcataagccgtctcaggcatcgcaaccttgtgcagcttgttgggtggtgccacgaggccgacgagctcctgctcgtgtacgagctcatgacgaatggcagcctcgacatgcatctctacagcacgagtgacgttctagcttggccagtcaggtacgacatcattcttggcatgggctctgctctcctgtaccttcaccaggagtgggagcagtgcgtggtgcaccgggatatcaagccgagcaacgtgatgctggactcgtcgttcaacgccaagcttggcgacttcggcctcgcccgcctcatcaaccacagccacgctgcgcacaccaccatgctcgccggcaccaagggatacatagacccggagtgcgtggtgactagccgcacgagcgtccagtccgatgtctacagcttcggcgccgtccttctcgagattgcctgcggtaggaagcccgttgtcccgcacgaggacgagagcaaggtgttgctcgtgcattgggtctgggatatgcacgggaaaggccagctcctcgacgtagcggatgcgcgtctgcacgacggcgggtttgacgtggagcagatggagcgaacgctggtcgtggggctgtggtgcatgcatccagactacgcgtccaggccttccatccggcaggcaatgaacgtgctgcagtttgaggtgcctttgccggagctcccgctagagatgcctgtggcaacgtacgcaccacctgtttcaagtggttaccggtcgagtaccacatcttcgtccgtgagtgacaacactacaggccactcgtcgacggcgaactcctcgggcttgtcggtgaagagtgacacccaagcagggacacgttcttttgtcacttccaacgacacaaggaatacaggaggcagtgttcgagaatccacttcatcaccaaatgctatctgatcgctcgagcactcgttaagaagcggtgcactctcaggcaggactgaacaatttcccagtacactctattcttcatagcttgtcttataatactccctctgtttcaaaatagtattcatttct

SEQ ID NO: 155435 - DNA, 2551 bp, Zea Mays
tcgtgtagtgagggcgcggctcatgtcgcgcaggtcgaggaagatgagcacgcgctcatgtacatcgccgccgatgccgaggtaacaatgtcgtgctcacctcacaggtcaccgctgcacctcgtcaagctatcggttcatgtccacctcgatgaactgaaggtgctcctccatctcagccaggaggagactacgatttctcgccgctgggtgctcgacactgctgcgacgaatcacatgacagactcgcgggctgtcttcgccgagctgaacaccgctttcatcggcactgtaaaatttggcgacgggtcggtggtcgacatcaagggcaagggcactgtcctctgcgtgtgcaagtccgacgagcaccgtcgtcttgatggggtctactacatcccgcgcctcaccaccaacatcatgagcctcggccatatggacgaggacgggttcaaggtcgccatcgagtcgggcgtactacgcctctacgacctgcagcgcaaactactggcgaaagtgcatcgatcacctagccagctgtacttcctcgacatgaacatcgctgccctagtgtgtctcactgcgtgggttggcgacgtggtgtggcgctggcatgatcgctacggtcacctcaacttctagtcgctgtgcaagctcggacgtgcggacatggtgcatgggttaccggcgattgaccgcgtcgaccaagcctgtgaggactgcgttctagcaaaacaaaagaggacgccgttctcgcaggctgccaagtactgggctcaggaggagctcgaactcgtacatggtgacctctgtggcccgatctcgccacctacaccggccaggaatgcctacttcctgttgttggtcgacgacatgagccgttacatgtggctcacgctgttgcggtcaaaggcagatgcaccagcagcaatcatggtgttccaggcgcgtgttgagcgtgaaaccggcaagaagctgaaggtacttcgtaccgacaatggtggtgagttcacatatttgcagtttggcaaatactatgcaggagaaggcatccaacggcactactcagcgccgtactcgccgtaacaaaatggcgttgtagagcggcgaaaccagatgatagtgaacacggcgaggagtatcctacgtgcatggagcatgtcagggtacttttggggagaggcggtacatactgttgtcttcctcctcaaccaggcgcccaccagcgtgctcgacgggctgataccgtaccaggcatggtacaagaagaagccgcccgtgcgcttcctcaaggtgttcgggtgtgttgcctacatcaagaacctgcgtccacaccacagcaagctcgatgaccgcgggcagaaggtcgtcttcatcggctaccagttcgggtcaaaggcgtatcatttctacgaccccgtcaccgagcgcgtccatgtctcatgcgacgctatttttgacgagagcgcgcgctggaactagggagaagcattgacgatagggagcgaggactccttcacgatggagtacgactacaacctgaggagccacgatgaggtggttgtacccatgtcatcatcgttggggacaccgtcctcaccgggcacaccaccttctacaagcacacaggctgcaccgggcacgacgtctacacctacttcaccattgactgctccacgagctgtgactccgcggatagcaacacctgctgccggcccactcatcaagtttgcgacgctgctcaccaccgacctaaacttcgacactgatgacaaaggaaagagggagctctggtaccggacgctggacaacatccatagcgtgggtgcagcgcccgggctggtgcaccatgacgaggaggctaagctacatgtcgtgagcgtggaggaacccaggaccttgaaggaggccgatggtgacccaaattgggttgccgcgatggaggaggagctggcgtcgatccgtgacaacaagacatggtcgctggccgagctcccgcgtggtcaccgtgccataggcctcaagtggatgtacaaagtcaagcgtgatgagaatgacaacattgtcaagtacaagacccgcctcgttgccaagggctatgtgcagcagcctggcgtcgacttctacaaggtcttcgcgccggttgcacgacaggagtctgtgcgcttgctactcgccattgcagcccactacggctgggttgtccatcacatggacgtgaagtcgtcattttttgaacggggagctccaagaagaagtctacgtccagcaaccccctggcttcgtcgacgacaagcacaagtataaggtgctctggcttcacaaagctttgtacgggcttcgccaagccccacgcgcctggaaccagaagcttgatgccgagctgctggcccttggcttcgcgcgctgtgttgatgagcatggaatgtacactgaggcaagggagaagcaagcctgatcgtgggcgtatatgttgatcacaggtggcgatgcaggagctgtggcgaagttcaaggtgcagatgcagaagatctttaagatgagtgatcttggg

SEQ ID NO: 155436 - DNA, 2315 bp, Zea Mays
atgtccacggactcggctgacgatgagctcaatctcaatgtcatggtcgaggagcagcgacttgaagcacataatgaggtagaggatgcccggtgcctcctccttggtcccactaccatcgatctggacggcgctggggcccaaacgacccgaacatacatgggctccacaagcccaatggccgacgtgagcaactctgtccctgtgcctggtaaacgttctaggaggagagctctgacctctaaggtatggctacactttgaggaggtaactgcgatgcaaaatggtaaggaggtaagagtatctgccatttgtcttcactgcaagaatagcatgtctgctaaatcttcatctagaactggccatttgatcagacacttggatctttgccctgctaagaaagagaaggatagatctgggaaatctcagtctttgcttaaatataattcagatggatctgttaatcattgggagtattccccttctgttgctagaactgagctttgtcgcttaataactaggctagacctgccactttgttttggtgaatctagtgcttttcaggagtatataactcgtgcccataatccaaggtttattaaatcttctaggaaaactactgctagagacttgattcaactgtttaatgattgtgttgaactacttattgaagtccttaaacatgtttcatctattgctttgacatctgatatatggtctggtaaagctaaagaggactatattagtgttgttgctcattttgtgaactctgattggtgtttagaaaagagattgcttggtcttggacctatagaggtagctcatataggtcttaacattgctgagcgtgttgaaatggttgcaaatgactatagcattactgataagatttttgctattgtgcttgataatgcctcatctaacaaaactgctattgatgttctgaaacttgtattttctggttatattggccatttgatacctgcacctagtaggaatgagagtgatttgagtaatatctttttgcatcagcgttgcgcttgccatattacaaatctgattgttaaaagttgtttgaaacgtttgcaaccatatcttgaagtctttaggactgctataacatttttaaactcttcaaatcaaagaattgcttcttataaacagtactgcatgagtgttggcgttagaccacgtaaatttggagtagatatggatgttaggtggaattcaacattcctgatgcttaaacatttagttccttatcatagcactttctctgtgtggattagaactaattatacttgcaaagaggatgggtctttttcattgagtgataatcattgggttgttgctgaaaaattgttgtgtttccttcaattattctatgactcaactgttgcactttctgggatatattaccctacatcactttttaatgctgcatcatattttgaaaattgctagacatctaaatgcatatgagaatcatgaacttttaagaaatgctgttgtacctatgatgacaaaaatttctgaaatattggagggaaatacccattctttatgcatttgctttcattcttgatcctagagcaaagatgaggggctttcataaagttcttcaaagattatcttctcttaatgggactgactatagtagatatccttcatgtgttagatgcaagttaactaagatgtatcaaatttatgaggccaaatttgaaggagtttgcttgactcctcaaccacaatcaggtagtggttctagtaaggccacagaggcatgagatgatatatatggtgatgatgaaaattacagcaatactggtacagctggtacatctactggtttatctgagttaacttcttaccttgatagtgacactgaaactaaatttgggcatgatttcaacattcttatgtggtggcaacgccacaatcgaacttaccctattctttctatactagctaaagatgttatgactgtccctgtttctacaatatcttaagaatctactttcagtctagctagcaggatgctcgaggagcggcgacgacggttgacgacagacatggtggaagtgctctcatgtatcaaggattgggagttggctgactagcacaagcaacatactgtgaagaagaaaaccaaagaccttgaagcaacctttgaagatatgtacctagatgatgaggactgtggactgaactatgaacctataaataatttaaggagctggctgtacttatttccttcctagggttttctcacgaggtgtgagtttttatataggaaggtttttaatgaggcagca

SEQ ID NO: 155437 - DNA, 582 bp, Zea Mays
atggcttcaacactagattccaggacaccggtggcctacagctacaagatctggacgcttaggcctagtgcgtgctactgccaagcaacaagcaaggtagtgaggatgtcctcatctttatctattcattcataccatcttaacaccaccaatagtaaaaagagtagtctcaagaggaattctagtgacattgggtgggattatggtgtgctagtcgatccaactaacctgaatgtgatccagtgcaagttatgtggtctcactgtgagggcagtgatatataggttaaaacaacatattgctggcattcgtggggaagttcagccttgtcctgaatcaaaagatgaggacaaagcaaagtgcaagcaagttatcaatgcctcaaaagaagcaaagaaggcaaggaacaaggataaggaagaagttatggatgttgtagtccttgatgatggactagctgatgaagacaccaccattgaagaagggcttgatgagattggagattcgacatcacgaaagttgggacctctggataagtttacaatgcctatggatcctagtaaattgagcaacactaagttg

SEQ ID NO: 155438 - DNA, 200 bp, Zea Mays
attcaaaatgcaaatttgaatttgctcattgtagtgaacttgtacgcatatttgaatgtaacctttgatcaggccattatggtatgatttatttatttaagaatttactttataccttatagtatttattcctctcctctcttcttttctttgttactttcccactcttaaatattccaaatagatattaaatcttaaat

SEQ ID NO: 155439 - DNA, 1447 bp, Zea Mays
cctagccgccacccgccaggcgttaacgctcgacgggaccccgtcgtcttaaactccgcaagcgctgccagcggccgcccccgccgcgtgcttccgccgtcctcggtgcctcggccgcctggtccccaccggtccttccccttcctcaatcggcggccggcggctcccgtagccttgccgcgcgcgttagatttttcctaccaaataccataccagtaccaagcccctagccacacagttttatagcccgatgtatattcatttttcagctattttgctacgcgtttgtcttgaatagttgaatcggtgttgattgaatgattttgtctttagaacggcagtcattcgcttgatttttcctacacacaagtgtacgcctttgttgaatcgatggcttttgttttggttagctcgcaccattagccccctgctctcttgaggttggatgcagggaaaaatgcgagaaggttaccggtgccagattcatggaccgggcaggggctctatacttctggggaagccagtaaatttcctcagggtcatatcttctgtccacattgcatcatcttgatgctgttgacctgttgtctttgttgtattattcacatattttcgttgattcgcatgtgttcttcatcaatttcattttattgagtaattaagctctgtcacatggttagaagcgacatgaggagactgaaacatctgaaagttttcatgtggataatacacatatatggtcttcaaagttctctgatcgcttcatgtccaaagcttttctttcatgtgaaagcttttgaattatgccatctgaatttggccttagtgatgcttgggtctgaactgtagccatctgaatatgaccttagtgatgcttgagtcttaactgtagtgtttaagtcgttgagaaacaacatgaggaggtcatacattctgaagtatctgatgttgatacatacattcatggtcttcaaagttctctgattgtttcctttacccactccttatccaaatgatactttgttacgttcattttttctctccttgaatcatagcttcaaatttctaagttatatgtcttgccaagtttttgagatgcaacgaagcaaaatgaggagttcatatgatctgaagtatctatgtttgttgatatatccatttgtggtcttcaaagttctctgattgctttgtccaccacttcaccccatgctgcattgtctttattcaaatcatatttctccatcttcatttttctgtgtgtattgctatagctttacagcatttcttagttatgcttgaacaaattttattggaatttaagatgtcaaaagaagcaaaatgaggaggctgtattatctgaagtatctcttgttgatacagtattcatggtcttcaaagttctttgtttcctttgaaatattattctattaaagcatagcagtttata

SEQ ID NO: 155440 - DNA, 1431 bp, Zea Mays
ctctaggtcatcatgcacatgttctgaatcacaaagcaatggtcttttttaaagccaaccttgtgttattgtattttgaattcagttcatcgtggtgttggcttttgtgttttagaggcacccctcctccgagatcggatcatgctgctgcttgccatgctgaccgctatcttttgatttttggtgggggatctcatgcgacatgtttcaacgacctacatgtccttgatttgcagacggtgcaaacttaatcttgctggaagtctgtaaagatttgtgtgttatctgtgactgctatttttttttgttggaactacagatggagtggtcaagacccaaacaacaaggcctgacgccaagcccaagagctggccatgctggtgcaactgtcggggagaactggtacatagttgggggtggcaataataaaagtggtgtctctgatactcttgttcttaacatgtcaactctgacatggtcagtggttagcactgcggaaggacgagttccccttgccagtgagggcatgactctagtgcatagcaattacaatggatacgattatctcatctcatttggaggatacaatggacgatacagcaatgaggtttatacacttagcctcaaatcagattttaagtccaccacaaaagaagaaactgtctcagatctagggtcgtcgaaccagaggttgaaatggtgattggcgtggacagtgctgattcagacctgaagaacagtagtacagtactgatgaagcaagtgaacagttcttagcagctctcaaagctgagaaagaggaactagaagcgacacttaacagggaacagctgcaaactgtacaacttaaagaatacattgctcaagcagaatccagaaatgtggaactcacaaaggaacttcaagccgtccgtggccaacttgctgctgagcagtcaagatgtttcaaacttgaggtcgatgttgcggaactacgacagaagcttcaaagtatggatgcattggaaaaggaggtcgagctgcttcgacgacacagagccgcgtcagagcaagcagcgctggacgcaaagcagcggcaaagttctgggggcatgtggagctggctcgttggtacccctcctgatgataaatctgaatcgtgatcgcgtcgtgagggcagcactttagttcatacaggccgtgattcatatattatacttgtaacatttatatacccgttgatattttttttacagttactgaattcgtgttcattttgaccacagaagataaggaaatcattagttttatgccttgttttggcgtattgcaatcactcaaatgtatcaggaagtttcaacattatttcttgaaaagctagatttcaacattgtcatcatgtattggtcctccttttgacgacatggttcaatatatgttattcgtttgaga

SEQ ID NO: 155441 - DNA, 2259 bp, Zea Mays
tgcaaatttccatttccacgcgacgacgacgaagaggaggtgggattcggaggagtaaatcctaacagccgtctcgcgccggtggtccggtgcccgcgcgagatcggggggggggggggggggggggggggggcgacatctagggcgcggtgccggccatggcgagctctggactcgcctaccccgaccgcttctacgccgccgcagcctacgcggggttcggcgctggtggggccacctcctcctctacggcctgcacagcaggtgatgcgtcagccgatgcttttgctaattttggcgatcaagccacagttggtccgtgcaatgtgcccaagccaagggcgtggaaccccgtggagcagagcaaatgggccagttggcacggacttggaagcatgccatcggctgaggcgatgcgtctttttgtcaaaatcttggaggaggaagatcctggatggtactcaagggttcctgagttcaactctgagcccattgtagatattcaaatgcataaaccaaaagaagagccacagattgtaccggcttcaacgaatggaacatcaatttcagaaccaaaaatcatttctgaaaatggaagttctgtggaaacacaggacatagatgttattttggaaggccttagtactgttagttctcttgacgaatggacaccattagctatcagtggccatcgtccgaagcctcgttatgagcatggagcaactgtgttgcaggataagatgtatatatttggcggaaaccataacgggtgttaccttagtgacctccaggctttggatctgaagaatttgacttggtcaaagattgatgccaaattggaagcagaatcttctgattcagcaaaaacctcacaaattgctccttgtgctggccattcattgtttttctccattgctgggcataccaaagatccatctgaaggtgttacagttaaggaatttgatccgcatacttgtacctggtctattgtcaggacttatggaaaatcaccggtttctcgcggaggtcagacagtgactcttgttggaacaacactagttttgttcggtggtgaagatgcaaaacggtgcctcttgaatgacttgcacattcttgatcttgaaaccatgacatgggatgatgtggatgcaataggcacccctcctccgagatcggatcatgctgctgcttgccatgctgaccgctatcttttgatttttggtgggggatctcatgcgacatgtttcaacgacctacatgtccttgatttgcagacgatggagtggtcaagacccaaacaacaaggcctgacgccaagcccaagagctggccatgctggtgcaactgtcggggagaactggtacatagttgggggtggcaataataaaagtggtgtctctgatactcttgttcttaacatgtcaactctgacatggtcagtggttagcactgcggaaggacgagttccccttgccagtgagggcatgactctagtgcatagcaattacaatggatacgattatctcatctcatttggaggatacaatggacgatacagcaatgaggtttatacacttagcctcaaatcagattttaagtccaccacaaaagaagaaactgtctcagatctagggtcgtcgaaccagaggttgaaatggtgattggcgtggacagtgctgattcagacctggtaatgtcctgctccgaacagtagtacagtactgatgaagcaagtgaacagttcttagcagctctcaaagctgagaaagaggaactagaagcgacacttaacagggaacagctgcaaactgtacaacttaaagaatacattgctcaagcagaatccagaaatgtggaactcacaaaggaacttcaagccgtccgtggccaacttgctgctgagcagtcaagatgtttcaaacttgaggtcgatgttgcggaactacgacagaagcttcaaagtatggatgcattggaaaaggaggtcgagctgcttcgacgacacagagccgcgtcagagcaagcagcgctggacgcaaagcagcggcaaagttctgggggcatgtggagctggctcgttggtacccctcctgatgataaatctgaatcgtgatcgcgtcgtgagggcagcactttagttcatacaggccgtgattcatatattatacttgtaacatttatatacccgttgatattttttttacagttactgaattcgtgttcattttgaccacagaagataaggaaatcattagtttt

SEQ ID NO: 155442 - DNA, 2073 bp, Zea Mays
tgcaaatttccatttccacgcgacgacgacgaagaggaggtgggattcggaggagtaaatcctaacagccgtctcgcgccggtggtccggtgcccgcgcgagatcggggggggggggggggggggggggggggcgacatctagggcgcggtgccggccatggcgagctctggactcgcctaccccgaccgcttctacgccgccgcagcctacgcggggttcggcgctggtggggccacctcctcctctacggcctgcacagcaggtgatgcgtcagccgatgcttttgctaattttggcgatcaagccacagttggtccgtgcaatgtgcccaagccaagggcgtggaaccccgtggagcagagcaaatgggccagttggcacggacttggaagcatgccatcggctgaggcgatgcgtctttttgtcaaaatcttggaggaggaagatcctggatggtactcaagggttcctgagttcaactctgagcccattgtagatattcaaatgcataaaccaaaagaagagccacagattgtaccggcttcaacgaatggaacatcaatttcagaaccaaaaatcatttctgaaaatggaagttctgtggaaacacaggacatagatgttattttggaaggccttagtactgttagttctcttgacgaatggacaccattagctatcagtggccatcgtccgaagcctcgttatgagcatggagcaactgtgttgcaggataagatgtatatatttggcggaaaccataacgggtgttaccttagtgacctccagtttttctccattgctgggcataccaaagatccatctgaaggtgttacagttaaggaatttgatccgcatacttgtacctggtctattgtcaggacttatggaaaatcaccggtttctcgcggaggtcagacagtgactcttgttggaacaacactagttttgttcggtggtgaagatgcaaaacggtgcctcttgaatgacttgcacattcttgatcttgaaaccatgacatgggatgatgtggatgcaatatctcatgcgacatgtttcaacgacctacatgtccttgatttgcagacgatggagtggtcaagacccaaacaacaaggcctgacgccaagcccaagagctggccatgctggtgcaactgtcggggagaactggtacatagttgggggtggcaataataaaagtggtgtctctgatactcttgttcttaacatgtcaactctgacatggtcagtggttagcactgcggaaggacgagttccccttgccagtgagggcatgactctagtgcatagcaattacaatggatacgattatctcatctcatttggaggatacaatggacgatacagcaatgaggtttatacacttagcctcaaatcagattttaagtccaccacaaaagaagaaactgtctcagatctagggtcgtcgaaccagaggttgaaatggtgattggcgtggacagtgctgattcagacctggtaatgtcctgctccgaacagtagtacagtactgatgaagcaagtgaacagttcttagcagctctcaaagctgagaaagaggaactagaagcgacacttaacagggaacagctgcaaactgtacaacttaaagaatacattgctcaagcagaatccagaaatgtggaactcacaaaggaacttcaagccgtccgtggccaacttgctgctgagcagtcaagatgtttcaaacttgaggtcgatgttgcggaactacgacagaagcttcaaagtatggatgcattggaaaaggaggtcgagctgcttcgacgacacagagccgcgtcagagcaagcagcgctggacgcaaagcagcggcaaagttctgggggcatgtggagctggctcgttggtacccctcctgatgataaatctgaatcgtgatcgcgtcgtgagggcagcactttagttcatacaggccgtgattcatatattatacttgtaacatttatatacccgttgatattttttttacagttactgaattcgtgttcattttgaccacagaagataaggaaatcattagtttt

SEQ ID NO: 155443 - DNA, 1404 bp, Zea Mays
ttcttaatgcacacctaatgagaagataaggccattatttgtttcgtgaatctttgctatgtgagcttaaaatgtatttttttaaaagctcctagatttggttggcgcactggtaacccagcatgattggtttacatggtaactttagcgctatcaagcattagcttttactaacataaaaatgcaaaataaatatagattgtatcaagaccttaaacatatttttcgtagttaggtaaggttatcttgtatttacactttcattatgaaggtgtaatatacgccccctcccccaatgtattttttttatgaaaggctgtattttaataacatgtatatgtggtttgtggaataatctctctaggtcatcatgcacatgttctgaatcacaaagcaatggtcttttttaaagccaaccttgtgttattgtattttgaattcagttcatcgtggtgttggcttttgtgttttagaggcacccctcctccgagatcggatcatgctgctgcttgccatgctgaccgctatcttttgatttttggtgggggatctcatgcgacatgtttcaacgacctacatgtccttgatttgcagacggtgcaaacttaatcttgctggaagtctgtaaagatttgtgtgttatctgtgactgctatttttttttgttggaactacagatggagtggtcaagacccaaacaacaaggcctgacgccaagcccaagagctggccatgctggtgcaactgtcggggagaactggtacatagttgggggtggcaataataaaagtggtgtctctgatactcttgttcttaacatgtcaactctgacatggtcagtggttagcactgcggaaggacgagttccccttgccagtgagggcatgactctagtgcatagcaattacaatggatacgattatctcatctcatttggaggatacaatggacgatacagcaatgaggtttatacacttagcctcaaatcagattttaagtccaccacaaaagaagaaactgtctcagatctagggtcgtcgaaccagaggttgaaatggtgattggcgtggacagtgctgattcagacctgtagtacagtactgatgaagcaagtgaacagttcttagcagctctcaaagctgagaaagaggaactagaagcgacacttaacagggaacagctgcaaactgtacaacttaaagaatacattgctcaagcagaatccagaaatgtggaactcacaaaggaacttcaagccgtccgtggccaacttgctgctgagcagtcaagatgtttcaaacttgaggtatacattggcttcttgttgcaatcaaacgagttgcacgacagataaatacaatgctctgatcatacataatttctgaaacaccccctaggtcgatg

SEQ ID NO: 155444 - DNA, 1996 bp, Zea Mays
caatcctgaaaaaaacttgaatcagcacgcggactatccgcgccactgaccgtgcgcgaggaccttgtgtgttcaacagttaacaccctgcactctgcaaatttccatttccacgcgacgacgacgaagaggaggtgggattcggaggagtaaatcctaacagccgtctcgcgccggtggtccggtgcccgcgcgagatcggggggggggggggggggggggggggggcgacatctagggcgcggtgccggccatggcgagctctggactcgcctaccccgaccgcttctacgccgccgcagcctacgcggggttcggcgctggtggggccacctcctcctctacggcctgcacagcaggtgatgcgtcagccgatgcttttgctaattttggcgatcaagccacagttggtccgtgcaatgtgcccaagccaagggcgtggaaccccgtggagcagagcaaatgggccagttggcacggacttggaagcatgccatcggctgaggcgatgcgtctttttgtcaaaatcttggaggaggaagatcctggatggtactcaagggttcctgagttcaactctgagcccattgtagatattcaaatgcataaaccaaaagaagagccacagattgtaccggcttcaacgaatggaacatcaatttcagaaccaaaaatcatttctgaaaatggaagttctgtggaaacacaggacatagatgttattttggaaggccttagtactgttagttctcttgacgaatggacaccattagctatcagtggccatcgtccgaagcctcgttatgagcatggagcaactgtgttgcaggataagatgtatatatttggcggaaaccataacgggtgttaccttagtgacctccagtttttctccattgctgggcataccaaagatccatctgaaggtgttacagttaaggaatttgatccgcatacttgtacctggtctattgtcaggacttatggaaaatcaccggtttctcgcggaggtcagacagtgactcttgttggaacaacactagttttgttcggtggtgaagatgcaaaacggtgcctcttgaatgacttgcacattcttgatcttgaaaccatgacatgggatgatgtggatgcaataggcacccctcctccgagatcggatcatgctgctgcttgccatgctgaccgctatcttttgatttttggtgggggatctcatgcgacatgtttcaacgacctacatgtccttgatttgcagacgatggagtggtcaagacccaaacaacaaggcctgacgccaagcccaagagctggccatgctggtgcaactgtcggggagaactggtacatagttgggggtggcaataataaaagtggtgtctctgatactcttgttcttaacatgtcaactctgacatggtcagtggttagcactgcggaaggacgagttccccttgccagtgagggcatgactctagtgcatagcaattacaatggatacgattatctcatctcatttggaggatacaatggacgatacagcaatgaggtttatacacttagcctcaaatcagattttaagtccaccacaaaagaagaaactgtctcagatctagggtcgtcgaaccagaggttgaaatggtgattggcgtggacagtgctgattcagacctgaagaacagtagtacagtactgatgaagcaagtgaacagttcttagcagctctcaaagctgagaaagaggaactagaagcgacacttaacagggaacagctgcaaactgtacaacttaaagaatacattgctcaagcagaatccagaaatgtggaactcacaaaggaacttcaagccgtccgtggccaacttgctgctgagcagtcaagatgtttcaaacttgaggtatacattggcttcttgttgcaatcaaacgagttgcacgacagataaatacaatgctctgatcatacataatttctgaaacaccccctaggtcgatg

SEQ ID NO: 155445 - DNA, 1063 bp, Zea Mays
gcgtgttccttctgccatgtgcgctactgtgctcttaagtccgaccgagcagccactgagctgaggaaaagcagcagctgcactcgcggactggtcgtgttggttgccacaatctcgatatctctcgccgccttttctttcctgaaaactgtagagaaataggaacggtacacacactatcgatccacgctaggagcgcgtagcgcaaagcaatgatctgcgcgcggcacactggaaacctggatcactatacacaaaagggtaagaggatcggtcgatcagtacacaggatgcaatcgtaagagttgtccgttagatcggttaactgggatccttttggtcaccgccgctactcagatttggcgatgccggcggccaaggaacccgcccaggaccgctctcttccgcctcggcgcctcttctccgccattgcctcctcgggccgtcattgtcgccggcgtgaccttccaccacgtcccaggtgaaccctccccccctcacccgaatccttcagtgcagcgcaagcccccgccgcatcgctgttgtcatctgactgaacacaacttctgctctactatattcatattcatttctccgtttcttttatgctgggtgaaagtgatacacatctgcgaaaagatgaggttgctgcgcatctgcaaaaagatgagtgtgccactaggtgatgctttactgcctgatgctgcatctcacatctttgatgggtctggcctgattcataatccagcaccccagcacctagccgtatatactgtcacatacaaatttcgagctgggttgctaaatttctttgatgcaactgtgtccatagcctcccaaagagcatctccaggtcaggaactgtgcatgtcaaaatttgatctgtcagctgttgagctcaggggcaatagtgcttctaaacacagatgcatccatttcagagtatacaacacataccatttgctactgttttgcagtgtaagctagcttatcttctcttgcaatgttacttttgatgactgaatattgcttttgactgacatgtgagatcattgttttgacg

SEQ ID NO: 155446 - DNA, 899 bp, Zea Mays
aaaagcagcagctgcactcgcggactggtcgtgttggttgccacaatctcgatatctctcgccgccttttctttcctgaaaactgtagagaaataggaacggtacacacactatcgatccacgctaggagcgcgtagcgcaaagcaatgatctgcgcgcggcacactggaaacctggatcactatacacaaaaggatttggcgatgccggcggccaaggaacccgcccaggaccgctctcttccgcctcggcgcctcttctccgccattgcctcctcgggccgtcattgtcgccggcgtgaccttccaccacgtcccaggtgaaccctccccccctcacccgaatccttcagtgcagcgcaagcccccgccgcatcgctgttgtcatctgactgaacacaacttctgctctactatattcatattcatttctccgtttcttttatgctgggtgaaagtgatacacatctgcgaaaagatgaggttgctgcgcatctgcaaaaagatgagtgtgccactaggtgatgctttactgcctgatgctgcatctcacatctttgatgggtctggcctgattcataatccagcaccccagcacctagccgtatatactgtcacatacaaatttcgagctgggttgctaaatttctttgatgcaactgtgtccatagcctcccaaagagcatctccaggtcaggaactgtgcatgtcaaaatttgatctgtcagctgttgagctcaggggcaatagtgcttctaaacacagatgcatccatttcagagtatacaacacataccatttgctactgttttgcagtgtaagctagcttatcttctcttgcaatgttacttttgatgactgaatattgcttttgactgacatgtgagatcattgttttga

SEQ ID NO: 155447 - DNA, 662 bp, Zea Mays
gacgaacagctagcaggagagaggcacctcgcaatagacgagagagagagagggaagaaaagatcgacgagcatccatgcgagcttgcgaggccagcaagatgactgccgcgtgctatagtgcgctgtcctcgccgtcaaatgcaggagcagctgcacgttacctctaactctgtgacacacaagaacaaaaatctaaagctaccacgtgcggagatcgatccagcatgcatgtagtatgagctgatgggcaggagcatacctgaagcttggcgagagtgatgaaaatcggtgtacagctccacgggtgctttttcttccgttgggcaacgcgagtaacaagagtggtagcccaggatcccaccgtaacaagagtaaccagcccttatataaagccgagaaaaaggcgaatgcaaagcgacccgggtggccggagcagcggagccacgggtgcagtgcagaaaggattcgaaatagtgtctttacatacttcaaaaatgtactgggtaaatagacgttaaaaaaacagtacaacaataacatatgtatgtatgaccatgtgttgtttcgttagtcaaagttaagacgcctctaaaacttaatcttgggggcctcttatgccaaatatcacttgtttacaaataaacggtcacttggctaaca

SEQ ID NO: 155448 - DNA, 743 bp, Zea Mays
gcttgtaccggaaggttatgtgtttgtgctgggagataacaacaacaatatcttcaagtaccaataatctgaaaagatggttccctactggttctgcatataggaagctgtgacataccatgtatttgtatctgaagaactgtttgacatatatttggttcctgattctacgatctgctgcaattgacatgcttttggttgattcagtttttcatattgagctgcacaagtgcagcacaagatatggccgcatatttacattacaaaggtgcagctttgctaacaggatctgcacgaaccagaaaccatcaggaataagcatcgctgtctgagaaatatggcccaggcttcagactgaatgtttggcatagcccgtgatacagcctacagcttcagcacgagaccaaggggactgtgatcactggcagaggtgtccggaataatatatgaatcatgcactttttctgcgattgattcggacacaagaaagtaatccaggcgccaaccttcaatccaatgaataaatcaaaacaagtgaaacggtgagagtgatcttgacttatgctggaataacaaatgggtataccaattttgatcagtgcttgtgcatgatggatgtaactcagaaaccttgctaaattacagaagtttccatgtattgtggcacaaattgctaaaatcgtaggtatgtttgtaaggggcacataatctcaaggatgtgtttgaaacagcattatgtctgt

SEQ ID NO: 155449 - DNA, 240 bp, Zea Mays
cctttttctgtgataaaactctttcttatgttgacagattattgtactaatttggttttgaattccttatcatacagagccacagaggtgttggagcatgcttgtggaatgggaacattgcaaatgggcgaatatgaatcaagtgtttctattgggaacgacacctttagcattcgggagccacctggtgtttgcactgggatatgcccatttaattttcgtgctatgattcccctatag

SEQ ID NO: 155450 - DNA, 109 bp, Zea Mays
gatttgttctttggcatttgcaggttatcttgtattcttggcaaggcttacgaagtttgctaattaattgtgtactaagttacggccgcgcactgttcatagaccaaat

SEQ ID NO: 155451 - DNA, 438 bp, Zea Mays
atgcagaagtgctcgaaagccagcttgaagtcagggatgtatggcttgattttcatcttgagcaccttcttggcaatcaatgtgcccatgaagagaagttgctctgataatgggagcaccaacggccccagcgtggtgatgttggtcttaagtgcgtctccggccactgccatgaggtccttggacagtgacacgccaatcttgccaatctcatcttcctcctgtgtcacgcagccgaagcacttgtcgttggcgcccttgtgcgtgcgcaccgtgtgcaccagctcatacttggacctccgcctgtcagaccgcctgttcgagagcaggatggccgcgccacccatccggaacaggcaattcgacacaagcatggaccggttgttcccaaagtaccaattcagtgtgatgttctccatgctgatcaccagggcgtaa

SEQ ID NO: 155452 - DNA, 104 bp, Zea Mays
gtataaagataaacatccatgtgtacaccctgttcattgtttttctatgaatccagtgataccaagatcaagtggtcaactctattttaattcaaaaataatgc

SEQ ID NO: 155453 - DNA, 1602 bp, Zea Mays
cccgctacgacctacgatcatgaccaaaggaccgatcgagcgcgtgccgcttcgtctcggctcgtcccaagtcctaaccctatataagcacagggtctggcttcctgcccctgcccccctgccccacactttagcccaaggaggacgatggagaagaagaaggtggcgataccgctggtgtgccacggccactcgcggccggtggtggacctcttctacagccccgtcacacccgatggctacttcctcatcagcgccagcaaggatacaaatccaatgcttcgtaatggtgagactggcgactggattgggacttttcaaggtcataaaggagctgtttggagctgttgccttgacaggaatgctctgagggctgcatctgcttctgctgacttttcagctaaagtatgggatgcacttactggggatgagctacattcatttgaacacaagcatatagttcgggcatgtgccttctctgaggatacacaccttttactcactggaggcatggaaaagattttgcgtgtgtatgatatgaatcgtcctgatgcagctccaagagagcttgacaaatcacctggttccgtccgaactgctgcttggcttcatagtgaccaaactatattgagttcctgcactgacatgggtggagtaaggctgtgggatgttagaactggaaaaattgtccaaactcttgaaaccaaggcttctgtcactagtgcagaagtaagccaggatggcaggttcatcactactgctgatggctcaagtgtaaaattctgggacgcgaatcactttggccttgttaaaagctatgatatgccatgcaatgtggaatcggcttcacttgaacctaagtctgggagtaaatttgtcgctggaggagaagatttatgggttcatgtatttgatttcttcactggtgaagaaatagcttgtaacaaaggacatcatggtccagtccactgtgtccggtttgcaccttgtggtgaatcatacgcatcgggttcagaagatggcaccattcggatctggcagcttagcccggctaatgctgatgacaatgaggtggccaatgcaaatggcaagacaactgctggggtaaacgaagttacaaccaagatcgaaggcttccacattcccaaggaggggcagaccgaggggagattgccatcagagctgcagtggtcattcagtttccctctgcggagtcatcatgtctgcgatccaagggtatcctggcttcatgagtcatcatcagcactggggaaaaacaagcaagcaaatggtggtgggtttttggatggggccctcgctttgatagaacatagcaattgtagcgtcaaaaataaacaagagttgggtagtttaggtaccgtgtttgcgttcattaaagtgaagtattctgtatcaccacagtcccctaaaaaaatacttgaggccttcatcgttggaacaccgaccttcaaagctgtagaccacttcttgatcctgaggtatcccataaggagaacatctgggatatggcacatgtttcgttttgcagcgaacatccctgctttcgcaaaagggaatcgcgtcacatgccccgccatgtga

SEQ ID NO: 155454 - DNA, 1936 bp, Zea Mays
gcccccctgccccacactttagcccaaggaggccggcctcgcctcgcctcgcctcgcttcatacgcccgcccgcccctgccgatccatccacccaataaagcgcctgtacagatccaacccttaggatccggatcgccttacccccccgcgacgatttgcgcgattcgattcgattcgattcgattatcctccgattttccccgttttttgtaggtttcctctctttttcgatcggtgtgctagggtttgggcgcgcggaggcgtcgcattccagggtaatcattggttcgacgggctagggtgctttctcacccggggaacggaagcgaatccagacgatggagaagaagaaggtggcgataccgctggtgtgccacggccactcgcggccggtggtggacctcttctacagccccgtcacacccgatggctacttcctcatcagcgccagcaaggatacaaatccaatgcttcgtaatggtgagactggcgactggattgggacttttcaaggtcataaaggagctgtttggagctgttgccttgacaggaatgctctgagggctgcatctgcttctgctgacttttcagctaaagtatgggatgcacttactggggatgagctacattcatttgaacacaagcatatagttcgggcatgtgccttctctgaggatacacaccttttactcactggaggcatggaaaagattttgcgtgtgtatgatatgaatcgtcctgatgcagctccaagagagcttgacaaatcacctggttccgtccgaactgctgcttggcttcatagtgaccaaactatattgagttcctgcactgacatgggtggagtaaggctgtgggatgttagaactggaaaaattgtccaaactcttgaaaccaaggcttctgtcactagtgcagaagtaagccaggatggcaggttcatcactactgctgatggctcaagtgtaaaattctgggacgcgaatcactttggccttgttaaaagctatgatatgccatgcaatgtggaatcggcttcacttgaacctaagtctgggagtaaatttgtcgctggaggagaagatttatgggttcatgtatttgatttcttcactggtgaagaaatagcttgtaacaaaggacatcatggtccagtccactgtgtccggtttgcaccttgtggtgaatcatacgcatcgggttcagaagatggcaccattcggatctggcagcttagcccggctaatgctgatgacaatgaggtggccaatgcaaatggcaagacaactgctggggtaaacgaagttacaaccaagatcgaaggcttccacattcccaaggaggggcagaccgaggggtaggatctcatgtgttttgtggtgcttgtggttcttattgcgaggagattgccatcagagctgcagtggtcattcagtttccctctgcggagtcatcatgtctgcgatccaagggtatcctggcttcatgagtcatcatcagcactggggaaaaacaagcaagcaaatggtggtgggtttttggatggggccctcgctttgatagaacatagcaattgtagcgtcaaaaataaacaagagttgggtagtttaggtaccgtgtttgcgttcattaaagtgaagtattctgtatcaccacaggtaaccttgattgtggtgactatttttttttggtttgcctcaccgtgttccagtcccctaaaaaaatacttgaggccttcatcgttggaacaccgaccttcaaagctgtagaccacttcttgatcctgaggtagttctggagcgtcatgcctatcaaatgatagatttctgttcagatggcttgagctctctagacatgctcttgtggtggctctctactagacatgctcttgtggttgcttccacggtactgaagaccaggacacgacgatacacg

SEQ ID NO: 155455 - DNA, 132 bp, Zea Mays
gtatgcttcggcatgaaatgcaacaaccaaagtttttctttctagggttttattttattaggattacacatagatattgttggcgtttcggaccccgggggacccttaaccgagccaaccagtaaatttatc

SEQ ID NO: 155456 - DNA, 752 bp, Zea Mays
ggcaacgccattcttctgtgttcgcgtgtgttagaggattgtgtgacatcgtaggcgcaattcatgtatcgtcgatcgtcgtcgagctgtgcattttggcaggtggcgccaacatcaagtatcaaatctcagtgtgtaatcccacacacaaacccgatagtgacgaagatgggcgacaacaggtcgtcaagcactgtggcatgcgacgtgcaggagagctcgctcatgtggccaatgctcacccgctccaattatttggagtgggccatgttgatgcagtgcaactacgaagtgaaagggaattaggcttacacctattttcctaattgattttggtggttgaattgcccaacacaaataattggactaactagattatacaggtgtaaaaggttcgcacttagccaataaaaagatcaagtattggattcaacaaaggagcaaagggacaaccgaaggcacctctggtctgggggcaccggactgtccggtgtacaccggacagtgtccggtgcaccaccggacagtgtccggtgcaccagaggactccaactcaaacttgccaccttcgggaatttccagaggcactccgctataattcaccggactgtccggtgtacaccggacagtgtccggtgctccaaggaagagtcgcctcaggaactcgcctgcctcgggaaatcacagcggctgctccgctataattcaccggacatgtccggtgtacaccggactgtccggtgcaactccgg

SEQ ID NO: 155457 - DNA, 1578 bp, Zea Mays
ctcttcgccttttcctcccctactttttcctgctactgttcacgctctacagtacggaggctcctacgtgcaggtagctcccaggaccagatccgaaccctaaccctagccaatttggtcggtgatggaagagcacgtgcctcgaggcggcggcggcgggaggcccccgatcccggcggcggcggcgaggaagccggcgctcgcgcggcactcctcttttgtgaggagtcctgcaaacaatacaaagcctgcaactgagagagcttttgaaggcatggacactgaatttatccctattgtacgatctggtgggtgggctgatattggctccaggcacacaatggaggatgtctttatctgctttgataatttcatgcaagattttggaattgaaagttttgaagaaggacccagtgccttttatgggatttttgatgggcatggtggaaagcatgcagctgattttgtgtgcagtaatttaccaaggtttattgtcgaggatgaggattttcctagggagatagtgaaagcaatgtcctctgcattcttgcaggctgatgcttcttttgcagatgcttgttctctgaactgctctctttcttctggtacaactgctcttgcagcacttgtggttgggagatcacttctggtcgcgaatgctggtgactgccgagcagtactttgtcgtcgtggaaaggcaattgagatgtccagggatcacaaaccatcttgcaacagggagaagatacgtattgaggcattgggtggatatgtcgatgatggctacctgaatgggcagcttaatgtcgctcgagcaattggggactggcatatggaaggcatgaaggcatgtggtggtcttggtcctcttactgccgagcctgaggtaatgacaatggatctaactgatgaggacgaattcctgatcatgggctgtgatgggatctgggatgtattcctcagccaaaatgcagtagattttgctcgccgtaagctccaagaacacaatgacccggctgcctgctgtaaagaactagttgatgaggccattaagaggaagagtggtgataacctttctgtggttgtcgtctgcttcaactctaggccgcctcctgttctaacaactcctaggcctcgtgtacagaggagcatatctgcagaaggcctgagagagctgcagagcttccttgatagtttggccgattgacatggggttctagcagccccactataagttttgaccttttccatagcttagcttggaaaataggtttagcatgtgctgtctcataacttcgctgagatggctgctgttgagtaatctagagttgtaaaatatgctgcggctaactgtgtcagcagttgagagcgtttatcagttgagagtatttatcagcatgttgactttgtgagtcctgaatgattagtcggcatttcttaggtctccataaatcggtggttcatcgttgtaaaaggctgttaatgcccttggatattttcctgtattgttcgctttggacaagttattaactgggaaaactgctgtttttgctgcgaagtggttgaattttcttgggt

SEQ ID NO: 155458 - DNA, 2133 bp, Zea Mays
gttttctcttcgccttttcctcccctactttttcctgctactgttcacgctctacagtacggaggctcctacgtgcaggtagctcccaggaccagatccgaaccctaaccctagccaatttggtcggtgatggaagagcacgtgcctcgaggcggcggcggcgggaggcccccgatcccggcggcggcggcgaggaagccggcgctcgcgcggcactcctcttttgtgaggagtcctgcaaacaatacaaagcctgcaactgagagagcttttgaaggcatggacactgaatttatccctattgtacgatctggtgggtgggctgatattggctccaggcacacaatggaggatgtctttatctgctttgataatttcatgcaagattttggaattgaaagttttgaagaaggacccagtgccttttatgggatttttgatgggcatggtggaaagcatgcagctgattttgtgtgcagtaatttaccaaggtttattgtcgaggatgaggattttcctagggagatagtgaaagcaatgtcctctgcattcttgcaggctgatgcttcttttgcagatgcttgttctctgaactgctctctttcttctggtacaactgctcttgcagcacttgtggttgggaggtaatattcttattaatttctgcaactgtgatccatacaaaatcattgtatagaataggtgtcactggctcactgctatttgatgtttctcactacatatggacgatggggggcctttttttgtttttatccaatctgccaaaatcaattctgacacatggtaactactatatgaagtttatcatttacttatgcaggtgggagcctttcctatttgtggtttatataccatcatgtgcccttttgtcccacctgactaaatctgttctggcacctgcactcatgtgtattattgcaaacaagctgcatgtgccttcacttgtttcctacaaggatctgcatcccctgccctttggtgactgcatatattcaaattttcgtggtgcatgcatgtgttttttagcgctgttcgttgctcttctatggaatgtcctgaagatagctaaatttgttaatttttaatttgttagttctggcccctcaaatttgcacatgcttttcacttaaatcctcagatgctgtcatatttctgtgtctggatgctcaacagatcacttctggtcgcgaatgctggtgactgccgagcagtactttgtcgtcgtggaaaggcaattgagatgtccagggatcacaaaccatcttgcaacagggagaagatacgtattgaggcattgggtggatatgtcgatgatggctacctgaatgggcagcttaatgtcgctcgagcaattggggactggcatatggaaggcatgaaggcatgtggtggtcttggtcctcttactgccgagcctgaggtaatgacaatggatctaactgatgaggacgaattcctgatcatgggctgtgatgggatctgggatgtattcctcagccaaaatgcagtagattttgctcgccgtaagctccaagaacacaatgacccggctgcctgctgtaaagaactagttgatgaggccattaagaggaagagtggtgataacctttctgtggttgtcgtctgcttcaactctaggccgcctcctgttctaacaactcctaggcctcgtgtacagaggagcatatctgcagaaggcctgagagagctgcagagcttccttgatagtttggccgattgacatggggttctagcagccccactataagttttgaccttttccatagcttagcttggaaaataggtttagcatgtgctgtctcataacttcgctgagatggctgctgttgagtaatctagagttgtaaaatatgctgcggctaactgtgtcagcagttgagagcgtttatcagttgagagtatttatcagcatgttgactttgtgagtcctgaatgattagtcggcatttcttaggtctccataaatcggtggttcatcgttgtaaaaggctgttaatgcccttggatattttcctgtattgttcgctttggacaagttattaactgggaaaactgctgtttttgctgcgaagtggttgaattttcttgggt

SEQ ID NO: 155459 - DNA, 1307 bp, Zea Mays
cgctctacagtacggaggctcctacgtgcaggtagctcccaggaccagatccgaaccctaaccctagccaatttggtcggtgatggaagagcacgtgcctcgaggcggcggcggcgggaggcccccgatcccggcggcggcggcgaggaagccggcgctcgcgcggcactcctcttttatttttgatgggcatggtggaaagcatgcagctgattttgtgtgcagtaatttaccaaggtttattgtcgaggatgaggattttcctagggagatagtgaaagcaatgtcctctgcattcttgcaggctgatgcttcttttgcagatgcttgttctctgaactgctctctttcttctggtacaactgctcttgcagcacttgtggttgggagatcacttctggtcgcgaatgctggtgactgccgagcagtactttgtcgtcgtggaaaggcaattgagatgtccagggatcacaaaccatcttgcaacagggagaagatacgtattgaggcattgggtggatatgtcgatgatggctacctgaatgggcagcttaatgtcgctcgagcaattggggactggcatatggaaggcatgaaggcatgtggtggtcttggtcctcttactgccgagcctgaggtaatgacaatggatctaactgatgaggacgaattcctgatcatgggctgtgatgggatctgggatgtattcctcagccaaaatgcagtagattttgctcgccgtaagctccaagaacacaatgacccggctgcctgctgtaaagaactagttgatgaggccattaagaggaagagtggtgataacctttctgtggttgtcgtctgcttcaactctaggccgcctcctgttctaacaactcctaggcctcgtgtacagaggagcatatctgcagaaggcctgagagagctgcagagcttccttgatagtttggccgattgacatggggttctagcagccccactataagttttgaccttttccatagcttagcttggaaaataggtttagcatgtgctgtctcataacttcgctgagatggctgctgttgagtaatctagagttgtaaaatatgctgcggctaactgtgtcagcagttgagagcgtttatcagttgagagtatttatcagcatgttgactttgtgagtcctgaatgattagtcggcatttcttaggtctccataaatcggtggttcatcgttgtaaaaggctgttaatgcccttggatattttcctgtattgttcgctttggacaagttattaactgggaaaactgctgtttttgctgcg

SEQ ID NO: 155460 - DNA, 739 bp, Zea Mays
atccaatctgccaaaatcaattctgacacatggtaactactatatgaagtttatcatttacttatgcaggtgggagcctttcctatttgtgttctggcccctcaaatttgcacatgcttttcacttaaatcctcagatgctgtcatatttctgtgtctggatgctcaacagatcacttctggtcgcgaatgctggtgactgccgagcagtactttgtcgtcgtggaaaggcaattgagatgtccagggatcacaaaccatcttgcaacagggagaagatacgtattgaggcattgggtggatatgtcgatgatggctacctgaatgggcagcttaatgtcgctcgagcaattggggactggcatatggaaggcatgaaggcatgtggtggtcttggtcctcttactgccgagcctgaggtaatgacaatggatctaactgatgaggacgaattcctgatcatgggctgtgatgggatctgggatgtattcctcagccaaaatgcagtagattttgctcgccgtaagctccaagaacacaatgacccggctgcctgctgtaaagaactagttgatgaggccattaagaggaagagtggtgataacctttctgtggttgtcgtctgcttcaactctaggccgcctcctgttctaacaactcctaggcctcgtgtacagaggagcatatctgcagaaggcctgagagagctgcagagcttccttgatagtttggccgattga

SEQ ID NO: 155461 - DNA, 726 bp, Zea Mays
ttaaacaagcctccgtagaaatctttccattctccctagtctaggacccgggatgaggactcgtattcctatttctttctttggatttgatcgagggctcaagtggcagcgcagatgttgttgacattggagagacctcgtatgcaatttattctctgctctgcgagattttggtagcatttttgggtactgtacttacatcaataaagtgcgctcacttctttgcactttgactgacaggtacaccatggttttggctgacaatgtggatggcggagacgatcttgatcttattgttactactatgaacggcaacgtctttagcttttccactccctcaccacaccatccactcaaggtaggcaatgcgtttttgtagtcatgtcttcattttgtttcacagtatttaaacttaagtcggatagatcttttggtgaacccattgcaacttctgcttaaagctggcttgatacttcagacttacatatctcctttgatctttttattcttttgatgtttaaacatagaggtgagcatgaaaacgagataaccatatcattccaatttgatggtaggaatggagatcatcaaaccaaggaaggaataatgctgcatatcggtacaaccgtgaaggtttttatgttaagcatgattccaggaccttccgtgacgaagagggcaagcatttctgggtagagtttgagattgttgacaagtacaggcttc

SEQ ID NO: 155462 - DNA, 612 bp, Zea Mays
aagttgagccagactcaattgcttctgttccttctggggctggcttggcttcttgagtttcctaaaaggccttcctcggatgcgatagagatagatcgcttttctttttaataattctttccccgcaagctcaacagcggaaccggaccctggcctcaatggatccgaatctggcctgcccgaaggaatggactgtacgaattggtcacttggctgagactaccatatttggaaacctggcctagattagaaggatgcgaacaaggcatagttccggcactttctctactccaatacctgcttcttcgcctgcccaaaactaatagctctgttggaacgagtgctgggattcatcttcctcatcttcattcatctacctcgcgccggagaccttcacaagctcactagtatagatcagatctatctggccaaaggataaactagtagctatatgaagacctgcacccgcccctgctctgaaatgtttcccgaggaactgcttccagtatcgatagaagctcgagtgttcacatgcataccactactatccagcatcaactggacctgcacctaaagagaaagagaggcgcagaatcactcaactagactcac

SEQ ID NO: 155463 - DNA, 624 bp, Zea Mays
gctttttttctcgtttagtactttacttgtgtaaactctctctttttcttttcttagagaagcgcaggattccctttcttcccggaacactaatacaatcgcactttcttccttgtcccgctaacctattattttttttaagacagaatttttagcttgaactatcaatactagcctaattgattgctggaatggaacttgatgtaactggcagggaccgcttatatagaacgcttgtagggaaccggaaaccaacctgctctgctagggaaacgaccccggagaccagcctgatagactatatctatgaacttcgaataagtccctactttcctatcctaataagggtactggctcgcgaatggccctacaaaatgactctcctaaaatcaatgtctggaagtccttttaagataggttaatataagatatgctatgcttaacacttaggcttagcaagagggactggcgcgtgagaccgagatcgccatagattgattgtgcaggcaggtaatactcattttaactagaaagaggatattatattatacatgagtactggttatagtcacactcccaaactcccgagaagtcttttttacttaactctaggacttgctataa

SEQ ID NO: 155464 - DNA, 792 bp, Zea Mays
cctaattgctctccatcccacatccgccgtcgccgttccccagcatcgcaaaacccgccctcgccgtctccatgtacgcagtcgccgccgcctcatcctcccatccccatctgcctcatcttccccttggaggactcaaggagtggcatcggattgcatttaactgccctgggcagcccgatctagcgtctggtgcacgccgttggcagccagcggcggcccgccgagcgccgcagggaagccacgagcacacgctgtcacgggaggaagcagatggagcacacatgcctttctgtttagcccgccaggtagatcgggtttagcgagatgcttgcggcggtgatccattgccaccagtaacagggaaaagcaggcagctagcagccgatccatctctgacgacaacgctagcggcgatccatctttgcctccacccacgccgtcgccgagccggccactccctgatacgggcacagcgccgctgcggcggctcaccagctccaacctctgtcctccgatactccactgtccggtcgcaaatgctcctccatggaacggctgatggctacacaccagtacgtatccagcagcgtctaagcatttagctgtcagagtgcctatcgaatttagcgtctaaaatataaagttcagtagagtattacagtgggtcaaatttcaggcggtatcatcagctgggccgactgcattttctgtaatacctaggcatagttgaactactctcgaagtcccacgactcttctccagcagcatctggttctggagcatcagcag

SEQ ID NO: 155465 - DNA, 2317 bp, Zea Mays
atggagtggagtcccgggcaaccgctgtccgctgggcaggggcaaccactttcgtctcgtccgcacatgcacggcgaagagaggactcctgttgattcattcattcacttgatctgctcagctcagcaacaggaagcatcgtatgcatggccagccagcccaggcccgctctccatacccggctgccacgcactcaccgaccccacgctctccaaacgggttaaaaggtcgcggtggacaacgcccggtgcgggtgtcagtgccagcgccagcggagaaaagaaacagagttcgaccggccccgccccgccccgcccggccgcccccaccgcagcgcccgcgaagccgccaaacaccaccacctatccgccagaagcctcttcctccctcgctctcccccatcggcgcgctgccaatggccgcgtggtgaagcgcacccgacggaagaagcacgcaccaacacccaagccccctgtgccctcgccgtcgccgcccgcgcaagattgagatcccggattcagacaggtgctaccattcgatttgatttggcgcggagcactttcctatggccgcctccatcgcggcctcgtccttctttccagggtcaccggcgccggccgctcctaagaacggccttggggagcgcccagagagcctggacgtccgcggcgttgcggcgaagccgggagcctcgtctagtgccgtgagggcgagcaagacgcgcgcccacgctgcggtccccaagatgaacggtgggggcaagtccgcggtggcggatggggagcacgaaaccgtaccttcttcggtgccgaagactttctacaaccagcttcccgactggagcatgctccttgcggccatcaccaccatcttcttggccgcagagaagcagtggacgatgcttgactggaagcctaggaggcctgacatgctcactgacacgtttgggtttggccggatcatacatgatgggctcatgttcaggcagaacttctccattaggtcctatgagattggggcagataggacggcatctatagagacgctgatgaaccatttgcaggaaacggcactcaatcatgtgaagaccgctgggctgctaggtgatggatttggctccacaccagagatgagtaaacgaaacttgttctgggtggttagccaaatgcaggccatcatcgagcgttatccatgctggggtgatactgttgaagtagatacatgggttagtgctaatggtaaaaatggaatgcgtagggattggcatatacgcgatcctataacaggcctcacgatactgaaggcaacaagtaaatgggttatgatgaacaaactcactaggaagcttgcaagaattccagatgaagtgcggactgaaatagagccatacttttttgagcattctgctattgttgacgaagacaaccgcaagcttccaaaactgccagagggacaaagcacgtctgtagctaaatatgtgaggacaggcctgactcctcgttgggctgatcttgatataaatcagcatgtcaataatgttaaatacattgcgtggattcttgagagtgcacccatctctattcttgagaatcatgagctggcgagcattgtgctggattacaaaagggagtgtggccgggatagtgtgctgcaatcacacacctctgtgcacacggattgcaacagtgagtctggagaaacaaccttgcactgtgagcatgtgctgagccttgaatcaggtccgaccatggtgaaggcccggaccatgtggaggcctaagagaaccaaggcccaagaaacagttgttccatcttcaatttgaattgtgtgagacgttcgggatggtgattttggcaacaaactactactatttggcaaaaagatcagaatggttactagcgtcctctattggaagcaagtcacacagggcgagacctaaactaatttaattatgaagtgtgaacaatagaggagatataaatagtgtgaacaatggactggaagagacagaagcggggggagatcgaagacaagggaggcctcatgtgcatgacaatcttcggtcgcacaaatgggtgttgtaagtattgatctgtaagctacaaatgtatgaaggggagtgagtgcttcccatacatgttccttctggggctatgtccatatgctataagcccctcgaaaacattgtcgcagccatatattcatgcagaggattttaatctcgtacgtatattgtatttgctgatattaagattgatattattactacttttctccaggctgccaaagcgttttgaaacttggacagatattgaaa

SEQ ID NO: 155466 - DNA, 1964 bp, Zea Mays
gctgtagctatttctgggcgcttcgctgttcggcctgctagcgtccgggccgtgacagctggggtgaatcgcgggagttcagggtccttgccccggctggatctcgagttcaggaaaccttgcgcccctcttccttctcgtttacgccgctagatttgggttgctgccgcttattttcttggattgagatcccggattcagacaggtgctaccattcgatttgatttggcgcggagcactttcctatggccgcctccatcgcggcctcgtccttctttccagggtcaccggcgccggccgctcctaagaacggccttggggagcgcccagagagcctggacgtccgcggcgttgcggcgaagccgggagcctcgtctagtgccgtgagggcgagcaagacgcgcgcccacgctgcggtccccaagatgaacggtgggggcaagtccgcggtggcggatggggagcacgaaaccgtaccttcttcggtgccgaagactttctacaaccagcttcccgactggagcatgctccttgcggccatcaccaccatcttcttggccgcagagaagcagtggacgatgcttgactggaagcctaggaggcctgacatgctcactgacacgtttgggtttggccggatcatacatgatgggctcatgttcaggcagaacttctccattaggtcctatgagattggggcagataggacggcatctatagagacgctgatgaaccatttgcaggaaacggcactcaatcatgtgaagaccgctgggctgctaggtgatggatttggctccacaccagagatgagtaaacgaaacttgttctgggtggttagccaaatgcaggccatcatcgagcgttatccatgctggggtgatactgttgaagtagatacatgggttagtgctaatggtaaaaatggaatgcgtagggattggcatatacgcgatcctataacaggcctcacgatactgaaggcaacaagtaaatgggttatgatgaacaaactcactaggaagcttgcaagaattccagatgaagtgcggactgaaatagagccatacttttttgagcattctgctattgttgacgaagacaaccgcaagcttccaaaactgccagagggacaaagcacgtctgtagctaaatatgtgaggacaggcctgactcctcgttgggctgatcttgatataaatcagcatgtcaataatgttaaatacattgcgtggattcttgagagtgcacccatctctattcttgagaatcatgagctggcgagcattgtgctggattacaaaagggagtgtggccgggatagtgtgctgcaatcacacacctctgtgcacacggattgcaacagtgagtctggagaaacaaccttgcactgtgagcatgtgctgagccttgaatcaggtccgaccatggtgaaggcccggaccatgtggaggcctaagagaaccaaggcccaagaaacagttgttccatcttcaatttgaattgtgtgagacgttcgggatggtgattttggcaacaaactactactatttggcaaaaagatcagaatggttactagcgtcctctattggaagcaagtcacacagggcgagacctaaactaatttaattatgaagtgtgaacaatagaggagatataaatagtgtgaacaatggactggaagagacagaagcggggggagatcgaagacaagggaggcctcatgtgcatgacaatcttcggtcgcacaaatgggtgttgtaagtattgatctgtaagctacaaatgtatgaaggggagtgagtgcttcccatacatgttccttctggggctatgtccatatgctataagcccctcgaaaacattgtcgcagccatatattcatgcagaggattttaatctcgtacgtatattgtatttgctgatattaagattgatattattactacttttctccaggctgc

SEQ ID NO: 155467 - DNA, 1679 bp, Zea Mays
acccgtcttcccagtcccaggtgaggcagccagtgcgcgcacccaccgccgccgcggtccagatctcccacccaaagtgctgccagcagcatgaggagcgcgggtgcggcggcgaccgtgacgcgtctggcgcagcgggtggtggccccggcggcgcccacgccccgaggacagctcccgctctcctggctggaccgctacccgacccagcgcgcgctcatcgagtccctccacgtcttcaagggccgagctgacgcgggagcggaggcgcccgccagggccattgagcgcgcgctggctgccgcgctggtgagctactaccccatcgccgggagactggcggtctcggacgagggggagctggtggtggactgtaccggcgagggcgtgtggttcgtcgaggccggggccagctgcgccctcgcggacgtggactacctcgagtacccgctcatggtgcccaaggacgagcttctcccgcaccccacctatcccgaatctgacctcctccccgaggactcgctcatcctccttgtccaggtgacgcagttcgcgtgcggcgggttcgtggtcgggttccggttcagccacgcggtcgcggacggccccggcgcggcccagttcatggccgccgtcggcgacatggcgcgtgggcacgcggcgcccctggtggccccggcttggggccgcgaggcgatcccgaaccctcccggcgcggcggtgggcgcgctgccggtcccgacggagctccggctgcagtacctcgccatggacatctcgacggaatacatcgagcacctgaaggcgcggttcctggagcaggcggggcagcggtgcagcgcgttcgaggtgctgatcgccaaggcgtggcagtcgcgcacccgcgcggcggggttcgcgcggggctcccccgtgcacgtgtgcttcgccatgaacgcgcggccggcgctgggcgtcccgcgcgggttctacggcaactgctactacatcatgcgcgtgtcggcggccgccgaggccgtgtcggacgcgtccgtgtgcgacgtggtgcgcctcgtccgcgagggcaagaagcggctgcccggcgagttcgcgcggtggagcgcgggcggcggggtggacgacccgtaccgcatcacgtcggactaccggacgctgctggtgtctgactggtcgcggctcgggttcgcggaggtggactacgggtggggctgccccgtgcacgtcgtcccgctcaccaacctggactacatcgcgacgtgcatcctggtccggccctccgcgcacaagcccggcgcgcgactcatcacgcagtgcgtggacgccggcgccgtcgacgcgttccacaaggacatgatgcggctcgactgattattctgctgtttgttaatccagttgcataatttaattcgttcgttcgttcgttgctgtatcgcatgagtgcatgactgggttgttgagcacatgagtggaatagttataaaaagaagaagatactattacggtctaagtgcatcaccaatgaatactacgtgcgtgcctgcaacgggaagcattgtttattcttcccttgtacatgttgcgtgtgtttagggagcacatcaaattagtaagtaggtggtggggagccattttctgctgttccctcttgcttaagcaactggaaatggtgccagaaagag

SEQ ID NO: 155468 - DNA, 1734 bp, Zea Mays
aaaagttagaaaattaattctgcgttagttactccaggcttaaggttaagcacctcccaaacacgcctatgagggccctcgtccggatccacctgcccacggccatctccaccggatccttcctccacacctcctcaaccgccgcctccaagaccctagtaccgaaccccaacctcgtcccgctccggctcgtccgccacttcccggccatggccgccaccgccgcagacgagttcgtgaagggccgcgtcttccccaacggcgtcgccgtcatcacgctcgaccgacccaaggccctcaacgccatgaacctcgaaatggatgttagatacaaggcacttcttgatgaatgggaaacaaatccaagtgtcaagtgtattcttgtggaaagcagctcttctcgtgccttctcagcaggtggggatgtgaagagacttgctaatgattgcaccatgccagaaataatagaggtattcacagtagagtactctttaatttgtaagatacatgagtatgcaaaaccttatatatgcttgatggatggagtgacaatgggatttggaattgggctatcagggcatggccgctaccgcattattacagagagaacactcctagccatgcctgaaaatggtattggcctgttcccagatgttggctttgcttacattggtgcaaaagcaccaggagggggtgcagttggagtttaccttgggattactggaaaaaggatatcatcacctgctgatgctatgttcataggccttgcaccaatgatcctcatagagacgttgagtcagttctgacaggatacaagaaagaaccagagtctgaaccacaactaaaaaagcttttgccatatatcatttcttctttcagtcctgataaatcagtggctgaatctgtggaagagctaaagaaatgtagccgaagtggtgatgctgcagtggcagaatgggccaatgaagctttagcaggaattgagaaaggcgctccattttctctttgtttaacacagaagcatttctctcaagttgcatcagcatatgggactagtgaacactatttatctaagctggctggtgttatgaaattggaatatcgcattgccttgaggtcgtcgattagaaacgattttgttgaaggtgtgcgtgctgttttagttgacaaggaccagaatccgaagtggaatccagccactctggaagaagtaaacatggccgaggtcgaatcagttttcgagccattaggggccgaggctgagttgagtgtgtgaaatatggcctgccacactcagttttcttatttgtgctgcaataataatgtatacaaaacagaaatgcgatgcccacagaaacaataaatgctgtgtcttcatgaactaactggagtggttccattttctcgaaaggggcgcgtgggaatctaaggtctgttgcttgctttcctgcctctgcctgcaatattccagccatggtaccaggtggatggccaaatactctagaagcgtttgccctgggcacttgcatgtagcttgatgtgagtagtgtaagaacaaccgggtacggaaaccgttgtctggccagcagatttcaaggcgtgtttagacaagtgtacaactgacgcgcacagatgtacggagtatatattatatgaaatatggcactaaaactcttttcccaggggctttgacgcaggcccggccgcggaaaaagtacgtgctttcgttttcgc

SEQ ID NO: 155469 - DNA, 1756 bp, Zea Mays
aaaagttagaaaattaattctgcgttagttactccaggcttaaggttaagcacctcccaaacacgcctatgagggccctcgtccggatccacctgcccacggccatctccaccggatccttcctccacacctcctcaaccgccgcctccaagaccctagtaccgaaccccaacctcgtcccgctccggctcgtccgccacttcccggccatggccgccaccgccgcagacgagttcgtgaagggccgcgtcttccccaacggcgtcgccgtcatcacgctcgaccgacccaaggccctcaacgccatgaacctcgaaatggatgttagatacaaggcacttcttgatgaatgggaaacaaatccaagtgtcaagtgtattcttgtggaaagcagctcttctcgtgccttctcagcagggatggatattaagggggttgccgtggaaatacaaaaagacaaaaaaacaccacttgtgcaaaaggtattcacagtagagtactctttaatttgtaagatacatgagtatgcaaaaccttatatatgcttgatggatggagtgacaatgggatttggaattgggctatcagggcatggccgctaccgcattattacagagagaacactcctagccatgcctgaaaatggtattggcctgttcccagatgttggctttgcttacattggtgcaaaagcaccaggagggggtgcagttggagtttaccttgggattactggaaaaaggatatcatcacctgctgatgctatgttcataggccttggtactcactatgtaccttctgcaaatttgggttcactcaaggagtccctgctgagtgctaacttcaccaatgatcctcatagagacgttgagtcagttctgacaggatacaagaaagaaccagagtctgaaccacaactaaaaaagcttttgccatatatcatttcttctttcagtcctgataaatcagtggctgaatctgtggaagagctaaagaaatgtagccgaagtggtgatgctgcagtggcagaatgggccaatgaagctttagcaggaattgagaaaggcgctccattttctctttgtttaacacagaagcatttctctcaagttgcatcagcatatgggactagtgaacactatttatctaagctggctggtgttatgaaattggaatatcgcattgccttgaggtcgtcgattagaaacgattttgttgaaggtgtgcgtgctgttttagttgacaaggaccagaatccgaagtggaatccagccactctggaagaagtaaacatggccgaggtcgaatcagttttcgagccattaggggccgaggctgagttgagtgtgtgaaatatggcctgccacactcagttttcttatttgtgctgcaataataatgtatacaaaacagaaatgcgatgcccacagaaacaataaatgctgtgtcttcatgaactaactggagtggttccattttctcgaaaggggcgcgtgggaatctaaggtctgttgcttgctttcctgcctctgcctgcaatattccagccatggtaccaggtggatggccaaatactctagaagcgtttgccctgggcacttgcatgtagcttgatgtgagtagtgtaagaacaaccgggtacggaaaccgttgtctggccagcagatttcaaggcgtgtttagacaagtgtacaactgacgcgcacagatgtacggagtatatattatatgaaatatggcactaaaactcttttcc

SEQ ID NO: 155470 - DNA, 1744 bp, Zea Mays
aaaagttagaaaattaattctgcgttagttactccaggcttaaggttaagcacctcccaaacacgcctatgagggccctcgtccggatccacctgcccacggccatctccaccggatccttcctccacacctcctcaaccgccgcctccaagaccctagtaccgaaccccaacctcgtcccgctccggctcgtccgccacttcccggccatggccgccaccgccgcagacgagttcgtgaagggccgcgtcttccccaacggcgtcgccgtcatcacgctcgaccgacccaaggccctcaacgccatgaacctcgaaatggatgttagatacaaggcacttcttgatgaatgggaaacaaatccaagtgtcaagtgtattcttgtggaaagcagctcttctcgtgccttctcagcaggtggggatgtgaagagacttgctaatgattgcaccatgccagaaataatagaggtattcacagtagagtactctttaatttgtaagatacatgagtatgcaaaaccttatatatgcttgatggatggagtgacaatgggatttggaattgggctatcagggcatggccgctaccgcattattacagagagaacactcctagccatgcctgaaaatggtattggcctgttcccagatgttggctttgcttacattggtgcaaaagcaccaggagggggtgcagttggagtttaccttgggattactggaaaaaggatatcatcacctgctgatgctatgttcataggccttggtactcactatgtaccttctgcaaatttgggttcactcaaggagtccctgctgagtgctaacttcaccaatgatcctcatagagacgttgagtcagttctgacaggatacaagaaagaaccagagtctgaaccacaactaaaaaagcttttgccatatatcatttcttctttcagtcctgataaatcagtggctgaatctgtggaagagctaaagaaatgtagccgaagtggtgatgctgcagtggcagaatgggccaatgaagctttagcaggaattgagaaaggcgctccattttctctttgtttaacacagaagcatttctctcaagttgcatcagcatatgggactagtgaacactatttatctaagctggctggtgttatgaaattggaatatcgcattgccttgaggtcgtcgattagaaacgattttgttgaaggtgtgcgtgctgttttagttgacaaggaccagaatccgaagtggaatccagccactctggaagaagtaaacatggccgaggtcgaatcagttttcgagccattaggggccgaggctgagttgagtgtgtgaaatatggcctgccacactcagttttcttatttgtgctgcaataataatgtatacaaaacagaaatgcgatgcccacagaaacaataaatgctgtgtcttcatgaactaactggagtggttccattttctcgaaaggggcgcgtgggaatctaaggtctgttgcttgctttcctgcctctgcctgcaatattccagccatggtaccaggtggatggccaaatactctagaagcgtttgccctgggcacttgcatgtagcttgatgtgagtagtgtaagaacaaccgggtacggaaaccgttgtctggccagcagatttcaaggcgtgtttagacaagtgtacaactgacgcgcacagatgtacggagtatatattatatgaaatatggcactaaaactcttttcc

SEQ ID NO: 155471 - DNA, 1691 bp, Zea Mays
aaaagttagaaaattaattctgcgttagttactccaggcttaaggttaagcacctcccaaacacgcctatgagggccctcgtccggatccacctgcccacggccatctccaccggatccttcctccacacctcctcaaccgccgcctccaagaccctagtaccgaaccccaacctcgtcccgctccggctcgtccgccacttcccggccatggccgccaccgccgcagacgagttcgtgaagggccgcgtcttccccaacggcgtcgccgtcatcacgctcgaccgacccaaggccctcaacgccatgaacctcgaaatggatgttagatacaaggcacttcttgatgaatgggaaacaaatccaagtgtcaagtgtattcttgtggaaagcagctcttctcgtgccttctcagcaggtattcacagtagagtactctttaatttgtaagatacatgagtatgcaaaaccttatatatgcttgatggatggagtgacaatgggatttggaattgggctatcagggcatggccgctaccgcattattacagagagaacactcctagccatgcctgaaaatggtattggcctgttcccagatgttggctttgcttacattggtgcaaaagcaccaggagggggtgcagttggagtttaccttgggattactggaaaaaggatatcatcacctgctgatgctatgttcataggccttggtactcactatgtaccttctgcaaatttgggttcactcaaggagtccctgctgagtgctaacttcaccaatgatcctcatagagacgttgagtcagttctgacaggatacaagaaagaaccagagtctgaaccacaactaaaaaagcttttgccatatatcatttcttctttcagtcctgataaatcagtggctgaatctgtggaagagctaaagaaatgtagccgaagtggtgatgctgcagtggcagaatgggccaatgaagctttagcaggaattgagaaaggcgctccattttctctttgtttaacacagaagcatttctctcaagttgcatcagcatatgggactagtgaacactatttatctaagctggctggtgttatgaaattggaatatcgcattgccttgaggtcgtcgattagaaacgattttgttgaaggtgtgcgtgctgttttagttgacaaggaccagaatccgaagtggaatccagccactctggaagaagtaaacatggccgaggtcgaatcagttttcgagccattaggggccgaggctgagttgagtgtgtgaaatatggcctgccacactcagttttcttatttgtgctgcaataataatgtatacaaaacagaaatgcgatgcccacagaaacaataaatgctgtgtcttcatgaactaactggagtggttccattttctcgaaaggggcgcgtgggaatctaaggtctgttgcttgctttcctgcctctgcctgcaatattccagccatggtaccaggtggatggccaaatactctagaagcgtttgccctgggcacttgcatgtagcttgatgtgagtagtgtaagaacaaccgggtacggaaaccgttgtctggccagcagatttcaaggcgtgtttagacaagtgtacaactgacgcgcacagatgtacggagtatatattatatgaaatatggcactaaaactcttttcc

SEQ ID NO: 155472 - DNA, 1650 bp, Zea Mays
aaaagttagaaaattaattctgcgttagttactccaggcttaaggttaagcacctcccaaacacgcctatgagggccctcgtccggatccacctgcccacggccatctccaccggatccttcctccacacctcctcaaccgccgcctccaagaccctagtaccgaaccccaacctcgtcccgctccggctcgtccgccacttcccggccatggccgccaccgccgcagacgagttcgtgaagggccgcgtcttccccaacggcgtcgccgtcatcacgctcgaccgacccaaggccctcaacgccatgaacctcgaaatggatgttagatacaaggcacttcttgatgaatgggaaacaaatccaagtgtcaagtgtattcttgtggaaagcagctcttctcgtgccttctcagcagggatggatattaagggggttgccgtggaaatacaaaaagacaaaaaaacaccacttgtgcaaaagggcatggccgctaccgcattattacagagagaacactcctagccatgcctgaaaatggtattggcctgttcccagatgttggctttgcttacattggtgcaaaagcaccaggagggggtgcagttggagtttaccttgggattactggaaaaaggatatcatcacctgctgatgctatgttcataggccttggtactcactatgtaccttctgcaaatttgggttcactcaaggagtccctgctgagtgctaacttcaccaatgatcctcatagagacgttgagtcagttctgacaggatacaagaaagaaccagagtctgaaccacaactaaaaaagcttttgccatatatcatttcttctttcagtcctgataaatcagtggctgaatctgtggaagagctaaagaaatgtagccgaagtggtgatgctgcagtggcagaatgggccaatgaagctttagcaggaattgagaaaggcgctccattttctctttgtttaacacagaagcatttctctcaagttgcatcagcatatgggactagtgaacactatttatctaagctggctggtgttatgaaattggaatatcgcattgccttgaggtcgtcgattagaaacgattttgttgaaggtgtgcgtgctgttttagttgacaaggaccagaatccgaagtggaatccagccactctggaagaagtaaacatggccgaggtcgaatcagttttcgagccattaggggccgaggctgagttgagtgtgtgaaatatggcctgccacactcagttttcttatttgtgctgcaataataatgtatacaaaacagaaatgcgatgcccacagaaacaataaatgctgtgtcttcatgaactaactggagtggttccattttctcgaaaggggcgcgtgggaatctaaggtctgttgcttgctttcctgcctctgcctgcaatattccagccatggtaccaggtggatggccaaatactctagaagcgtttgccctgggcacttgcatgtagcttgatgtgagtagtgtaagaacaaccgggtacggaaaccgttgtctggccagcagatttcaaggcgtgtttagacaagtgtacaactgacgcgcacagatgtacggagtatatattatatgaaatatggcactaaaactcttttcc

SEQ ID NO: 155473 - DNA, 752 bp, Zea Mays
acagacgacccgtacgacccttacctctgcctttcccttttctcctcctatccctaacgcactcgccgccgctcggctctcccttgtcaatgcacacatgcactcgccgccgccgctcgactctcccctcccaatggcaccccgtcgctcaccatcaaatatttcctcccctgcaagtgcaagatcaccaacgaggagatattgatggcgctgttggtggacccacctgacatcaagagggagatgcagcccgcaccaccaccatctgctgcggcgtcggcatcgcagatggcgtggccgctggattggccggtggacgggtgctcgctcaatcctccatcaccgcccctatatcagtcgagtatgtgtttggactggaatgctcacagtctgttactttgatggcaaaacatatgaattggttggacagagccgccaacgaagtaccatgggatgtgctgaacaatgaaagcttctgtcttgaaacaataggatataagaagcttgcaagtggttttgtgaaggcttttgtgaatcacttgaatcattagttcttttaagaatggttttgtaaagcgttagcaaatatgtgtaaaacacaataagatgtgtggcaaagtcagtgatctagttgtacaattttttgtgtttatgtgatatgtggatatttcattgtggaatgttaatgaactgtgtatgtctatgtgattatgtgtataaaatatatgttttgtggtgcttttgtgataata

SEQ ID NO: 155474 - DNA, 1494 bp, Zea Mays
acgttgggctcctacataacacgcgcccccgcttccactcggcgaccaccggtccaccgcgcatcgaacccccacttgtgctgattctgctgatccctcgccgacaacggccggagaatcgacaccatggccgctgcgcgccggggccgtggcgacggcgccaacggcgtcgtccgtccccgcccccgcgaccgcggcatcggcggcgggagcatggcggggcgcgtggccgtcctcgccttctgtgtcgcagggatctggtccgcctacatctaccagggcgtcctccaggagactctatcgacgaagcggttcgggccggatgcgcggcggttcgagcacctcgcgttcctcaacttcgcgcagaacgtcatctgcttcgtctggtccttcataatgattaagctgtggtcgggcgggagtagctccaatggcagcgcaccgatatggaagtactggggcgtcagcgtcaccaataccatcgggccgaccatggggatcgaggctctcaagtacatcagctacccggctcaggtgttggcaaaatcttctaagatgattcctgtaatgttgatgggaactcttctctatggtgtgaagtacacacttccagagtatttatgcacctttcttgttgccggcggtgtgtcctcctttgcgttgttgaagacaagctccaagacaattaagaagcttgccaaccctaatgcacctcttggttacacattgtgcttcctcaacttagcttttgatggatatactaactcgacccaagatttaataaagtcaaggtacccaaaaacaaacccatgggatataatgcttggcatgaacctctgggggaccatatataatgctgtaattatgtttgttgcgccattactattcagtaactggccatatgcaaatggttttgaggcattgagattttgccaggagaacccagaggtggcctgggacattttcctattctgcctatgtggcgccgtggggcagaacttcatcttcttaaccatcagccggtttggctctcttactaacacaacaatcactaccacccgtaaattcatgagcattgtggtttcatccgtcatcagtggcaatccattatctttgaagcaatggggtagtgttgtgatggtcttcttaggcctctctatccaaatatatctcaaatggaagagaaagaaaggcagagagcacaaggagtaagcttgattcttcaaccttttctgatttgtaacttcaattggacagatctcttgtgaggttgaccaggataacgttaatgcagtctgtttgaaattaggaacttttacatggattattatgagtgataccaagtgtgaggctgagctattggtaacagctctaatttatgttctagagggaggattcatgtgtttcacttaaatgttgatctcgtggatttgtcttatgctactagaagaaaatacccacctaaacaatataaggaatatacgaatagtcctt

SEQ ID NO: 155475 - DNA, 1209 bp, Zea Mays
acgttgggctcctacataacacgcgcccccgcttccactcggcgaccaccggtccaccgcgcatcgaacccccacttgtgctgattctgctgatccctcgccgacaacggccggagaatcgacaccatggccgctgcgcgccggggccgtggcgacggcgccaacggcgtcgtccgtccccgcccccgcgaccgcggcatcggcggcgggagcatggcggggcgcgtggccgtcctcgccttctgtgtcgcagggatctggtccgcctacatctaccagggcgtcctccaggagactctatcgacgaagcggttcgggccggatgcgcggcggttcgagcacctcgcgttcctcaacttcgcgcagaacgtcatctgcttcgtctggtccttcataatgattaagctgtggtcgggcgggagtagctccaatggcagcgcaccgatatggaagtactggggcgtcagcgtcaccaataccatcgggccgaccatggggatcgaggctctcaagtacatcagctacccggctcaggtgttggcaaaatcttctaagatgattcctggtaagtttacatttacttatacacactacagtgtatatgtatcacaacataaaagtattcacagcttgttcttttcttcttgaacagtccaatttaatttatttcactgagtaaagaaaactacaaagagcagaataaaagtgcaatgaaagataatccctttttcttttatgttgagacataccatgctcaacactattatgagtataattctacattagtaggaacaatgacagggatatttttattgatatccatgttggctcgatgtgtttattaagtatcataagatattagattggccctgacatctaagtccatacggttctaagaaaacgaatatatttgtgtcttctttttgttgacaaaatcatcatagggtgaatatattaattaaggtagatctcttttgccaactaaactcatggtcattctatcttatgtgcttacatgatttaaccgttgaagccatcaatatgcaatgagttgttggatcttatgtgcaattatgcattgcttaccgaaactattctaatagtttatagaactgaaactattctctgagttgtcggatttgtatttgttctatgtatctaagtacttttgggtcagtaattgtttctatgtatttaagtatttttctt

SEQ ID NO: 155476 - DNA, 1335 bp, Zea Mays
ggcaaaaatggcaattggccggtgccaaagggctttccttcttggcggtgcctccctctaatgtttaggagaggtgttggtgtgttgtttgtatgcctgtttctttagtgtccagatggatagttatttgtatgcctgtttctggcctccataagggaaaggtcttgtattttgggtcttctatagacctcttgttttctcttctaatataattaaaaggagtagctctcctactcttttcgagaaaaaaagtgatatgtaagcagctcccttgcatatttgagataaacagctcgagatggcagaagaatgtcttcttcaagctacagactttagtgggttattgcttctatattcatcacttggagatgctgaagggataacaaaactggcatccatgtctaaagaactaggaaagaacaatgttgctttcctttgcttgtttatgttaggcaaattggaagaatgtcttcaattgttggttgatagtaatcgtattccagaagcagcactgatggcacgatcttaccttccaagcaaagtttctgatattgtctcaatatggaaaaaggacctccaaaaggtgaattccaaagctgcagaatctctggcagatcctgctgagtacccaaacctgttcgaggactggcagattgctctgaatgtagaagctactgttgctcccaagaggggtgtctacccacctgctgaggagtacatgacttatgcggagaggtctaatgacagccttgtggaagttttcaaaagtatgaatgtggaagaagtaccaagtgataatggagatcctgttcatgaggtcactgaggatgacggagtcgagggaagtatggatgatgttgttgaagttgaacccgatgattcaacagatggcggtgtccttgtgaatgggaatgatggtgaggaacactgggtgcttactcctgaccagcagtagagatatcacgacaacattctgcaccagcagattagttgcctattgtaaaaaattgtaggtcgccacatgttcagactcgatagtcatgtaaaagaagttcctccccatttgtacaaggcgttgtgcgtggtctagtattgcggttacagaaacagtcttggatggtaattagcatttggtctagataagaaattttgtaattcgattcattttgggtgggcattgtagatttgtggtatgttatagattatctacccttgtatgtttaccacatgatacgatactaacattctttaaggttggaatttgttcaccgacacatgggctgcgacctgcatagcatgtgaaagttgtatttttggttccccagttgtcgataa

SEQ ID NO: 155477 - DNA, 3153 bp, Zea Mays
atggggcggttcggtcatgctcctagcctttgtctgtgcgtgccgtcgaggaggacatggtggcgcatgccacgcttaggttatctcaacgatgaggagttcaggtctgagatattggacaaccaaggcccgtattgtggcagcagtcggcatattcctacggagttggtggtggtgttgtgtcacctcgtccgcttcgcgaaaaacgctagatcccgatgcgaccttgtcacttcatatcccgctggacgcattgatgctttccgagccgagatccccattcaaatcctttttttgccgctccagttagagatcaagaggaagctcgcgcagaggtcggagagggtcaagtccgtggacctgcatcccacggaaccatggatcatgtcaagtctttattctggcagtgtctgcatctggaactaccagactcagacaatggtgaaatcttttgaagtcagtgagttaccagttcgttcggctaaatttattgcacagaagcaatgggttgttgctggtgccgatgacatgttcatccgtgtgtataactataataccatggataaggtcaagttgttcgaagctcatactgattacatcaggtgtgtggctgttcatccgaccctgccatatgtgttgtcatcatcagatgacatgcttataaagctttgggactgggataagggttggatgtgtactcaaatttttgagggccactctcactatgtcatgcaagtcacatttaaccccaaagacacaaatacttttgctagtgcttctcttgatcgtactgtaaagatttggagtcttggttcccctgatcctaatttcacattggatggtcattcaaaaggtgtcaattgtgttgattacttcactggtggtgaccggccatatctaattacaggctctgatgaccaaactgcaaaggtttgggattatcaaacaaagagctgtgttcaaacacttgaaggacatgcacataatgtctctgctgtatgtttccatcctgagcttccaataataatgacaggttcagaggatggaactgttcgcctatggcactccactacttacaggcttgagaatacacttaactatggccttgaacgagtttgggcattaggttacatgaagggctcacgaagagtcgtgattggatatgacgaaggaacaataatgattaagattgggcgtgaagcacctgttgctagtatggatagcagtggtaaaatcatatgggccaaacataacgaagttcaaactgtcaatatcaaggcagttggtgcggatgctgagattgcagatggagaacgtctgccattggctgtgaaggagctaggaagttgcgacctttacccacaaagtttacggcacaatccaaatgggaggtttgttgctgtatgtggagatggagagtacattatctacacagcgctagcatggagaaatagatcctttgggtctgctcttgaaattgtttggtcaactgaaggagagtatgctgcaagggaaagcacatcaaaaataaagatctacagtaaaaactttcaggagaggaaaagtataagaccagcattctctggagaacgtatatatgggggagtattgcttgctatatgtacaaatgatttcatttgtttttatgactgggcagagtgcaggttgatacgtcgaattgacgtgaatgtaaaaaatgtatattgggctgacagtggtgatttggtgacaatagcaagcgattcgtcattctacattttgaagtacaatagggatctagtttcttctcatctagatggaggggcatcagttggcgaggaaggtgttgaagatgcctttgaattgcttcatgagataaatgaacgtgtccgtactgggttatgggtcggagactgttttatatacaataattcttcatggcgcctgaactactgcgttggaggagaggttactacaatgtttcacttggatcggcctatgtatttattaggatatcttgctaaccaaagtcgtgtatatcttattgacaaggaatttaatgtggtgggttatactttactactcagtttgattgagtacaaaacacttgtgatgcgtggggatttggaacatgcgaatattattttaccatccataccaaaggaacaacacaacagtgtggcacatttccttgaatcacgtggcatgttggaggaagcccttgatatagccactgaccctaattacagatttgatctggctgtgcagcttggaagcctcgaagttgcaaaggaaattgctattgaggcacatagtgaatcaaagtggaagcagttgggggaactcgctatgtccactggaaagtaatcgtattccagaagcagcactgatggcacgatcttaccttccaagcaaagtttctgatattgtctcaatatggaaaaaggacctccaaaagaatctctggcagatcctgctgagtacccaaacctgttcgaggactggcagattgctctgaatgtagaagctactgttgctcccaagaggggtgtctacccacctgctgaggagtacatgacttatgcggagaggtctaatgacagccttgtggaagttttcaaaagtatgaatgtggaagaagtaccaagtgataatggagatcctgttcatgaggtcactgaggatgacggagtcgagggaagtatggatgatgttgttgaagttgaacccgatgattcaacagatggcggtgtccttgtgaatgggaatgatggtgaggaacactgggtgcttactcctgaccagcagtagagatatcacgacaacattctgcaccagcagattagttgcctattgtaaaaaattgtaggtcgccacatgttcagactcgatagtcatgtaaaagaagttcctccccatttgtacaaggcgttgtgcgtggtctagtattgcggttacagaaacagtcttggatggtaattagcatttggtctagataagaaattttgtaattcgattcattttgggtgggcattgtagatttgtggtatgttatagattatctacccttgtatgtttaccacatgatacgatactaacattctttaaggttggaatttgttcaccgacacatgggctgcgacctgcatagcatgtgaaagttgtatttttggt

SEQ ID NO: 155478 - DNA, 3212 bp, Zea Mays
atggggcggttcggtcatgctcctagcctttgtctgtgcgtgccgtcgaggaggacatggtggcgcatgccacgcttaggttatctcaacgatgaggagttcaggtctgagatattggacaaccaaggcccgtattgtggcagcagtcggcatattcctacggagttggtggtggtgttgtgtcacctcgtccgcttcgcgaaaaacgctagatcccgatgcgaccttgtcacttcatatcccgctggacgcattgatgctttccgagccgagatccccattcaaatcctttttttgccgctccagttagagatcaagaggaagctcgcgcagaggtcggagagggtcaagtccgtggacctgcatcccacggaaccatggatcatgtcaagtctttattctggcagtgtctgcatctggaactaccagactcagacaatggtgaaatcttttgaagtcagtgagttaccagttcgttcggctaaatttattgcacagaagcaatgggttgttgctggtgccgatgacatgttcatccgtgtgtataactataataccatggataaggtcaagttgttcgaagctcatactgattacatcaggtgtgtggctgttcatccgaccctgccatatgtgttgtcatcatcagatgacatgcttataaagctttgggactgggataagggttggatgtgtactcaaatttttgagggccactctcactatgtcatgcaagtcacatttaaccccaaagacacaaatacttttgctagtgcttctcttgatcgtactgtaaagatttggagtcttggttcccctgatcctaatttcacattggatggtcattcaaaaggtgtcaattgtgttgattacttcactggtggtgaccggccatatctaattacaggctctgatgaccaaactgcaaaggtttgggattatcaaacaaagagctgtgttcaaacacttgaaggacatgcacataatgtctctgctgtatgtttccatcctgagcttccaataataatgacaggttcagaggatggaactgttcgcctatggcactccactacttacaggcttgagaatacacttaactatggccttgaacgagtttgggcattaggttacatgaagggctcacgaagagtcgtgattggatatgacgaaggaacaataatgattaagattgggcgtgaagcacctgttgctagtatggatagcagtggtaaaatcatatgggccaaacataacgaagttcaaactgtcaatatcaaggcagttggtgcggatgctgagattgcagatggagaacgtctgccattggctgtgaaggagctaggaagttgcgacctttacccacaaagtttacggcacaatccaaatgggaggtttgttgctgtatgtggagatggagagtacattatctacacagcgctagcatggagaaatagatcctttgggtctgctcttgaaattgtttggtcaactgaaggagagtatgctgcaagggaaagcacatcaaaaataaagatctacagtaaaaactttcaggagaggaaaagtataagaccagcattctctggagaacgtatatatgggggagtattgcttgctatatgtacaaatgatttcatttgtttttatgactgggcagagtgcaggttgatacgtcgaattgacgtgaatgtaaaaaatgtatattgggctgacagtggtgatttggtgacaatagcaagcgattcgtcattctacattttgaagtacaatagggatctagtttcttctcatctagatggaggggcatcagttggcgaggaaggtgttgaagatgcctttgaattgcttcatgagataaatgaacgtgtccgtactgggttatgggtcggagactgttttatatacaataattcttcatggcgcctgaactactgcgttggaggagaggttactacaatgtttcacttggatcggcctatgtatttattaggatatcttgctaaccaaagtcgtgtatatcttattgacaaggaatttaatgtggtgggttatactttactactcagtttgattgagtacaaaacacttgtgatgcgtggggatttggaacatgcgaatattattttaccatccataccaaaggaacaacacaacagtgtggcacatttccttgaatcacgtggcatgttggaggaagcccttgatatagccactgaccctaattacagatttgatctggctgtgcagcttggaagcctcgaagttgcaaaggaaattgctattgaggcacatagtgaatcaaagtggaagcagttgggggaactcgctatgtccactggaaagctcgagatggcagaagaatgtcttcttcaagctacagactttagtgggttattgcttctatattcatcacttggagatgctgaagggataacaaaactggcatccatgtctaaagaactaggaaagaacaatgttgctttcctttgcttgtttatgttaggcaaattggaagaatgtcttcaattgttggttgatagtaatcgtattccagaagcagcactgatggcacgatcttaccttccaagcaaagtttctgatattgtctcaatatggaaaaaggacctccaaaaggtgaattccaaagctgcagaatctctggcagatcctgctgagtacccaaacctgttcgaggactggcagattgctctgaatgtagaagctactgttgctcccaagaggggtgtctacccacctgctgaggagtacatgacttatgcggagaggtctaatgacagccttgtggaagttttcaaaagtatgaatgtggaagaagtaccaagtgataatggagatcctgttcatgaggtcactgaggatgacggagtcgagggaagtatggatgatgttgttgaagttgaacccgatgattcaacagatggcggtgtccttgtgaatgggaatgatgtgcttactcctgaccagcagtagagatatcacgacaacattctgcaccagcagattagttgcctattgtaaaaaagtaagtaccattatgtatacgcacaagtcaagaaaaaattaaattgacaaagaaccgtgctcccatacccttgaataaatctatgttgtatgtaatgttttctaggcctaagtagtatgtaatattcttcatgtttggcgtgtaagggcgagtttgagaaccctatttt

SEQ ID NO: 155479 - DNA, 139 bp, Zea Mays
tacccgtacccatcaaaaaaattatacccgtcgggttacccatatatactcgcgggtataaaatcttactcgtacccgtacccgctaggaaagtcttaaattccaatataccaatcactcaaaatattaaataaacata

SEQ ID NO: 155480 - DNA, 589 bp, Zea Mays
gtcaagcagcagctgctagagcaaacctaagagccaagcggcagcagccagctaataattaagcagccaaattaagtgcgacgatggcgtcgtccatcgccagaaccgcatgtctcctcgtgctcacactgttcgtcgtctccgcggcgatcatcttgcccagctccctgtgccatggagcccgcggcgtcgggttaggtatcggcggcggcgctttggaccctgaccgtccagcgtgcgtcggggtcggggcatgcccagttcgtgggcgcccctttcctatcgtcaaaccgtcccccccatccaacggaggggacccacatcactgatgcctgcctcggatcacgcgccctccgtcgtatcggtctgtctacgatggaacgatgcaccgtgcacgagcacgactgcatgctactagctactagctatctcgtgtacctgtacagtcgtcgtgcttatgtacgtacgtatggtcaattaataaaactggagtgggatgatgatggtgagaatttcttgtactggatgatgacatgcatatgtcgttggttcatatagacgaccacttgcaaaataaatgaatatatgg

SEQ ID NO: 155481 - DNA, 538 bp, Zea Mays
aagcaagcagcacagcagctatagatagcgcgcgctcatcaccaaagccgagagccaagcagccagctaattaagcagccaaattcagtgcgatggcgtcgtccgtcaccagaaccgcatgtctcctcgtgctcacactgttcgtcgtctccgcggcggtgatcttgcccacctccctgtgccatggagcccgtggcgtcgcagggttacgtatcggtttggaccctaaccatcctgcgtgcatcggggcatgctcagttcctgggggctcctacactcaccttcccccctatcgcggtggcggccctgtgaaaccgcttcccccaccgaacggagggaacccgtgacgccgcctgcctcccatcacgcgcgctctacgatggaacgatgcaccacgcacaactgtatcttagctgtgcttgtatagtactccctccgtttctttttatttgtcgcttgcactatccagcgacaaataaaaagaaacggagagagtatatgatgatcaataaaactggagtagtactggaatggtgag

SEQ ID NO: 155482 - DNA, 1730 bp, Zea Mays
ccaaatgcttgctatcccgaaagcccatttttttgaaaagaaagcccaaaattagacgtgggtcttgcagcgcttcctcggaatccaacaaaccgaacaggcccaaatcagtttgccccaaccaaaacgagacccaagcaagacactcgtggagcccagctcacccgaaagctgcatcagcggcccacgagcacaacggacgccgtgccactcacgggctcacggctggtggagacggagaggctaggcggggacggcctgcccctgcgcccctgccatcttgcgcggcgcagcatcggccaccgaggcgcggcttctcgattcttgaccatcctgctgttctgccttctccgtccgcgccttcgagaaggccacagagcgaaggaattgcagagttttcttggcgcgaaagaaggagagagagagagagagagagagatggggggcgcaggcatggaggacggcggcgtttgggctctacggcttcaaccatttcacaaaatctggtttcctggagcatgcgaagaaattcagagaggaggatatgcagatccggttggatggaaaaaattgcctagtaactggagcgaattctggcattggttttgctacggctgagggtttggcttcacatggtgctaccgtctatatggtctgtcgtaacaaggagagaggggaggcagctctcaaccaaataagatccaaaactggcaatgcaaatgttcatctggagatatgtgacctttcatctatcaatcaagtaaaatcgtttgcaacaaagttcacttcgatggataaaccactccatgtcttggtaaacaatgctggcttactagagcacaagcatgagattacagcagaagggttggagctcaattttgctgtcaatgtagctgcgacatacactttaacagagctagttatgccgtcattggagaaagcggcaccagatgctcgtgtcatcacagttgcatcaggaggcatgtacaccgagccactgaacaaagacttacagttcaccgaaggcaccttcgatgggacgcaacagtatgctcgaaacaaaagagttcaggtggcactgactgaatggtgggctgagaaaagcggtgacaggggagtcggtttctacgccatgcatcctggatgggccgatacgcctggggtcgccaagagcttgcccggactgtcagagaggttgtctggaaacctgagaacaaatgacgaaggagctgatacagtggtttggttggcgttgcaacctaaggagaagttagcctcgggagccttttacttcgaccgtgctgaagcaccaaaacatttgaagtttgctgggactgcagattcgcacgctcagataaaccctatcgttgatagcattagatccatctgtggtctctctgttaatggttgagctgccaaagcaaaagtgatatacagctccatcgtcaatagcattagattcatctgtggcttctctgttaaaggttgagcttccaaagcaaaagtgaagtgatatattacttgatataatgggtgcatgattcataaaaccgcaaaaaattgaagagtggaaaaaaaaatgcaccagccgggaatcgaacccgggtctgtaccgtggcagggtactattctaccactagaccactggtgcctttgatgctaaagttatgtacgtatttaatttcttttgaatcaacaatcaaacatagatccaacattcttatcacaca

SEQ ID NO: 155483 - DNA, 1461 bp, Zea Mays
cctgcgcccctgccatcttgcgcggcgcagcatcggccaccgaggcgcggcttctcgattcttgaccatcctgctgttctgccttctccgtccgcgccttcgagaaggccacagagcgaaggaattgcagagttttcttggcgcgaaagaaggagagagagagagagagagagagagagagagagagagagagagagaggaagacgaagatgtttatccagaaggcatggaggacggcggcgtttgggctctacggcttcaaccatttcacaaaatctggtttcctggagcatgcgaagaaattcagagaggaggatatgcagatccggttggatggaaaaaattgcctagtaactggagcgaattctggcattggttttgctacggctgagggtttggcttcacatggtgctaccgtctatatggtctgtcgtaacaaggagagaggggaggcagctctcaaccaaataagatccaaaactggcaatgcaaatgttcatctggagatatgtgacctttcatctatcaatcaagtaaaatcgtttgcaacaaagttcacttcgatggataaaccactccatgtcttggtaaacaatgctggcttactagagcacaagcatgagattacagcagaagggttggagctcaattttgctgtcaatgtagctgcgacatacactttaacagagctagttatgccgtcattggagaaagcggcaccagatgctcgtgtcatcacagttgcatcaggaggcatgtacaccgagccactgaacaaagacttacagttcaccgaaggcaccttcgatgggacgcaacagtatgctcgaaacaaaagagttcaggtggcactgactgaatggtgggctgagaaaagcggtgacaggggagtcggtttctacgccatgcatcctggatgggccgatacgcctggggtcgccaagagcttgcccggactgtcagagaggttgtctggaaacctgagaacaaatgacgaaggagctgatacagtggtttggttggcgttgcaacctaaggagaagttagcctcgggagccttttacttcgaccgtgctgaagcaccaaaacatttgaagtttgctgggactgcagattcgcacgctcagataaaccctatcgttgatagcattagatccatctgtggtctctctgttaatggttgagctgccaaagcaaaagtgatatacagctccatcgtcaatagcattagattcatctgtggcttctctgttaaaggttgagcttccaaagcaaaagtgaagtgatatattacttgatataatgggtgcatgattcataaaaccgcaaaaaattgaagagtggaaaaaaaaatgcaccagccgggaatcgaacccgggtctgtaccgtggcagggtactattctaccactagaccactggtgcctttgatgctaaagttatgtacgtatttaatttcttt

SEQ ID NO: 155484 - DNA, 427 bp, Zea Mays
ccttgctggctgccgggcttgattagcggctgctgcgaggtcttggcccactcctcgggcgggctcttcacctccttgagcagcgccaccacctccttcatcgtcggccgctcgtggggcgccgtgttaacacagaagatggccacgcccagcgtctgcagcatctcctgcaccagctggtccggcatgccccgcagcttcgggtccaggatgttcaccgccggctcgtagctgcccatcttcttcttcgcccactccacgatgtgcaggctggcctcacccagcactggctctatggcgctccgcccgcttaggatctccagcagcaccacgccgtagctgtaaacgtcgctcttctccgtgatgttgctcgtgtacgcgtactctgaaatgtagcacacatgtgtaaacaattcagagtcttttg

SEQ ID NO: 155485 - DNA, 421 bp, Zea Mays
ccttgctggctgccgggcttgattagcggctgctgcgaggtcttggcccactcctcgggcgggctcttcacctccttgagcagcgccaccacctccttcatcgtcggccgctcgtggggcgccgtgttaacacagaagatggccacgcccagcgtctgcagcatctcctgcaccagctggtccggcatgccccgcagcttcgggtccaggatgttcaccgccggctcgtagctgcccatcttcttcttcgcccactccacgatgtgcaggctggcctcacccagcactggctctatggcgctccgcccgcttaggatctccagcagcaccacgccgtagctgtaaacgtcgctcttctccgtgatgttgctcgtgtacgcgtactctgaaatgtagcacacatgtgtaaacaattcagagt

SEQ ID NO: 155486 - DNA, 2955 bp, Zea Mays
ggctgctgcactgcaagcgttagtgcgactgtccccactgcaagttcggctggaaaccaccactactcgcgccgctcgctcggtcatccatggcgacctcctccactccgcctgctgcttcccacgcctccctctccccccgtctctaggttcgttcgttccacgtcgccgtccacccctgtccacagccgcgacaaactcttcctcagacccacgccacgtacgatgcctctctccccttccccttcccctccgcccaacgccaccgccgccgccgccgccctgcccctcctcctgctgctcgtctgcgccagcagcattgccgcgcagccgctggcgtcgtcgcaggccaaggcgctcctccgggtgcgccgcctgctgttctacccgccggcgctcgagccgctgcgcggggcgccggacccctgcgcgctgccgcccgcgccggccctcgccgtcgcctgcgagggcggccaggtcacggcgctctccgtcctgggcgaccgcgacccggacgcggcctggcgcgccgcgctgccggccagcttctcctccgaggcgctgttcaccacgctcaccaggctcccggcgctcgcgcgcctctcgctcgtcggcctcggcgcctggggcccgctcccgggcgccaagctccgccggctccaggcgctgcagcagctcaacctcagctccaactacttctacggcgccgtccccgatggcctcgcccggctctactcgctgcagagcctcgtgctgtcctggaactggctcaacggcaccgtgccgtccctgtccgggctccagttcctggaggagctcgacctgtcgcacaaccggctcggcccggcgttcccggacgtggggaggtcggtcgcgcggctggtcctggacgacaacaacttcaccgggggtatcccggcgggggtgagctcgctgggcctgctccagtacttcgacgtgtccgggaaccagctgcagggttggatcccctcctccgtcttcgcgctcccggcgctgcggtacatcaacctctcccgcaaccggctggcgggccagcttcccgccaccacggcttgcgcggaggcgctggcgttcgtggacgtctcggcgaacctgctcactggggcgcgcccgccgtgcatgcggggcaattcctcggcgcgcacggtcctcgtcgcgggtaactgcttcgccgacgccaagcagcagcgggccagctcgtactgcaaccccggcgcgctggccgccgtgctgccgccgccgcagggcaacggaggaggagggcaggggacggggaagggccgcgagatcgggatggttcttgcgattgccggcagcgtcgttggtgccgcattgctgattgcgctggccatggtggtggtcctgaggagggcgaggaggcagcgtccggaggcgaccatcctgccgaagtcgcccgcggcgacaccgaccaacaaggcggatggatggaaggctccggctaaggcaacccagaagattattactactgctgataagagacatgcatcacaagctgcaagggtgaatacactggaagtaccagcctaccgagtgtgtacactggaggagctccaagaagcaaccgacaatttcagttcctccaacctaatcaagactagtcctcttgcacaggattataatggtcagcttcaagatggttcacgagtactggttagatgtttgaggctgaagccgaagtactcctcccagagccttgtccaatacatggagattatttctaaacttcggcaccgtcatttggtcagcatcattggtcattgcattgtcagtgatgaggagaatcctaatatcgcgagcttggtctacctcgtttctgaatgcgtgacaaatggatctttaagaagtcaccttactgagtggaggaagcgtgaaatgctcaaatggccccaacgggtttgcgctgccattggcattgcgagaggggttcagtttctgcataatctgactgctcctgggatcgtacagaacaatctcaacatagaacatatcctgctggacaagaccctcacgtctaagatcagcaacttcagtcttccaatgatatcaactagcaagaacggcaagattctctcagagaccccatttgctgtccatgaagacaatgatattggcagtgctcagaacgcggcacaaggtgacaaggaagacatctaccagattggcctaattctcctggaggtgatcacaggcaaaccaacagagtcccaaaggcaactggagtccctgaaagctcagctaagtgaggcgctaactgaagacccagacaggctgaaagacatggcagacccggcgatacacggtacttttgcagtggactcactgagcacagttgccgagatagccctcaagtgcacgactggcgacccaagcgaccgaccttccatcgacgacgtgctctggaacctgcagtactccatgcaggtgcaggatgggtgggcgagcagcgagagcttaggcttgagcgtcaaatctcaggcttagataaaggcgcagtgattcggttcctatgcaaatgatgattatgaagctctatgcgccatcactctgcctctagttttctggggtttttttttgggaggaagagaggtcgttggtatagtctctactgtatatatgtggaccttacttttttcagaactgttgtttatggtacctgtaaaactcaggttctcttaagcgtttgtccactcaacagatatgtgctgccatttatggagcagcacacaagcagtagttaaaatgggacttacagcctaaattctttgaaacaaaccccttactttttgagctaaggttagcaaaaaccccttacttcctcagttcacatgatttagatcgtttcagacttgtcctaagtcaattaatattagctttgatcagatattttataagattttacaaaataaaagaaaa

SEQ ID NO: 155487 - DNA, 1635 bp, Zea Mays
acctcctccactccgcctgctgcttcccacgcctccctctccccccgtctctaggttcgttcgttccacgtcgccgtccacccctgtccacagccgcgacaaactcttcctcagacccacgccacgtacgatgcctctctccccttccccttcccctccgcccaacgccaccgccgccgccgccgccctgcccctcctcctgctgctcgtctgcgccagcagcattgccgcgcagccgctggcgtcgtcgcaggccaaggcgctcctccgggtgcgccgcctgctgttctacccgccggcgctcgagccgctgcgcggggcgccggacccctgcgcgctgccgcccgcgccggccctcgccgtcgcctgcgagggcggccaggtcacggcgctctccgtcctgggcgaccgcgacccggacgcggcctggcgcgccgcgctgccggccagcttctcctccgaggcgctgttcaccacgctcaccaggctcccggcgctcgcgcgcctctcgctcgtcggcctcggcgcctggggcccgctcccgggcgccaagctccgccggctccaggcgctgcagcagctcaacctcagctccaactacttctacggcgccgtccccgatggcctcgcccggctctactcgctgcagagcctcgtgctgtcctggaactggctcaacggcaccgtgccgtccctgtccgggctccagttcctggaggagctcgacctgtcgcacaaccggctcggcccggcgttcccggacgtggggaggtcggtcgcgcggctggtcctggacgacaacaacttcaccgggggtatcccggcgggggtgagctcgctgggcctgctccagtacttcgacgtgtccgggaaccagctgcagggttggatcccctcctccgtcttcgcgctcccggcgctgcggtacatcaacctctcccgcaaccggctggcgggccagcttcccgccaccacggcttgcgcggaggcgctggcgttcgtggacgtctcggcgaacctgctcactggggcgcgcccgccgtgcatgcggggcaattcctcggcgcgcacggtcctcgtcgcgggtaactgcttcgccgacgccaagcagcagcgggccagctcgtactgcaaccccggcgcgctggccgccgtgctgccgccgccgcagggcaacggaggaggagggcaggggacggggaagggccgcgagatcgggatggttcttgcgattgccggcagcgtcgttggtgccgcattgctgattgcgctggccatggtggtggtcctgaggagggcgaggaggcagcgtccggaggcgaccatcctgccgaagtcgcccgcggcgacaccgaccaacaaggcggatggatggaaggctccggctaaggcaacccagaagattattactactgctgataagagacatgcatcacaagctgcaagggtgaatacactggaagtaccagcctaccgagtgtgtacactggaggagctccaagaagcaaccgacaatttcagttcctccaacctaatcaagactagtcctcttgcacaggtatgcagccatggattcctttagctttgactgcggcatggaagggcaatgaatatacaaataattgttccactgtc

SEQ ID NO: 155488 - DNA, 1427 bp, Zea Mays
gagtcggagaccccaaacctctgtcgaaagtttcacctccggtcgctggtttcctccaatctccgtggtagttcagcgcgagcgggcggcggggtttgagctcgatggtcacttccggcgaacaatcggctggcggcgggtctgcggcgagggcgtcgaagctgcggtacccgctgcggtcggcgagcaaggggaaggcggcggtcgtttccccggcggctgatgctcctcccaccatctctgctccgcgacgggcaaaaccatcttcagatgtcagcaagagcatgtgtttagacctttctgtgaaggataattctgccaaacccccacggaggcactcaatacaaaccaagccaggagctagcccaaggccaacaccttctggaactgtgactccggtgtctggggttcggtcaaagaggtcggaaagccaggggaggtttgataccccgacatcagaagtgtccatgtccatctcaaggcgcaagttcagcacgctttcttcaatctcgtactggatgacacagatcaggctggcagaggctgcttccaagcactcggtttctctgggcttctttaagcttgctcttgaatcagaatgtgagcctttggaccggatgagggaagaactcaagtcctacgtagcacggcatggcctggcgacagaattggaggacccagttaaggacattctccaggtttatgatattttggatgattttgagaagctgaagatctctgcagagccctcacagcaaccaaaaaagtctgacaaggctgctcgtactgccacaaatgcgtcaccgaatggtaacctgaagccaaggtcactgaactctgatgctactgaaagcaaggaagctgtaaagaaagagagcattcagaaagtaaatcctggtgcaaggatcagaggctcctgtaacaggaatccagtcaaaaacaccaccgcaaaggaagcagttgccaagaacaccggtaaggaaaccaagaaaggggccaagggtcagcaggaagttagcgaggctccgtcagcccttccaaatcaggaatctgctgatgttgtgaaggagatcacccatgaagataaagagaacatgggcgatattgaaatggcagtggatgttgccgtagcccaagatatctagaacagccggaccaacttcagattcgatccccttttttttctatcgctgaagatgaagtgttagcgtgtggttgcttattttggttttcaattgttaatatgttattagtagagcttgtctgtgtgattgctgtctggctggaccttgaacggtcttcaagagcgtgtcataagttgatgattgctttcattcctctgtcaagtttgcggctttgcatgtgctaatccgtgcaactgaatatagttgaatttatctattctcgtggttcctccgggcacaaga

SEQ ID NO: 155489 - DNA, 1509 bp, Zea Mays
gagtcggagaccccaaacctctgtcgaaagtttcacctccggtcgctggtttcctccaatctccgtggtagttcagcgcgagcgggcggcggggtttgagctcgatggtcacttccggcgaacaatcggctggcggcgggtctgcggcgagggcgtcgaagctgcggtacccgctgcggtcggcgagcaaggggaaggcggcggtcgtttccccggcggctgatgctcctcccaccatctctgctccgcgacgggcaaaaccatcttcagatgtcagcaagagcatgtgtttagacctttctgtgaaggataattctgccaaacccccacggaggcactcaatacaaaccaagccaggagctagcccaaggccaacaccttctggaactgtgactccggtgtctggggttcggtcaaagaggtcggaaagccaggggaggtttgataccccgacatcagaagtgtccatgtccatctcaaggcgcaagttcagcacgctttcttcaatctcgtactggatgacacagatcaggctggcagaggctgcttccaagcactcggtttctctgggcttctttaagcttgctcttgaatcagaatgtgagcctttggaccggatgagggaagaactcaagtcctacgtagcacggcatggcctggcgacagaattggaggacccagttaaggacattctccaggtttatgatattttggatgattttgagaagctgaagatctctgcagagccctcacagcaaccaaaaaagtctgacaaggctgctcgtactgccacaaatgcgtcaccgaatggtaacctgaagccaaggtcactgaactctgatgctactgaaagcaaggaagctgtaaagaaagagagcattcagaaagtaaatcctggtgcaaggatcagaggctcctgtaacaggaatccagtcaaaaacaccaccgcaaaggaagcagttgccaagaacaccggtaaggaaaccaagaaaggggccaagggtcagcaggaagttagcgaggctccgtcagcccttccaaatcaggaatctgctgatgttgtgaaggagatcacccatgaagataaagagaacatggtaaacatagctagcagctttcatcatttgaacacttttaggacagcaacaatgatattatttcgatcatactatactgaccaattgttcgatttgcttcgcctgcagggcgatattgaaatggcagtggatgttgccgtagcccaagatatctagaacagccggaccaacttcagattcgatccccttttttttctatcgctgaagatgaagtgttagcgtgtggttgcttattttggttttcaattgttaatatgttattagtagagcttgtctgtgtgattgctgtctggctggaccttgaacggtcttcaagagcgtgtcataagttgatgattgctttcattcctctgtcaagtttgcggctttgcatgtgctaatccgtgcaactgaatatagttgaatttatcta

SEQ ID NO: 155490 - DNA, 1445 bp, Zea Mays
cggcaacgggtgacgtccgtgtattttaggacgcatccgctagtgtcgtccctcccagcatccgcatccgcgtgacacaattgttcacttgttcttggtttcggtcttacagaccgtcaccggcaggcagcagccttggcgggttggtcttgtgtcattgtttcctggctgccatcaatggaggtggtgaacaggtacgtcgccacccggcaccacatcgagggcgccccgacggaggccgattttgaggtgaaggaggagatggcgaggtgggcgccggactccggcgaggtgctcgtcaggaacctgtacctgtccatcgacccgtaccagctcaaccgcatgaagcggagcagcgtgacgcacctcgccgtcgaaggcatcctgcccggccaggctgcttctactctattatctccgtctccgtccgtgaagaggatcactacgtacgcggccggcgaggtagtggcgtcggcgtgtgaggagtacaaggcgggcgacaaggtggccggcgtgctcgggtgggaagactacacgctgttcaagccgtccccggccgtggtcatgtccaaggtcgccgacgacgccgcgggcttccccctgtcccaccacatcaatgtgctgggcaccagcggcatgaccgcatacggtggcttcttcgaggtgtgcaagccggtgaagggggagaaggtgttcgtgtcggcggcgtcgggctccgtcggcagcctcgtcggccagttcgccaagctcgccggctgctacgtcgtcgggtgcgccgggaccgcagccaaggttgatctgctcaaaggcaagctgggattcgacgatgctttcaactacaaagaggaacctgacctgaaatcggcgctgaagaggtacttccccgacggcatcgacatctacttcgagaacgtgggcggggagatgctggaggcggcgctggccaacatgaacccctacggccgggtggcgctcagcggcgtcatctccgagtacacgggcggcgcccggcgcgcggtgccggacctgctggaggtgatctacaagcgtatcaccatccggggcttcttcgcctacgacttcttgtccaagttcgcggagttcaacgccgtcatcggcggctgggtccgggacggcaaggtccaggtgctcgaggacgtctccgacgggctggagagcgtcccgtcggcgttcgccgcgctgttccgcggccagaacgttggcaagaagctcgttaagctggcgtagaaagaaccgtcgtccgtggaggtagctagcatccaggagcatgtacgttcgtctgtcatgcatgctggccgtgcccgtcattcagcaccttaggctatctggagcagcctctttataccactttctaatttactctatctatctcatcatctatttcaaactctaatttatctccattacaaaatagtattttgcac

SEQ ID NO: 155491 - DNA, 1406 bp, Zea Mays
cggcaacgggtgacgtccgtgtattttaggacgcatccgctagtgtcgtccctcccagcatccgcatccgcgtgacacaattgttcacttgttcttggtttcggtcttacagaccgtcaccggcaggcagcagccttggcgggttggtcttgtgtcattgtttcctggctgccatcaatggaggtggtgaacaggtacgtcgccacccggcaccacatcgagggcgccccgacggaggccgattttgaggtgaaggaggagatggcgaggtgggcgccggactccggcgaggtgctcgtcaggaacctgtacctgtccatcgacccgtaccagctcaaccgcatgaagcggagcagcgtgacgcacctcgccgtcgaaggcatcctgcccggccagaggatcactacgtacgcggccggcgaggtagtggcgtcggcgtgtgaggagtacaaggcgggcgacaaggtggccggcgtgctcgggtgggaagactacacgctgttcaagccgtccccggccgtggtcatgtccaaggtcgccgacgacgccgcgggcttccccctgtcccaccacatcaatgtgctgggcaccagcggcatgaccgcatacggtggcttcttcgaggtgtgcaagccggtgaagggggagaaggtgttcgtgtcggcggcgtcgggctccgtcggcagcctcgtcggccagttcgccaagctcgccggctgctacgtcgtcgggtgcgccgggaccgcagccaaggttgatctgctcaaaggcaagctgggattcgacgatgctttcaactacaaagaggaacctgacctgaaatcggcgctgaagaggtacttccccgacggcatcgacatctacttcgagaacgtgggcggggagatgctggaggcggcgctggccaacatgaacccctacggccgggtggcgctcagcggcgtcatctccgagtacacgggcggcgcccggcgcgcggtgccggacctgctggaggtgatctacaagcgtatcaccatccggggcttcttcgcctacgacttcttgtccaagttcgcggagttcaacgccgtcatcggcggctgggtccgggacggcaaggtccaggtgctcgaggacgtctccgacgggctggagagcgtcccgtcggcgttcgccgcgctgttccgcggccagaacgttggcaagaagctcgttaagctggcgtagaaagaaccgtcgtccgtggaggtagctagcatccaggagcatgtacgttcgtctgtcatgcatgctggccgtgcccgtcattcagcaccttaggctatctggagcagcctctttataccactttctaatttactctatctatctcatcatctatttcaaactctaatttatctccattacaaaatagtattttgcac

SEQ ID NO: 155492 - DNA, 1437 bp, Zea Mays
ctcgttggatacaacggcaacgggtggcgtccctgtattttaggacgcatccgctagtgtcgtcccacccagcttccgcgtgacacaattgttcatttgttcttggcttcggtcttacagaccgtcaccggcaggcggcagccttggcgggttggtcttgtgtcattgtttccttgttgctgctgccatcaatggaggtggtgaacaggtacgtcgccacccggcaccacatcgagggtgccccgacggaggccgattttgaggtgaaggaggagacggcgaggtgggcgccggactccggcgaggtgctcgtcaggaacctgtacctgtccatcgacccgtaccagctcaaccgcatgaagcggagcagcgcgtcgcacctcgccgtcgacggcatcctgcccggccagaggatcgcggcgtacgcggccggcgaggtggtggcgtcggcgtgcgaggagtacaaggtgggcgacgtggtggccggcgtgctcgggtgggaggactacacgctgttcaagccgtccccggccgtgctcatgtccaaggtcgccgacgccgacgccgcgggcttccccctgtcccaccacatcagcgtgctgggcaccagcggcatgaccgcttacggtggcctcttcgaggtgggcaagccggtgaagggggagaaggtgttcgtgtcggcggcgtcgggctccgtcggcagcctcgtcggccagttcgccaagctcgccggctgctacgtcgtcgggtgcgccgggactacagccaaggttgatctgctcaaagacaagctgggattcgacgatgctttcaactacaaagaggaacctgacctgaaatcggcgctgaagaggtacttccccgatggcatcgacatctacttcgagaacgtaggcggcgagatgctggaggcggcgctggccaacatgaatacctatggccgggtggcgctcagcggcgtcatctcggagtacacgggtggtgggcggcgcgcggtgccggacctgctggaggtgatctacaagcgcatcaccatccggggcttcttcgcctgggatttcctgcccaggttcgcggagttcaacgccgtcatcggcggctgggtccgggacggcaaggtccaggtgctcgaggacgtctccgacgggctggagagcgtcccgtcggcgttcgccgcgctgttccgcggccagaacgttggcaagaagctcgttaagctggcgtagaaagagaaccgtcgtccgtggaggtagcatccaggacccggaggccggagcatgtacgtctgtcatgcatgccggtcattcagcacccgtagaacttcattgcagaggtgcttcgagttcgaggctttattggggtagtgggggtgaaatgcagtgaacttgttaatttaaccgaaagaaaaaggaaaatgcaacggcattgcttcgactg

SEQ ID NO: 155493 - DNA, 905 bp, Zea Mays
gtatatggcatcatgtcagagcattattttggggcatacatgatttagacagcatcgacatatttagcatgttccccgttcctgatgtcatcaaatccccaagcatgcttatgcgttttctgttggatatgattccttgtgccttttttctttgtcgatactgcagtgcgattcttgttaggaatatgatcccctgtgtgtatgtgttttttattgctgatctgggcagtttagaagtctgaaactacatgttcctccattatcttgtctcatttaacagagtatcatgtgctcctggcatcttaggtttctgagaagattctggacaagaaagagctggagttctacaagtgggagggcaatctctcccagctgctgcagaacgtccgcaacaagcttaaccaagtcgcttcaagctggtctcgggaggagaaggatcactgcctggaggagacggagaagtcgttcgcctactcaggaggcctcctccgccacatattcacctgacttaacactgttggctgatccagtttcaaatgctgtacatacataacctttgactgttaaaactttattactggtgagggggatctccctcccccagatacgttttacctgcaaccaagttgccaagtgttgaataaacctccctgcattgctggtgttgggtaaatgctgagcgatgccgctgactgtgaaggtatatgttttctgtaatggaatcggatggcacagcaccatgcccctagacctggacaccggtggatggcgctgccacaacacacggctgccgttgagatgcgatgcagtggatagccgtaggtcgtttcatgaccactagaatcggccgttccagtactgcactattgctaatggcaaagaggagcccttttattataaaattg

SEQ ID NO: 155494 - DNA, 1528 bp, Zea Mays
cattccgccatcgtcttctccagccggcgaggccgttccaatccattcccccggttctcattcccatccccgcctcctattctcctcgctcgcgctgacgcgctcccacacgcacccggcaccccccgctgtgccgccacaccaacaccaacaccgcactccaccgccacagtccccgcccccgcgtcgctgtcgtccgtcatcggtgccgtcgcttccccagcacggtacccctagcgccagcgcacgctataaggcaccgcggcctagccatggcgcccgcaccggcatcgctctccgcgcccaacgccctctccctgcccgcgcccgctagagtcacctccgggaggtggaacaggagcctgtctgtttccgccgctgcgcggtccgtgacccgggtggtgtctgtcgcgtccgcggcagcggttacggcgcagaggaggttggtcgccgcggcagcggccacggagatggcgcccacggcgagcggggaggatgggagcaagcccttcgtggaggagatgcgggaggtcgcgatgaagctgcacaccaaggaccaggcccgcgagggggagaaggagcctcaggcgccccccgtcgccaagtgggagccctccgtcgagggctacctccgattcctcgtcgacagcaagctcgtcttccagacgctcgaggccatcgtcgagcgctccgctgtcccgtggtatgcagagttccggaacactgggctggagagatcagaggcactcaaaaaggatctggaatggttcaggcaacagggccacacaattccagaaccatcgccccctggcaccacatacgctactctactggaagaactgtctgagaaggacccccaggcatttatctgccatttctataacgtctactttgctcatactgctggaggccaaatgattggcaaaaaggtttctgagaagattctggacaagaaagagctggagttctacaagtgggagggcaatctctcccagctgctgcagaacgtccgcaacaagcttaaccaagtcgcttcaagctggtctcgggaggagaaggatcactgcctggaggagacggagaagtcgttcgcctactcaggaggcctcctccgccacatattcacctgacttaacactgttggctgatccagtttcaaatgctgtacatacataacctttgactgttaaaactttattactggtgagggggatctccctcccccagatacgttttacctgcaaccaagttgccaagtgttgaataaacctccctgcattgctggtgttgggtaaatgctgagcgatgccgctgactgtgaaggtatatgttttctgtaatggaatcggatggcacagcaccatgcccctagacctggacaccggtggatggcgctgccacaacacacggctgccgttgagatgcgatgcagtggatagccgtaggtcgtttcatgaccactagaatcggccgttccagtactgcactattgctaatggcaaagaggagcccttttattataaaattg

SEQ ID NO: 155495 - DNA, 105 bp, Zea Mays
cgggttcgagccctagcctctgtatattatgcgggtaaggcttggcgcttaaagatacccttccccagaccccgcacagtgcaggaagcctacgacactgggtac

SEQ ID NO: 155496 - DNA, 729 bp, Zea Mays
atggcgcccgcatggctctccgttcccagcgccgccctctccctcctcgacggccagcgtccccgcgagtgggagtggcttccgctccgaaccgcctgcccgagcggtggccgtcgtgtgcgtgtgccgtgccgccggcccaggacgaccgggttttctgtcgcggcgcagaggaggctggtcgtggcggcggcggcgatggagatgacccctgccgcgggagaaaaggaggcggacgccccgttcaccgaggagatgcgggcggcggccatgcggctgcactccagggaccaggccagggacggcaagaaggaggcgcccctggagccgcccgtcgccaagtggcagaccaccgtcgaggggtacctccgcttcctcgtcgacagcaagctcgtcttccagacgctcgaggccatcgtcgaccgcgccgtcgttccctggtatgccgagttcagggatactggtttagtggtttggagagatcggagccgctcggcagggatctggaatggttcaggcagcaaggttgctgagaagctcagtctgcagaaagagctagagttctacgaatgggagggcgatctgtcgcagctgcagcggaatgtccggtcgaggcttaaccgagtcgcttccggttggtctcgagtagagaaggaccgctgcctgggcgagatggagaaggcgtttacctgttcagttgacctccgccgccatatgtttccctgctga

SEQ ID NO: 155497 - DNA, 726 bp, Zea Mays
catccccgtacaaagccttgcctgcctctttgcttattttactacgtaccgatccgtccatcgttcgccgccgtctcctttgcaccgatcgatcccatggccgccgcgagcttcgacgctgccgccgatgtcacgcggcgcggcgggaccggccgggccctcggcgtgcacgccgcgtcgcacaagatcggcaagccgccgccgggcgccgggcacgggcaacaggagcggaagccggtcatcatctacatggtgtcccccaaggtcatccacgtcgacgcccacgagttcatgccgctcgtgcagcggctcactggccccgaagccggccgcggcgacaggaagagcaggccgtcgacctccggagtaggaggcgctggcgaggcggagccttcggaaggcgcgcgcaacaagaccagggcggcgccgccggtgcgcgtgaaggcgcgcgccctgaaccggccggccgtgtccgtgacgaccacgcggcggcagcaggcggcggccgacgcgtcgccgccgtcggggctgatgttgttccaggacctcagcccgctccgcggcgccgcgctcaagggcgagcacctccctctggtctcccccgcctggctgcaccacgttggcgaccatttcctcagccctgctggcgctgcggccgcgctcggctcgccgtcccccagcttcgtcgacgacatcttcgggacgctgtcctcgcagcagcagtga

SEQ ID NO: 155498 - DNA, 893 bp, Zea Mays
acgtcggcgtcttccatcgaagtggccttttcggcggcgagtgagagggcgaggaataaaactcgcgtcgcgcacgcaccgcaacaataatatccttccacgcgaatattcgccgcttcccacctcccccgccccgcatatccttccgtccgtccgttcgtctcccccctttcccttcccctctatttcaccaccccatcagccgcccgccaccgcgacgatcaccggcgcaatccgttcaccccaccactcatccactccccctccgcgaatctcatttctttactgcggctaggaggaggcggcggcggcgatgaagttcggcaagagcctgagcggacagatcgtggagacgctcccggagtggcgcgacaagttcctgtcctacaaggatctcaagaagcgcctcaagctcatcggcgccgggaacggggctgagcggcagccgaagcgggcccgccgcgacgactccggggaggctgacgcggccgcggccgcggcggcaatgacgccagaggaggcggagttcatgcagctcctggaggctgagctcgacaaattcaactcttttttcgtcgagaaagaggaggagtacatcatccgtcagaaggagctgcaggaccgggtggccagggcggccgggcgggagtccaaggaggagctcatgcgggtgcgcaaggagattgtcgacttccacggcgagatggtgctgctggagaactacagcgccctcaactacacagtagctagtagcaacttagcctggactgtggctgtgaattagggatgaagcctctagattcctggggctaacaatcagtgtttgccatagctaacatgggtcaaataaagagacgaattgctgtgttgcttgtcagcaagggacaatacat

SEQ ID NO: 155499 - DNA, 890 bp, Zea Mays
acgtcggcgtcttccatcgaagtggccttttcggcggcgagtgagagggcgaggaataaaactcgcgtcgcgcacgcaccgcaacaataatatccttccacgcgaatattcgccgcttcccacctcccccgccccgcatatccttccgtccgtccgttcgtctcccccctttcccttcccctctatttcaccaccccatcagccgcccgccaccgcgacgatcaccggcgcaatccgttcaccccaccactcatccactccccctccgcgaatctcatttctttactgcggctaggaggaggcggcggcggcgatgaagttcggcaagagcctgagcggacagatcgtggagacgctcccggagtggcgcgacaagttcctgtcctacaaggatctcaagaagcgcctcaagctcatcggcgccgggaacggggctgagcggcagccgaagcgggcccgccgcgacgactccggggaggctgacgcggccgcggccgcggcggcaatgacgccagaggaggcggagttcatgcagctcctggaggctgagctcgacaaattcaactcttttttcgtcgagaaagaggaggagtacatcatccgtcagaaggagctgcaggaccgggtggccagggcggccgggcgggagtccaaggaggagctcatgcgggtgcgcaaggagattgtcgacttccacggcgagatggtgctgctggagaactacagcgccctcaactacacagctagtagcaacttagcctggactgtggctgtgaattagggatgaagcctctagattcctggggctaacaatcagtgtttgccatagctaacatgggtcaaataaagagacgaattgctgtgttgcttgtcagcaagggacaatacat

SEQ ID NO: 155500 - DNA, 798 bp, Zea Mays
ctcctccttttgcacttggaccttagccgttacccgttacccgttataaataaataatagagcggcgtgctgcgtgcgccactgcaagactcttctgctacggtgctcgcttctctgtctcggtcggcggactctgtcgctcctcctcctagcgcgagcgagcgagctagctcacctactctgtggctggacctcgcgcgcgggatggcgccgtcgtcctcgccctcgccttcggcggccggctcccacgcgggcctcgccatcgcggccaccgccatggcgctctccggcacgctcgtcctctactccctgtgccgcgcgaagcagcagcgcctggtgctcccctcctcttcctccgacgacgccccgtcccctcgccctcggctccgcccgtgcctctcctcgtccggtaattaagcgcgcagcgagccgttccccttctttcctcgtcccttgctctgtctgccgcgtgcgtgcgttgcttgattctggaatctatgttcttaacggcggcggcggctcgttcccgttgcagagaagcgcaagaagaagaagcgggagatggcgcgccgcggcagccagaagcgggtgcgcttcgcggacgacgtcgtgggcagggacaatgccgcctccgccgccgccgccgcgccaagggaggaggccgagccgtcgtgcgccgcagcgctcaggacgcccatgccggccaaccgggaggcgctgtaccgcggcatgctccgcggccgctccatgctcagggtcgcctgctcctactagctagctacagtagcaccaccgtgc

SEQ ID NO: 155501 - DNA, 705 bp, Zea Mays
gatctatcaaaacaaatgtagaagaagagaaggggcctgctcctgccgccggatctgcttggctttggaaaagctagatgaaaataaggagagaagggagggaggaggtcgtggtctccttgagtggagatatgtattgtgtcttgaccggtcaagaaacacctgtcaatatacatcggcaccacatgggctacgactgctatcgaatccttgaagccaaagctaaagagaatgctccatcaccagcttcccccttgcaagccgacctatgtgtccagctgagttgaagataatgcaaaaatttgaaggtgactaaaaaatctgaagacagggtgtggacaggaattgcattcagaaaatttataactaaaaccgctcgcttagctgtatcgtcaaatgcagaataattacaagctaatctaattgatgatttttatcatttcgggtttgggaaaaggtaaatatgttggatttaagcataaataaattttcttactttcaacatcgtccagtactagaaaaccttggatttatcatatttttaagatgaaggaaatcatcattgacaagttttatatatcagcattggtggtagcttaaaccctgtacaacattgtttagaataatatcagttgagttatggtaattagatcaaatatgattgtgtgccgtcgcaacacacaggcgttgtactatgatacttgc

SEQ ID NO: 155502 - DNA, 317 bp, Zea Mays
gggtttaaaaatccaagacattttggctgataaatgttagggccaatctgttgtggatgtggttctgttattagcctcatgtttgcttgaaattgtctattttgcttaatagccatccatgttgtctattttgcttaatccccgccgtcatgtccctccattccctgatctatcaaaacaaatgtagaagaagagaaggggcctgctcctgccgccggatctggtctgcccaacaacaaccgaagtctggaggagtggccaaccctcctattgctgctccttgttcttataccgattcgatctgtgctgcagcttgg

SEQ ID NO: 155503 - DNA, 1347 bp, Zea Mays
atgacggtggcggctctgcaggcgatggacgcgctgtcgcggtgggggaccatgctgcgggactctgcggcgaagccaagggaacacggacaacatggtcaccatcctcggctccttcgaccaccgcctctccgcgctcgaggccccttgctccaccgtgcatttcaacatgaaatttgggttgagttcaatctggaacacatgtggaaaagcccaaatggcacaactaggaacattataaatgttcatatttttccttgcatgattaaccccctaattaagaaggctgaagaaactactttgatatctgacattgttgtagatttagcacacaagatttttatagagggcattgctagggtgatctcatctgggacgatgtgcaacagggaagggcggggagccgactgcttcgaccgagacatcaccagcttggaagagtgcccaagggtaatggaggagttgttggcggtctcgcttaggtgtatccctcctgtaaatgagaggcctaacatgaagccagtctgcgatgacctgtgctccataacagtccagaggaacacggacggcatggtcaccatcctcggctccttcgacaaccgcctctccgcgctcgatgccgcaatgcgccccacccaggtgaggacgcacgcgatccggacggcgcatgagaatatcgactggaccatcaaggccgtcgacgacatcctctcccagttcgatctcgctcgccggattagggacatgaaacagctgcgacttaggttccagttctttgcaagtgccatgtcattcaacatcatgccagaggagcagcaggtgaatgagagcttcttgcccagccattttcgcaatttctggcagcgattacagctaagtaagttgcagtccgaggttctcaaggatgccatctcccagatagttcaggatgccaagaagaataggaagttcactgagactgttgagcttcagattagtctaaagaattatgatccacaaaaggacaagcgtttcagtggctctattaagttgcctcacatccctcgtccaaagatgaaggtgtgcatgcttggtgatgcccaacacgttgaggaggctgagaagatgggacttgactacatggatgttgaggccctcaagaaaatgaacaggaacaagaagcttgttaagaagcttgtcaagaagtaccatgcttttttggcatcagagaccatcatcaagcaaattccccgtctccttggtcctggcaagttccccactctggtcactcaccaggaattcctggaatccaaggtaagatgcctctacatcaagagcaccatggggaaaccatgcagggtgttctaa

SEQ ID NO: 155504 - DNA, 186 bp, Zea Mays
gcttcccccctctgctatggactccggtgtactggatctgtggatctgcctctcctctgtcttctccatcaccgatggtctgtggatctgcttccggctctagatctgatctggtaaggtaaagcttcacacctcctctccctgtttggccatctatatcgtgcgtttgtgctcatagtctctctg

SEQ ID NO: 155505 - DNA, 1780 bp, Zea Mays
aaagtccaaacgctgcccccaccctctcggcctccgccaccgccgcggtccttccctcccctgcccaccgagtagatttgaggatctccagctttttgaggacaatccagttttcgtcgaagttcaaaatgacggtggtggaggcgggggaagtgttgaacttgaaggtgggcgagaaccctctactggaggatgaggccaagacggggtacgtctcgcccgacgaccaagacggggagaccgccagcgaaaaacccagcggcgcgccccagctgaagaagggcccctggagtcccgatgaagataagcttctcaaaaattatgtcgaggcacacggcgaggggaaatggaacaaggtgcagcgcaactccgggctcaatcgctgtggcaagagctgccgcctccgctggaccaaccacctcaggcccgatctcaagaaagggtctttcgacaatgaggagatcgacaagattttgaagttttacctcaagtggggccccaagtgggccaagatagcctcgcgattgcctggtcgcacagataatgaaataaaaaacttttggaataccagaataaagaagactgagaaacagggtttgcctatctatccggaacatgtgctttctcaggttaagcaaccgcaacaagacatgaactgtgaaactcctggattgtcacatggcaagaaacggataagagagattgagattcatgatcttatggatgtcaaaatcttatttcagcaccttgactatcataaggatctagtggttccaacaaaacctttgaaacgccgtgcatctattggtagtctgaaaatttctggtgagactaaggaaacctattgttccactgatttgaactatgtattggcaaggagtgagtcggtgcctactggtagtgccattgccagtggttatccagtcgagctcccttcagtccaaagttccagctctaccctaagtaatgactggttgcttcaatgtgtttcggcttctgtcgaacaacagattcatagctccattcaatctacagaaaccatttcatcgcaaaccactggcctgctccccacaatgtctgaaatatcttttgaaacactgattccaatggtataccctatgattcattcttttggctactctgaacatgaaagctctccgaatactgatattcaagctgcaaacttatctttaggttcagatgatgttagccagtattatcaagttgctagtttttttgatcctggggtccctgatacagagctaggggcaagtttcttcaatgacacaccaccagaaacaagttttttgaaccaacagaagcaagtatcttgaatggtacaccaccagaagcaagtatcttgaatgatatagcactagaagcaagtttcttgaatggtacacaactagaagcaagtttcttgaatggtacacaactagaagcaagtttcttgaatgataattcgaaggaccattcacatctttactgtcaggagcctaagcctgattgatggaggccaatggtttgatctgtgtcgcaagcccaggtccgtgagcagcagttctccgttgcacaatcagggtcagtgcgacaaccatgattagatactcttgtcttcctagcattttgttaaggtcacagagccttgtgttgtttcaggcagtttgtgtataaagacataccttgagtgcttgaacttcatattcatttattttgatgtgctgcgaccatctgaactgaaatttcgttctttgatgtgatgtgatttatcgggacataa

SEQ ID NO: 155506 - DNA, 515 bp, Zea Mays
gttgaaatgcatgacatacacctggacaaacttgatgaaatattagctgcagacttgcttgagatcgatatcttagtcatatgaagttcctgatagttattcagggggaaaaaatatctgtatgaaggtgggaaactcattggatgcaatatgcatatactgctcagaggataacattacaagcttcgatgtcacttcagctgttcagatggcacttagatcagcgcctcaataacttgaacaactgccaagaatgttgattacagttaacattagtaaggacagcaacaccagcactttttgaaaacggtttctggaatactggaggatattgcaatagaactgaaccattgggagaagagcaatgataagaacagggcaataagaaatgcaggaagctagcagagcagaaagcatagaaggaaagcagccacatgggatggatgaatatagagattttagatacaaccaaagctatgtccatgagacctgatgcacactcggggatccattgg

SEQ ID NO: 155507 - DNA, 128 bp, Zea Mays
ttgaattctacaccagttcttggaagagaaagcctcaccaagtcatcatctccaggaacgatgttagcgaaagtcaatttaatctggtgctgaacattgagttgcaacaaatcatcgatagagactga

SEQ ID NO: 155508 - DNA, 583 bp, Zea Mays
gcgttagggcctggagaagtatgtcatgaccaaattgttcgaccgcacgtttgggacttccactgaggatgccgtttccgacatggacatcttagagaagattggtctcttgcagcagtttgttaagcctcatcacttggatatacccaaggtcctgcataacgaggcatcgtggctggtaactcattctgagcttgaagcatccacaatgcgatttcagtccttgatgtttgtcataagttctaaggatgggagtaattggtgcatttcacattttaatagcattgtgtgtttgatcaaaatgaagcccccaaaatagtattacttggatataaatttgctagcctcgatattcaaaagggtgtcaattgttaagcattcagctctattttccccctctgttatcaattatgctctgattgtactgtgtatattcaagaagttgctggttttaatcatgtaaaatccaaaattttaaattatccaaagttcccatgaaagaaatcgttccagtgatacagccaaagctcatactgactgagaccattctttctctgcacatgccacttcagcttgcagtgaa

SEQ ID NO: 155509 - DNA, 1815 bp, Zea Mays
cgcataatcatactagtgacacaatcacagctagccacctccccgtccccagcatcgccaaaggtcacatcggtcggccacgggcgcggggcaagaaggaccaggtgacggacgagcaggagggaggaataatggcgggcgcgggcgcgggcgggtggaagaagcgggtgggccgctacgaggtgggccggaccatcggccggggcaccttcgccaaggttaagttcgccgtcgacgccgacaccggcgcggctttcgccattaaggtgctcgacaaggagaccatcttcacccaccgcatgctccaccagatcaaaagggaaatatctatcatgaagatcgtaagacatcccaacatagttaggcttaatgaggtgttggccggcaggacaaagatatacatagtcttggaacttgtcactggaggtgaactgtttgatagaatagtccgccatgggaagctacgtgagaatgaagctaggaagtatttccagcagctttattgatgccattgattattgccacagcaaaaggagtttatcatagagatttgaagcctcaaaacttgcttcttgactctcgtggaaacttgaaactttctgattttggacttagcacattgtctcaaaatggagtaggccttgtacacacgacatgtggaacaccaaattatgttgcacctgaggtgctaagtagcaatggatatgacggatctgcagcagacatttggtcgtgtggtgtcattctctatgttttaatggctggttaccttccctttgaggagaacgaccttccacatttgtatgaaaagataactgcagctcagtactcatgcccatattggttctctccaggagccaagtcattgatccagagaatacttgatccaaatccaagaactcgtatcactattgaagaaataagagaagacccatggtttaagaagaactacgtaactattagatgtggtgaagatgaaaatgtcagcctagacgatgttcaagctatttttgacaatattgaggacaagtatgtatcagacgaagtaacgcacaaggatggtggtcctcttatgatgaatgcctttgagatgattgcactatctcaaggtttggatctctcagcattgtttgataggcaacaggagtttgtcaagcgccaaacacgtttcgtctcaagaaagccagccaagactgtagtagctacaattgaggttgttgctgagtcaatgggtctcaaggtccactcccggaactacaaggtgaggcttgaaggtccagcgtcaaacagagcgagccaatttgctgttgttctagaggtctttgaagttgctccttctctgttcatggtcgatgttcgaaaggttgccggtgacactccggaataccacaggttttacgagaacctatgcagcaaactttgcagcataatctggaggccaaccgaagtttctgccaaatctacgccgctgaggacgaccacctgctagccgcctagcccagcactgagctactgtagtggcatcaccaagagacgtgattcgtagccgtcagaaagggagagcttctgttgaatctagcattgctcgtggagctgggattcatgttgaccaccaggtgtttgtatattgtagtaacgctattgtagatagtctgtatagctccatttgtgcagttgtacgtagcaggaatatgttaaaaaacaacttttaatgtcaggtataatcggtttgcatccaggaagcatctccaacagtgtcttaaatcagtactctatttttaaatatagggttcaacttataaaaacagttttaac

SEQ ID NO: 155510 - DNA, 1891 bp, Zea Mays
cgcataatcatactagtgacacaatcacagctagccacctccccgtccccagcatcgccaaaggtcacatcggtcggccacgggcgcggggcaagaaggaccaggtgacggacgagcaggagggaggaataatggcgggcgcgggcgcgggcgggtggaagaagcgggtgggccgctacgaggtgggccggaccatcggccggggcaccttcgccaaggttaagttcgccgtcgacgccgacaccggcgcggctttcgccattaaggtgctcgacaaggagaccatcttcacccaccgcatgctccaccagatcaaaagggaaatatctatcatgaagatcgtaagacatcccaacatagttaggcttaatgaggtgttggccggcaggacaaagatatacatagtcttggaacttgtcactggaggtgaactgtttgatagaatagtccgccatgggaagctacgtgagaatgaagctaggaagtatttccagcagctttattgatgccattgattattgccacagcaaaaggagtttatcatagagatttgaagcctcaaaacttgcttcttgactctcgtggaaacttgaaactttctgattttggacttagcacattgtctcaaaatggagtaggccttgtacacacgacatgtggaacaccaaattatgttgcacctgaggtgctaagtagcaatggatatgacggatctgcagcagacatttggtcgtgtggtgtcattctctatgttttaatggctggttaccttccctttgaggagaacgaccttccacatttgtatgaaaagataactgcagctcagtactcatgcccatattggttctctccaggagccaagtcattgatccagagaatacttgatccaaatccaagaactcgtatcactattgaagaaataagagaagacccatggtttaagaagaactacgtaactattagatgtggtgaagatgaaaatgtcagcctagacgatgttcaagctatttttgacaatattgaggacaagtatgtatcagacgaagtaacgcacaaggatggtggtcctcttatgatgaatgcctttgagatgattgcactatctcaaggtttggatctctcagcattgtttgataggcaacaggagtttgtcaagcgccaaacacgtttcgtctcaagaaagccagccaagactgtagtagctacaattgaggttgttgctgagtcaatgggtctcaaggtccactcccggaactacaaggtgaggcttgaaggtccagcgtcaaacagagcgagccaatttgctgttgttctagaggtggtgaagccatgcatgcagcgcatcagttggtcgcttgtcctttacacagtgttatttccatgctctgaagtgcacttgattgaatcaggtctttgaagttgctccttctctgttcatggtcgatgttcgaaaggttgccggtgacactccggaataccacaggttttacgagaacctatgcagcaaactttgcagcataatctggaggccaaccgaagtttctgccaaatctacgccgctgaggacgaccacctgctagccgcctagcccagcactgagctactgtagtggcatcaccaagagacgtgattcgtagccgtcagaaagggagagcttctgttgaatctagcattgctcgtggagctgggattcatgttgaccaccaggtgtttgtatattgtagtaacgctattgtagatagtctgtatagctccatttgtgcagttgtacgtagcaggaatatgttaaaaaacaacttttaatgtcaggtataatcggtttgcatccaggaagcatctccaacagtgtcttaaatcagtactctatttttaaatatagggttcaacttat

SEQ ID NO: 155511 - DNA, 1737 bp, Zea Mays
cgcataatcatactagtgacacaatcacagctagccacctccccgtccccagcatcgccaaaggtcacatcggtcggccacgggcgcggggcaagaaggaccaggtgacggacgagcaggagggaggaataatggcgggcgcgggcgcgggcgggtggaagaagcgggtgggccgctacgaggtgggccggaccatcggccggggcaccttcgccaaggttaagttcgccgtcgacgccgacaccggcgcggctttcgccattaaggtgctcgacaaggagaccatcttcacccaccgcatgctccaccagatcaaaagggaaatatctatcatgaagatcgtaagacatcccaacatagttaggcttaatgaggtgttggccggcaggacaaagatatacatagtcttggaacttgtcactggaggtgaactgtttgatagaatagtccgccatgggaagctacgtgagaatgaagctaggaagtatttccagcagctttattgatgccattgattattgccacagcaaaaggagtttatcatagagatttgaagcctcaaaacttgcttcttgactctcgtggaaacttgaaactttctgattttggacttagcacattgtctcaaaatggagtaggccttgtacacacgacatgtggaacaccaaattatgttgcacctgaggtgctaagtagcaatggatatgacggatctgcagcagacatttggtcgtgtggtgtcattctctatgttttaatggctggttaccttccctttgaggagaacgaccttccacatttgtatgaaaagataactgcagctcagtactcatgcccatattggttctctccaggagccaagtcattgatccagagaatacttgatccaaatccaagaactcgtatcactattgaagaaataagagaagacccatggtttaagaagaactacgtaactattagatgtggtgaagatgaaaatgtcagcctagacgatgttcaagctatttttgacaatattgaggacaagtatgtatcagacgaagtaacgcacaaggatggtggtcctcttatgatgaatgcctttgagatgattgcactatctcaaggtttggatctctcagcattgtttgataggcaacaggagtttgtcaagcgccaaacacgtttcgtctcaagaaagccagccaagactgtagtagctacaattgaggttgttgctgagtcaatgggtctcaaggtccactcccggaactacaaggtgaggcttgaaggtccagcgtcaaacagagcgagccaatttgctgttgttctagaggtctttgaagttgctccttctctgttcatggtcgatgttcgaaaggttgccggtgacactccggaataccacaggttttacgagaacctatgcagcaaactttgcagcataatctggaggccaaccgaagtttctgccaaatctacgccgctgaggacgaccacctgctagccgcctagcccagcactgagctactgtagtggcatcaccaagagacgtgattcgtagccgtcagaaagggagagcttctgttgaatctagcattgctcgtggagctgggattcatgttgaccaccaggtgtttgtatattgtagtaacgctattgtagatagtctgtatagctccatttgtgcagttgtacgtagcaggaatatgttaaaaaacaacttttaatgtcaggtataatcggtttgcatcc

SEQ ID NO: 155512 - DNA, 2169 bp, Zea Mays
agtggcacgggcgcggacactgccgctcgcgatatttgcgagagagagagagagagggcccgagagccgaggacgagtgaagtctggctggcgtgatgctgcttcggagcgcgtcctcgccgctgctcaactgcgggcgcgcgccggctgcggcggcgtcggtcgagcacctcgcggtggtttcgccgttgttgtcaccggcagtggcggcgcctaggcatgggccggtgctgtgccgcgccatgtccgagggggacctcgccgcgccgctcgtgcccaagaaggacgatggacacgggagggcgccgaggctgtccctgtccgcgtccttgtcctcgtccgcctccatcttcgtcgaggaggaggacggcgagggcgaggaggaggaggacctggtcgcggtcgcgggggccggcgtggacgtgccgctgccgctgcgtcggctgctgacgaacacggggctggacgtgtccgccgccgcggcgctggcgttcgtggagcagggcgtcgggggcagcggcgggggcgggaaggcgtgcggcagcagcggcggcaagggtgggatcggggacggcgacggtggcagcaaccgcgccgccacggacgcccactaccggcagatgatcgaggcggacccgggcaactcgctgctcctggtcaactacgccaggttcctcaaggaggtggccggggacgcggcaagggcgcaggagtactgcgagcgcgccatcctcgccagccccggcgacgccgaggcgctgtcgctctacgcgggcctcgtttgggagaccagccgcgacgctggccgcgccgaggactactacagccgcgccgtccaggccgcgcccgacgactgctacgtcctgggctcttacgccgggttcctgtgggacgccgaggaagacgaggaagagaactccgagcccttgccaccgccttcgctgttccagggggcagctcagcgtccttccatcacagcggcctcttagatgatcgtgaactcgatctagatctcaccaccgcctgtgaacgaagctgaatctggaaccctggagagtggagagtgactgggtgataaccgtgcagaaacccccgacgagtgactcacatcgccggcaggctcctcgccgcttgtgaactgaatcacggcacatgtaaaactgaatctggcagagcacacacgcgcctaagcctattagcgtctatagactttgcagggctatgtatagtagatatgtagattgagaccctgctgaacttgtacgtgcagtatgttcctagtcacttgtgtatcattactagtaatgcagtatccctcgtgaaataaacgtcaaaaccccttcctgctgcttcatccgagcagagcatcttccaagaagagcagatatcgaactgcaagaactgatgcactgaatcacaaagctttgcaaaatcgtgtacatatcttacttggacggcaacttaattgactggtagccctggagaataatatgaaattctgcctgtctgccaactacaaatacctggtatgtcaacagaaactaagataaagaatacacggtgtcacttgccactcttcaagctcctggtgctgagactaattctaatacataataccagccagcagtttactgcagaaatagcaaaatgtgataaaggaagctggggcacaactccctcctttcataggagtcggcttgataggttcctatgcagtaagtccaggttcgtcaggtgtaatttgagcgcggatcggctctcgatcaagacccttcgtcggcgacttgttttctagctcttctgcagatggaacagatggtgcaatgtcaactttggttgtttgctctgaaggcagtttaggtagagatttccgttggggcttcttcactgcatttgcagcaggtgctttcttgacaccattttgggagaccctttcatcgagactcagtcgacctgaacgagctggaggatttggattcccttctgtccctcctgaggatgtgttcttggagcgaccaagctttggtgacctagctcttgttgtaggtatctaagatcaacagaaaataatataacatccttcagaagttagagagccataacctttatacctagtgggttagtgtcaagctggctatgaaaactttaagtgtgacataactgtaattg

SEQ ID NO: 155513 - DNA, 189 bp, Zea Mays
tccgagttatgttttcaaaattctattttaatgcacaatgaaatctccatcatgcaaaattttaagtttattcatatttaattatttcattcctttaattaagtgctccaaaacaaataataaagagtagctcctattttaaacttcaaatttgtttctagttccaagttcaaatccaaattcaatttc

SEQ ID NO: 155514 - DNA, 3694 bp, Zea Mays
gcaaggcagcagaatagcagtagcccatgttgttgaggacaggtcgcctgtaggccaaccgaccaaagggccacagcactacagcaggccggccaacacgactccgagttggaggcgacctccgctcccctcttcctccctctttccgactttccctccctactcgcccccgcgccgcgccaatcttttttccctcttgacggcgcacataaatccgcgccaaatcgtcaaaccaaaaccaggccgcgcccgcctcgtcagtcctcagtcctcactttcgggccgagctccggatatccagcggcggcaatggcagccgaagccagcgccgtccagcagctcgctggcctcctggaccaagtggacgcgccgctgaagaagacatttgagaatgtgcatcagggctacccaacagagacattattgcgtttccttaaagctagagagtggcatgtgaataaggctcacaggatgcttgaagattctttgaattggaggatgcaaaatgaaatcgatagtatattggagaaacctattatcccagtagatttgtatagatcaattcgtgatacacagcttattgggttatcaggatactccaaagagggcattcctgtatttgcagttggtgttgggctgagtacatatgacaaagcttcggttaactactatgtgcaatctcacattcagatcaatgagtaccgagatcgttttattttgcctacagtgacaaagaagtatgggagacctattaccacctgtataaaggttctcgatatgactggtctgaaattgtcagcactacaccaaatgaagattgtgactgcaatatctacagttgatgatttgaattaccctgaaaagactgagacctattatatagtaaacgctccatacatattttctgcatgttggaaggtcgtgaagcctctgttgcaagagagaacaaggaagaaagttcatgtgttgcgtggctgcgggagagacgagcttctacagatcatggactactcctccctcccccatttctgcagacaggagggctcgggctcatccaaacattcgtcaggcgacgccgataactgcttctctctcgaccacccgttccaccaggagctctacagcttcatccaggagcaggcgctgaaccaggagctcatcaagcagggctccttgcacgtgaaaatccccgagcaggaccctgaggacgcaaagatcgtggaggtcatcgaggccgagttccacaagcttggcgtgcagaacgggtccgccaatggcatcgaccaagcatagcacctttgtctaataaggccagcctgattcaaccgagacgttgcttgccacttctgatgcaactaatcctactgtttaatttttttggtggggtgggcccacccccattgctgtttcctggggggaggggggggggggggggggtgattggtattggtggtatacatagcaaagtcatttgcagatccatccatgatgcaggactgagatagacgatatcacctgtgtaaacttgcagatttgcaatgtgtcctcatctcatatgtatgctgagttgagatgaaatgaataaatcatcctacaagttttttttgagtcatcttcagaattgtgttgtgctcagtcagaaaagtaaccatgcgtttctgtgccgattcttgctagccctaattaatataaggcgaaacagataatgcctatccattggagggattagaggaaggttctccccttagaaagattgtgggtcaccaaacaaagggtaaacgaaccgaaccgaaccgtgcatatcaacaacattacaacaaagtaagcatgctcttggttggcagtagttaccacttgataaaaagaagagggagaccatgtgctttggcttcctctctgagccatctttcttgctctagccttaggccttagcaatggagatcagcgacgagcagaggatgcaagtggagtgccagcgccttccgccttcctggcaaggcaacggatcagacgccgatgtcgaagtggatcatcatctgtggccgtcaaaagatggccctcttccaatattccttaagtttgagaacgtggagtacagggtgtcaggaggcgagaggaagaggaccagcatcgggaacgagatcctcgtcgacccgtcgctgctcctcctcgacgagcccacctccggcctcgactccacgtcggcgagcaagctcatctttatcctccagcgcctggccaagacgcggaggacgatcatcacgacgatccaccagccgtcgagccggatgttccacatgttcgacaagctgctgctcatctccgacgggcacgccatctaccacggcaaggcccgggactgcatgcaccacttctcctcgctgggcttcgtcccggagatccccatgaacccggccgagttcctgctggacctcgccaccggcaacctcgacgacatcagcgtccccgaggcgctgcgcggctcgccggacccgcaggagttcaggtcccaggtcatcaggcacctgcagctcaagtaccgggcgggcgccgaggctcccgcggggagaaggacgcccactgagcagctgcgtctggcggtgcgggcgcataacaaggaccgccgccggcggagcatcggctggctccagcagttcgccgtgctgtcccggcgcacgttccgggagcgcgcatccgactacctggacaagatgcggctcgcgcaggccgtcggcgtggcgctcctgctgggtctcctctggtggaagtcccagaccgggaacgaggcccagctgcgggaccaggtcggtctcatcttctacatctgcatcttctggacgtcgtcgtcgctcttcggctccgtctacgtgttccccttcgagaagctgtacctggtcaaggagcgcaaggcggacatgtaccggctgagcgcctactacgccagcagcacgctgtgcgacgccgtgccgcacgtcgtgtacccggtgctcttcatggccatcctctacttcatggccggcctccgccgcaccgtgccgtgcttcttcctcacgctcctcgccacgctgctcatcgtgttcaccagccagggcaccggggagctgctgggcgccgccatcctcagcgtcaagagggcgggggtcatggcgtcgctcgtgctcatgctcttcctcctcaccggcggctactacgtccagcacatccccaagttcatccgctggctcaagtacgtctccttcatgcactacggcttcaacctgctgctcaaagcgcagtaccacggccacctcacgtacaactgtgccagccggggcggctgccagcgcctgcagtcgtcgccgtcgttcggcaccgtggacctcgacggcggcatgcgcgaggtctggatcctgctcgccatggcgctcgcataccgactcctcgcctacttctgcctcctcaagcggatcagcctcacgcccttgtgatcatccacctaattaaattggggcgcaatttcgcatgcctgtgtgaatgattattcatgggaaatgcctgcatggcgatgtgtatcaggctatcagctatactttgcagactgctgggcctaatttacgaggtgtatttgtctgacacaagttttagaagaagagtgaacaatgacatagcatttttagattatataagtgtttatgctagccgttcctagttataa

SEQ ID NO: 155515 - DNA, 860 bp, Zea Mays
catctagcatatttgtgaacaattcactgaatggaaaccaaattggaaagacatttccaaatttggatgcatctttggcattcaattttgttttcgaagccgaggagaaccaaagagttagtgatttacagtccttgcagaagaagacaatggaaacaagcttgctgcttggaaatcttattgatgttttagaagaaatcaaattatctaagttggagttagtaaatcttacctccgctgcttttgttttggagtcccagacacgtaaacttggcctccacctgtctttcatgagtttcaagagtggcaagaagattgctttcatcatcgacatgacagacttgaaccgctcggtctacccttctgaaccatctgagctcattaaggtttttgaagcacatactacgctagcacagccaagcatagacgagaccatggcttctataaggaacctgcaatctggtcgcacagcaatactaagattgtgccggatggtatcccggctgattcatggttacaatgatgacctgatcactggagtgcaagctgtaggaagtaaacatcatccggatatgtaggtagtaggcattaacagtgttggttttgtttttgtttttgcatgtaggcttaagatgtttgaatgcataaagcagtccttttcaggtggacgtgcaagcgattttggttactgcaaatccttgtaactgcccgtttattacagcaacaatgcataactggtagcttggtgcgttagagtgatggattacagtcttgcagatatgtcggcactgttgtatacgagttagtctaaaaggagccaggctaatgttttctccccgcagctgggactgttgctgaaa

SEQ ID NO: 155516 - DNA, 2493 bp, Zea Mays
atggacatcggcggcagcggcggcatcatattgtcgcccggatcggaggatgataagtttgcgcggaggcgctcccgccgtgtgagcttcgcggacaccaccgcggtgcacgtgttcgaccgcgacgaggacttcgagacgcctcccgaggagcgcgagcccgactccacccccgcacccccttctcccaggaggtcctcggttggccgggaggttgaggacgacacggaggaggatttcaaccgcccccctgtcatcttcctccacgacgtcgactcgtcgtacccagacagcgccgctgaatccatcgcctccgccgatggtagtcaggttgctgcatttttcaactggattatgtcagatgaaaacttttttggacctgtgtcggcaagctttattcaaacaggaagaccatcagattctggaatgtcagaggatgacaaccatgatataactatggattccaggacgttctctttgcattttcgcaatattgctccaccagatgactgtacagcctactcagctgggagtctaatgacacctaatactgcatctgagggacccctgaaggaacttactgcatctaatcctgcaagagcatcaattaatggccgagatacattgactgacatgagtttgttgagtggtaaccccagaacttatggttatgataagttgtcacccacgttgaacagtatgatgaagaagataaaagggagcaagcaaacaaactctcctaaacttggtatttctgatgtaacttctgattgtgtattaaccttgtctacatctgaggaagaaagtagggaagaaaatttatgcattgacaatggtgtatcttctgatgagctggtcatggttaatacaattgcagagcacatttctatgagaaatccagtttcgaccagcacagatctgattcaagatgacaatgaaatgataattgatgtccaggagaattcaaagaactgcaaccatgatcacatggatgatgaccctggtgccaataatactgcagaacctcctgcaaagatttccccagcatataagtcattcatgattaatggtgatgtgcaatcccacctagtcgatcaatcttcgtcaaaagatcgaccatctggatcaaattgcactgcaagtgtttcctccatgtgtaatgttgacatggaaacccatcttttggatcaactacctggtaaggataacacatatgctgcccagtcgtcaagtgaagctactgccattttgctgatggatgctgagcagctgcggcagaaaaatgaggtgatggatacagaaacagttctacacactccaagaactgcaggtctgcagttgcaagttccacgaggatccatatcctccttacgctcaaaaaggcataagcttttcactaatactgtatccaatagtaaagtagcaagacaggagggttgttcttcgggtactgagtttgttcaccatgacaagagactttcttctctgaagcatcaagaattggctgcagcttcccagttacaattggttgagaagaatgaacttggtcatcgagcaagtgacatgttcagcaatactgaagatcatgattctacgttatctgtttcttctcattctgttccaaagctgaagaaaaccaatgaatcttttgtcctaggcactcctcgaagacatgggctaaatgagtctactaaggtcctagatacattatgtcatgcctttactttggatagccaacctagtcgtgaatgcaactctcatgtggatttaaatggtgttggaagaaagagaactgctgaggaaaatggttatgctgtgcaagagtgtcctgaaaaaaccactaagacagcaagaagccctagaaaatctagaaaagagattccttgtgtatctcagccttctatgattgaagaaaaacagaatggtgctcatgataatggaaagtccgtggatattgattggagcaaggtagtatgtactataactaatgccacggagcaagttttgccagcatcaataagcaagtataatctacaacagcttgacatgctaagcgataggttggatgagattcatatggctagaaaatataaaaggctttctactgctgtgaaaaaggctcaactatgtcaagatggaattcaagagtgctgctttctgaaatccaagattttgggcgctggacacatggaggattcttcacttcctgcagctactacagtcagtgctggtgatagacaggtcggcgatgaagggatccccatccctagcgagcgcggtggagaggatggcggttgtggtgcgagcatgggcaggaagggcaatgcaggacgcagagatggggacgaggccacccgcagcggcggtggcgtgctgcaggcccgacgcggagatgggaacgaggccgctcgcgtctgcggcggtggcgtgcagtccccgctctcgcgtccgcacggaggatgctcgcgcgtgcgtcgtgacgagcaagattga

SEQ ID NO: 155517 - DNA, 234 bp, Zea Mays
atgactgtcaaccttagtggcgctcaggtgaaaattgatgacctgaaagatgaagtaaaccataaaaggggcaaaaaagaattaagcattgaagaatctgtaaagaacagggagaaggtaataattgaagtgaaacatactgaagccgaagcaaaggatgatgtcgatgatgctgtcctcaagatttacgagcaaatttatgacgaactaatgcaaggcaacccaggaaattga

SEQ ID NO: 155518 - DNA, 1680 bp, Zea Mays
caagacaactagtttactgtcttccctcctcccaaatcccaaaacctgatcccagctccgccgccgagcaaaaccctaggggcttcctataacgccgccgccgcgatggacgacagcctctacgacgagttcggaaactacataggcccagagctcgccgactccgacgctgatgatgactccgacgccgccggcgcctcaccgtcctccaccgcgtcccgctcgccgtcccccgcggcgcgctccccgtcgggctccccctcccgccctgcggcgctcatggacgtcgacgaagacgagggcgacccgtcccagcaggccgtggtgctcgccgaggacaagaagtactatcccaccgccgaggaggtgtacgggcctggcgtggaggcgctcgtcatggacgaggacgagcagccgctcgagatgcccatcatcgcgccaccacgcgtcgtgaagttcgaggtcgggacccgcgccgcggccacgtctacctacgcgtccaccgacttcctcctcggtctcgcgggcaaccccgcgctcgtccgcaacgtcactctcgtcggccacctccagcacgggaagacggtgttcatggacatgctcgtagagcagacacacgaagtggacaccttcgactccgagggggagcgtcatgtgcggtttactgacacaagggtggacgagcaggagaggcaggtctccatcaaggctgtgccaatgtcgcttgttctcgaggggggaaacggtaagtcatacctgtgcaatatcatggacacgcccgggcatgtcaacttctctgatgagatgactgcggcacttcgacttgcggatggggctgtgctcattgttgatgctgccgagggagtaatggttaatactgagagggcaattcgtcatgcaatccaagaaaggcttcccatagttgttgtgattaacaaggttgacagattgataacagaactaaagctgcccccaaatgatgcatatttcaagctgcggcatactctagaggcaattaacgatcttatctcatcgtgttctactacagtaggtggcactcagctggtggatcctattgctggaaactcttttgcgcatctttacttaaagattcatggggttcaatttgaccatgagaaatttgcatctcgcctatggggagacctgtattttcaccctgattctagaacctttaaaaagaagccgccaaaggaaggagctaacagatcatttgttgagtttatccttgagcctctgtacaaaatttatagtctggttgttggtgagcaaaaggggaatgtggaatcaaagcttgctgaattgggtgtcacactgagcaatgcagcttataagctaaatgttagacctttgctgcggttagcttgccgctcaatttttggcactggtactggttttactgatatgttagtgaaacatatcccctcggtgaaggatgctgctgcaaggaagatagaccacatatacactggaccacaagattcctctattgtagatgccatgaaaaaatgtgatcccaatggaccccttatggttaacgtaacaaaactatatccaaagtctgattgcagtgtctttgatgtcttcggacgagtttatagtagcacgatacagactggacagtccgtgagggtccttggagaaggctatctgacgaatcct

SEQ ID NO: 155519 - DNA, 195 bp, Zea Mays
atggttccaagcccccactggcgttcggtgtacacgacctggttgcgggtggtcgccagggcatggggagtccttcaccggcgtcgatttgggcaacgccggcctcatcaccgggtgatttctcgccgagctttggggccccaccgtgggtctgtcacggaccgtgaccatggcattggcgccgctagaatcacg

SEQ ID NO: 155520 - DNA, 285 bp, Zea Mays
atggcagatgatgacgatgtcaatccggtcaccggcaacgacgaccttcgtgcggcagggcttgtcccagatgacgaagacgacatccaggctgacgctgctgctttgctcggtatcgatctaacctctgctcctgtcgatctaagttctaatccgaccaacgctggtggagggcctgctacgtccaccgatactccggtcggctccaccagcatcgatggtggtactggtacctcatctgttggatctctaacgggctggtgctggcacggcccgtttttttga

SEQ ID NO: 155521 - DNA, 117 bp, Zea Mays
atgatacataagcagttaggctggtatgcagcttgtgtttgtgattctgaaaaagcttgtcttcctaggaagatcctcatgagtataccagagttgcgagataaccgcagaatctga

SEQ ID NO: 155522 - DNA, 2689 bp, Zea Mays
tgaccatggaaagaggtaaacgtgctgtatgcccattactggcaacgggatcccaggcatgaattgggaatctttcaaaaggtttacttgtaaatcgatgggtaaagttccgttgaaaattcttgagaaagatgtttttccttaatgagctactgtatgctttattccagttacttttttttataatcattccagttactacatattggtgtctgaggccctgcagccaatgacgtacttatgtattatcataatctaggtatctagattatataatccacctaataatttgtattgtttgattgtctcttaacttatttaagctggattatataatctagagagtaaacaaacaggacctgagtacattgatgttttttctttcctttattttaccaggaagctcatctgggtgttggcctcatcccctgcacaagctgaggaatggggcaaaaggactccaagccttcaaatggatatggctactcttctgattacgggggtacttcatcgggatataacttgagaaatactggaagtacgtcctccagttatggcgcgaggtatgtgccttcttcagagaacaatgtacagccagaaacacatgccaggttgcagaggaagtattccaggattggtgatgactatcgttctctgagtcaggtgactgaagctttggcgcaagcaggccttgaatcttcaaatcttatcgtaggcattgattttacaaagagcaatgaatggacaggtaaaatttcatttaatcgccgctgcctacatgatattggaaacactccgaacccatatgagcaagctatatctattattggaaggacactttcagtatttgatgaagataacttgattccctgctttggatttggtgacgcatcaactcatgatcaggaggtattcagcttttacccagagaaccgcccatgcaacggatttgaagaggcactagacagatacagagaaatcgttccaactcttcgattagcaggacctacatctttcgctccgatgatcgagacagcaattggaattgttgacagcactggtggtcaatatcatgttcttctgataatcgcagatggacaggttacccgaagtgtcgatacacaatctggacaattgagtccacaggagcgggatactatagatgcaatagtaagagcaagccagttccccctgtcaattgttcttgttggggttggtgatggaccatgggacatgatgcaccagtttgatgacaatatacctgctcggtcatttgacaatttccagtttgtgaacttcacggagattatgtcaaagagcatagcagctgacagaaaggaggcagaatttgcattgtcagcgctgatggaaatccctacacagtacaaagcaacacttgatctccaactcttaggccgccgccaaagaataactccaagaattgctctgccgccaccaacaaggactgcttattcacggactactagctttagccaacagtctggtgtttattcgcgatcaagtagctttgaccaacaaacaagtgtctaccagcaacgttctgagagcttgaaacagcagcaacctgcagccccaaagggacctgacacttacgtatcagaaagtgctctggaggacagaattctgtgccccatctgcatgtataaatcgaaggaccttgcatttgggtgtggacatcagacttgctatgaatgcgggagagatttggagcgctgccctctgtgccagcaacacataaccacgaggatcaggctctactgatttgaagccaatgggattgaaaaatgttcagaaccagctttgatgctactgtgcttcatcattttgtaattctgaatgagataacactgtctcagtagtttcgctacactagttatgccaaaaggaagcgcaccagaaaataatgtacagatttttcctccttttatctcttttgttaggtaaacaagttagacagcagtaaaattctgaatgagataatggatattgtgaagcaaaactatcgccatggaaaatatgcattctgtatgcaatgaccccatggattaaagcttcagtaataagtaagatggtcacatctatatatattgcacttatgttccagtaatactgtacattgcgagctgcaaatagatcaacgtgttgtgtgtgtgtgtgtgtgtatgttttgctcaaataggagccggacgaagagaagagaatttagtacacaaacactagtgtagcacatatatctcggcacagtccgagcgctgcgacgtgggacacaaggattgggtcggcacagtcagcagtggcggctttagtacttgtaccccttgacgtacaggctctcggaggcggcggcgtccccggcgccggagccggcgtacttgcccagcgcggcctcggagttggccttgcagcggatgacgaaggtggcctgcgcggcggcgacgttctccttcttgccgacccacttcttgagggtgctctgctgcagcgcgcggccgaaggagaaggacagcgtccagggcttgagcacctccagcttgttcatcgcgtccaggttctgcgtcgcctcctcctcgctctgcccgcccgacaggaacaccaccccgggcaccgccggcggcacggtgcgccgcagcgccgccaccgtgtactccgctatcacctccgcggagac

SEQ ID NO: 155523 - DNA, 2335 bp, Zea Mays
gaattctcggttggcttaggcggtgggtggatcaaatcgagtccggaagctcatctgggtgttggcctcatcccctgcacaagctgaggaatggggcaaaaggactccaagccttcaaatggatatggctactcttctgattacgggggtacttcatcgggatataacttgagaaatactggaagtacgtcctccagttatggcgcgaggtatgtgccttcttcagagaacaatgtacagccagaaacacatgccaggttgcagaggaagtattccaggattggtgatgactatcgttctctgagtcaggtgactgaagctttggcgcaagcaggccttgaatcttcaaatcttatcgtaggcattgattttacaaagagcaatgaatggacaggtaaaatttcatttaatcgccgctgcctacatgatattggaaacactccgaacccatatgagcaagctatatctattattggaaggacactttcagtatttgatgaagataacttgattccctgctttggatttggtgacgcatcaactcatgatcaggaggtattcagcttttacccagagaaccgcccatgcaacggatttgaagaggcactagacagatacagagaaatcgttccaactcttcgattagcaggacctacatctttcgctccgatgatcgagacagcaattggaattgttgacagcactggtggtcaatatcatgttcttctgataatcgcagatggacaggttacccgaagtgtcgatacacaatctggacaattgagtccacaggagcgggatactatagatgcaatagtaagagcaagccagttccccctgtcaattgttcttgttggggttggtgatggaccatgggacatgatgcaccagtttgatgacaatatacctgctcggtcatttgacaatttccagtttgtgaacttcacggagattatgtcaaagagcatagcagctgacagaaaggaggcagaatttgcattgtcagcgctgatggaaatccctacacagtacaaagcaacacttgatctccaactcttaggccgccgccaaagaataactccaagaattgctctgccgccaccaacaaggactgcttattcacggactactagctttagccaacagtctggtgtttattcgcgatcaagtagctttgaccaacaaacaagtgtctaccagcaacgttctgagagcttgaaacagcagcaacctgcagccccaaagggacctgacacttacgtatcagaaagtgctctggaggacagaattctgtgccccatctgcatgtataaatcgaaggaccttgcatttgggtgtggacatcagacttgctatgaatgcgggagagatttggagcgctgccctctgtgccagcaacacataaccacgaggatcaggctctactgatttgaagccaatgggattgaaaaatgttcagaaccagctttgatgctactgtgcttcatcattttgtaattctgaatgagataacactgtctcagtagtttcgctacactagttatgccaaaaggaagcgcaccagaaaataatgtacagatttttcctccttttatctcttttgttaggtaaacaagttagacagcagtaaaattctgaatgagataatggatattgtgaagcaaaactatcgccatggaaaatatgcattctgtatgcaatgaccccatggattaaagcttcagtaataagtaagatggtcacatctatatatattgcacttatgttccagtaatactgtacattgcgagctgcaaatagatcaacgtgttgtgtgtgtgtgtgtgtgtatgttttgctcaaataggagccggacgaagagaagagaatttagtacacaaacactagtgtagcacatatatctcggcacagtccgagcgctgcgacgtgggacacaaggattgggtcggcacagtcagcagtggcggctttagtacttgtaccccttgacgtacaggctctcggaggcggcggcgtccccggcgccggagccggcgtacttgcccagcgcggcctcggagttggccttgcagcggatgacgaaggtggcctgcgcggcggcgacgttctccttcttgccgacccacttcttgagggtgctctgctgcagcgcgcggccgaaggagaaggacagcgtccagggcttgagcacctccagcttgttcatcgcgtccaggttctgcgtcgcctcctcctcgctctgcccgcccgacaggaacaccaccccgggcaccgccggcggcacggtgcgccgcagcgccgccaccgtgtactccgctatcacctccgcggagac

SEQ ID NO: 155524 - DNA, 1703 bp, Zea Mays
gaattctcggttggcttaggcggtgggtggatcaaatcgagtccggaagctcatctgggtgttggcctcatcccctgcacaagctgaggaatggggcaaaaggactccaagccttcaaatggatatggctactcttctgattacgggggtacttcatcgggatataacttgagaaatactggaagtacgtcctccagttatggcgcgaggtatgtgccttcttcagagaacaatgtacagccagaaacacatgccaggttgcagaggaagtattccaggattggtgatgactatcgttctctgagtcaggtgactgaagctttggcgcaagcaggccttgaatcttcaaatcttatcgtaggcattgattttacaaagagcaatgaatggacaggtaaaatttcatttaatcgccgctgcctacatgatattggaaacactccgaacccatatgagcaagctatatctattattggaaggacactttcagtatttgatgaagataacttgattccctgctttggatttggtgacgcatcaactcatgatcaggaggtattcagcttttacccagagaaccgcccatgcaacggatttgaagaggcactagacagatacagagaaatcgttccaactcttcgattagcaggacctacatctttcgctccgatgatcgagacagcaattggaattgttgacagcactggtggtcaatatcatgttcttctgataatcgcagatggacaggttacccgaagtgtcgatacacaatctggacaattgagtccacaggagcgggatactatagatgcaatagtaagagcaagccagttccccctgtcaattgttcttgttggggttggtgatggaccatgggacatgatgcaccagtttgatgacaatatacctgctcggtcatttgacaatttccagtttgtgaacttcacggagattatgtcaaagagcatagcagctgacagaaaggaggcagaatttgcattgtcagcgctgatggaaatccctacacagtacaaagcaacacttgatctccaactcttaggccgccgccaaagaataactccaagaattgctctgccgccaccaacaaggactgcttattcacggactactagctttagccaacagtctggtgtttattcgcgatcaagtagctttgaccaacaaacaagtgtctaccagcaacgttctgagagcttgaaacagcagcaacctgcagccccaaagggacctgacacttacgtatcagaaagtgctctggaggacagaattctgtgccccatctgcatgtataaatcgaaggaccttgcatttgggtgtggacatcagacttgctatgaatgcgggagagatttggagcgctgccctctgtgccagcaacacataaccacgaggatcaggctctactgatttgaagccaatgggattgaaaaatgttcagaaccagctttgatgctactgtgcttcatcattttgtaattctgaatgagataacactgtctcagtagtttcgctacactagttatgccaaaaggaagcgcaccagaaaataatgtacagatttttcctccttttatctcttttgttaggtaaacaagttagacagcagtaaaattctgaatgagataatggatattgtgaagcaaaactatcgccatggaaaatatgcattctgtatgcaatga

SEQ ID NO: 155525 - DNA, 76 bp, Zea Mays
aacgcgatttacctcacctcacgccactaccgagtgtcgtccccatatcgcaaaggagtgtagtaaagaaagaaag

SEQ ID NO: 155526 - DNA, 665 bp, Zea Mays
atggaggcagttcggacttcggagtcggtggtggagtacgtggcgcaggaagaggcggaggagaagaaggaagcgctcaacccaaactcgtggtcgtccaccagcaagaactatgctggttgcatctcccaatggttgaaccatgaagaacaggaaacatgcttagctgctaaagatgttatgtcgtttgatctacttaagaagagtctaatgtatctattgaacgcgatgggagttcgtatccgaaaagtgtatgatgaggaatggtcctacatttctgttggatggtccttaccaaacacagatcagaaaaatcttgcatttggtgctacaacaagcatggtgcatcctgcaaccaggtacttagtggtcagatctttgtttggtgctccaagatggcaagatatgcttctgtgatatctgacatcgtaagaaattgagttcctgaagaatatttgcttggaaattcacaaaattacattccatcaatgttaacatggagaatattgtcgcctcaagaaaggaaacaccaacaatcattcttccttttttgattagtgttggtaatccaattgaataatgaggccatacaaagatttttcgaagcctagggtgccgtatcgatgagtatggtaaggttattctgagcttgtcaacctctttcg

SEQ ID NO: 155527 - DNA, 107 bp, Zea Mays
atggatccggggttatgggccacaacacgccaccaccggtgataccagcaccaggaggagcttatgtaggggagggagctactgcaggagagaatccaaaccagtta

SEQ ID NO: 155528 - DNA, 1877 bp, Zea Mays
cacaagagaaaaaaaagaaacttaataaggagagagaggagcttagcgctgtctctctctcgctcgtgcgtgcgtgcccaattgcaggaaagccacaaagtctcgtgttcctgggggcagggatctcctctcctctcctctggctctttaaccggagaggcgaggagtagtacggagcagcatgaggctgctgtcacctccattgccgtccctgcgctcttccgtcccggccgtcctcctccacctcctcctcctgctgctgctgctgtcctcatgcccctccccggcaaacggaagggccgcgccgtcgtctccgggcgctacggcgcctgtcaccagtgatcatcgtggagcgccaccgtcatttccaccgtgagctagtcatcgcctccatcctcgcctcaatcgccatcgtcgcgattatcctctccacgctctacgcgtggatcctgtggcggcggtcccgccggctgccccgcggcaagagcgcagacaccgcgagggggatcatgctggcgccgatcctgagcaagttcaactcgctcaagacgagcaggaaggggctcgtggcgatgatcgagtacccgtcgctggaggcggcgacgggggagttcagtgagagcaacgtgctcggcgtaggcggcttcggttgcgtctacaaggcagtcttcgatggcggcgttaccgcggcggtcaagaggctggagggaggtggccctgagtgcgagaaggaattcgagaatgagctggatctgcttggcaggattcggcaccccaacatcgtgtccctgctgggcttttgtgttcacgaggggaatcactacattgtttatgagctcatggagaagggatccctggacacacagctgcatggggcctcacatggatcagcgctgacctggcatatccggatgaagatcgcactcgacatggccaggggattagaatacctccatgagcactgcagtccaccagtgatccatagggatctgaagtcatctaacatacttttagattctgacttcaatgctaagatttcagattttggtcttgcagtgaccagtgggaacattgacaagggaagcatgaagctttctgggaccttgggttatgtggcccctgagtacctattagatgggaagctgactgaaaagagtgacgtatatgcatttggagtggtgcttcttgagctactaatgggaaggaagcctgtcgagaagatgagtcaaactcagtgccaatcaattgtgacgtgggccatgccgcagctgactgacagaacaaaacttcccaacatagttgacccagtgatcagggacaccatggatccaaagcatttgtaccaagtggcagcagtggcagttctatgtgtgcaaccagaaccaagttacagaccgctgattactgatgttctccactctcttgtccctctagtccctgtggagctcggagggacactgagggttgtagagccaccttccccaaacctaaaacattctccttgttgaggcgtcccgatcagtcgaagatcacagctacatgctgatgaacttggacgatgtttatcagtaactttatcaccctagctgtgtgccagaggatgacggttccaacctgccggttgctggttggatcgagagagaattctggtttgaaaagagttgtctcctgtgggtttgcttgtacaaagaagtgaaagaaaacaacactcttttccttagaattttaggtcccttctgtacagatcaaagtttgtccaacactatttaaaagaatttgagaatgacgagctttgggttccacatgggtacccgagcactttggtttgctgcgatattttgcttcttgtcgtacttcgataaaactgaaaaatgatt

SEQ ID NO: 155529 - DNA, 1297 bp, Zea Mays
cctgaactgtctcctgacctgcatgttttctgtgtctgcagtgatcatcgtggagcgccaccgtcatttccaccgtgagctagtcatcgcctccatcctcgcctcaatcgccatcgtcgcgattatcctctccacgctctacgcgtggatcctgtggcggcggtcccgccggctgccccgcggcaagagcgcagacaccgcgagggggatcatgctggcgccgatcctgagcaagttcaactcgctcaagacgagcaggaaggggctcgtggcgatgatcgagtacccgtcgctggaggcggcgacgggggagttcagtgagagcaacgtgctcggcgtaggcggcttcggttgcgtctacaaggcagtcttcgatggcggcgttaccgcggcggtcaagaggctggagggaggtggccctgagtgcgagaaggaattcgagaatgagctggatctgcttggcaggattcggcaccccaacatcgtgtccctgctgggcttttgtgttcacgaggggaatcactacattgtttatgagctcatggagaagggatccctggacacacagctgcatggggcctcacatggatcagcgctgacctggcatatccggatgaagatcgcactcgacatggccaggggattagaatacctccatgagcactgcagtccaccagtgatccatagggatctgaagtcatctaacatacttttagattctgacttcaatgctaagatttcagattttggtcttgcagtgaccagtgggaacattgacaagggaagcatgaagctttctgggaccttgggttatgtggcccctgagtacctattagatggtattgtgtcagcttaattgtcaacttcgactcacatacataaacaacttcattatcgacagtgaagttctacttccatcccgtatctttcagctactgtgtcgatttcagggaagctgactgaaaagagtgacgtatatgcatttggagtggtgcttcttgagctactaatgggaaggaagcctgtcgagaagatgagtcaaactcagtgccaatcaattgtgacgtgggtacggtgcacacaaagttacactaaacatagtatatctctgatcaagtcaaattcctcaacttggaactttagtagtaatggacaattgtcaaccctcattttcacgcaatgtttattgcatcttagttttattttatcatatactagaaaaacatcaacttcacgatcagtgctaacatttaaggagtcaaatgcagtttctttgtgtgctgatatttgacatgct

SEQ ID NO: 155530 - DNA, 198 bp, Zea Mays
atgaagaaacccccttttttgcatgtagtctaccctagctatctgtatgaaaacaacatgaagacattaattggtgaagaaatcaagccaccaattttacagctgttcttgggcgctgttctagaagaacgagaagggaatacacaattggtcccttacacctttgtagacatgaccggttgcaagagcccaaactga

SEQ ID NO: 155531 - DNA, 116 bp, Zea Mays
cacgtatgaggttcaggtcacgcctgttgaaggaggcaaggacaatcatgggtcagctaagatagggatatatatcatccgcgatggaccggtgtttaaaaaaataaaaaaataaa

SEQ ID NO: 155532 - DNA, 843 bp, Zea Mays
gccatacccataccagagtgctcgcaatcacaagagaaaaaaagaaacttataaggagagagaggagcttagcgctgtctctctctcgctcgtgcgtgcgtgcccaattgcaggaaagccacaaagtctcgtgttcctgggggcagggatctcctctcctctcctctggctctttaaccggagaggcgaggagtagtacggagcagcatgaggctgctgtcacctccattgccgtccctgcgctcttccgtcccggccgtcctcctccacctcctcctcctgctgctgctgctgtcctcatgcccctccccggcaaacggaagggccgcgccgtcgtctccgggcgctacggcgcctgtcaccaggcacgttcgcgccgccggcgccaatggcaccgcccccgtcgctccggcggtgccggcgccgcctcctgtcgtgatcatcgtggagcgccaccgtcatttccaccgtgagctagtcatcgcctccatcctcgcctcaatcgccatcgtcgcgattatcctctccacgctctacgcgtggatcctgtggcggcggtcccgccggctgccccgcggcaagagcgcagacaccgcgagggggatcatgctggcgccgatcctgagcaagttcaactcgctcaagacgagcaggaaggggctcgtggcgatgatcgagtacccgtcgctggaggcggcgacgggggagttcagtgagagcaacgtgctcggcgtaggcggcttcggttgcgtctacaaggcagtcttcgatggcggcgttaccgcggcggtctcggtgttatcacacacagtgcagaaggcgcgtacctcagaaactggttag

SEQ ID NO: 155533 - DNA, 4064 bp, Zea Mays
cttccgcccacgccagcgccaacgccagcgcctcggggccgtgcgggggctagggtttggattcgtgggtggagtccgaggctagatccagcaggaggaggggaggggaggggaagggttgtgggtccagccggcggggatggccgccaccgccggggcgtcggacgacggcggtagcgtgggcggcggcgggggcggcgagcggatgaagctgctgtgcagcctgggcgggcgcatcctcccgcgcccgggggacggcacgctgcggtatgcaggcggggacacccggatcgtgtccgtgccgcgcggggtatcgctgccggacctcctcgggcggctcgccgacgcgtacggcggcgccactggcccgcacttcgccgtcaagtaccagctccctgacgaagggctcgacgcgctcatctccgtgtcctcgccggaggatctcgacaacatggtcgaggagtacgacaagctcagcggcgccagcccgaagctgagggtgttcatcttccccatcctggatgcggcgggcggcagcggcgccgcaggcggggaggacttggagaccgggaactttgactcgggccttcggtatctggaggccgtgaacggcattgtgcgcaaggacagcatcgcgagcctctcctccacgcagtgctctgacggggggctcccccctccggcgccatcaggtggcggcggccctggatctccagctgcgctctcccccacatccactagctcaaatgatgctgcgagatcgaacatcactggagccggggcggcgcctccgccccttgttgacgtcttcagtaatgctgctcctgctcctgtacatgtgaagccacaggagattggtgctgaagggagggctccccaggcgaatccacatccacatccagaggcagctacaaacacccatccggaggcagcgaggtacaggcaaccactatcgcagctgccaccactgcctcctgtgttcatgaacgatcacagagatgccattcagggtctgaatcagcagctgccaggtaacggagcaagattcgacgactgccacatgtgcttgaaggcattgcctcacgcccactctgatccagtggtcaatgagtatggcaatgaggtgcatggaggggctgctccagagcctgggcctgtgtttatgagcctgcggcctgaagatgtggcaaggatgatgataccggagaggggtgttcagccacccatgggggcttacggatatacgcatatgcatccagtgcctcaggagaggatgtatgtgcccaagatggaaggggttacaaactcagtattcattgatccaactggcttgcatcagcatgtgtatgtgcagcagcagcagcagcagcagcaaatgccgccacaacagttgccatctacctatgggtttagccatattcctgtgatttctagcgagaaggacagagtagtttctccaagttctgcccacaatgatgttgcaaactctcatcatcaatttatgcagcagtcgcagcagcagttaccttctggccatgggatgcctcagtatccagtgaagcctactagtcccagtaacccgcttgctggtgaaggtagtgtaagtggcaattcaaggcataatgaggatggacaggtgtatcgtgacaatatgcctccggttgcacctgtggctgtgccaacatacatggcaaatgtggacaggatgatggattcactccgtatgagccccagcgaagtttctggctctactgaacaaaggaaacatgcaatgtctcctgacagtggcttaccccagaatgcagtgccagattactctcaggggcatccagagaatagtatcagtacctggccagatacacgagcaaatgatgttcatccaagcaacaccaatactttttttgatgttagtgaaccaaaggtattgcttcaaactgaatctgcgccaccaccttctgttgccagctcttatctgcataatgtccagcatgttaatatgagtcatatgccacatatggtgagcattgggggaccctattctagctatgttgttgctacagtcggacctggtggattgcctcaatcaacttatggtattgatatgatctatccaaatgccactgttaatccagtgactgagagaagagatgtcccgcctgaagtttatcacaaggaagctccacatgaagtcgtagctcctccaaacacagttcagttgccgacagcagcattggcaaaccatgctacaaatgtggatcaagcagctgcacatgcactgccaccaagacctaagagggtagcaagcagagagaacatcagcccaaaggatccgcacccacacaactctttgttgaactgcaaagggccagatctgaatattccagctgaggatgtttctctccagaaacagtcagatcacaaaggtgatgacatctctaacccagatttactgagtatggatgatgggttagctacatctaaagctcagtcatctgagcctcaacctcctctggtaaatgaaggagttggggcaattaccaataaagtagaaggtgaagtccaccccaacgaggtttccaagagcaggccagcagattggatttcaggatttccagcttcagatggacgtctgcagattataaagaacaatgaccttgaagagctccaagagcttggttctggaacttttggaactgtctatcatggtaaatggagaggcactgatgttgcaataaaaagaatcaatgatagatgttttgctgggaaaccatctgagcaagaaaagatgcggtatgacttctggaatgaagcatctaaacttgctgatctgcaccacccaaatgttgtcgcgttttatggtgttgttcttgatggacctgggggatccattgccacagttacagaatatatggtcaatggttcacttaggacagctttgctaaagaatgccaaaaccctcgatcgacgcaagagattaattattgccatggatacagcctttggaatggaatacttgcatagcaaaaacattgtgcactttgacttgaaaagtgacaatttgcttgttaatttaagggaccctcagcgtccaatatgcaaggttggtgatcttgggctttcaaaagtgaagtgtcagaccctcatctctggaggtgtccgaggaacacttccatggatggccccagaacttctgaatggtagcagcagcttggtctcagaaaaggttgatgtattctcttttgggattgttctctgggaactgctaacaggagaagagccatatgcagatttacattatggtgttataataggtggcattgtgagcaacactctacggccgccagtgcccgactcctgcgaccccgagtggaggtcactgatggagcaatgctggtcaacagaaccatctgagcggccaaacttcacagaggttgtgaataggctgcgctccatggcggcatcccagaaggtacaacaacactaagggaccatcggcacgcagaagttgtaccagggcagcagtcagtcaaacttgcaggttacatccatgggccgccaattcacgccatccgccatatatgcctaggatctgttcataacccttcatttgttcgtatattgtaatcaaaagttacccgccgtgtgtctacaacgtgtcgtcgcaatggacgcagcaggtgcctgcctattcattcattcataccgttttggtcgtcgagaggtgcgttcaataagttactagtccagtgtccgttataggggagtccggtagtgtccgttataggggagtccggtattattattattattgtttcatcttcttcttcgccctttctctgggtaataattgggttacttggaaactgttgatcagtgggtcagttagaatgtgaactggttgttgctgggtaagtatgtggtttgttggtatattgagtctggggacagagagtgaggtcctgatctgcttgtaacagtacctgctttggttttgtgattgctatatactgaaacccaaatccctctgttgctattctaaattctgagttgtttggtgcatgtcg

SEQ ID NO: 155534 - DNA, 3994 bp, Zea Mays
ctccttcccattccccgcaaaccaagcgacgacgcggcccacgccatgagctgatgaacattgggccagtcgctgctccagtcctctgctcttccttccgcccacgccagcgccaacgccagcgcctcggggccgtgcgggggctagggtttggattcgtgggtggagtccgaggctagatccagcaggaggaggggaggggaggggaagggttgtgggtccagccggcggggatggccgccaccgccggggcgtcggacgacggcggtagcgtgggcggcggcgggggcggcgagcggatgaagctgctgtgcagcctgggcgggcgcatcctcccgcgcccgggggacggcacgctgcggtatgcaggcggggacacccggatcgtgtccgtgccgcgcggggtatcgctgccggacctcctcgggcggctcgccgacgcgtacggcggcgccactggcccgcacttcgccgtcaagtaccagctccctgacgaagggctcgacgcgctcatctccgtgtcctcgccggaggatctcgacaacatggtcgaggagtacgacaagctcagcggcgccagcccgaagctgagggtgttcatcttccccatcctggatgcggcgggcggcagcggcgccgcaggcggggaggacttggagaccgggaactttgactcgggccttcggtatctggaggccgtgaacggcattgtgcgcaaggacagcatcgcgagcctctcctccacgcagtgctctgacggggggctcccccctccggcgccatcaggtggcggcggccctggatctccagctgcgctctcccccacatccactagctcaaatgatgctgcgagatcgaacatcactggagccggggcggcgcctccgccccttgttgacgtcttcagtaatgctgctcctgctcctgtacatgtgaagccacaggagattggtgctgaagggagggctccccaggcgaatccacatccacatccagaggcagctacaaacacccatccggaggcagcgaggtacaggcaaccactatcgcagctgccaccactgcctcctgtgttcatgaacgatcacagagatgccattcagggtctgaatcagcagctgccaggtaacggagcaagattcgacgactgccacatgtgcttgaaggcattgcctcacgcccactctgatccagtggtcaatgagtatggcaatgaggtgcatggaggggctgctccagagcctgggcctgtgtttatgagcctgcggcctgaagatgtggcaaggatgatgataccggagaggggtgttcagccacccatgggggcttacggatatacgcatatgcatccagtgcctcaggagaggatgtatgtgcccaagatggaaggggttacaaactcagtattcattgatccaactggcttgcatcagcatgtgtatgtgcagcagcagcagcagcagcagcaaatgccgccacaacagttgccatctacctatgggtttagccatattcctgtgatttctagcgagaaggacagagtagtttctccaagttctgcccacaatgatgttgcaaactctcatcatcaatttatgcagcagtcgcagcagcagttaccttctggccatgggatgcctcagtatccagtgaagcctactagtcccagtaacccgcttgctggtgaaggtagtgtaagtggcaattcaaggcataatgaggatggacaggtgtatcgtgacaatatgcctccggttgcacctgtggctgtgccaacatacatggcaaatgtggacaggatgatggattcactccgtatgagccccagcgaagtttctggctctactgaacaaaggaaacatgcaatgtctcctgacagtggcttaccccagaatgcagtgccagattactctcaggggcatccagagaatagtatcagtacctggccagatacacgagcaaatgatgttcatccaagcaacaccaatactttttttgatgttagtgaaccaaaggtattgcttcaaactgaatctgcgccaccaccttctgttgccagctcttatctgcataatgtccagcatgttaatatgagtcatatgccacatatggtgagcattgggggaccctattctagctatgttgttgctacagtcggacctggtggattgcctcaatcaacttatggtattgatatgatctatccaaatgccactgttaatccagtgactgagagaagagatgtcccgcctgaagtttatcacaaggaagctccacatgaagtcgtagctcctccaaacacagttcagttgccgacagcagcattggcaaaccatgctacaaatgtggatcaagcagctgcacatgcactgccaccaagacctaagagggtagcaagcagagagaacatcagcccaaaggatccgcacccacacaactctttgttgaactgcaaagggccagatctgaatattccagctgaggatgtttctctccagaaacagtcagatcacaaaggtgatgacatctctaacccagatttactgagtatggatgatgggttagctacatctaaagctcagtcatctgagcctcaacctcctctggtaaatgaaggagttggggcaattaccaataaagtagaaggtgaagtccaccccaacgaggtttccaagagcaggccagcagattggatttcaggatttccagcttcagatggacgtctgcagattataaagaacaatgaccttgaagagctccaagagcttggttctggaacttttggaactgtctatcatggtaaatggagaggcactgatgttgcaataaaaagaatcaatgatagatgttttgctgggaaaccatctgagcaagaaaagatgaaccctcgatcgacgcaagagattaattattgccatggatacagcctttggaatggaatacttgcatagcaaaaacattgtgcactttgacttgaaaagtgacaatttgcttgttaatttaagggaccctcagcgtccaatatgcaaggttggtgatcttgggctttcaaaagtgaagtgtcagaccctcatctctggaggtgtccgaggaacacttccatggatggccccagaacttctgaatggtagcagcagcttggtctcagaaaaggttgatgtattctcttttgggattgttctctgggaactgctaacaggagaagagccatatgcagatttacattatggtgttataataggtggcattgtgagcaacactctacggccgccagtgcccgactcctgcgaccccgagtggaggtcactgatggagcaatgctggtcaacagaaccatctgagcggccaaacttcacagaggttgtgaataggctgcgctccatggcggcatcccagaaggtacaacaacactaagggaccatcggcacgcagaagttgtaccagggcagcagtcagtcaaacttgcaggttacatccatgggccgccaattcacgccatccgccatatatgcctaggatctgttcataacccttcatttgttcgtatattgtaatcaaaagttacccgccgtgtgtctacaacgtgtcgtcgcaatggacgcagcaggtgcctgcctattcattcattcataccgttttggtcgtcgagaggtgcgttcaataagttactagtccagtgtccgttataggggagtccggtagtgtccgttataggggagtccggtattattattattattgtttcatcttcttcttcgccctttctctgggtaataattgggttacttggaaactgttgatcagtgggtcagttagaatgtgaactggttgttgctgggtaagtatgtggtttgttggtatattgagtctggggacagagagtgaggtcctgatctgcttgtaacagtacctgctttggttttgtgattgctatatactgaaacccaaatccctctgttgctattctaaattctgagttgtttggtgcatgtcg

SEQ ID NO: 155535 - DNA, 797 bp, Zea Mays
caacgcaaaaccacttttccttcacgcatcgcaacgcatctacacttcccaaaacgcagcagcacttctttcctccacttcccaaatcgcagaaggaccagggaacagaagagacccttcgttttcagtccggaactggcgagatcaatggacgccgccggggaggcctcgtcgccgtcgtccccgtcgaagctgcgggacaagctgcggaccacggtgtgctgttgcttcggcgcgggcggcggcccggagaggacgaggtggcggcggcggggcgcggccgcggccgcgggcgagttccgctacgacgcgctcagctacgcgctcaacttcgacgagggcgacgacgacgacgcgtacgcggaccccgccgcggtcttccggtacaggaacttcaacgcgcgcctcccgtcctcgccggccgccgctgccgcggttgggacccagcggcaacacaccacggccatcgcctagaacgtagaacgtgatggctctcctgtaatttttttggccgacttctgtaatttttttgggccccctcctttaactgtacgatctactaaacgagcgacagagttcttaagctcctctgtgcagcgacgtactctagcgcgttttatgtatatagtattattactcttgtcatagtaccagcattcagagtgttccatcagattggaagtggcggtgatgaaccctagaaatcggggattcgattccagaaagaaatatctcctcgccgagaatctcctctgtttatccgttagatgtcttttgtctgagataaagcaaaaaaa

SEQ ID NO: 155536 - DNA, 84 bp, Zea Mays
ggctgcccgcagtcgcgcgctccacgcaaaactgtatcgagatagcgtttactcttcaactgcagcggtcaactgtatccgtga

SEQ ID NO: 155537 - DNA, 606 bp, Zea Mays
atgcggagatggccaggtgggctgagggcagaggccgcccacggcgggcggaggccggaagccggtgggcggtgggcgggcgggtggaggctggagccggaccgcggtccgcgggtcgcgacggaggaggacggcgggcgggtggaggctggagccggaccgcggtccgtgggtcgacggcagaggtctgtgaccgcggcggcgggtgacggggcggaggctgcctgggttgaagtcgtggagaaagggcgaggcgcttgggccagatggataatgggccctccgcccctgcacgtagagaactgcgtcaacggactgattgatcttcaagcgcaagatcagcggggtagcgcggagccctgcttcgtttctggcgacgacgagaagcggcgcggcggtggcggtggcggtggcggtggcggacgagcggagaggagggtcgtgggggctagatggagagcaaagcggagggcagggaggggctggggcgccgactgcggcgccggcgcgtgccgggcgccgagaggcgggccaggccgggccgaaaagaatttgcggcccataacggagaacgagcacgagcaatcgggtcgactatcccagtaa

SEQ ID NO: 155538 - DNA, 4087 bp, Zea Mays
gtagcacgtgagcatagcttcagctggccactaaaccctcgtcttccccttccaagcgaatcccattccctacctttcgccgccgcctacgcaccatcgctcgaaaccctagccccattccccgtctcgctcggaatcccagctacctccagcgccgccgcgactgcaggataggaggccatggacgacgtgtgcgaggggaaggacttctccttcccggagcaggaggagggggtgatcgagctgtgggcgaagctcgacgccttccacgagcagctccggcgcacggagggcggcgaggagttcgtattctacgacggtccccccttcgccacgggcctgccccattacggccacatactcgccggtaccatcaaggacgtggtcacccggcaccagtcgatgcgaggccgccacgtctcgcgacggttcggatgggactgtcacggactccccgtcgagttcgagatcgataaggcgctcggcatcaccaaccggcagcaggtgttcgacctcggcatcggcaagtacaacgagacgtgccgcagcatcgtcaccaagtacgtctccgagtgggaggccatggttacacgcacggggaggtggattgacttcaagaacgactacaaaaccatggacctcaacttcatggagagcgtctggtgggtgtttgcccagctatgggagaaggacctcgtctataggggtttcaaggtcatgccttacagcacaggatgcaaaactgcactgtcaaactttgaggcagcactggactataggactgttcctgacccagcggtgatggtatccttccctattgttggcgatgcggacaatgcagctcttgttgcatggactacaacaccctggacacttccaagtaacctagcgctgtgtgtcaatgccaatcttacatatgcaaaggttaaagacaaatcaaatggagcagtatatgttattgcagaatccaggcttgggcagttaccagttaaggccaaagcttcaggaaagaagcaggcaccttcaaagggaagcaatattgaagctgttcaggatggtttggacaaggaatcatatgagctgttgtcaaagattcctggggtatccttggttggcttaaaatatactcctctatttgactttttcattgaacttcaagggactgcctttagagtgattgcggataactatgtcacggatgatagtggaacgggtgttgttcattgtgctcctgcttttggtgaagacgaccatcgtgtttgccttgctgctgggatatttgagactgctggacttgttgttgctgttgatgacgacggatgttttattgaaaaaatatctgattttaaagggcgatatgtcaaagaagccgacaaggatatcatcaatgctgttaaggataaaggaagactcattagtaaagggagtattgagcactcttatccattttgttggcgatcgggcactcctcttatttatcgggctgttccaagctggtttgtcaaggttgagaagattaaagaccagttgctggaatgtaacaaggagacttactgggtgcctgactatgttaaggaaaaaagatttcacaactggcttgaaggtgctcgtgattgggctgttagcagaagtagattctggggtactccacttccactgtggataagtcaagatggtgaagaaattgttgttatggattctatagagaagcttgaaaaattatctggagtcaaggtcactgatcttcaccgacactatgttgatgatattacaattccctctaagagaggacctgagtttggggtgctcaaacgtgttgatgatgttttcgactgctggttcgagagtgggtcaatgccatatgcctacattcactatccatttgagaatcgggaactatttgaaaagaactttcctggcaattttgtggcagagggtttagatcaaacccgtggatggttctatactctgatggttctctcaacagcactgtttgggaagcctgcatttaagaatcttatatgcaatgggcttgtcttggctgaggatggtaagaaaatgagcaagagtaaaaagaactatcctccacccaaggatctcattgatgagtttggagcggatgctctgcgactatatttggtaaactccccagttgtacgtgcagagtctctacgattcaaacgtactggtgtctttgctgttgtgaaagatgtcttcctcccatggtataacgcatatagattttttgtccaaaatgcaaagagactggaagttgagggtcttgcctcattttctccgatggaacaagtggtacttctgaagtcatccaatgtgttggatcactggataaactctgcaactgaaagtctagttagctttgttcaccaggagatggatgcatatcggctttacacggttgtgccgtatttggtaaaatacattgactatcttactaacatatatgtgcgtttgaaccgcaaacggttcaaagggcgtactggagaagaagactgcagaatttctctttcaacactctaccatgttcttgtaacaacttgcgtggtgatggctccatttacaccattctttactgaagttctttatcaaaatttgcggaaggtgtcaagtaattctgaggagagcatccacttttgcaagttcccttccacaactggcgagagagatgagcgtgttgagcaaagtgtaaagaggatggtgaccataattgatcttgcacgtaatattcgtgagcggcataacaaagctctcaaaacaccactcaaggaaatggtggttgtgcatccagacaatgacttccttgaagacatcactggcaaactaaaggagtatgtcatggaggaaatcaatgttaagaatgtcactccatgtaatgaccccttgatgtatgcttctctgcgagccgagcctaatttcagcgtgctaggaaaaagacttggaaaagacatgggaaaagtatcaaatgtggtgaagaagatgactcaggagcagatcttagcatttgaaaaaagtggagaggtttcattcttcggccattgcttgaagctagatgatatcaaggttgtccgacaattcaagcgtcctgaaaatgtgtcagagaaggagattgatgctgcaggagatggtgatgttttagtcattttggatctacgaaccgaccagtcattgtttgaagctggagtggctcgagaggttgtgaacaggatccagaaattacgaaagactgctcagcttgaacctgctgatccagttgatgtgtattacgaatctgtgggcaatgacaaaaacactctggaagagatattgaagtcacaggatcagtatattagagacgcacttggctcaccaatcgttccaaaggaaatggcaccaacagatgtcgtagtacttggcgaggaatcgcacaacgtacatgacatgtcatttgtcatatgcatcgcaaggtccaccccgattatttcaccagatcttctttctcatgcctcaggcaacagcaatcatgtcgaggcgttgagagtatatcttctgtcaaaatctctatccagattgaagaaccagttccaaagtggaaatggcgtgattacggtcgactgcatcgaaggttatccactaatcaggttacagctaggaaagcatgtttttctaagtgcaggggatttttatctggctagtcgatcctaatttttgtgtgcagcatcccaattttgactgattcacccatcattttgccgcaatcggcttaaacagcttggttccatttatgcattcagattcacttgttaaaggtgaaaaatcccaatttatgatataccatggtactctccgttctttttttatttgtcgtgttttagttcaaaaatgaactagccggtgacaaatatttttttttattttgtcgtgttttagttcaaaaataattagccggtgacaaatattcgagtaagctataggttcccatacccctagtgaattatgagtagataacatgtatgtttgtaatctcttgggtgtttggtttttgaggattgatgtggtccatcagattttgatgaatgaatgcatttcattt

SEQ ID NO: 155539 - DNA, 3983 bp, Zea Mays
gtagcacgtgagcatagcttcagctggccactaaaccctcgtcttccccttccaagcgaatcccattccctacctttcgccgccgcctacgcaccatcgctcgaaaccctagccccattccccgtctcgctcggaatcccagctacctccagcgccgccgcgactgcaggataggaggccatggacgacgtgtgcgaggggaaggacttctccttcccggagcaggaggagggggtgatcgagctgtgggcgaagctcgacgccttccacgagcagctccggcgcacggagggcggcgaggagttcgtattctacgacggtccccccttcgccacgggcctgccccattacggccacatactcgccggtaccatcaaggacgtggtcacccggcaccagtcgatgcgaggccgccacgtctcgcgacggttcggatgggactgtcacggactccccgtcgagttcgagatcgataaggcgctcggcatcaccaaccggcagcaggtgttcgacctcggcatcggcaagtacaacgagacgtgccgcagcatcgtcaccaagtacgtctccgagtgggaggccatggttacacgcacggggaggtggattgacttcaagaacgactacaaaaccatggacctcaacttcatggagagcgtctggtgggtgtttgcccagctatgggagaaggacctcgtctataggggtttcaaggtcatgccttacagcacaggatgcaaaactgcactgtcaaactttgaggcagcactggactataggactgttcctgacccagcggtgatggtatccttccctattgttggcgatgcggacaatgcagctcttgttgcatggactacaacaccctggacacttccaagtaacctagcgctgtgtgtcaatgccaatcttacatatgcaaaggttaaagacaaatcaaatggagcagtatatgttattgcagaatccaggcttgggcagttaccagttaaggccaaagcttcaggaaagaagcaggcaccttcaaagggaagcaatattgaagctgttcaggatggtttggacaaggaatcatatgagctgttgtcaaagattcctggggtatccttggttggcttaaaatatactcctctatttgactttttcattgaacttcaagggactgcctttagagtgattgcggataactatgtcacggatgatagtggaacgggtgttgttcattgtgctcctgcttttggtgaagacgaccatcgtgtttgccttgctgctgggatatttgagactgctggacttgttgttgctgttgatgacgacggatgttttattgaaaaaatatctgattttaaagggcgatatgtcaaagaagccgacaaggatatcatcaatgctgttaaggataaaggaagactcattagtaaagggagtattgagcactcttatccattttgttggcgatcgggcactcctcttatttatcgggctgttccaagctggtttgtcaaggttgagaagattaaagaccagttgctggaatgtaacaaggagacttactgggtgcctgactatgttaaggaaaaaagatttcacaactggcttgaaggtgctcgtgattgggctgttagcagaagtagattctggggtactccacttccactgtggataagtcaagatggtgaagaaattgttgttatggattctatagagaagcttgaaaaattatctggagtcaaggtcactgatcttcaccgacactatgttgatgatattacaattccctctaagagaggacctgagtttggggtgctcaaacgtgttgatgatgttttcgactgctggttcgagagtgggtcaatgccatatgcctacattcactatccatttgagaatcgggaactatttgaaaagaactttcctggcaattttgtggcagagggtttagatcaaacccgtggatggttctatactctgatggttctctcaacagcactgtttgggaagcctgcatttaagaatcttatatgcaatgggcttgtcttggctgaggatggtaagaaaatgagcaagagtaaaaagaactatcctccacccaaggatctcattgatgagtttggagcggatgctctgcgactatatttggtaaactccccagttgtacgtgcagagtctctacgattcaaacgtactggtgtctttgctgttgtgaaagatgtcttcctcccatggtataacgcatatagattttttgtccaaaatgcaaagagactggaagttgagggtcttgcctcattttctccgatggaacaagtggtacttctgaagtcatccaatgtgttggatcactggataaactctgcaactgaaagtctagttagctttgttcaccaggagatggatgcatatcggctttacacggttgtgccgtatttggtaaaatacattgactatcttactaacatatatgtgcgtttgaaccgcaaacggttcaaagggcgtactggagaagaagactgcagaatttctctttcaacactctaccatgttcttgtaacaacttgcgtggtgatggctccatttacaccattctttactgaagttctttatcaaaatttgcggaaggtgtcaagtaattctgaggagagcatccacttttgcaagttcccttccacaactggcgagggaaatggtggttgtgcatccagacaatgacttccttgaagacatcactggcaaactaaaggagtatgtcatggaggaaatcaatgttaagaatgtcactccatgtaatgaccccttgatgtatgcttctctgcgagccgagcctaatttcagcgtgctaggaaaaagacttggaaaagacatgggaaaagtatcaaatgtggtgaagaagatgactcaggagcagatcttagcatttgaaaaaagtggagaggtttcattcttcggccattgcttgaagctagatgatatcaaggttgtccgacaattcaagcgtcctgaaaatgtgtcagagaaggagattgatgctgcaggagatggtgatgttttagtcattttggatctacgaaccgaccagtcattgtttgaagctggagtggctcgagaggttgtgaacaggatccagaaattacgaaagactgctcagcttgaacctgctgatccagttgatgtgtattacgaatctgtgggcaatgacaaaaacactctggaagagatattgaagtcacaggatcagtatattagagacgcacttggctcaccaatcgttccaaaggaaatggcaccaacagatgtcgtagtacttggcgaggaatcgcacaacgtacatgacatgtcatttgtcatatgcatcgcaaggtccaccccgattatttcaccagatcttctttctcatgcctcaggcaacagcaatcatgtcgaggcgttgagagtatatcttctgtcaaaatctctatccagattgaagaaccagttccaaagtggaaatggcgtgattacggtcgactgcatcgaaggttatccactaatcaggttacagctaggaaagcatgtttttctaagtgcaggggatttttatctggctagtcgatcctaatttttgtgtgcagcatcccaattttgactgattcacccatcattttgccgcaatcggcttaaacagcttggttccatttatgcattcagattcacttgttaaaggtgaaaaatcccaatttatgatataccatggtactctccgttctttttttatttgtcgtgttttagttcaaaaatgaactagccggtgacaaatatttttttttattttgtcgtgttttagttcaaaaataattagccggtgacaaatattcgagtaagctataggttcccatacccctagtgaattatgagtagataacatgtatgtttgtaatctcttgggtgtttggtttttgaggattgatgtggtccatcagattttgatgaatgaatgcatttcattt

SEQ ID NO: 155540 - DNA, 3881 bp, Zea Mays
gtagcacgtgagcatagcttcagctggccactaaaccctcgtcttccccttccaagcgaatcccattccctacctttcgccgccgcctacgcaccatcgctcgaaaccctagccccattccccgtctcgctcggaatcccagctacctccagcgccgccgcgactgcaggataggaggccatggacgacgtgtgcgaggggaaggacttctccttcccggagcaggaggagggggtgatcgagctgtgggcgaagctcgacgccttccacgagcagctccggcgcacggagggcggcgaggagttcgtattctacgacggtccccccttcgccacgggcctgccccattacggccacatactcgccggtaccatcaaggacgtggtcacccggcaccagtcgatgcgaggccgccacgtctcgcgacggttcggatgggactgtcacggactccccgtcgagttcgagatcgataaggcgctcggcatcaccaaccggcagcaggtgttcgacctcggcatcggcaagtacaacgagacgtgccgcagcatcgtcaccaagtacgtctccgagtgggaggccatggttacacgcacggggaggtggattgacttcaagaacgactacaaaaccatggacctcaacttcatggagagcgtctggtgggtgtttgcccagctatgggagaaggacctcgtctataggggtttcaaggtcatgccttacagcacaggatgcaaaactgcactgtcaaactttgaggcagcactggactataggactgttcctgacccagcggtgatggtatccttccctattgttggcgatgcggacaatgcagctcttgttgcatggactacaacaccctggacacttccaagtaacctagcgctgtgtgtcaatgccaatcttacatatgcaaaggttaaagacaaatcaaatggagcagtatatgttattgcagaatccaggcttgggcagttaccagttaaggccaaagcttcaggaaagaagcaggcaccttcaaagggaagcaatattgaagctgttcaggatggtttggacaaggaatcatatgagctgttgtcaaagattcctggggtatccttggttggcttaaaatatactcctctatttgactttttcattgaacttcaagggactgcctttagagtgattgcggataactatgtcacggatgatagtggaacgggtgttgttcattgtgctcctgcttttggtgaagacgaccatcgtgtttgccttgctgctgggatatttgagactgctggacttgttgttgctgttgatgacgacggatgttttattgaaaaaatatctgattttaaagggcgatatgtcaaagaagccgacaaggatatcatcaatgctgttaaggataaaggaagactcattagtaaagggagtattgagcactcttatccattttgttggcgatcgggcactcctcttatttatcgggctgttccaagctggtttgtcaaggttgagaagattaaagaccagttgctggaatgtaacaaggagacttactgggtgcctgactatgttaaggaaaaaagatttcacaactggcttgaaggtgctcgtgattgggctgttagcagaagtagattctggggtactccacttccactgtggataagtcaagatggtgaagaaattgttgttatggattctatagagaagcttgaaaaattatctggagtcaaggtcactgatcttcaccgacactatgttgatgatattacaattccctctaagagaggacctgagtttggggtgctcaaacgtgttgatgatgttttcgactgctggttcgagagtgggtcaatgccatatgcctacattcactatccatttgagaatcgggaactatttgaaaagaactttcctggcaattttgtggcagagggtttagatcaaacccgtggatggttctatactctgatggttctctcaacagcactgtttgggaagcctgcatttaagaatcttatatgcaatgggcttgtcttggctgaggatggtaagaaaatgagcaagagtaaaaagaactatcctccacccaaggatctcattgatgagtttggagcggatgctctgcgactatatttggtaaactccccagttgtacgtgcagagtctctacgattcaaacgtactggtgtctttgctgttgtgaaagatgtcttcctcccatggtataacgcatatagattttttgtccaaaatgcaaagagactggaagttgagggtcttgcctcattttctccgatggaacaagtggtacttctgaagtcatccaatgtgttggatcactggataaactctgcaactgaaagtctagttgtgccgtatttggtaaaatacattgactatcttactaacatatatgtgcgtttgaaccgcaaacggttcaaagggcgtactggagaagaagactgcagaatttctctttcaacactctaccatgttcttgtaacaacttgcgtggtgatggctccatttacaccattctttactgaagttctttatcaaaatttgcggaaggtgtcaagtaattctgaggagagcatccacttttgcaagttcccttccacaactggcgagagagatgagcgtgttgagcaaagtgtaaagaggatggtgaccataattgatcttgcacgtaatattcgtgagcggcataacaaagctctcaaaacaccactcaaggaaatggtggttgtgcatccagacaatgacttccttgaagacatcactggcaaactaaaggagtatgtcatggaggaaatcaatgttaagaatgtcactccatgtaatgaccccttgatgtatgcttctctgcgagccgagcctaatttcagcgtgctaggaaaaagacttggaaaagacatgggaaaagtatcaaatgtggtgaagaagatgactcaggagcagatcttagcatttgaaaaaagtggagaggtttcattcttcggccattgcttgaagctagatgatatcaaggttgtccgacaattcaagcgtcctgaaaatgtgtcagagaaggagattgatgctgcaggagatggtgatgttttagtcattttggatctacgaaccgaccagtcattgtttgaagctggagtggctcgagaggttgtgaacaggatccagaaattacgaaagactgctcagcttgaacctgctgatccagttgatgtgtattacgaatctgtgggcaatgacaaaaacactctggaagagatattgaagtcacaggatcagtatattagagacgcacttggctcaccaatcgttccaaaggaaatggcaccaacagatgtcgtagtacttggcgaggaatcgcacaacgtacatgacatgtcatttgtcatatgcatcgcaaggtccaccccgattatttcaccagatcttctttctcatgcctcaggcaacagcaatcatgtcgaggcgttgagagtatatcttctgtcaaaatctctatccagattgaagaaccagttccaaagtggaaatggcgtgattacggtcgactgcatcgaaggttatccactaatcaggttacagctaggaaagcatgtttttctaagtgcaggggatttttatctggctagtcgatcctaatttttgtgtgcagcatcccaattttgactgattcacccatcattttgccgcaatcggcttaaacagcttggttccatttatgcattcagattcacttgttaaaggtgaaaaatcccaatttatgatataccatggtactctccgttctttttttatttgtcgtgttttagttcaaaaatgaactagccggtgacaaatatttttttttattttgtcgtgttttagtt

SEQ ID NO: 155541 - DNA, 570 bp, Zea Mays
atagattgcgaactgaacttaaatcaaatacttcagtattggtctctagagaggaagctctgccaaccattactaataactgagaaggatttggcaatcgcttatctttgactcaataccttatgacctcggaaaggtttgaacccgtcagggactaaagatgccaaaggtatactgttttccttctcattctactatgctataactatttctcctctactgtttttaccctacgaactgtgttgctcatcttattctacactacatctacttaaactcaattgtcagtgtcatagctttgctggaagccacatggcatattacttacatgccttcttagagtcttttagttatttctgtaatctgtattataggaatcataattaatgttgttttataacaataaatttatattgttgttttttagtcagaaaaaatgcttgtcatttggtcaattagctagcgacatgatattaagtgttgtagcatggtcaagggttagctatgtctatgtgccatgtgttaaaagtattaggctacaaaaatccgaaaatgtcttgataaaagcaa

SEQ ID NO: 155542 - DNA, 849 bp, Zea Mays
aaaggtgggactaaaccctagcgagctgcggcctagtatataaatgagcaccacgcgtctgtcgtccttctgaagtttcggcggcggcgtaggtagcggcggtctcaaccccaggcgagctcggctccggtcacccgtcgatccacgcaaccatgtcgaggaggaagaccagggagcccaaggaggagaacgttacccttggacccactgtccgtgaaggagagtttgtctttggtgttgctcacatctttgcatccttcaatgacaccttcattcatgtcactgatttgtctgggagggaaactttggttcggatcactggtggcatgaaggttaaggctgatcgtgatgagtcgtctccttatgctgctatgcttgctgctcaagatgttgcacagcgttgcaaggagctcggtatcaccgcgctgcacattaagcttcgtgcaactggaggcaacaagaccaagacccctggacctggtgctcagtctgctctcagggctcttgctcgttctgggatgaaaattggacgcattgaggatgttaccccggttcccactgacagcactcgcagaaagggtggtaggaggggaaggaggctgtaggcgtgtatccttgctatttgccatcactttgcactggcctctgggtagcgttgctgtttattagcttgccaaaaggagttttaattttgctcattttgctctatgtcgaggatcatttactgttagccgaatctatgatgtgcattgataatgttttggttgaggaattgacaattatgctagttttgctgccccgcggatctgagcatgctttccgaatacgagcgtgttgtgtggagaaata

SEQ ID NO: 155543 - DNA, 799 bp, Zea Mays
gccgaaattactggtgctttagttacctgaagtgcgaaagcgtggggtatgcgacggtgccagttgtcgcaggcggtggcgacaatgcagctggtgcagttggtgtgggaatggttgatgctaatcaggcaatgttatcgctggggacgtcgggggtctattttgctgtcagcgaagggttcttaagcaagccagaaagcgccgtacatagcttttgccatgcgctaccgcaacgtggcatttaatgtctgtgatgctgagtgcagcgtcgtgtctggattgggccgcgaaattaaccggcctgagcaatgtcccagctttaatcgctgcagctcaacaggctgatgaaagtgccgagccagtttggtttctgccttatctttccggcgagcgtacgccacacaataatccccaggcgaagggggttttctttggtttgactcatcaacatggccccaatgaactggcgcgagcagtgctggaaggcgtgggttatgcgctggcagatggcatggatgtcgtgcatgcctgcggtattaaaccgcaaagtgttacgttgattgggggcggggcgcgtagtgagtactggcgtcagatgctggcggatatcagcggtcagcagctcgattaccgtacggggggggatgtggggccagcactgggcgcagcaaggctggcgcagatcgcggcgaatccagagaaatcgctcattgaattgttgccgcaactccccaccattcattgcatccaagttttccacttcccaactactacaagagctctagcattcaattctaga

SEQ ID NO: 155544 - DNA, 1966 bp, Zea Mays
gctctctcgaatgtaatacattttgacctagtgtatagtcaccatgtttacacgatctgtatgccagttgtagcaacacaccatgtctatcaacttgccatcttggggaggtcattcagacttactcttcaaggtgtatacatttccaacgactccgatgacgctaacaagaattgatagccccagcaaaccaagcgcaaggagcctctccccatgtcccaagtgactcccttccttgtccagcctcaatgccaccagggccgggaacatgaaacccaacgccagccctgtggtagctccggtgaacttgaaggccatccagatgttgggtatcattgtcgagccaaggtagatgagtgctagaagcaccactgtcaatgtgaatgttctcttcctgctaggggttgccagctccccgaagatcagcgcctccactgtctgcctcagcgagaagtggacaactgggaagacgaggaccaggtggatgacataccctatcctgacaatgtagttgagcagagagctgaatcttatcccgagatccttgtcgaagttggtgagcacgtcggactcggtgtcctcgccgaacaagaggtaccccgagagggcagtcagggcatacaccgccacgcatagcacggtgctgatcctgccaaccttgtacatgttctgtggtgtcttctccttgagctcgttgtagatcggctgcacattgaaatggcagatgaaggcattagtcatgatgggtatcacgacgagcaggtccagcattgctgcacgggagctgaaatctggacccatcctcggcatactgatcttgccctcggcgatcttgatcaaagcaatgatgctggacaccaccacaaacacaacggcaagggcaaccgacgcggcagatgacatgctcagtgagtcaatcttctcaagcgcacacaatggtgcgaggaagatgacaaggaccaccaagatcagcagcttccggttatcccactcgccatggccaaccagctgatccatgacgccgatgtgcttcagtgaccctgacatcacgtctccgatgatgatcagatacaccaccaggacccctgcgttgttgatgatgacgcacatctgcgccacgatgctcgccgggcggcccatcgccctgtgcacgacctcgccgtacgatagcgcgcggcagtgggccgagaatctcacgagcagctcgacggtgatctcggacaggacccccatgaccaggatcgagacgagcccagcggcgactccgagcaccttcatggtagccgggagcgccataatgccggccccgatgatggatgtcgcgaggttgaacacggcggcggtcacgtcggacccctctggcggcccggcagggccgtcgccgatgagcggcagctcgtcgtgctcaccggccccgccgccgtcgtcctccacctcgcccaagaacgaatcctgcctggagattttagcgtggccgttgaggacgccattggcggcggcgctagatttggccccgttgggttggagctcgatggagggggaagtcaatgggagagccgagtaattcgtattcatctcgcctcttagcgcatcgaagatggatcagaaagcaaatagggagatgggaaattcttggcaagagcggatacaggaacaaattgtgccgattgaatcctaatgcctgaatcacccacggatggaaggaaaatctcgcccaatctacaactgagaacacaaaattgcttgctgtcgaaagggaggaatgagtgcctatgctatgcagcaggggagtcggaaaccaaaacaactatttccctgcggaggagattggggggagaagatgaatcttggtgagcaccaagggcttgggagttggaatttgggaagcaccaagaggttggggttgccgggttggactaagaggcaggattggggcgttgaactgtggcgagagatctgagctcta

SEQ ID NO: 155545 - DNA, 3391 bp, Zea Mays
ccaaccaaactgacctacccggaaaacgagccccccgactcccgcctgccgccgccgctctgccagccaaacccaaactaaaaccctcgccgacggcgcgcctgttgttaaaccctagaaaaaccagcggcgacaggagtggccgcaaccccgccgccggagggggctccacgaccagatagaagagggagagaggatggggatcttcgagccgttccgtgcgatcggctacatcacggcgagcggcgtgcccttctccgtgcagcgcctcagcaccgagaccttcgtcaccgtcagcgtcggcaaggctttccaagtctataactgtgctaagctgaatttggttcttgctggaccccaattgcccaagaagatccgtgctattgcatcctacaaggattatacatttgctgcttatggaagtgatattgcagttttcaaaaggactgaccaggtggctacttggagtagacatgaagaaaaggtcaacatgctatacctatttggagaatatgttctaagcgcagatgctaaaggtaatgtattcatgtgggccttcagaggagcagaaccaaacactgaaccagttggaagcatatcattgggagacaagttcaccccaacatgtatcatgcatcctgatacttatctgaataaggtaattgttggtagcgaagaaggctccttgcagctgtggaatatcagcacaaaaaagaaactgtatgatttcaatggttggaactcacctgttcggtgttgtgtctcttctcctgccctggatgtagttgctgtcggatgttctgatgggtcagttcatgttcataatgtaagatatgatgaagaattgatgtctttcaaccaccagattcgtggtgctgtgactgcactgtcatttcgaacagatgggcaaccccttctggcttctggaggttcttcaggcgttatcagcatatggaatcttgagaagagacggctgcattctgtgattagggaggcccatgatggttcaatagtttcacttcacttttttgcgaatgaacctattctgatgagttcagctgctgacaattcagtcaaaatgtggatatttgatagtaatgatggaggtgctcgtctgttacgatttcgaagtggtcacagtgcaccacctaggtgcataagattctatggcaatggaaaatgcatattatctgctggccaagatcgtgcatttcgccttttctcagttatccaggatcaacaaagtagagagctttctcagaggcatgttgcaaaaagagcaaaaaagctaagagtaaaggaggaagagatcaagctaaaaccagttgttacatttgactgtgctgagatacgtgcacgtgactggtgtaatgttgtcacatgccacatggatactccacaggcatatgtatggcgtcttcagaactttgttattggtgaacatgttttgacaccatcatcaagcactgtgacaccaattaaggcttgtgtgataagtgcatgtggtaattttactatcttgggcactgaaggtggttggattgaaaaatttaaccttcaatcagggtttagtcgtggtagttacattgacacctcgttggcaatgcaatgtgcacatgatggtgaagttgttggattagcttgcgatgccagaaatggctttttgattagtgctggataccaaggtgatattaaggcatgggattttaaaacttgcaagctgaaatctagattggatgttggtaaatctgttactaaaatcgcatttcaccggccaaatggtcttcttgctacggtagcaggtgatatggtactcatattgtttgatacggtgtccatgaaaatggttcgtagatttgaaggacatacagaccgtatcactgatttgtgcttcagtgaggatggaaaatggctcatctcgtctagcatggatgggactcttaggatttgggacatcagtttagcaaggcagatagatgcaatgcatgttgatgtatctataacatctatctctatgtctcctaatatggatgtgttggcaaccactcatgttgatcaaaatggtgtctacctctgggttaatcaatctttattctcggtctcaacaaatactgaaaattatgccagtggtaaacatgtacggaatgtgtgtttgccagctgtttcatcaacagagagatctgaggaagaacaagttcagaatttaggagagtcatataagtccagtattaaaccttttgtcataacggatcatcaaataccgaatctagttaccctctccttacttccaaagagtcaatggcaaagtttgactaatcttgacattataaaggttcgcaataaaccaattgagccacctaagaaacctgagaaggcaccattcttcttgccttcagttccatccctttctggggagatattgtttgagcctcctgccagctcaaaagatacagacatcagtaccacgaagaatacaaatcataagatgtctgaactctcctctcatttcagtcagcagttgcaattttgtggtgaaacaaagaactattcggcttttactgactacctaaaaggcctgtcaccgtcgtctttagatatggaactgcgaatgctacaaatattagatgatgaagagtctgaagatctggagcaaagacctgagcttcagtccatttcttcgctgttggattatttcattcatgaactttccttcaggaataactttgagtttgtccaggctgttctgaaattgtttttgaagatacatggtgaaacaatacgacggcactcaatgcttcagagtaaggtgaagaagcttcttgaggtccagagcttagtttggcagaagattgataagatctttcagggtgcacgatgcatggttacattcctcagtaactcacaattttagtagcaggccggagttccacataccagggcatacatggtgcctaatgcctgcacgagtgtggccattggattgagcaagtggatatagttgattttttttggagacggcattaaaatggatctggttctcaaacatggcatgactaggcattggagcattgttgagcagcagccatggctatattactctaggcttacaattttgctgtagctgttagtctgttacacagcaaggagtccacttggtaaacatttgtagctaccaaaacagccccatctcatggtgtaacaattttgtagttttacatttgtgtcatctttttgtaacaaactgatgtatcaaacaccgtattgcaagaaatactaaggcttgccattgctatttgaacaaaaaaccatatctgtatattcaacaagcttagcttctgtgttggtcttatattgtggaggataccaggtgaaaatatccaaatgtacctaa

SEQ ID NO: 155546 - DNA, 123 bp, Zea Mays
gcttcttttctgctgattcctgaagggctctcacagggaattttcagagctgcagccaagaaccataaggatgttcttattgtggtggatcataatgattatcctgctttactggagtacctt

SEQ ID NO: 155547 - DNA, 2800 bp, Zea Mays
cttccctctcgttctccgcttccgcctccgcctccggccacgagtcaccagggaagggacaaacgcacaaaatcaacgaacgcccagcgcccagtcaaacactaccccttcctccctcccccctcgccgcctccccggaccccgccccgaccccaccgaacccatggcgtcggagatcgaggtgctcgaggacaccaccacctcctcgacttccctcgtcgcggccgcgtccacagtcccttctctcgcggagggcgcggaggcgccggcggaggacgactcgctgaagaacgacgtgtacaccgcggcggcgtacggcgatctggagaagctgcagcgactggtggagggggagggccgcccagtcaccgagcccgacggcgggggctaccacgcgcttcagtgggccgcactcaacaaccgcgttgccgccgcgcagtacatccttgagcatggagcagacataaatgctgtggatcacactggacaaacagcacttcactggagtgctgtacgtggtcatattcaagttgctgaactacttctgaaagaaggagctaaggtggatgctactgatttatacgggtatcaggccacgcatgttgcagcacagtatggtcagactgcattcatttaccacattgttgcaaaatggaatgctgatccagatatccctgataatgatggaaggagccctttacactgggctgcttataagggatttgcagactccatacggcttcttttgtttttggatgcttataggggacggcaagacaaagaaggttgtactccattacattgggctgctattcgggggaatcttgaggcatgcactgtcttagttcaggttggcaaaaaggatgatttgatggtgaaagacaaaactggcttaactccagcacagcttgctgccgataagaatcatcggcaagttgcatttttcctcgacaatgctagaagggtacacggcaaaggatgtggtgcgaacaccagatttgggaaattgtcaaaattagggctcgctcctcttctttggtgcaccattattggcatgcttattacatacacacactctgttatatcaggacaatatgccatgactacgacagcaccatttgggatattcgcatggtcaggagtttttcttgcaactgctggcttggtcatgttctataaatgtagcaggaaagatccaggttacatcaacataaatgcaaggggctcgcaaaatcaaagggatgatgaaccgttgctgaagatggagttagaaaatcctgcacttctttctggcaactggtcacaactttgtataacctgcaaaatagtcagacctgttcgttcaaaacattgttctacatgtgatcgctgcgtggagcagtttgaccaccactgcccttgggtatctaattgcataggaaagaagaacaaatgggaattcttcatgttcctcactctagaagtttttgcaatgatcattactggctctgctgccattataagaattgtaagagatccaaattctccatcatcctttggtgcttggattcattattctgcgtttcagcatcctggggtggtttcatttctcgcattggattgttttcttttctttggtgttgcagttcttacagttgttcaagcatcacagatagcaaggaacattacaacaaatgagatggcaaactccatgagatatgcatacctcagaggcccaggtggcagattcaggaatccgtatgatcatgggattcgcaagaactgctctgacttcttgttaaatggatacaatgaggacactgaacggctagagcagacattgcccactgatgaggaaatgggaatgatacagatgacaagtgcagtttcgcagcagaacggtgacaatcatttacatcatggtaatggcactgaccatagttgcgctgtttcacaagcaaactcaaaacctcatagccaagtgggttcgtctcagtgttgtgaccacagtaagaggactgataggacaccgttgggcctaggattgggccttggacgaaacagtgcgtcccggcagtatgttcggtctcttatcccattgtgatccatcatttggcgatcatgtgtttgtttgactgtagattggatttgttcacttattctgttatacgtgcccttgacatggttcaccatggctgggcagggttaacgttattgtgccatgagctccggaatactaagatatatctggtgttgtagtttagcgttgaactcagagaagttgaaggtaacgacctggtttgcgagtatcagctgatcagcagtctggaatcagagagtttgtgcagaaaatgtaagagttatggactcatggcagatgcagtagcatgagatgtcttcagaattgttgtgtacatcaggttcggtggtacccccattgtttagcgtgatacgagtttggaaaaaaaaaaagtagtcgtaaattgagaaaattgtaaattgattagtaagctcactgcaacactagctgttttcctagttttcattcatttttgggtctggttattgttatgaaccacggaaagaattttcggttttcgggtatgggtacctcagttatatttggtctggttatggtacttactggtggtgcatgtttgtgtgagtgcttagagtttaggctatggccatcagatcatgtatatgactatatgactgtgtaaaacactgttttttatctgattgtgtaaaacagtgtttttgtatcgtacactattgttttatagattgaagtttaaaataagagatgtgaatgagtaag

SEQ ID NO: 155548 - DNA, 2887 bp, Zea Mays
tcctctccgctctgctccctccgccgtgcgctcgaacgaactccacacgaaattatccgcgtaaagttggggagcagcgaacccgtagcgcgcgccccggatccctccacggggggcaatggcctcgtcggcgttcctgcccgagctgggcacgcaggtggtggtgcccgtcgcggccgtggtaggcatcgcgttcgcggtgctgcagtgggtgctggtctccaaggtgaagctctcccccgagccgcgccgcggagacggctccgccgggaagagcggcgccggcgccggcgccagcgagtacctcatcgaggaggaggaggggctcaacgagcacaacgtcgtcgtcaagtacgccgagatccagaacgccatctccgaaggagcaacttctttccttttcactgaatacaagtatgtgggactattcatgggcatttttgctgtcctgatcttcctcttccttggttctgttgagagcttcagtaccaagagtcagccatgccactacagcaagggcaagacgtgcaagcctgcccttgccaatgctatcttcagcaccattgcctttgtgcttggtgcagtcacctctcttgtttctggtttccttggaatgaagattgccacatatgcaaatgccaggacaactcttgaggctaggaagggtgttggaaaggcattcattaccgctttccgctctggtgctgtgatgggcttcctgcttgctgctagtggcctttttgttctttatattgcaatcaacttgtttggaatttattatggtgatgactgggagggcctttatgaggctatcactggttatggtcttggtggttcttctatggctctttttggtcgtgttggtggtgggatttacactaaagctgctgatgttggtgctgatcttgttgggaaagtcgaaaggaatatccctgaagatgatccgagaaacccagctgtcattgcggacaatgttggtgacaatgttggagatattgctggtatggggtcagatctctttggctcttatgctgagtcttcatgcgctgcgcttgtcgttgcctcaatctcttcattcgggatcaatcatgaattcacccctatgttgtacccactcctcattagctctgtgggtatcatagcttgcttgataaccactctttttgcaactgatttctttgagatcaaggctgtagatgaaattgagccggctctcaagaagcagcttataatttccactgctgtgatgactgttggcattgcacttgtcagttggttagggcttccatatacattcacaatcttcaactttggtgtgcagaagacggtgtataactggcaattattcctatgcgtggcagttggtctgtgggcaggactagttattggatttgttacggagtattacacaagcaatgcatacagtcctgtacaggatgttgctgattcctgcagaactggagctgctacgaatgtcatctttggccttgctctgggatataaatccgtcattatccctatttttgctattgcttttagtatttttctcagcttcagccttgctgccatgtacggtgttgctgtggctgctcttggaatgctcagcacaatcgctactggccttgccattgatgcctatggtcctatcagtgacaatgctggaggaattgctgaaatggctggcatgagccacagaatccgtgagagaactgatgctcttgatgctgctggaaatactactgctgccattgggaagggttttgcaataggttcagcagccttggtgtctcttgccctctttggtgcttttgtcagccgtgctgagatctcgactgttgatgttctgacacccaaagttttcattggactgattgttggtgccatgctcccatactggttctcagcgatgacaatgaagagtgttggaagtgcagcactcaagatggttgaggaagtccgcaggcagttcaacaccatccctgggctcatggagggcattaccaagcctgactatgcgacgtgtgttaagatctctactgatgcatctatcaaggagatgatcccacctggtgcacttgtcatgcttacacctcttattgtggggatcttctttggtgttgaaaccctctctggagttcttgctggtgctcttgtttctggtgtccagattgccatctctgcatccaacactggaggtgcctgggacaacgcaaagaaatacattgaggctggtgcatctgagcatgcaagaaccttgggcccgaaaggttcagacccacacaaggctgctgtcatcggtgacaccatcggtgatcccctcaaggacacctcaggcccctcgctgaacatcctcatcaagctcatggctgtcgagtcccttgtctttgctcccttcttcgccacccatggaggcatcctcttcaaatggctttagaggaagaatggaagatggatgggtagtttatttttgccgggggagagcactagatatatgtcatagagaagtttcagtttacccatatggtgcacttcatccttttttgtttcgcttgtactgtgtcgcagtcttgttgaacttgtcagccgtggtatcacctagtttttgggtctagatgcagtagccgagtggagcaaaaacgtctagcattctacaggattggaatttggacatggatgtgttgggaagtttgatactgcatgtagatatttcgatgatgatgatcaaggaatgcacaagtcagatttacctgtgtttgtgaaacttgaaactctgcgtaggagtgtatggcggtagaatagtcaatcagtgaccgatcaaaatctgtaactcatcgaccttattttaatagtataaactagataaaattatacaacaaacccaattaaa

SEQ ID NO: 155549 - DNA, 105 bp, Zea Mays
cgacttacgtcttccgtgtgcagacaaccaaacacactctcagatcaagttaatgcatgtgtcggggaccataattatgggtacccccaagactcctaatctcag

SEQ ID NO: 155550 - DNA, 233 bp, Zea Mays
gatcctttacgtattttatgtatatgtgttgtttcattttggtaggaacatcagtgatgaagaacgtagaccgaccaccttccaatccaaaacggatcataatccagtctactcaggagtgattcagcgttgacataccccgtgctccggcggggactgttagacctgagacaaggcgtgctgctgatgaggatgatgactttatgccatcatccaagaagcgtaacttggac

SEQ ID NO: 155551 - DNA, 1356 bp, Zea Mays
aaaccgaaccgaagtgcaaccatccgtcacatcacaaaccgaaaaaggccgcgacgagccgaccagctctactgcccccttccggccttcggcgaccgtgacgagcaacgacgaccacggcgacgatggccgcttcctccctctgccacgggcacttgctcctgtttctcctcgtgtccgtcacatcggcctgcctcggtaccgcggcagcgcatcaagccgggtctggagagggttacacgatcgccggccgcgtcaagatcgatggcatgagtgagaagggctatggtcttccagccaagacatcaaacacaaaagtgatacttaatggcggccaaagggttacatttgccaggccagacggctactttgcattccacaacgtgccagctggaactcatctgattgaggtctcctcaattggttacttcttttcccctgtccgagttgatataagtgcaaggaatcctggatatattcaagcagcattgactgaaaccagaagggttctgaatgagcttgttctggaacctctgaaagaagagcagtactatgaggttagggagccgttctccatcatgtcacttttgaagagccccatggggttaatggttggttttatggtcttaatggtctttgtgatgcccaagatgatggagaacatagatcccgaggagatgaagcaagctcaagaacaaatgaggaacaaccctgtatcattctctggcttgctcgccagagcgcagggctagagaagtagactgtagacatgaggatactgcaaaggtcaaacattctagaatgtgagtaagagcactattaaagtgcttggcacgtcactcactcggggcaatttcctggggataagaaggaaatcctttccccctgtttttaccgtattttagggctagtttgggaacaccaatttcctaaaagatttatattttcccatgggaaaatgaactaatttcccttgggaaaataaaaatcttttggaaatttggggttccaaactagcccttaagttgtaatttgtctgcggtgtagaaccttctgaaacctctgagctagtgatgcgtcagattgagatattttgttcaatgtttgctgtttgaatcaggtgaatctttgacaccttgcttagtcatcatcagaccacggcggactgtggacatttttagacttgtgtagtgatgcgtcagagacctcgccaggatggacagagggatacccatgcaaatttgtgcacttatgcatccagctaggggtgtaatcggatcgaatacagagtatccagccatccgattcgtatccaacacatgtcagcgaatatgagtaatttttttaaaaaataaa

SEQ ID NO: 155552 - DNA, 1820 bp, Zea Mays
ctaggcgactttcagtgtgcttctgtgaaaatgagtatagaggaggctgcgaagaagacaggaattgatggtagtggttcaggagggatcacaaagagtgagatgatgagtgaaatgagaagtatgatccaagagctcatggggttagggttgattggtgctaaggccaatacaggtacatctgagttgaagttggaacttgtgcctaatgatgtgaagttagaaggtagtaagaattatctaagctggtccagaagagtgcatgtactcctaggaggcaagggagtggagcattattttgaggagacatgtgttgagccgattgataagctcagcgcagaatggagaatctggcatgcgacaaactctatgatagttgcatggttattggcatccatgtctcccactgttagcaagagggtggaagccatgcgtactgcatcacagatctggaagaccttgagtaatatatactctcgaaaggggaatgtgatggtgatgatggaaatacagagcaaggtagatgcagtaaagcagatggggagactagtggaacaatatgctagtgagctccatcacttatggggagagctggatcattatgctcctctccaaatggtttgcccacaggatgcacaaatggttcataagtgggtagaggataggagggtgacccactttctaaagaatctggattctgagtttgagagcaggagagcggccttttgtcaccaggagagtattcctaccacggatgaggttgtgtctgccatgatagatgaagagagcagacttcgagtgatgagtagtggtaatcatgtgaagccagcatacgttgcaattgaggatagaaaatgctataattgtggggaaaggggacacctgagttacgattgtcccaaccctagaggaaatggtggcacgggaggatctcgtggaggacgaggcggtactcgtggtcgtgggagctatggaagaggtcgcagaggtcgtggtagaggccgtggtggctccaaggccaacatagctaccactgaagagagtctcactgttactctgtctggggaacaagttaagcaatgggagcagtggcagaagggaaagtcttctgagtgcctcacttcacctgatgggcaagccaccaactccttcggtaactttgccaactacgcccacatgggcgaaggtactcaggcacaagcttttgcatcctcatgtaggcatcacatatattgggtcatagattcaggagcatcaaagcatgtgactggcatgtccacccctttcaaaacatacattccttatacacattctgagtcagttcaaattgttgatggtacatctcaacaaatctgtggtataggatctattgagtgtacaccatctcttagcttgtcatcagttctgcatgttccatctttccagtcaatctcctttctgtaagttcaatcattgaccaattcaagtgcacaataatatttgatgataattcttgtgtctttcaggagaagagtactgggagaaagattgggactggagtcaggcataatgggttgtggttcatcagtcatgaggagtcagcattgaaagcaactgttgagggggatgtcaaggagattctactacatcatcgtcggttaggacatatatcttttgagaacttaagtcggttgtatcccatgatgtttaagggagtggacaaaagtagacttgtatgtgatgcatgtgaacttggcaaacatactagatctacctaccctagtgttggtcttcgtagttgtgaaccgtttattctaatacattcagatgtttggggtccc

SEQ ID NO: 155553 - DNA, 1739 bp, Zea Mays
agggtgcgcactccgatcctgccctctaataacagcagcagcagcagccgccatggaagccagcagcaagaagctccaggcgttcatcctcacgctgctgctggtgctctccaccgccgtgactcccatcctctcgctgtcagtgccagacgacgaggtagcctgcgactgcgataaacccaaggcgcccaagccgtcgcacccgcccaagaccaagccctcccacccgtcgccgtcgccgaagcccaagaatcccaagccacccaagggcagcaccgggtacccagcgccggggcaccaaccgcccaagagcccctcctaccccccggtcgtcggccctcccaagggccccgtcacgcgcccgccagtcatgcgtccgccggtcgtcggtcctcccaagggccccgtcacgcgcccgccggtcacgcgtccgccggttgtcggaccaccggtgacctacccgccgatcaccggccctccgacgacgccgcctgttgtcggaccaccggtgacctacccgccgatcaccggccctccaacaacgccgcctgttgtcggcccaccggtgacctacccaccgatcactggcccgcctgcgacgacgcccccggtcaccggtccgcccgtgacctaccctcccggcggaggcgggggaagctcgacgccgtgcccgccgccaccgagcccgacgccgacgccgtcgtcgcctacgtgcccggctgactcgctgaagctgggcgcgtgcgtggacctgctgggcgggctggtgcatatcggcctcggcgaccccgtggtgaacaagtgctgcccggtgctggaggggctggtggagctggaggcggccgtgtgcctctgcaccaccatcaagctcaggctcctcaacatcaacctctacctgccactggcgctccagctcctcctcacctgcggcaagacgccgccgccgggctacacctgcaccgtctgatctggactagctggcagcccccggctcatgcgtccatttatccgtgaacatgggttttggagtgagctagcatccagttcatcggtcgtttgaagagagatcgacatgagaggatgtcgtctgcttcgtcgttccaagctgaagaaggcacgccggaggaggaagagagtaacaacggccgggtcgatcagctaacgatggatcgatcatttttttccccatatttattgtgttgcgtctgctgtagtttctaattttctagatgtgctttcggtttggtctgtagaccctgcagcttgatttggttaagtttgatttgatgcaagggaaatgggtggcggttgattgctaataattcccgttgatatttgtcatgcgtacgtgaacttgataacaaaatgcatgatgtcttctctttgcgtgatttcgagttgattgtcatcaccatggcactcgatcgtgctctttggcagtgttaacgtagtctgttatattatgctgactaatctttcccatcatggaggtataattgtgaccgtcgtggagtacatctaaggtgccgtttggttcacgaaaatgtaatgtaaataataatggtaacgattcacagtcgaataccggcgttaacaaatttgaataagacggtatccattttttttgaaaggaagcggcaaaagacttgcctcttcattgtattagattaagaagaataagataatccacaggaccgaagacacaccgaaaaaagagaaaaatacaaaaacacaaaaaa

SEQ ID NO: 155554 - DNA, 1277 bp, Zea Mays
tacctgaaaaccctagggtgcgcactccgatcctgccctctaataacagcagcagcagcagccgccatggaagccagcagcaagaagctccaggcgttcatcctcacgctgctgctggtgctctccaccgccgtgactcccatcctctcgctgtcagtgccagacgacgaggtagcctgcgactgcgataaacccaaggcgcccaagccgtcgcacccgcccaagaccaagccctcccacccgtcgccgtcgccgaagcccaagaatcccaagccacccaagggcagcaccgggtacccagcgccggggcaccaaccgcccaagagcccctcctaccccccggtcgtcggccctcccaagggccccgtcacgcgcccgccagtcatgcgtccgccggtcgtcggtcctcccaagggccccgtcacgcgcccgccggtcacgcgtccgccggttgtcggaccaccggtgacctacccgccgatcaccggccctccgacgacgccgcctgttgtcggaccaccggtgacctacccgccgatcaccggccctccaacaacgccgcctgttgtcggcccaccggtgacctacccaccgatcactggcccgcctgcgacgacgcccccggtcaccggtccgcccgtgacctaccctcccggcggaggcgggggaagctcgacgccgtgcccgccgccaccgagcccgacgccgacgccgtcgtcgcctacgtgcccggctgactcgctgaagctgggcgcgtgcgtggacctgctgggcgggctggtgcatatcggcctcggcgaccccgtggtgaacaagtgctgcccggtgctggaggggctggtggagctggaggcggccgtgtgcctctgcaccaccatcaagctcaggctcctcaacatcaacctctacctgccactggcgctccagctcctcctcacctgcggcaagacgccgccgccgggctacacctgcaccgtctgatctggactagctggcagcccccggctcatgcgtccatttatccgtgaacatgtacgtagctatacgtgcatgcatctctctgcaagtactagtcttttgcaagtggcacatgcacatgcacatatataatatgcgtacgtacatatacgtgtactagcctgcctggtctgatgactttgtttctacacgtgcaaatatgcaggggttttggagtgagctagcatccagttcatcggtcgtttgaagagagatcgacatgagaggatgtcgtctgcttcgtcgttccaagctgaaga

SEQ ID NO: 155555 - DNA, 522 bp, Zea Mays
ttggttttgtttattttaatatgacacccacatacagtgacgacacagaatcataatacacagaaaagccatcatacacaacattcttatcacaagtcatacacaattccagcacactagttcttccacaacagaggttcaaacatacaaaagttccaccataaaggtttgaagcattcaaacagattgcacgtagttctgacaaagttctaaccacagatatgttctagcaaggtagaaaaaccttaagcaaaggcatcatcctcagacttggtatgcatccctacctcaatctttctgaagtttcaggacaactcgtagcagtgcattggtctcttcaaacttggtatgcatccccttcacttcctcttgggtctggcgcagcaaactttggttttcttcaagtgcggcctgttgagcttgtagttgtgcttgcaactcttcctgcttcctagcagcttcctctctttcagcttggagtttttcctcaaactgagcttgcatgcgtgcttgtgcagctag

SEQ ID NO: 155556 - DNA, 1219 bp, Zea Mays
caggacacggtcgccacacgacgactcccacccgcagccaccgcacggccgtgttggcaccaaaccgcgtggtggtgttaggctcttcgcccagatcaaaatcgaatcgatcccccaacccgatcgcctcgtcgtcaaaaaatccccattcgttccccttctcgcctccacgagccttcacaaattgccctctcagctcttctcctaatctcactctagccctagccaaatcccagacccatcccagccctagcgacaccaaccagctcgccagcgaccatggggaacccggagaagctgatgaatcagatcttcgacctcaagttcacctccaagtcgctgcagcggcaggcgcgcaagtgcgagaaggaggagaaggagcagaagctcaaggtcaagaaggcgatcgagaagggcaacatggacggcgcccgcatctacgccgagaacgccatccgcaagcgcaccgagcacatgaactacctccgcctcgcctctcgcctcgacgccgtcgtggcccgcctcgacacgcaggccaagatgcaggtcatcggcaagtccatgcagtccatcgtcaagtcgctcgactcctcgctcgccaccgggaacctccagaagatgtccgagaccatggacaatttcgagcgccagttcgtcaacatggaggtccaggccgagttcatggagggcgccatggccggctccacctccctctccacgccggagaccgaggtcaacagcctcatgcagcaggtcgcggacgactacgggctcgaggtctccgtcggtctgccgcaggcagccgcccacgccatccctgccgccaaggataaggagaaagtcgacgaggatgacctttctcgccgcctcgccgagcttaaggcccgcggctgagaggttgtttcaggctttatcagatgcgattcaggcttatgctgttgagccgcaatgacccattgtcctgtggactgctactcatgtttggtagattcgtaaatactactgttatatgcttgaaggcgtgtgttggcattgccatgtggggtttgtgtgactcgatggaaactttgctgtcttattgtactttaaaatccaataatttgcgcgattgcggacatctgtgattctgtgtttctgtctgggtcgcccacatctggtatgaacaatgttgaagctgatgcttggcatcagtttgccataccgttgattctgttgcctt

SEQ ID NO: 155557 - DNA, 818 bp, Zea Mays
aagttactatgcgactggctctataccaggaccataatattatcaatcaattcatagcatgttcacagaataagaagaggctgtgcagtgtgtgtaaatttgtgatgtagtgtgcctctgttagagaaaaattcctatttggcactagaaaacttctgctttcgtatttcacagaggtgcccccccccaaatgtttgtgtatttactgttatattgcttacccaggtgtacaaagaatatttctgaaggcacgcattgcattttgcacactcgtagagtttttttttttgtcttgcatataaatagcatcggctcaaattcatacttcctgagcaaattctgttaactctgttctgtttatggcagttgataaatcctctgcaaatgttctccagcttatctgtttggtaaactattggtggccggataacctcttcctcagatttcttgaactcagcttctatatgctgtgaaatacttatgatttatggaacctaacttgggtatgctaacatgggtgtctgctcctttgcagatgcgattcaggcttatgctgttgagccgcaatgacccattgtcctgtggactgctactcatgtttggtagattcgtaaatactactgttatatgcttgaaggcgtgtgttggcattgccatgtggggtttgtgtgactcgatggaaactttgctgtcttattgtactttaaaatccaataatttgcgcgattgcggacatctgtgattctgtgtttctgtctgggtcgcccacatctggtatgaacaatgttgaagctgatgcttggcatcagtttgccata

SEQ ID NO: 155558 - DNA, 1112 bp, Zea Mays
caggacacggtcgccacacgacgactcccacccgcagccaccgcacggccgtgttggcaccaaaccgcgtggtggtgttaggctcttcgcccagatcaaaatcgaatcgatcccccaacccgatcgcctcgtcgtcaaaaaatccccattcgttccccttctcgcctccacgagccttcacaaattgccctctcagctcttctcctaatctcactctagccctagccaaatcccagacccatcccagccctagcgacaccaaccagctcgccagcgaccatggggaacccggagaagctgatgaatcagatcttcgacctcaagttcacctccaagtcgctgcagcggcaggcgcgcaagtgcgagaaggaggagaaggagcagaagctcaaggtcaagaaggcgatcgagaagggcaacatggacggcgcccgcatctacgccgagaacgccatccgcaagcgcaccgagcacatgaactacctccgcctcgcctctcgcctcgacgccgtcgtggcccgcctcgacacgcaggccaagatgcaggtcatcggcaagtccatgcagtccatcgtcaagtcgctcgactcctcgctcgccaccgggaacctccagaagatgtccgagaccatggacaatttcgagcgccagttcgtcaacatggaggtccaggccgagttcatggagggcgccatggccggctccacctccctctccacgccggagaccgaggtcaacagcctcatgcagcaggtcgcggacgactacgggctcgaggtctccgtcggtctgccgcaggcagccgcccacgccatccctgccgccaaggataaggagaaagtcgacgaggatgacctttctcgccgcctcgccgagcttaaggcccgcggctgagaggttgtttcaggctttatcaggtgatgatagattcatcctagccccccgtgaccttagcctatgttttgctgcggtagcctttgatcattgttgaagaactgctatcgtgaatcgtgagtgtgatgctttataaaattgtgcccaattgcatgtgaaggtggtcaggtatgtatatctactacctgttgaaccaagctttttagcgatttgagttg

SEQ ID NO: 155559 - DNA, 1616 bp, Zea Mays
agaagtcaaggaaaactccgaggtgcaactgaaaccatggaccaagaaatccaatcatcctaccatcacctcttcttggtggcgatcctgctgctgccgctcctcgtcgtcaagctcaggcggcgcaaccacggcaataaaccgcctcccggcccatggcagctcccggtgattggcagcctgcaccacctcgtgggcgcgctcccgcaccgcgccatgcgtgacctggcgaagcggcacggcccgctcatgctgctccgcctgggagagctccacgtcgtcgtggcgtcgtcgcccgacgcggcccgggaggtcatgaagacacacgacgccgcgttcgcaacgcggccccggaccgccaccatccgggagctcacccgggaaggcctcggcatcgcattcgcgccgcacggcgagcactggcgccagctccgcaaactctgcgtcaccgagctgctcagcgcgcggcgcgtgatgtccctccgccgtgggcgcgaggccgaggccgccaacctcgtcgcgtccgtcgcgtcgtcatcgaagcccgtgaacatgagcgccctcctcgccacgtacgtcaccgacgcggtcgtccgtgccgtggtgggcggccagatcagggaccgcgacacgttcctggagaagctggacgagggcgtcagggtggccgcggggttcagcctcgccgacgtgttcccatcgtccaggatcgcgcgagcgttcagcggggcggcgcggcgcgcggaagcgcaccaccgcgcgatgacactgctcatggacggcgtcatcgcggagcaccaggagaggagggcggccggtgctggaaacgacgaggaagacctgctagacgttctactgagaatccagaaggacggcggcctgcaggtccccctcgacatgggcaccatccgcgccgtgatcatcgatcttttcagcgcggggagcgagacgacggcgacgacgctgcagtgggccatggcggagctgatgcggcatccggcggcgctgcgcaaggcgcaggccgaagtgcgtcacgtgctcgcccgtcaaaaccgcgtgccggaggacgccctgccaaagatgcattatctgcagctggtcattaaggagactctgcgtctgcacgctgcagtgccgctgcttctcccgcgtgagtgccaggaggagacgcgcggcgtcctagggtacgacgtgcccaagggtgccatggtgctggtcaacgcttgggccattggccgggactccgcgagctggggccccgacgccgaggagttccggccggagaggttcgaggacggcagcgtcagggcggaggtggacttcaggggcacgaacttcgagttcgtgccgttcggcgccggacggaggatctgccccggcatagcgcttggcctcgctgtcatggagctcggtctcgctagcctcctcttccacttcgactgggcgctccccggtggcgctgtgccggaggagctggacatgaccgaagggctcggaatcacggcgaggaggaagaacgacctgtggctgcaaaccaccataagcattccagtttctctaatgtgaattgtgaactgctgtgtcacatataaggacttgctcggtttgatgttaat

SEQ ID NO: 155560 - DNA, 106 bp, Zea Mays
aatttatcttaagtgtttggaaataaatttacttatgaagatcaaccacagtaatattgagatggtgttgaagtgtataagtggattgtctaccttctctcaatag

SEQ ID NO: 155561 - DNA, 288 bp, Zea Mays
atggcgcccaagcgaaccaccttcagtgttgtcctcctgatcgccatcgccgtggccgtggcgtccatgctgtccgcgcatgccactcgcaccctgcggcaggaggacgtgaacctaccggtgcgtgtggcctcttcttcttcgccgacgacgtgcgtcaccttcttcgacgacgccccggcagaagagatggaggcggacggtcctagtcctgcggcgcccgggcctgacgatgcgtggaactacgatgatgataaaacacctataacgggaccattattattatag

SEQ ID NO: 155562 - DNA, 2324 bp, Zea Mays
gcagcaaagaagaaaatccgcccgcgtatataaccgctctaccgctcaaggctcgactcccgtgcgcttgcggtgcggacgcttcccctccacctccgcacacatctccaagtccaactaaccatgccagtctaccgcagtactgccgacttctagcagttgttttataggttagtttcgttgccttgtggctttgttagtgtatcaaaaccaattcgcgacatcactcaggaaggggaaagcagggtccggaaaaagaagaagagacgggaatggcaagctccgactcaaatcccaccgatgcattcgagtacatgctgcttgagaaggatcctgatctctaccggacggttttctctggtccgagccagacaagcccatggattaacccgagtgtgttaaagctgaagcaccggatagggagaggtccatttggggatgtatggatagcaactcaccaccaaaggacagaggatttcgatcagtaccatgaggttgcggtgaagatgctgcatccaattaaagaggaccagctgcagatcttctcagcgaggttccatgagatcttcagcaaatgtcagggtctgggcaacgtttgtttcttgcatggcatctctacacagaatgggaggatttgtatagctatgaagttctatgaaggatccatcgggaacaagatggctcggcttaaaggtggaaagctccctttgtcagaagttctaagcgtccttgagatgttgactggcattcagccatggcgtggaaagtcagcagatgagatatatcagttggttgtcttgaagaaagaaaagccaatattcccgtgcagtctacctccagacattgaaaatgtgctttctggatgttttgaatatgactttagaaaccgtcccttgatgaaagacattttgcatgcatttgagagtgctaaaggtgcagatcatgacaacattggttggggcaattctgaaaatgctatggtagacaggataaccatgccaaatcgcatcaattggttacactttaaggacaagcttcaagtgggcgacaaggtccgttcaagaaagcttaaaaactcttgcggtcctgaaactatggaaatccctgatggaaccatagttggcattgaggacgatggcgagcgtgacgcttacgttcttgtacgagtccacgcgctacacaaccctttaaaggttcgcttttcaacggtggagagggtaacatatggttttgctgctggagactgggtgcggctgagggaggaggacaagaagcgctctcaggttggcattcttcacagcatcgaccgtgacggtgcagtggcagttggtctgataggagtggataccccttggaagggcaattattcagacctccagatggctgaagcctactgtgtcggacagtttgtgcgcctgaaggccagcatttcaagcccaaggttcgaatggcagcgaaagcggggtggattagcttctactggccgaatttcacagatacatccgaacgggttgctcgtcgtgaaatttcctggcaagtttaaccttggcgaagtgtgcagttgcctggcagacccctccgaggtggaggtggtgagctttgacaaatgcgaggggattgtgaagaagtacgagcatctcgaggacttccattgggcagtgaggcccctgttcgttgctattggtttcctcacggcgatcaagctgggtgtttttgttggcaagagcatttcgaggccgaggagccggaaggttgccagcatctctgatcagagtggagattaccagcagcagcaccagcagcaggtagtccaacaaagtgctaatgcggcgtggcttcctccaccagttgcaaacatgttcttcggagatagtgttgggacttctggataagaaatcataagtggcccggagttttgcttaaaataacaatttggaattgtggttcctagttgtgtgcatatttaggcctgaaatggtttatcccttatctaagcatctgtacatatctgccttatgcaccacaagttctgtaaataaactctagaattatcgtcttaaacatacaagtatgcgaagctatttcttgcttggtggactgtgtttatgccttcccaggcatgtcttatctcctgagatctcatgtgtgtctgtgtatgatgattccagtcgtgtactagttaaaatcctaaagcttctctctgcattttgtttttactcaactctcagaatagttgactgttgaaacccaaacaataagtgcagcttggctatatctgaagtctcctgtaatctttggttgtgtatcttaaaaaatataagaaa

SEQ ID NO: 155563 - DNA, 2373 bp, Zea Mays
gcagcaaagaagaaaatccgcccgcgtatataaccgctctaccgctcaaggctcgactcccgtgcgcttgcggtgcggacgcttcccctccacctccgcacacatctccaagtccaactaaccatgccagtctaccgcagtactgccgacttctagcagttgttttataggttagtttcgttgccttgtggctttgttagtgtatcaaaaccaattcgcgacatcactcaggaaggggaaagcagggtccggaaaaagaagaagagacgggaatggcaagctccgactcaaatcccaccgatgcattcgagtacatgctgcttgagaaggatcctgatctctaccggacggttttctctggtccgagccagacaagcccatggattaacccgagtgtgttaaagctgaagcaccggatagggagaggtccatttggggatgtatggatagcaactcaccaccaaaggacagaggatttcgatcagtaccatgaggttgcggtgaagatgctgcatccaattaaagaggaccagctgcagatcttctcagcgaggttccatgagatcttcagcaaatgtcagggtctgggcaacgtttgtttcttgcatggcatctctacacagaatgggaggatttgtatagctatgaagttctatgaaggatccatcgggaacaagatggctcggcttaaaggtggaaagctccctttgtcagaagttctaagatatggggctgatttggcacgcggtgtactaggcctacacaccagggggatattgatcctaaatatgaaaccttgcaattttctcatagacgaaaatgattgtgctgtgctgggggattttgggattccatccctgctgtttggcctttcattacctaatccggaccttatccagaggcttggaactccaaattacatggctcctgaacaatggcaaccaaacatcagaggtccgattagttatgaaactgattcgtggggttttgcgtgcagcgtccttgagatgttgactggcattcagccatggcgtggaaagtcagcagatgagatatatcagttggttgtcttgaagaaagaaaagccaatattcccgtgcagtctacctccagacattgaaaatgtgctttctggatgttttgaatatgactttagaaaccgtcccttgatgaaagacattttgcatgcatttgagagtgctaaaggtgcagatcatgacaacattggttggggcaattctgaaaatgctatggtagacaggataaccatgccaaatcgcatcaattggttacactttaaggacaagcttcaagtgggcgacaaggtccgttcaagaaagcttaaaaactcttgcggtcctgaaactatggaaatccctgatggaaccatagttggcattgaggacgatggcgagcgtgacgcttacgttcttgtacgagtccacgcgctacacaaccctttaaaggttcgcttttcaacggtggagagggtaacatatggttttgctgctggagactgggtgcggctgagggaggaggacaagaagcgctctcaggttggcattcttcacagcatcgaccgtgacggtgcagtggcagttggtctgataggagtggataccccttggaagggcaattattcagacctccagatggctgaagcctactgtgtcggacagtttgtgcgcctgaaggccagcatttcaagcccaaggttcgaatggcagcgaaagcggggtggattagcttctactggccgaatttcacagatacatccgaacgggttgctcgtcgtgaaatttcctggcaagtttaaccttggcgaagtgtgcagttgcctggcagacccctccgaggtggaggtggtgagctttgacaaatgcgaggggattgtgaagaagtacgagcatctcgaggacttccattgggcagtgaggcccctgttcgttgctattggtttcctcacggcgatcaagctgggtgtttttgttggcaagagcatttcgaggccgaggagccggaaggttgccagcatctctgatcagagtggagattaccagcagcagcaccagcagcaggtagtccaacaaagtgctaatgcggcgtggcttcctccaccagttgcaaacatgttcttcggagatagtgttgggacttctggataagaaatcataagtggcccggagttttgcttaaaataacaatttggaattgtggttcctagttgtgtgcatatttaggcctgaaatggtttatcccttatctaagcatctgtacatatctgccttatgcaccacaagttctgtaaataaactctagaattatcgtcttaaacatacaagtatgcgaagctatttcttgcttggtggactg

SEQ ID NO: 155564 - DNA, 189 bp, Zea Mays
gatcctcctgcattcgtgtctgacgatgaagactacaaggatgtttttgtgtcattggcttgcttgctcactcgcgacgagaacgagtggtatagggaaccaatctcggccaatgccacgtctggcaaagaaggtttgcaagcctcagttgctgactgattaagtcaggttctgtatcagttcctatga

SEQ ID NO: 155565 - DNA, 276 bp, Zea Mays
atgcttatttggagcatatacacaatcccaactagccaatggatagatgagctcgctaagggtgacactgtaaagaattcaatcctctgcgcaattgttgtgcccagcatctttagagtgcaaacatcaagccaccaaccacacattagaggaaatacaccaagctcaatgaccagaaggaatgcaactttgaccatagtcataatatgcttcattccagcaaagaactgcctgcacagagaagggattgcctctaatatagtagctataccatag

SEQ ID NO: 155566 - DNA, 97 bp, Zea Mays
cactcttatgttgtatccctgtactcttggcgtcgcgttgcagattccaaaatctcaggtcaaagtggcattccgtagagaaagcatggctggcgct

SEQ ID NO: 155567 - DNA, 1227 bp, Zea Mays
atggcggaaccgggcgacggcgcgcacctgcgcctcgaagtccttgagcttttcggcgccgccgctctcgccgatgcgccggacggccagcgcggtgccgtcgccgagcacggccttgtacacgatgctggaacccgtggcgccgaggatgtaggccgacgccttgagcagcgtctccatctcgagctcgccgtcgccgtcgaccgtcaccagcgtcgcaggcgcggggggcgcctgctgctgctgctggggcaggttgtgcttcttgctgccgtgctcctgcggggtgctccggccgatgaagcttcccctcttcttgaggccctcctcgtcggaggactcgccgtccgacgacgcggagtactcggagctgtccgagctgtcgttcctacggccaatgcagcaccccgtcgacgtggacgccttctcttctttgcctccggcgatgtcgagcgtcttgactacgccgccgtcgaaacctcgcgcgctcttctgctgcaggtgcagcggcggcgtcgggtcctgctcccgacgctgccgcctcttcttcctgacgtggtacgcgtacatgaacagcatgaagaggaggccgacgccggcgatgtccccgacgacgatggccacaatggacgcgggacgaagcttatcctgctcgctcggcggctgcccctgggcttgcggcggggcgcgagcggggttcttggggatggccgcgaacgccggcggcgagtcggtggcgttgggaggcttcgacagcgacgacgggatcgagcacgcctgcttcagcggcggcccgcacaggttcgggttgccctcgtacgccgccgccggctgcgcggcaaacgggccggcctgtgggatcgcgccggtgaagttgttccgcgacaggtccaccgtcgcgttcgcggggacgacggcggccagctcggtcggcacagcgccggcgagcttgttggacgaaacgttgaggaggcggagtgcggtcccaccgaagtccgacgggagcgagccgttgaagtcgttgtcgctcaggtcaacaagctccaacgtcccgaggcctccgacggggagctcaccggcgaggtggttgctggcgagccccagcgcaaggaggctcggcagcctgcacagcgcggcggggaggcggcccgcgagcgcgttgcccgagaggttgagctgctgcaggccgcgcgcataggccgccgccgcgtccgggagctcgcctga

SEQ ID NO: 155568 - DNA, 829 bp, Zea Mays
tgctctctccgtccgaagtgctctctgaaattccccccaaatatcccagccactgccgtcgtgcagtcaaagtgtcaaaccatgccggcagtagcgttcgcgtcggctcctgccatattcgcctccgcctccgcgcgtccctgccgcagcgcggctccgggcatcctttcctccgactccgggcggccccgccgcggcgcgcgtggcgccgtccagtgtgaggtcgcctcctcctcggcaccgtcggcggctggaccccaggccgcccggtgggcccagaggaccgtggtcatcccgccacagcgccgcgggtgccacctcatcaccaacaagggtccatctgctccatggaggcacaccatagaaggacctgatgacatgccagcacatatcaaatcatcaatgtttggttgttccctgatgattcctatcaccaatggacgtctcaacatgggaacttggcagggtatttggctctgtgaacatcgagattatgctactcctcgacagattgtgatcacgctgaatgggatctagcctaaggtgatctatgttaagagctggaaatgcaatgcagcgacttcgacatgtttaaatcagatgcactgaaactgaaactgtctttggcccagttgtgataggcgttccagtggagaatgttatttgtaatatgatgctagcatgaggggaacaaaatctcttaacgagcttcttctcatgttgagcttgtttagttatctttggtggtttaaagaaatggtttataagttgttagtgtcgtttggttcacgaaatgtaacgtaaatggtaatgataatgattcacactc

SEQ ID NO: 155569 - DNA, 2056 bp, Zea Mays
tgctctctccgtccgaagtgctctctgaaattccccccaaatatcccagccactgccgtcgtgcagtcaaagtgtcaaaccatgccggcagtagcgttcgcgtcggctcctgccatattcgcctccgcctccgcgcgtccctgccgcagcgcggctccgggcatcctttcctccgactccgggcggccccgccgcggcgcgcgtggcgccgtccagtgtgaggtcgcctcctcctcggcaccgtcggcggctggaccccaggccgcccggtgggcccagaggaccgtggtcatcccgccacagcgccgcgggtgccacctcatcaccaacaagatcgtaaatgagatagggaatgacctggccgacttcaagtgtggcatggcgcatctgttctgtatgtatttattcataatgcatgcgtttcctgcactttgtggtgcatgattgcttttgtatcaatttctctcagttatggaagttacatcattatttggtgtcgatggtattactgttggccagaatcgttttaacacggagacgtttgcccataagataagcagcctacaagatggtcctagtatctggaattggtcgcattcccggttctttttatgccaaagctagtatggaaaattggaaactaaacccataagaagattttaagttgtgatcattgaatgatgaatggatcgtttaatatgcttgggagagaattcaagtggaactcattacaacaaccattgaaattctaagagctggttactttttttttttgtttagtttcatggagatgcaagttctgagtggtttgtagcagtggtctcttacatctatactatcagtgctggcaaattctgtgtctacttgtttttgttgtagcgatgacagtattttttattctagagtccatcttttggcatttatgcaaaaaaggtagaaaggtaaagaatttgcagttacttggctttgttgcgcattcaggtgtaggaagaaaaatatgaagcaatattcatgtacactggcctttgctgctaagaagttttgagtataatgaaaatatattcaattcatgtattttcatggttattctaattagaagagaaaagatctgaaaactcaaggcggcttatgtacccatttttttatgaagggaaattttattaaaaatttcaagcacattacatcgaggggatacaagcccttgaaatttcttctagcctctgtttaagaagcacacagtttaaaacaaataaagttgataaccacacactctaattgtaatcaatccattaaacctcatattatattagattggatttttatgtagacttttgtatatgaagtaagtatatttgagacgcagttctcaatatttttagcactagtaaaatggccatgctctacagtgcagcacacaagtgcgtcgttgactattaatgagaactacgactctgatgtccaggttgacactgaaacatttcttagtcgcattgttccagaggtgaatgccgtgaccgtgatatttcttgtctaattctgtccatggaggaaaaaaaattaaccggtatcttaattcatgtttttgtttttatcacgaccagggtccatctgctccatggaggcacaccatagaaggacctgatgacatgccagcacatatcaaatcatcaatgtttggttgttccctgatgattcctatcaccaatggacgtctcaacatgggaacttggcagggtatttggctctgtgaacatcgagattatgctactcctcgacagattgtgatcacgctgaatgggatctagcctaaggtgatctatgttaagagctggaaatgcaatgcagcgacttcgacatgtttaaatcagatgcactgaaactgaaactgtctttggcccagttgtgataggcgttccagtggagaatgttatttgtaatatgatgctagcatgaggggaacaaaatctcttaacgagcttcttctcatgttgagcttgtttagttatctttggtggtttaaagaaatggtttataagttgttagtgtcgtttggttc

SEQ ID NO: 155570 - DNA, 1089 bp, Zea Mays
atggagatggcatgaagcttgcttccattgggtttttagcgaacaatattttatatcagaattaatatatttaggttggagtcctttatttgtatatttgttccaacacgaaatgttctatgggacacgtagtgtcaacatatccacaccttctagttccttatatttttggatagtgttgattcttcatctgaaaaagcatgctgtctctgctttaaaacaatggtcgtattatcttttaaatttctgggaccttagatgaacctttacggttctgaatggatatcactaatcttttcatggacttgaaacaatctctgttacgagcagtgtcgtaaaaagcacagctatgtatgcctcgtctttgaggcaacaggagagtgcccacaaggatcaagatgcaagcttcatcacccgaagaagaaaagcaaatccaagagaagcaaagtagacaccgtccaaaacaacagttggggtcggtattttgagacaaacgttggccatggcagtggagcaagaatagtttatttggaggaagatgagagacagaaaccagagcaagtctctggtgaggagtttgctgacttcattgaacttggtgccggtattgaagtccctgaagatgcagacacttcggatgacatacagctgatggaactggacttagggaatctcgaggtgcaggctgacaataatgacgcgataatcaagccacttcggatcatgagaacggcaagagtttgatgagttctttggttggatacagctgcagtgttcctgggtcagggtggtattttacgctatgtttgacgtggcatataggcgctgactggagtttctatttctcgaagactggttctgacgggggcaatcggtttttgcttggttgaaggtttgattttgttcatcttgtacatcttttattaggaaatatattaggaccatatggcagtggtagaggccatgagggttactggctgttaacccgtgttttttcaacattacccagagttgaatgtaacaaacagtgctttacaatatgaaatgaatgaaggtttgcatacaggaaatgaagctttcattttgtgt

SEQ ID NO: 155571 - DNA, 3955 bp, Zea Mays
agtattggtgagaatatccagaaggaaagccaaatgcccatggatccaagtgcttttcaaataatagaatgtgccgaagctcctaatacaggagttgttagtagtaagtttgctctgaatgtagcatgcgatagtcccatggatttaaatttgacaaatgttgggacttcagataacatcctgtacacttcagagtttgctgtaccaggtcgaaccgaggatagaagcatgcaagttgattttcatgatgcgaaagctgctttacataagccaaatcttcccctggaagtagtggatacagatacccatgatctgcagtcatccagaaatactgagagcacaattctgccatcattcggtgatgatcctatgaaggattcctctggtgctctgaataatggtctagggaggagcacttcatctcaagtaaccgaactgacacatcttcatagatcccacccgcctgctgactacaatccattctccttgcattcccatgattcaccatctgtatctggtaacagtgagcattctgttccgacagctttgacacttggtaataatatctatttcagtagtgcagagagtgagggacagcctgaggaaaaccataacctattggatgtaaacttaggatttgatgtgacaacgacagaatttggtaatgttgtcaaaagaaaaggtgaatctggcaatgacttaatgaatgcaggcagtcagaattggttgactttaccacttactgtcagctgcttggataatgcttctgctgttagtaatgggaggataggtttagagcagattgtggatgaaggtgtccctgttatctgtcaggatcatgatattatgctggatattgaccagcggggcagtattgatgttttgtctggccaggatcacaacctcaaactatgtggtatcagtattcctcaagcagtccttttggcaacagaagagagaaataaggatgttgatgatgagatcgttcgcccaggttcttctattaattctgtaaatgttttagataaatatagttattgcacagtgggtaaacctatagataatcttagtagacccattctcttatcttcacaatctgctgatgtaccaggtcgagacttagcttctcagatatctgttgattctgatcacacttaccatggaagtactgaggatcctgtgggcatgtcaagtacaacacctgattcggtatcctcctggattgaagccattgtaccagaagctaacaaggaacaccaatcatgcaaatcttctctacttcctatctgttcttcagaaaaggtatcagcaccaaaggaggatagcaagaaggcgttgtcagattcagtagtcaactctgtagtaaaatctcctcctcgaattaatattgcaagctccacagtattgaaggtacctactaaacaggtagctttgcctggttcattgctagagccccctcgcttaaaccagaatgcaaggaacaggacatggcgtcgtgacaatgcatcatcttctaattcgtcattgcatgtttcacagacttcaggattaccccctaaactgccattaaaaaagaacagcaaaagtcaaaactcttatatccgcaagggtaatgccctaattagaaatccagccaatggaaatcatcttcattcttcttctagtctagattctcaaaataagttgagtaagcctgttatgaggagaagcatgaactttgtcaggaatgtcgattcaaaagacgcagcacattctcatatttcagttgaaagacccaagaccccacctttgccacttcataccaaatccatcagttgtgctgtgaatgttttggagccattgtctcaaaatttgcagcaacaggtccttgaaactgaaaaggaagattccagtgggcaggttaactcaggtgctgacaatctaagcattattagtttgcacaagtctgaagcccttgatgctggtaaagcaatttatgttaggccaaagttaaatcaactagttgcacaggggcggcatcttggtgagtcgagtaacatttccttggataaagtgacgttgctgcagccttccgcaacatctgatctctatttcaagaaaaggaaaaatcagattattttgggtccctctacttctgatgccccgagttcaaaagatacatttcaggctgaaaatataaagtcaggtgagagtaaagttctaatgtcttcatcttccaacaacaatatcactgtggcaaaggacaggctgcacaaagctcttcagacaacaaatactgtcagaagtttctctcatgtatggacacttaatggacaaaatcctcgaaagaaatcttatgtgggagctagtcatatgaaggtcttacctcgtatacttccatggaaaagaaaaatattctgccagaactttagaggcagttattcttcgttgttgaatacaagctctataggaataatgagaaaattattgcaaacaaggaagagaagtactatttacactgtctctactgatggattctctcttcggaaatctggagtgttaagtataggcgggtcaagtttgaaatggtcaaggtccctcgagaaacattctcgaaaggttaatgaggaagctacacaggcagttgctgaagttgaaagaaagaaaagagaaaagagaaaacggcagtctctccgtagcaagggaaggaatgatcggtactctgcatcagttgctgccaatcaattaacaaacagaagcagagcatcttcagattcaagggtgtcatcaacttgcaatgaatatgtgcgtgttaacaaaggtaaccaactggtcagaaatccgaagaaagtaatccgcatgctagcaagtgagaaagttcgatggagtttgcacactgttagaacacgattggcaaagaagaggcaatattgtcaattcttcacccgcttcggcgagtgtaaaaaatctggtggcaagtgtccctacattcatgaccgagctaaagtggttatttgtactaaatttcttaaaggcttgtgttctagtactagctgcaaactaactcacaaggtcctgccagaaagaatgccagattgttcttactttctgcaagggctatgtaccaacacagcctgtccctataggcatgtgaaagtgaactcgaatgctcctgtctgtgaagattttttaaagggatattgtgctgatggtgatgagtgtcgtaaaaagcacagctatgtatgcctcgtctttgaggcaacaggagagtgcccacaaggatcaagatgcaagcttcatcacccgaagaagaaaagcaaatccaagagaagcaaagtagacaccgtccaaaacaacagttggggtcggtattttgagacaaacgttggccatggcagtggagcaagaatagtttatttggaggaagatgagagacagaaaccagagcaagtctctggtgaggagtttgctgacttcattgaacttggtgccggtattgaagtccctgaagatgcagacacttcggatgacatacagctgatggaactggacttagggaatctcgaggtgcaggctgacaataatgacgcgataatcaagccacttcggatcatgagaacggcaagagtttgatgagttctttggttggatacagctgcagtgttcctgggtcagggtggtattttacgctatgtttgacgtggcatataggcgctgactggagtttctatttctcgaagactggttctgacgggggcaatcggtttttgcttggttgaaggtttgattttgttcatcttgtacatcttttattaggaaatatattaggaccatatggcagtggtagaggccatgagggttactggctgttaacccgtgttttttcaacattacccagagttgaatgtaacaaacagtgctttacaatatgaaatgaatgaaggtttgcatacaggaaatgaagctttcattttgt

SEQ ID NO: 155572 - DNA, 1517 bp, Zea Mays
cgtgggaggaggctgaggaggagcgccgctacactgcccagcagcaccaggtgtcgctgtcgccacccggtacacggaagaggtaccgcagcgccatgcatgactcagttgacctggagagcacatccagctctggcccaccacccctccgcaagaggcaacagccgcaccctagctattctccccctccagatgatagttttgtagatagggcaactagttattcttgttacggccatgggggctttgtgacacacagcgacagtaaaggaaacagtaagatgccgatgtccatgtcgactatgctgcctggctcgcctaggcgagccccacagaaggtggttcctatgagattgtctgtgtggcatcggattgaggagaatccatcagtgcatacgtcgccttctccaagcaaggtgccaaaggaggtgcacatttcgccgagcaagaccaaaaactctgggtctgcttcaaaggaattggcaagcgtaatttcttcggattgcaaggcaaagagttctgattgtaagggtagtgatgatagtgcaggaatgaagaagaacgcagcaaagaaaactgagaaggtgctgtcgtcggttcttgtgaagccttcaccagaagacaaggaaagagaaagagctgttaataaggttagtaagaagcctaacaaggttggcaataatataccaggtttcacgagtgcaggtgtgagattggcagcctttcctgggcctggtgtgaaaaaagtgaaaaagattgtcatcaagaagattgttaggaagattggtgccaaagataaacaaactagtagttcaaccgtcccagaaaaggacatcattgatgctaatgtaaatgcctctgaaaaagaagaagctaatgcaaatgcttctgagaaagaagaaggtgagatcacaacatcatcttttgagaaggatgctatttctgcacacaatttggtcagtactagtgatacagctggagttgttaacagtgtggaggtccagaaggaacaaaatagtgatttggtaaatctgaggaagagcaatgctgcttcaaccattgcatctacggatactcttggtacagcaagtgccggccggagaaagcatcctggaaaagattataagagctttgtgagttccattgattgcaatgcatcttcagccattgaatctactaaaacatttaatacaagtggtgttgaacatcctggaaaagaagatgatagggttgtcatcaattcaagttttaaaaatgctacccttcattgtgagaacaataattctcaacatgaagatggtgaaattctggctgtttcaggtcttgtgaatgttagaagcaatttcccaaggattcttgatgcagtggaaccacatgattgtgaagtggagaacatggaaggcaacggcgtttctgaggtcctgagtggaaatggtgctgtttacgagaatggagctaaggattgtgcaacagaagtttgtggaaatgtcactgaattgaaatttagaatggtctaa

SEQ ID NO: 155573 - DNA, 81 bp, Zea Mays
gtctatgattaccttcagtgtgtctgctaaagctggatcaacttgcttatctttagatatgtctgacgattgcagctaagt

SEQ ID NO: 155574 - DNA, 912 bp, Zea Mays
gggtgcaaaccaggcgcatatatacatagtcgtcgattgtctgcactacctagctacctggcaacataaacacgcacgtgtgtcagtgtgtgtgctagtgctagctaggctcctgctagcagtgtcgtcagagtgcagctagcgcagagagagacgggtacgtagcgtagcgttcctcgacgacgactggtcggtcgagactgcgcgcgcgccacggccagcagaatggcgaccaagctcatcatcatcggcagcgcgcgggcgccggcggctggagtcgtcgtcggccttctgctcttgacgacgtgcctgttgctcgcggcgaccgtctcgagtgccagcaggccgctgaaggtatcgtcagagggcgatgatggtggtgcgcagcagcatacggtggaggagtcgccgccggtgggttacatccagacggtggtggtggtcagggccgcggagcaggacggcggtgctgcagcaggccacaggttgatgagcgtcgacatgctcggcgggatcaagaactccggcccgagccccggcgacggccactaggcgcgccatcccgtacacgccggccggccggcccggagtaagtgacagggccggcgatccctgtcaccctgtcaccctgtgtgctggtttcagatttcagaacacacgggagggagctagtaggctttagattaatgtcgatcgtcggcagttcggcacgacgggctcttctttttgttctttactaaggtttcggtagtgctgtcttatgcatgcatggcaaagtaatacagtagctggtagaattattgcaatgtaatatgaaaagtaaatatatacgttgtattgtatgaaactgaacccatgtacataagcttaatcatttcttactcatatgctcaatgcaactcaactatagta

SEQ ID NO: 155575 - DNA, 855 bp, Zea Mays
ccaacgccgctcctgccgtcaccttcttcgatcgatcgccttcgtcgtccccccacatccttcttgattgttatttctccgactccccggccggcaggtgggacatgagcaaccaaccaaccatggcggcggcccccgtgcgcgcttgggtgctggtgctggcgctggcgctggcgtgcgggctgctccagctgcggccgtccgacgccgcggcgccagcccagccggttgcggtggcggcaacgatggtgtcgtcgggcgccgcgaagcccaagtgcgtgcccggcgccaagaacgacaaggcgtgccgcgtcggtgccgtgcacgacccggagaaccaggaggaggagggctccagcgtcaccctcaaggcgcccgccgccgcgcccgacgacagcgacggcagcgactacaacgaccccgacgagcccaacgacaaccagctcatcgtcgtcggccactgaagctgccgcgcgccgacccatggatcatgcatggagattcgactgggtggatggagtggaccggccggttaacggatctctcggtgctaattcgtgatcttgaccggtggaagcagatggggcttgcatgtttgtttcgttcttgcattgattgttcgttgttaactagtgtatgatgaatcggtcgttaacgcttattaatcaccaagtgtgtgctgtgactgtgaacttgccagggagcgatcctatctcaagattaggtttgatcaaatttaaaacaacgaacatcaacggttgttacattttattagcttgcaaacgtgcaagtttcaatatcttataaaacctcccaaatttgaatggtttttaaaatgtgtttcgaaaaaaaaaa

SEQ ID NO: 155576 - DNA, 2145 bp, Zea Mays
tttttcctcagcactttgtttttccgctggagatatctctctctgttctcatctgccgcgtagctgggggcgatcaccgatcagatgggaagcagatgagaagttgagaactaggcgctggaagacgccgaaaaggtgcggccttttctgaactgcatcttcacgagacatccttgagcacctttactctctcctccggcatatccccacgctctggactctggagtcaactacaccagcgcttgcggcttgctcctcaagggtgcgggagaggactcgaggaggaagaaggacaccgtctcctcctcgtgcctttatccgctttcgtgccgtctgcatcctccaagaagctagctagcagcgcgggcagcagctgggtacgcatgttttgtggatagggtagctaccccgcagtacacagggttgttatctatctgggagttgcttgcatgggcgtgggagtttgggatcttggttagcttatgcgtggtgaagatactttgctttaatttggggtgtgaagacctgtaattaagcatcgtgagtgtggtggtgacggcggcggcgcagcgagcaatgccactggcggtggcgcggccgtcgtctggcgtgtcgcgacgccatcggtcgtgctggtagtgcagcggtaccgtcgccggcatgccgcgcgcgacgtcgcgcaacgagtcttgatcctggcgccccacatgctgtcttgcttccggctgccgcggccgatcggcggcggggacgtggaccagcaggccgcggcggtgtccccacgtcggggcccgtccctgccgttcgcggcgtccccctcgacgtcggggcgcgggaggagcccgtggccgccgccagaggcggacgacatggagaagaagcggtgggacagcatggagtcgtggtccatgctgctggacacggtgctgtgcgaagggtcgtcccggccggacagcagcgggcggcgggaggaatggatggccgacctgtcgcagctcttcatcggcaacaagttcgcggcgggcgccaacagccgcatctaccgcggcatctacaagcagcgcgccgtggccgtgaagatggtgcgcatcccggagcgcgacgaggcccagcgcgccgtgctggaggagcagttcaactccgaggtggccttcctctcccgcctctaccaccccaacatcgtgcagttcatcgcggcgtgcaagaagccgccggtgtactgcatcatcacggagtacatgtcccaggggacgctgcggatgtacctgaacaagaaggaccctcactcgctgtcgccggagacgatcctgaagctggcgctggacatctcgcggggcatggagtacctgcacgcgcagggcgtgatccaccgggacctcaagtcccagaacctgctgctcaacgacgagatgcgcgtcaaggtggccgacttcggcacctcctgcctggagaccaagtgccaggccaccaagggcaacaagggcacctaccgctggatggcgccggagatgaccaaggagaagccctacacccgcaaggtggacgtgtacagcttcggcatcgtgctctgggagctcaccacctgcctgctcccgttccaggggatgacgcccgtgcaggccgcgtacgccgcatcggagaagaacctgcgcccgccgctgtcgagctcgtgcccgccggtgctcaacagcctgatcaagaagtgctggtcggcgaacccggcgcggcggccggaattcagctacattgtgtcggtgctggagaagtacgaccactgcgtgaaggaggggatgccgacgatgatggcgcaccaggagctcaggctctggcgctccttcgccaagatcttcaggatgggctgcatcaccaacaacttgtccagaacggtgaatgcgtgatccatctccggcgccatccgtaactgaactgttgcattgcagctgcttgtttctctctgctctgcttgtttaatcaatcactccaccaagagcctaggaactactactagcagtatatactacatccatcgatctctctgtcacaaacaaatggcataaaagacgtccggctccggccggaaccaattgtaactcgcgtcaaatgtgtaaattttatctcccttatgagcatttaagcccaaaagaa

SEQ ID NO: 155577 - DNA, 1065 bp, Zea Mays
ctaagggaagttgctggtgcaggtgagactgttcatatccttgcatactatagtatgtgtggtccgtcaaggtgtgatgagttggacagcatgctattgaacattagagatgggcgatacttacgtgcaaagaacatgctggaaaagctagctacactgaaggtgccaataaatggtagcatgtgaataaaattgctggtgacggagtggcacctggccgattgcacatagctagggctatggttgaaatgggtcatgtagagaatttaagccaagcattcaacaaatacctcggcaatgatggccctgcatatgccagaggaagtgaaccatttgctgagactgttgtgcagttaattagtcgcactggggtttttctgcacttgctcatccttggtcactgaagaacccagatgcaataatcaggtctttaaaaggtgctggtcttaatggtatggaggtctacagaagtgatggagaagttaatggatttagcaaactagctgagaagtatggacttctgaaacttggaggttcagattttcatggaagaggtggaaaagatgaatctgatgttggaacagttaagctcgctattacaactttgtgctgttttttgaagatggctaggtctatctggtcttctgctatgaaagacatcctgcttaagtttgcagagggtctgctgcaaatctaggaaacatgctcaagtttggacgtcttaccaaatttgctggtttttctccaataaacaatggtattcgtgttgttgatttctgcttatcttcttggtcaagcaatgatgatatcgaagatgttgagcttgaagaggtaagattgaagcttgctcattatgcatcataaatataacctcaactacatggtcatcttgagcaatgttttcacacttgttcaaattacagtatgtgctgttgcaatgttcacttcttttgcggcccagtataattaatgttgaaattagatatgctcaatctggtagctttgacattttattcaagaacatatatttctctactatgataactaaaaattaatatttagaat

SEQ ID NO: 155578 - DNA, 668 bp, Zea Mays
ctgtacacatctctcatgaacctcgcagaaacacgacactcaagtagacctccaaaaagtccgaagcgtaagcgttgttggaacctggctgtatacaggtgctatttggttcatatcattgtaacatcgtgggcaatagataatattaaaacatatttatttaagtccaacgtaatcagatatcataatagaaattataccgacatattcaaatttattattgttgtcattcgagtgtgaattattaatactatcatttacgttaccattcgtgaaccaaacaacatcacaccagtaggacgacatgccgcgcaacttgtggactgggtccttagactgtctccagcaacgtcctctatatacatcctctatatccgtcctttacagtcttctctaaaagattccatctcctatatctactttctctccaacaacgtcctctaaatcacgtcctctatatgtaaatacctatattaaagacatttttaattttttaatttttgtacatacgtatttgtcatactctcaaatgtattgtacatattttagttttattaaaccggttttttaaagtattcaaatagatagagaactgtttagagaaactctacatatagaggatccagcagcgttctctaaatttagagaatcgtttagatgacgttgct

SEQ ID NO: 155579 - DNA, 135 bp, Zea Mays
gatcctttgagaactatatgtcgtttatttagtatttacctatctgtaattcgactctgcatcatcctaatgtctgtatctgtatggtttagtgtgttccttttatgtactgtgatggatggtcatggcctaatt

SEQ ID NO: 155580 - DNA, 762 bp, Zea Mays
atgcaaggcggcgtggtcgagctcgcgaggcaggcggcggccgcggcgagggccgagcgaggaggggcgcgtggcgcggccaggccgcccgtgcgtaggtaccgtggcgtgcagaggcggggcgacatgtacgtcgccgagatcatggacgccgagggcatcctcccgctgtgcctcggctcgtacgcgactcccgaggaggcagcgtgcgcgtacgacgccgccgcgagggtcgtgcatgggaacaaggccaagcccaacttccccgagccccccgccggcgcgccgccgcccgcccgcgccggggtgctcccgccggtcgggcacgctcgcgtgcgtgcgcctctctacggccaccagcagcagccggcgccggtgggcggcggaggacagcagcgtcaggcattccccgtcccacatttcccggcgcccccgggcgcgttctctcagcttttttaccgtccagctgcaggtccagcgttcgccgccgccgccgccgccggtggaagcaacggcgcaggcttctacggtatggctcccatgatcggccccgggcccgaggtgcccatgcccacctatgcagcgagctcccaactcagcagctctgacaagaaaaacaaggcggctgtccatgccccggcggccgccgagcctaagctgatcatcttcatcgagtgtggtggtgaacccgtggtcgaggataacttcaacggggacagcggcgcgtccacctcgtctgcagcacgtccggcggtgccgtaa

SEQ ID NO: 155581 - DNA, 1291 bp, Zea Mays
acatcggctgcaggcgacgacgcggcacatccggcaccgcggcagggagagagggaggccgggcgcggtcgagttcatcacaccgaggatgcaaggcggcggcatcgtcgagctcgccaggcaggcggcggcctcggcgaggaccgacccagcggcgcgcctggcggccttgcagccggtgcggagctaccgcggcgtgcagcagcgcaacagcaggtacaccgccgcgatctggaacacccacgccgcgcgcacgctgtggctcgggtcgtacgagacccccgaggaggccgcgtacgcgtacgacgccgccgcgaggatcatgcgcgggcacagggccaggcccaacttccccgagccggaggtgttcgcgggcctcgtgctcgcgctgccgatgccgacgcgcgctcgcgaccccgctgcggcggcggcggctcatcaggtggccttcgacaactggctgtctgcgtcggtggccgcagcggagccacagcgtctgagaagcaggccgcccgcggcgttgttcccgcaccaccaccaccaccagcaacgcccggtgccaccgccaccgttcacgcagttcttctacccttcggatccccccgccactgctgcggccaatggcggcgccgctatcgccaatccttccatgccgggcgcctatgttttgacaccgcaaaacgtgcggatattgtcgcccgccaatccggcgagcaccgcgctaagcagcaccgagcccgtcgtcgtcgatgatgcccaacagtccggcttcgctcccgccgctacccatcagcaccgcgagctgccgccggtgccgcacgccagcgtgtactctgatgaggtcgtcgtcggcgataacttcaccgactacggtgcgtcgtcctcgtctgctgcacgtcctccggtgcctccgctgacgctcacggatgtgctgctccaagtcgatcagcctgctggtcgcggcggctcggttcgggcgcagtaaggaagcacaagccgtgtcagtgtccgagaccgatcgaggggctgccgatcgactgcgattatctcatgcggttcctgcttcgagtactcgacatgtggtcttgtttaccgtctactagctatccatgatgattatgtatgttttttctttcccaaaattcggaaacattgtgtatgtattatcaattcaactggacttgtgacgcctcctcctttgtgctcctgtcagtatgtattgttttctagtgtcttgtaactttgttgaaaacgcttcagttttccagcgctgtgagccaaaaaaaaagaa

SEQ ID NO: 155582 - DNA, 318 bp, Zea Mays
ttgcgataacctgctacttagatgtctctccaaagttcggcttcagactcctcgtgacttcgctttcagatatggctgcccacgacgatggtggccttgcgacggtgatgtaccccggcgacgaattacctgcactctccctgctattgccctcaatcaatccttcacgtacgttattcgtgcttcatcacaacacctcaacctctcagcgacgactcgacgatggcacactcgattcaagcgcggcggctctaccatatctctatactcgctcggccaagggacggtggcggggctctcggtttctcttggctcggc

SEQ ID NO: 155583 - DNA, 87 bp, Zea Mays
agaagaataacagaattctattacctaaatcttctctgaatcaaccccacagactcagtagtgttccttgctctcccttatgttcgt

SEQ ID NO: 155584 - DNA, 487 bp, Zea Mays
aggattcgaggaacaaccacgatgacaatcctttggtgaagatgtctgtgtgttgtcatctgctggcacgtgatgaacctgtagcaggccaagcaccgaaagacaatacgtcatcaacccatgggcttggaatccaagggtggagatctccaattgtgaaccgaccttcaactgacttagaagagtgctaatcatcgttcgatgcatgatggaaggcaggggaggctgaccggcctcctccttggccaaccgaccacgtggaaggcgtctcggcataccatgtcacgtccatgcaaccattttaacccataaatcgaccttgtaacaatataaatgcccccagccttgggagggccataaatatcccctaggaggtcatttggaggaagataaagagagaagatagttctaccgtagagagtcacctcttttcattttagtagtttacattagtccttgggagttaaattaagtctgagcttttgcc

SEQ ID NO: 155585 - DNA, 1687 bp, Zea Mays
cgcccccgtccggcgtccgctgctccgctccgtttacccttttcccctccgatcgcggcggcagcttccgcgaaggccttcgctaaaaaaccgagctcgccacgccaggtatctcctatttttttctcctccgcctcgagttccgccacctccgagcctcccccgccgcgtcccagggaccgggagccccagtcccctagttcgctcgccttccgccggcgcaagagaagcccctatctcctcccatcctatgggcgccgtggcgtcgacggtggcggcgcgcttcgcgttcttcccgccgaccccgccgtcgtacggggtagagccaccgccgtcgccggccgcggctgcggcggacacggaggtggtggagctcagcggggtgccggtgtcacggggccgcggcgtggaggcgcgccggctgccaacgaagcgcggcaccgaggtggtgtccatgtacgtccgccagcccggggcgcgcctcacgctgctctactcccacggcaacgccgccgacctgggacagatgtacgagctcttcgtcgagctcagcgcccacctcaatgtcaacctcatgggttatgactattctgggtacgggcaatcatctgggaagccaagtgaacaaaatacttatgctgatatagaagctgtgtataggtgtcttctagaaacatatggagcctctgaagaaaacatcattctatatggtcaatcagtggggagtggccctactttggatttagcatcccgtttgcctcatttacgagctgttgttctacatagcccaatttcatctggtttaagagtgatgtatcctgtaaagcatacatattggtttgacatatataagaacattgacaaaattcctctggtcaggtgtcctgtattagttatacatggtacagctgatgaggttgttgactgttctcatgggagggcactatgggaactatccaaagtgaaatacgagcctctgtggatcaagggagggaaccactgtaatttggaactgtacccagaatacattaagcacctgaaaaaatttgttactgccatagagaaatcacaaccagttaaagacgaatctccagagagttcaggtccttcagatcctagtgaaattggatccgaaagtgcagagaactcaaggagaagcaccgatatccgggacaaaccaagatcaagcattgatcatagacctagcattgatcgacgggagaaacctaggggaagtatagacaggagagataaaaacagaaagagtattgatcagcttgacaaaccacgggctagtgtggatcaacctgacagggcacgtaagagcattgatcgctttggggggatgatgaggtcagtcaaattgtgcaatattgattgtttcactgcagcttccgggagctgataatatcgggaggttagtacttcgtagtgtctcttagtcatctgtatgtattccattttttataatttattattcaattgggtgttttagtgtggctgtggaaaaggtgtattggtctgaatgagggcttgtatttgtttcccatgaattgtttgtttctggaaaggaaactcccatagtttccaaacaagatcattttttttcttgaagtctttcatttgttacctgatgaaatccgaagaaaatgcaaagcaacgagaagcattgtctttgcagaactgt

SEQ ID NO: 155586 - DNA, 2126 bp, Zea Mays
acgagcaccacctcgccctcgccagattccaaagggagtgggccaggcaaagtcggctcttgcgtcgacatcgacggggagaaacagctgtgggcaggcgatgaactgtagcgcgtgacagtgaggggatttggttggatccaatgtttggtcggtctgcttgcatcacctggttgcagctctgcattttctggctataaagcgacggggcccttgcgctgggcgcggagactggagagggcgagagtcctcccatccacaagttcttagcttttgcgagattgagatccggctggggacagaccgacagaggaaggtgaattgtgggaaagaggacagaaaaatggggattggagatggatcttcaaatgggaaccagcaaccggtgcataaggaaatacgagatgagaccacaccacttcttccagtcaaggtggaggaggacgaggggtttcatgagttcaatggagcttcattctctggggcagttttcaatctgtcgaccaccatagttggggctggaattatggctcttccagcaagtatcaagatgctgggcatcatcccggggattctgttgatcatccttgtggcactgctcacagaggcatccatcgacatgcttgtaaggtgcagccaccagggcaagattacatcatatgggtggctgatgggcgaggttttcgggcagtgggggagaattgcgctgcaggcctccgtcatcataaacaatgttggcgtgctaattgtttacatgattatcattggtgatgtattatctggaacaacatcaggcgatgttcatcatcgtggtatattggagggctggtttggagctcatttgtggaattctcgtgccattgttcttcttgccacagctcttttggtgttcgctccgttggtgagctttaagcgcttggattcattaagatacacatctgcgctatcagttgccctggcagtagtttttgtcgtaattactgctgggattgccatcatcaaactcttcaatggaactgtagcgatgcccaaactttttccagaattagatggtcttaattctatctggaatctttttacagctgtccctgttcttgttacggcctatatctgccactataacgttcacagcattgacaatgaacttgaagacagaacacagatcaagccgattgtgcgaacatcgctgttcctgtgctccagtgtttacattgccacaagtttctttgcttatctcctcttcggtgaaggcacactggacgacgtgctcgccaactttgacgcaaatcttggcattccattcagttcagtcttcgatgacatagtgcgagtgagctatgcagcacatgtcatgcttgtctttcccattgtcttctttgccctccggctcaacttggatgggttgctcttccccacgtcaaggcacatctctcgtgacaacaagagattcgccatcatcaccgtctctctcctcgcagtaatttatcttgctgccattctcataccaagcatctgggacgcgttccagtttactggtgccacagctgctgtcctgattggttttatatttcctgccatggtcatacttagggattcttacggaatcgcgagcaagcgcgacaagattctggctgtaaccatgatcgtgcttgctgtcctgtcaaattctgtcgccctatacagtgacgcgatgaacatcttccgtaagaaggaagtggcctgatctcagatttcaaaagtagtcagtgctggatgaagaatggtctcgcaatgcaagactcgatggtacgaaggaaaacgatgcgcttggattccgtgaaggaacgatttctttgtcagcacctcagaatttggccacttgaaagaatctgatgcttgaagtttcctggttctgtgtacacaagtcggctcaatgtcagaattgagccgcttgaaatatatttagttatattctatgcggagagtaggtcttggaaacagccttttccacaataatgtacagttattatgccaatttctgagttcagttaaattttgtgaaatatggacatgggcgtcttgtctcgattaaaattgagaatggtatgattgcacattacgtcgctaccatgtttgtttttgccttc

SEQ ID NO: 155587 - DNA, 1969 bp, Zea Mays
agtgaggggatttggttggatccaatgtttggtcggtctgcttgcatcacctggttgcagctctgcattttctggctataaagcgacggggcccttgcgctgggcgcggagactggagagggcgagagtcctcccatccacaagttcttagcttttgcgagattgagatccggctggggacagaccgacagaggaaggaggacagaaaaatggggattggagatggatcttcaaatgggaaccagcaaccggtgcataaggaaatacgagatgagaccacaccacttcttccagtcaaggtggaggaggacgaggggtttcatgagttcaatggagcttcattctctggggcagttttcaatctgtcgaccaccatagttggggctggaattatggctcttccagcaagtatcaagatgctgggcatcatcccggggattctgttgatcatccttgtggcactgctcacagaggcatccatcgacatgcttgtaaggtgcagccaccagggcaagattacatcatatgggtggctgatgggcgaggttttcgggcagtgggggagaattgcgctgcaggcctccgtcatcataaacaatgttggcgtgctaattgtttacatgattatcattggtgatgtattatctggaacaacatcaggcgatgttcatcatcgtggtatattggagggctggtttggagctcatttgtggaattctcgtgccattgttcttcttgccacagctcttttggtgttcgctccgttggtgagctttaagcgcttggattcattaagatacacatctgcgctatcagttgccctggcagtagtttttgtcgtaattactgctgggattgccatcatcaaactcttcaatggaactgtagcgatgcccaaactttttccagaattagatggtcttaattctatctggaatctttttacagctgtccctgttcttgttacggcctatatctgccactataacgttcacagcattgacaatgaacttgaagacagaacacagatcaagccgattgtgcgaacatcgctgttcctgtgctccagtgtttacattgccacaagtttctttgcttatctcctcttcggtgaaggcacactggacgacgtgctcgccaactttgacgcaaatcttggcattccattcagttcagtcttcgatgacatagtgcgagtgagctatgcagcacatgtcatgcttgtctttcccattgtcttctttgccctccggctcaacttggatgggttgctcttccccacgtcaaggcacatctctcgtgacaacaagagattcgccatcatcaccgtctctctcctcgcagtaatttatcttgctgccattctcataccaagcatctgggacgcgttccagtttactggtgccacagctgctgtcctgattggttttatatttcctgccatggtcatacttagggattcttacggaatcgcgagcaagcgcgacaagattctggctgtaaccatgatcgtgcttgctgtcctgtcaaattctgtcgccctatacagtgacgcgatgaacatcttccgtaagaaggaagtggcctgatctcagatttcaaaagtagtcagtgctggatgaagaatggtctcgcaatgcaagactcgatggtacgaaggaaaacgatgcgcttggattccgtgaaggaacgatttctttgtcagcacctcagaatttggccacttgaaagaatctgatgcttgaagtttcctggttctgtgtacacaagtcggctcaatgtcagaattgagccgcttgaaatatatttagttatattctatgcggagagtaggtcttggaaacagccttttccacaataatgtacagttattatgccaatttctgagttcagttaaattttgtgaaatatggacatgggcgtcttgtctcgattaaaattgagaatggtatgattgcacattacgtcg

SEQ ID NO: 155588 - DNA, 2005 bp, Zea Mays
agtgaggggatttggttggatccaatgtttggtcggtctgcttgcatcacctggttgcagctctgcattttctggctataaagcgacggggcccttgcgctgggcgcggagactggagagggcgagagtcctcccatccacaagttcttagcttttgcgagattgagatccggctggggacagaccgacagaggaaggtgaattgtgggaaagaggacagaaaaatggggattggagatggatcttcaaatgggaaccagcaaccggtgcataaggaaatacgagatgagaccacaccacttcttccagtcaaggtggaggaggacgaggggtttcatgagttcaatggagcttcattctctggggcagttttcaatctgtcgaccaccatagttggggctggaattatggctcttccagcaagtatcaagatgctgggcatcatcccggggattctgttgatcatccttgtggcactgctcacagaggcatccatcgacatgcttgtaaggtgcagccaccagggcaagattacatcatatgggtggctgatgggcgaggttttcgggcagtgggggagaattgcgctgcaggcctccgtcatcataaacaatgttggcgtgctaattgtttacatgattatcattggtgatgtattatctggaacaacatcaggcgatgttcatcatcgtggtatattggagggctggtttggagctcatttgtggaattctcgtgccattgttcttcttgccacagctcttttggtgttcgctccgttggtgagctttaagcgcttggattcattaagatacacatctgcgctatcagttgccctggcagtagtttttgtcgtaattactgctgggattgccatcatcaaactcttcaatggaactgtagcgatgcccaaactttttccagaattagatggtcttaattctatctggaatctttttacagctgtccctgttcttgttacggcctatatctgccactataacgttcacagcattgacaatgaacttgaagacagaacacagatcaagccgattgtgcgaacatcgctgttcctgtgctccagtgtttacattgccacaagtttctttgcttatctcctcttcggtgaaggcacactggacgacgtgctcgccaactttgacgcaaatcttggcattccattcagttcagtcttcgatgacatagtgcgagtgagctatgcagcacatgtcatgcttgtctttcccattgtcttctttgccctccggctcaacttggatgggttgctcttccccacgtcaaggcacatctctcgtgacaacaagagattcgccatcatcaccgtctctctcctcgcagtaatttatcttgctgccattctcataccaagcatctgggacgcgttccagtttactggtgccacagctgctgtcctgattggttttatatttcctgccatggtcatacttaggtaactcaatgtttagttcttggtgtatgttgcctactactagccaagccattttgtatagcatgtaatatcgtggcttgaatttctgcagggattcttacggaatcgcgagcaagcgcgacaagattctggctgtaaccatgatcgtgcttgctgtcctgtcaaattctgtcgccctatacagtgacgcgatgaacatcttccgtaagaaggaagtggcctgatctcagatttcaaaagtagtcagtgctggatgaagaatggtctcgcaatgcaagactcgatggtacgaaggaaaacgatgcgcttggattccgtgaaggaacgatttctttgtcagcacctcagaatttggccacttgaaagaatctgatgcttgaagtttcctggttctgtgtacacaagtcggctcaatgtcagaattgagccgcttgaaatatatttagttatattctatgcggagagtaggtcttggaaacagccttttccacaataatgtacagttattatgccaatttctgagttcagttaaat

SEQ ID NO: 155589 - DNA, 476 bp, Zea Mays
acgagcaccacctcgccctcgccagattccaaagggagtgggccaggcaaagtcggctcttgcgtcgacatcgacggggagaaacagctgtgggcaggcgatgaactgtagcgcgtgacagtgaggggatttggttggatccaatgtttggtcggtctgcttgcatcacctggttgcagctctgcattttctggctataaagcgacggggcccttgcgctgggcgcggagactggagagggcgagagtcctcccatccacaagttcttagcttttgcgagattgagatccggctggggacagaccgacagaggaaggtgaattgtgggaaagtgcgtgctctcggctcttttcccgtcttccttgccttgtggttttgttttggaagagaggattcttgcttgggtaggattgggtaatttgagagttcatttctcgggattttgtggctgtacgaggcttttctgaggccaattt

SEQ ID NO: 155590 - DNA, 309 bp, Zea Mays
atgtctagtcagcacggaccagactatgactggaggacctcacctattgatcctcaggttgtgtatgcaagtggtggaaaaggtcatggaaggtacacaatatttgctaacgtcaacgactcgatccaggtgagagttcagtgtggagcaactagcacaggcccaagggatacatgtcccggtgtccccaccaccaccaccaccacctcccgtacattatccttggtcttcacatccacctacacctacatctccacctaccgaacatcagctgttgatatatttgttatgttgtggaatatggtgtaa

SEQ ID NO: 155591 - DNA, 510 bp, Zea Mays
atggcgacgttggtgtgccacacgctcggcgcagcagacttggcgagcttctacttcgtcacaccgcaccaccatcacggctcgctcgcccaggggccgtcgtcctgcccgggcaccgcggctggcggtggccacggcgccggcgcgagcatgctcgcgggcgagctggagcagcaggagcaggcggccgcaggcgccgcggcgcgcgacgagcggaaggcgaggcggcaggcgtcgaaccgcgagtcggcgcggcgcgcgcgcgcccggcggagggggcagctcgacgagctgtcgtcgcgcgtcgccgcgctccgcgccgcgaacgcgcggctggccgtggagctgagccgcgtgtcggccgcgcgcgcgcgggaggcgcgggagaacgcgcggctccgggccgaggcaggcgccctgcgggagaggctcgcggcagccgaggctgcggcggcggcggctggccacggccaggtgcgcgtcgtcccggaaggaaggcgccggcgatga

SEQ ID NO: 155592 - DNA, 783 bp, Zea Mays
agcagtctaagtcattccaacggtgcatacgcagaaggacgagatgatgaattgctagaggcttaatttttaaggacttgcctacgctgagacgatggctacaagaatattcagggccgttcctgactttttaggggcccagtgcaaaattcgatatggtgggcccatccacacacaaatatatataattatacatacaatattgaatatttaacgtataaaaattattatgcaccttttaatgtttataagataacaaatgtaaaatatagccaaaaacacttacttctcatctgatatcattaaaaatatcttctaacattttgtgatacgaagtcatcccttatatcgttgagatcaatttcatacaacaacttttttcgatatatagaatcgtcaagtcatttaacctctcttaagttatgtttgaccataaatagtccacaaaaacatttcaattttaaaaagcttctgtttgacgatgcaactatcatgtgtatagtaaataatactctgtctatatcaaaataaaatttgtttgcttctttagtggatttatcatcatctagttgaatataaacataaaaatatatagcaaaaataaatactattttgaaacgaacggagtattcgataagtcattgagacattagtttaacaatctaaatgagactgattgatagcgtatcgctcattgcgtatttgtgtctagaatagataggtttaataggaaaaagtgctagcgtctggtacttaggggccctctgattttgggggcccggt

SEQ ID NO: 155593 - DNA, 348 bp, Zea Mays
atgaggccggggagagatggtggaggtgtttcggcgaagctaacgggcggcgcaggcggggccccgccgagcctatggaagacgccgaccccatacgtcttcctaggcctggccttcatgatgtgcgtcatcgcgacggctctgctcgtgctcatctgcacgcgcaagaaggcgtcgtcctcgcggcggcgggatgatggggcggccgacgagagggcggcgctcgcgccgctggaccgcgagcccaaggtcgtcgtcttcatgcccggcgaccgcgcgcagccgtccttcctcgccagcgtcaagccgctcggcggcggcggtgatgatggcacggcggcagcgtag

SEQ ID NO: 155594 - DNA, 595 bp, Zea Mays
ggctatggagtcgacgacgtggttgaccacgtcagatggcggatccgtagccaccgcatcagaccgccgagcaaattcggacaagtccacccatcaccttgctcctgggagttacctctaggttcgctgcacaccaccggtagtccctcgccctcctcccgaggccggaccgtcagccagggtaggatccgaccgcgacggcgacgagctcgacttgcagctgcccggcggcgaaccacggactccataggaaacaaacccaataccccgatgaacttctacgctcatcagcgaacctctctgtgcggccctggcgccgcgaccttcgctccacatgatccgacgaactccccctttctctctcctcgagtgcggcggcggatctcccctgttggtttcctgcgctcaccctctctctccaatggccacggcacaccatgggcgaacgcgctgccttacttctggttgaccagggcggtgagttccagggccatgagcgttcctctttttatgcgcagcgaatgagtggtcaattcccctcaggactgcaagggatccgcaccccacggatctctccgtccactgcgcacgcgtc

SEQ ID NO: 155595 - DNA, 543 bp, Zea Mays
atggggaatgttttagatgcatccacagagggtagtctaagtgacatgaagtcaaaaactctgaagcaaaaacttgaagaggttgaccaagacaagtacaggataataccaagtttatcctatgggccaatggggatcaggagtagacaaaagtgttgcaaacctgtcaaagtgctgtccctcatggcctgtccaccgactctgaggttgcccagagggaagccgagtctatctctaggaagactctcaggagctcaatcgagaatgcaggaacagaagctgctcgagtctcttgtcgaagctgatacgagaaggcaggaaagagctaaaaagatggaagaaaagaaagtgtatctgcaactgtacgaagcaatggaggcgctggtccacatctgccgggaaaacatagaatagaattcaaatttggtggtcgcaaaagtgtgaagactttaattcatataaagttaggcttaacattagtgcaaacagttgtattttagtttagattttagagtacacttatgtatgcgttgtttgacaatg

SEQ ID NO: 155596 - DNA, 600 bp, Zea Mays
actgaactagctagcagcagcagcagtttcctagtgagcttagtgcgtccagtgcctgacaactgtcgtctgtgctgtgctccgagagaagcttagagcgccagcaggcaagaagaagcttcggggtcatcggtcgccgccggaatgggagccagcctgtcttgcttcggcgggtcagaaggcgggtactacgccgacgagccggggtacgagcagccgcggcggtcgtccaggaaggtgcggccgagcgacgaggacggcctgtggtacgtaggcgagcgcgacgtcgacatgaaggcgtcggcgttcatcgccaggttccatgccaccgcctcgagctaggccctgcaggagtgtccatgtgcacggcgccgatcatataccaccatgtgaaatctttagtctatctgtgtctctcgagcctgctcatgcctctgctcgagataatctctctagtcactagcgcttccttcttccttcttccccgactgatggttagcttagttcgcttcattttccgttaattactactgtacgtgcttgacactatacttaagccccatgcatgtcaatatatccatctacttactctctcaaata

SEQ ID NO: 155597 - DNA, 159 bp, Zea Mays
atggtcgaagcacttaggtgctgcttcacaggcttcggtgtgaggattagacgtttcaccaatctcttccaagataacagatcaggcctaaccacactgatactgaacctcatttttggtgaagtcgtggtgttcgaaattccgaaaagaaccacatag

SEQ ID NO: 155598 - DNA, 201 bp, Zea Mays
atgggagccagcctgtcttgcttcggcgggtcaggaggcgggtactacgccgacgagccggggtacgagcagccgcggcggtcgtccaggaaggtgcggccgagtgacgaggatggcctgtggtacgttggcgagcgcgacgtcgacatgaaggcgtcggcgttcatcgccaggttccatgccaccgcctccagcagctag

SEQ ID NO: 155599 - DNA, 8280 bp, Zea Mays
atggatgaccacaagattcaagaagccgatatcaatggattattcgtcccattccagtcgcatgtgctgttggctccaacgccgtcagactttgggcacggcagcgagggaggcctccagcttgtccgccgggtgcgagagatcgaccatgtctcccctcaggtacttctcgtacgcggcgaggtcgaaatgtccgtgcccgcacatggccatcaggatgaccttctcctccccggtccgcttgcactccagcgcctccctgatcgccgcggcgattgcgtgcgtcggctccggcgccgggatgatgccctccgtcctggcgaattgcaaggcagcttggaagcattcagtctgctgtatagcaacggcatccatgaagcccagctcgtacacgtgcgagatcagaggtgccattccatggtaccgaagcccacctgcatggatcgggtcggggacgaagccgtggccgagggtgtgcatcttcatcagcggcgtgagcccggccgtgtcgccgaagtcgtacgcgtagacgcccttggtgagcgtggggcacgcggcgggctccacggccctgaacgcggggctcatcttgccgcgcagcttctcgcgcaagaacgggaacgcgagcccgccgaagttggacccgccgccggtgcagccgatgacgacgtcgggcgtctcgccgagcgccgccagctgctccaggcactcctccccgatgacggtctggtggagcaggacgtggttgagcacgctgcccaggcagtacttggtgtcggcgctggtggccgccacctccaccgcctcggagatggcaatcccgaggctgcccgggctggacgggtccgcctcaaggatcctcttgccggcctccgtcgccgtcgacggcgacgggtgcaccttggcgccccacgtctccatcatcagcctccggtacggcttctggtcgaacgacgcgcgcacctgccatacctcgcagttgaggccgaagaggctgctggcgaaggacagcgcgctgccccactggccggcgccggtctcggtgaccacgttcttcacccccgccgcggcgttgtaccacgcctgcggcacggcggtgttgggcttgtgcgaccccgccgggctggtcccctcgtacttgtagtagatcttcgccggcgtgccgagcagcttctccagcctcctggccctgatcaggggcgtcgggcgccagagcttgtacacgtcgatgacctcctcgggtatgtcgacgaaccgctcgtcggtgacctcctgtgtcaggcatccagtgacagatacaggctacgtctaaggacataaagacaattgggccgggacagagtgagcgagcccggacggcaattgtgaagctgagcggcccagagtggtcagcaatgtaattttgtgtcgtgagccagttgaacgagtatttagaggagatcgtccataggacaagggagatattcagactgtaaacagaactataccttcttcttcgtctctaacctctgcttcctctgttcctatgaatctcttgctatcttcctgaatccccagttcctgcttcctacctccaattcctgtctcggatctatctccactatctgccgctaacaattggtatcagattcgttcgatcctcgacttcaatttgcccacgccatgtcgctcgatttcaagctcatcctcgacgagctcaaccggcgattcgacgagctggaggttcgctgggaccggcgcttctcgccttctgcgtacctcgaccttccgcccacactgctcagcgtccaccaatcctccgacacatccgccagcatgccgcccaccccgactgcggctgttggggccgtcgtcatcgccgacaactggggcgggtgcttcgatgacggcaaggagtactatgcagcgccatctgtcgtcgccgacaactggggcgggctcttcgagggttgtgatgctgacggcgatatctcttcgaacctgcgcgactccgaccccgacgaggcgttcgtcacctcccactcggacaaggcgttgctcgacaaccaccacgccggtgagctcatcgccaccggcatcgaatatggctcatacaactccgtccatggtagcggcggcgctgcgctgtctcaactcgcgcacagcaacaccaacttcgccatgcccacaacctgttcgacttgggggctcaccgagcatgctatggccgaggccgtgcaccgtcgcgcgctatggctgccccgacgcgagccacttccgcgcctacttcgtgcgttcctaacgctcgagcggctcgacctctccgcatgcgcctcgctcgacgacgcctccctcgctgcgtccgtcggcgatggaccagcagccgcgacaacctggtggtggtgcgcttcggcttcggccacgggcgacatggagagcacgctcaaggggattcgcggcagcgacgcgccgttcgtgatggacctaaacgacgcagccaccgtggcgggcggcatcgaggacacttacggcgaggaccgcgccatcgaggagcagctcgccacgcccttggacacgctcctgtgcgcccgcctcgaccctgtcaagtcgcacatcgggtgcctgctgctgcagtacctcaagctttcgcctaccttgattggtgccaaggtcgcctttggcaggttcgacggacacttcttccacgacttcaccatcatcaagctgaagacggacagcagcagctcgcccctcgagtgttcgaccaaatgtctcagccacgatattggacatgattcacgaaattatgcacacaaattacagaatgcagtcactcatggaatcactgctgctggacatgatatcctacaggtgggattggcttcaacacctgcaatgttcaacattatacttatagaagatgagagaagtcatttacctgttgacgccatttgctctcctgatgaattgataaagacatcacgtctttgtgctttagaaatggttcattgccgtaaaccttggatgagatctcttggcaacacagataggcttggactattctctgaagctcgtgctgtgttaaatgcagcaagacagcaagcaatgaagattgcactaaacatgccacagcaccagacctgcatagatgtgatgggagaaggcatattatatggaggtcgacctggtgttttgaaggaagccattgtttgctcgattccgggtgtcatggtgtttacttggactgttaggaatttttctggagttactcatttatacagtcagcatgacagaggtgtggtgtggctaatcgttgctcctgattgctacttcattcaacacaatgagaggatgcacatgatattctatggcttcgatctactgagtttgcaacacttccatggacatttcattgaagctgatatgtttgctccttgggatggtcaggaattaacccagtttctattttctgaactaccaatatattggcagcagtcacatggtgaatttttctcagctagcataattagacaatttcagttcatatcacagctgattttattggcaattacaggcatgaacagtctattatttttcagaaagctcaagtattcatcatcagttgagatattttgtggtgcacagttttcatttcctaatattctattgcccaagtcttggtcacaggagttagccaccaacatagaaagacatttactatcagaaatgctagaagtggctaatggctataattttcatgagcttcatctgatgcttgcctctattggagtgacacaaatgatcagttgtggtaaatatttgatatggatcattggcttgctaactccatgggatccgggcagaatggtcttcgacctcaagttcgtgatgcttttggcttgagggcaagccaaatcttaagaggggggaatgtcaggcatccagtgacagatacaggctacgtctaaggacataaagacaattgggccgggacagagtgagcgagcccggacggcaattgtgaagctgagcggcccagagtggtcagcaatgtaattttgtgtcgtgagccagttgaacgagtatttagaggagatcgtccataggacaaaggggagatattcagactgtaaacagaactataccttctttcttcgtctctaacctctgcttcctctgttcctatgaatctcttgctatcttcctgaatccccagttcctgcttcctacctccaattcctgtctcggatctatctccactatctgccgctaacatcctgcctgatcagctcgtcggggaacagaggggagaggtcgctgggattcagaggctggtgtgtctgcgggtgcagcggtggcggtggcttcaccggcaggtcggcgatgaggttataccattgcttagggatgctcacactggcgcccgcattcgagctggccctagtggtgaatctcaagcttctcctgctggcagcaactcggtgcttcggtgtgcacagcagtgaagctctctgctcttgccctgttgctgttagaaacaatcttgccattagcatttgcatgtttaattctgtttttgtgtatgcatcggcaaatcaagaaatcgtgtgagctgctgttgactcggcatatacgcaagcgcgagaggccagtatgccgtgtgatacgtcagtgcgtgatatacacgataagtattagactaagtctggtcatagcatgcatttttgttagcctgagatgcgcgttgttcgcataaggccaagagcatgatctgcatgtccacggcgatgagcctggattgtgctggagttgcaggtgtggcggcagcattgtggcgtcagtattgctgtaatccctttccactgtttgcgtctggtttattaaccaagaggtgcgagaggcaatattccaaaaggaaaatgataaagcaccagaacttagatggttttcccccagaattttatcagatacttccctattttcaaatatatgtcgtccattagtttattttttaactaaaacgtgataaataaaaaaacggaggagaaggtattttagagtttaatcaaagatgacgatggctctttccggggggactttcatgttgggatgctacctcttcacagagtaaattttaggacaatgattctatactaaaaactattgaggcaaaccaaatacaacaattttaaaaaaaggacaaatggatcgtgacccgtctttaaatgaatatcctcttttgtacaatattgttcattgaaattaagcaacaatagccaatgttctaaatacggtgggaaacaaactactagaattgcagcacttagttgccacaattatgattttaaaattacagtaggtattggtaagcttatttggaatttaaagaaaaaatggacattactcggttaaatatatgtataagtttcttatcaacaacaacatccagacttcctaacaatgaaatttggagaacaaaaagtacctttaagaattagtttggaaacttaaatcccctccgggattttcggggattgagagaaaaactaaccccgaaggtactaccggaattcggctttttgccgagtgtctcgatctttgccgagtgcaatttatcagacactcgacaaaacttgcttcgtcgagtgccacactcagcacagaccccccatttgttgagagccaagcgctcgtcatagaatgactctcggcaaaggcttctttgccgatcgtcaagctctcgacgaaacaaggggtaaactgccgttagtagtcgtctatagttgacaaccgttagctatgcaacaaactaacttctttgccaagtgtcttttcctgagtcctgaaacattcggcaaagcagctgtgtctggtagcgagtggatttaaatttctaaactagctctaaagaataaaatatttatgtggtattttaaaactgttgtcctcacagtggataacctagcgagaaggaattgacttgatggtaaaaatatgttgtttttcgccacgtggaaaccattcaacacatattttttaatgttattttgtaagatttctttggcgtgttttttacatttggaactcaactgccaaagaatttaaatgatgtattgtaaccattaaagtgtgctagcagagcgatataatatgctaaagttgttgataggtgcttctacgttatgttgggccgtactgctatcaagaaattacattattttttagaaatgtcgactaaaaactttcatgcaggttgtattcaggggacatagtggctaaggctctgggcacgattgcagtgacttattggtcaacaggagatgcagattttagcttgccaaaacttggagtcagtaggacagtagctatgcaattttttttgactcctattgacggtcatcgtttttttaggattggtcaatgatgccaaactctgtcataatgtcctatagcttttgcgagtgaatttataaccacggatatttctctccaataatttgcgactgataccttgtcttcgatggggttgaagccggaacaatcggtccgtctcaaaatattaatcattttagtttttttatttttatatctatgtttaaatggatgataatgaatctagagagtaaaacaaatatattaattatcgtataaatcaactaaaaaggtaaaaacgaatttttattttaggatggatggagtattatctaaaaaaattacttcaaataaggatccaaacaagtctaaatgtagtcatcaaatcagacagaccagtgacggagcacaaatgaaaagcgaggtatggaaatgaaaagcaaggtatggcagtggagaactgtagatgccaggtaatgcaggcgtcgtcgtgtagggttgcggagctgcgcacgactttgaggtagggtggggcgcgaggcatgagcgctatgggtctaggctatagagcagtgtgagtgcagaactgtcgatggagacttgtggcgcgtctgtggcaaggatatgaagagtgagacatcggatgggaggtggggtgagttggacataaaggccttgagtgcaaggcactaaggcagtaaatcgacgagtgctcgcactagaagggcatgaagaggaggtcagcggacgacgccatggaagagtgaggagacgcgcttcatcgacagcttcgccttgccatctcactctcgaccttggtgttctctgtccactactgtctgagcctgaagcaccggttcctcacgatggaggatggagtaaggtatggcgagcatcatagctcggcataccgagcgctccgccactgataatgcccttccatagcccaactcagccatatactcacctttagctcccaaacatgtgtgagattcaacccggtccattttgaatataataattctcaaaaacatgtcggccagctttcaatgcctggcctagctacgacccaaccacttattcatgaagtatccaactatacccgatcaggaactaaaaaatggtcccctccgcgactttggtgtagcatttgaagccgtcatactccaacccagaggtgaaagaacctaaacatgcttctgaaaccgtaaaaaaaagaacttttatgcaatcatgggtgcatccatggttcctgaccttcgtgttatatccgatactccccaactatccgaagaaacagacaatactttgtttttcgaagaactagtactaaaatgttatagtcagactatcttcagtagcttatccatatctatatctatatctatatctatatttaaactttattctgcgaataatacaatctacagaataaaacggtattcagggtaaacttcagctgaaccgatgtagtcggcctcggagtcagatgcgttgaacagctagatatggtacactggttgctgggacgggtaatggtcaacaaccagcctccaaaaccaaaacgataacgtactatagtccctggagatctgcgctggcagaaagaaagctaaaaaaataaaaaattgcgagggcacaagcttctagttctagcctgccaagctcaacctgaccgagcggagaggttcttaatcctcctattcctatcttagcgacgacgacggacgacccatccaaagaactacgtggagagatttatgaggtcgacaagctataaggctataataactagctaggtaggtaggatcggagtcggagaaaacaagccaaggagtcggcggtggggatggcgaagcgggtgtgtgggcgcaccttgggagagagcagtacgaagggtggcggcggcggcggcgtcggcggccattc

SEQ ID NO: 155600 - DNA, 1722 bp, Zea Mays
atgcccacaacctgttcgacttgggggctcaccgagcatgctatggccgaggccgtgcaccgtcgcgcgctatggctgccccgacgcgagccacttccgcgcctacttcgtgcgttcctaacgctcgagcggctcgacctctccgcatgcgcctcgctcgacgacgcctccctcgctgcgtccgtcggcgatggaccagcagccgcgacaacctggtggtggtgcgcttcggcttcggccacgggcgacatggagagcacgctcaaggggattcgcggcagcgacgcgccgttcgtgatggacctaaacgacgcagccaccgtggcgggcggcatcgaggacacttacggcgaggaccgcgccatcgaggagcagctcgccacgcccttggacacgctcctgtgcgcccgcctcgaccctgtcaagtcgcacatcgggtgcctgctgctgcagtacctcaagctttcgcctaccttgattggtgccaaggtcgcctttggcaggttcgacggacacttcttccacgacttcaccatcatcaagctgaagacggacagcagcagctcgcccctcgagtgttcgaccaaatgtctcagccacgatattggacatgattcacgaaattatgcacacaaattacagaatgcagtcactcatggaatcactgctgctggacatgatatcctacaggtgggattggcttcaacacctgcaatgttcaacattatacttatagaagatgagagaagtcatttacctgttgacgccatttgctctcctgatgaattgataaagacatcacgtctttgtgctttagaaatggttcattgccgtaaaccttggatgagatctcttggcaacacagataggcttggactattctctgaagctcgtgctgtgttaaatgcagcaagacagcaagcaatgaagattgcactaaacatgccacagcaccagacctgcatagatgtgatgggagaaggcatattatatggaggtcgacctggtgttttgaaggaagccattgtttgctcgattccgggtgtcatggtgtttacttggactgttaggaatttttctggagttactcatttatacagtcagcatgacagaggtgtggtgtggctaatcgttgctcctgattgctacttcattcaacacaatgagaggatgcacatgatattctatggcttcgatctactgagtttgcaacacttccatggacatttcattgaagctgatatgtttgctccttgggatggtcaggaattaacccagtttctattttctgaactaccaatatattggcagcagtcacatggtgaatttttctcagctagcataattagacaatttcagttcatatcacagctgattttattggcaattacaggcatgaacagtctattatttttcagaaagctcaagtattcatcatcagttgagatattttgtggtgcacagttttcatttcctaatattctattgcccaagtcttggtcacaggagttagccaccaacatagaaagacatttactatcagaaatgctagaagtggctaatggctataattttcatgagcttcatctgatgcttgcctctattggagtgacacaaatgatcagttgtggtaaatatttgatatggatcattggcttgctaactccatgggatccgggcagaatggtcttcgacctcaagttcgtgatgcttttggcttga

SEQ ID NO: 155601 - DNA, 1275 bp, Zea Mays
atggatgaccacaagattcaagaagccgatatcaatggattattcgtcccattccagtcgcatgtgctgttggctccaacgccgtcagactttgggcacggcagcgagggaggcctccagcttgtccgccgggtgcgagagatcgaccatgtctcccctcaggtacttctcgtacgcggcgaggtcgaaatgtccgtgcccgcacatggccatcaggatgaccttctcctccccggtccgcttgcactccagcgcctccctgatcgccgcggcgattgcgtgcgtcggctccggcgccgggatgatgccctccgtcctggcgaattgcaaggcagcttggaagcattcagtctgctgtatagcaacggcatccatgaagcccagctcgtacacgtgcgagatcagaggtgccattccatggtaccgaagcccacctgcatggatcgggtcggggacgaagccgtggccgagggtgtgcatcttcatcagcggcgtgagcccggccgtgtcgccgaagtcgtacgcgtagacgcccttggtgagcgtggggcacgcggcgggctccacggccctgaacgcggggctcatcttgccgcgcagcttctcgcgcaagaacgggaacgcgagcccgccgaagttggacccgccgccggtgcagccgatgacgacgtcgggcgtctcgccgagcgccgccagctgctccaggcactcctccccgatgacggtctggtggagcaggacgtggttgagcacgctgcccaggcagtacttggtgtcggcgctggtggccgccacctccaccgcctcggagatggcaatcccgaggctgcccgggctggacgggtccgcctcaaggatcctcttgccggcctccgtcgccgtcgacggcgacgggtgcaccttggcgccccacgtctccatcatcagcctccggtacggcttctggtcgaacgacgcgcgcacctgccatacctcgcagttgaggccgaagaggctgctggcgaaggacagcgcgctgccccactggccggcgccggtctcggtgaccacgttcttcacccccgccgcggcgttgtaccacgcctgcggcacggcggtgttgggcttgtgcgaccccgccgggctggtcccctcgtacttgtagtagatcttcgccggcgtgccgagcagcttctccagcctcctggccctgatcaggggcgtcgggcgccagagcttgtacacgtcgatgacctcctcgggtatgtcgacgaaccgctcgtcggtgacctcctg

SEQ ID NO: 155602 - DNA, 262 bp, Zea Mays
cttgaattgaaggtttggctaaggatggggatccggtgtcttcatctataccatcagagaagaaggcttgccaagaatggacgaaggtatgattctaggaaatctagatttgaaagaaggaagcacccgaggagcaatcaaacggacatttctacgagtgaactcgctaaagctgaggatccgccagccaataactaactcatacgaaattcatggagcatagtagcgttttcccctgtgcatcactagcatcaactatcaa

SEQ ID NO: 155603 - DNA, 381 bp, Zea Mays
agttcttgtctcactcagcttatgtttatacagattgtttcttcgttaagagtcacccctgaatatgtcttgttagttttccatcctgaagcacaggtgaactttttgctcacttcttgtatatcctgttcatggtctgaagtaatttaagccccctttgctatttatgctcttatacatttgagccacagaaaaatctgattgtgtggtggaacatgctccctagatgcttctaccaatgacacacatgtggtgcaaatagttacacatccaggaaaagccttatgttctcaattgattcttgcggaaggtttaggcgaagctataatcataatccaggatgttggcctttctcgaagagcaactactcattctttggta

SEQ ID NO: 155604 - DNA, 1521 bp, Zea Mays
gacgtcgcggcggcgctgtggcagcagctcaagtccccggtggtggtgccgctgctgcgggtgtcggtggcgctgtgcctggccatgtccgcgatgctgttcgcggagaaggtgtacatggccgtggtggtcgccgcgtcgcgcctgctcgggcggcggcccgagcggcggtaccggtggcagcccatccgcgacggcgacgacctcgaggcggccgccgcctaccccatggtgctcgtccagatccccatgttcaacgagcgggaggtgtacaaggtgtcgatcggggcggcgtgcgggctgtcgtggccgtcggaccggatcatcgtgcaggtgctggacgactccaccgaccccgtcgtcaaggagctggttcgtgctgagtgctggcggtgggcgagcaagggcgtgaacgtcaagtacgaggtccgcgacagccggcgagggtacaaggccggcgcgctccgggaaggcatgaagcgcgcctacgcccgcggctgcgacctggtggccatcttcgacgccgacttccagccggagccggacttcctgtggcgcgccgtgccgttccttctccacaacccggacctcgcgctcgtccaggcgcgctggaagttcgtgaacgcagacgaatgcctgatgacaaggatgcaggagatgtccctggactaccacttcgcagtggagcaggaagtcggctcctccacctacgccttcttcggcttcaacggaaccgctggcgtgtggcgcatatccgctttgaacgaggccggagggtggaaggacaggaccacggtggaggacatggatctggcagtccgagcaagcctcaaagggtggaagtttgtatacatcggtgacctcatggtgaaaagcgagctcccgagcacactcaaagcgtacaggtaccagcagcacagatggtcgtgtgggccggcaaacttgttcaggaaaacgctggtggagatcgtcagaaacaagaaggtgacgctctggaagaaaatccacgtcatctacaacttcttcctcgtgcgcaagatcgtagcgcacgccgtgacgttcgtgttttactgcatcgtgatccccacgacggtcctggttcctgaggttcaagtgccaaagtggggttccgtctatatcccaaccgtaataacccttctcagtgctgttgccactccaaggtcagctcacttagttgtcttctggaccctcttcgagaatgtgatgtcgctgcatagaaccaaggccactttcatcggcctactggaggcaggcagggtgaacgagtgggtggtgacagaaaaactcggtgatgctctcaggaccaaagtgccaggcaagaaaccccgcatgaggataggagacaggttgcacgttctggagctcggtgtcgcagcttacctcctcttctgtggatgctatgacattgcgttcgggaacaaccgctactacatattcttgttcctccaatccatcgctttcttcatcgtcggcattggctatgtcggaacattcgtccct

SEQ ID NO: 155605 - DNA, 1286 bp, Zea Mays
agatcccggattgcagaggatcccatttcccattccatcctagggctcgcgagtcgcgtcccccaaagtgaatacagaaacctccagccccaggccaattcctcgaccgcatcgccacccaccccatctccatggctacctccgccctcgctgctctgtccgccaccgcggccgccgccggtaagcgcatcctcctgtcgcgccccgcctcctcctcctccctctccttcgcctcccgccgcctggccgccggggcacccctccgggggttccttggcgcgccaatccgggccgtggcgtcgtcggcgtcggcggcccccgcggcggcggccaagaccatcgcggtcggggaccggctccctgacgcgacgctctcctacttcgacacgtcctcccccgacggcgagctgaagacggtgacggtccgcgacctcaccgcggggaagaaggtggtgctcttcgccgtgcccggcgcgttcacgcccacctgcacccagaagcacctcccggggttcgtggccaaggccggggagctccgcgccaagggcgtcgacaccgtggcctgcgtctccgtcaacgacgccttcgtgatgcgcgcgtggaaggagagtctggggatcggggacgaggtgctgctcctgtcggacggcaacggcgagctggcgcgcgccatgggcgtcgagctcgacctctccgacaagcccgtggggctcggcgtccggtcccgccgctacgcgctgctcgcggaggacggcgtggtcaaggtgatcaacctcgaggagggcggcgcgttcaccaacagcagcgccgaggacatgctcaacgcgctctgaactcgcgacgccatggttggttcgtctcttccggcaagagttggtttcttttccctgaaaataatcgtgacggcaacggtggcttgtgttactgccgccactgttgtgaccggcgctgttactagtgcactgcagagatgcaagtttcttgcgaacatggctttataggtctagcttcatgcaattgttgacgccctctgtttcatgacttgtcatggtatgcaactcttgtctgagaattgatcatctgcatagtaccactactatcacaggcgttctctattattatcaaaggagagaaggggccgcccagccgcaaaatggctccattttgactggaaggttgatgctgtgatgctcaccatgccaaacaaatactaggctcttgatattaggctgtgcactgcagctgcggctaattgctatggttatctagtttaattggggattgtc

SEQ ID NO: 155606 - DNA, 1893 bp, Zea Mays
aaatatacgattgtgtcggctaattatcgcgtcgggggcagggcgtgtcttccatcgctccccaaggccccagcccccaggtacccttcgctccccttcctcgtatgctgtgagcgtcgtggggtcgtggggaggaagacgatttcgagggagagaggcaaaggggagctcgcccgctccaggcacccattcctctcgaacccgacatctctcttgttgtttcgaggtgctggagctcccccgctttccacaaaatctgtggagattattcgaaaccatctcgtcgctcacgaacgcgtcagaggttttgcagaaacggagcgcgtgcggcgttcgtcggcaacgttggcgtccatggagagcaccgcgggtccgaggaagaggcagaaggccgcctcggcctctggatccgtggccccgtacttgccccaggagctcgtacggaacatcctcctccgcctgccttccaggtccgtcctccgcttccgcgccgtttgcaaggactggctccggatcgtctccgaccgcgagttcgcggccgaccacaaccgccaccagccggcgatgcccctcgtctccttcctccgcagcgccgccggtagcaagagggggcagacggactgctgcgtcgacgcatttgacctcagcgccgacagtttccggtccgtcgtccggttcgccgacaaggggacgcggtgcagcagcttcgacatccacggctcctgcgacggtctcctccttctcagcttcgatgcccgcttctacgtttgcaacccggcaacgcaccagtggacgcgcctcccggcgcccctccgcgcctcgtggctcgccggcttctaccgccacgagcccaccggagagtaccgggccttgttctaccggggccagtggcccgggacggactactacatcatggtggcggactccaggaaagggaggggaattggcctgccgtcggagaaatatgggtacaagttcaggagacaaccgtatagcctgccggtcctgctccgcggccacctccactggatggcagccattgaaggctacgactacgagatgttggcgttcaacacgacgactgaaaagttcacggttatgtgccctcctgtggttcggtggcacatgtcgctagctgaggtgggcaacgagctcgcgttgttgagctgcggccaccaggtcccgatgctcgagctctggattctgaaggattacgagaacaagagctgggtctgcacgcactggattcggctgccggagttgaagatgagcaccttcgcgttcgatgacttctcgcgaatgattttcgtgtcagaaaagggagttctgatagccaccccggagcagaagctgttgcgctatgacctgaatgggactctgctggaaagcttcccttgcaataatggcagccatctcaagattactccgtacaccttcaaggagagcctcgttcggcatgcattctttgagacaccggattgcaatgccgatggtcatgaagatgaagatgaaccagaaccaccacctttcttcctggggctgtagacccggacccggtggtgatggatctcatgggaacccttggttggagttgatcagcggttcatgcttcagatcggtattacagcctcggtagatgaactgagagtaagctacatttttcttttgtctctcttttatacccatcattccatcaataatgtcactatgtttgtctccttgatgggatgcgggccatgcggcattgtgcaaactgactcccatctctcattagttcgatgttctgaaactatttctgttgcagttttgagtactcctgaacaattgttactgtaaatggctgagttcgtgcttcttgcaataatgcaataccatacatgaaaactgtcatct

SEQ ID NO: 155607 - DNA, 1766 bp, Zea Mays
ggcagggcgtgtcttccatcgctccccaaggccccagcccccaggtacccttcgctccccttcctcgtatgctgtgagcgtcgtggggtcgtggggaggaagacgatttcgagggagagaggcaaaggggagctcgcccgctccaggcacccattcctctcgaacccgacatctctcttgttgtttcgagaaacggagcgcgtgcggcgttcgtcggcaacgttggcgtccatggagagcaccgcgggtccgaggaagaggcagaaggccgcctcggcctctggatccgtggccccgtacttgccccaggagctcgtacggaacatcctcctccgcctgccttccaggtccgtcctccgcttccgcgccgtttgcaaggactggctccggatcgtctccgaccgcgagttcgcggccgaccacaaccgccaccagccggcgatgcccctcgtctccttcctccgcagcgccgccggtagcaagagggggcagacggactgctgcgtcgacgcatttgacctcagcgccgacagtttccggtccgtcgtccggttcgccgacaaggggacgcggtgcagcagcttcgacatccacggctcctgcgacggtctcctccttctcagcttcgatgcccgcttctacgtttgcaacccggcaacgcaccagtggacgcgcctcccggcgcccctccgcgcctcgtggctcgccggcttctaccgccacgagcccaccggagagtaccgggccttgttctaccggggccagtggcccgggacggactactacatcatggtggcggactccaggaaagggaggggaattggcctgccgtcggagaaatatgggtacaagttcaggagacaaccgtatagcctgccggtcctgctccgcggccacctccactggatggcagccattgaaggctacgactacgagatgttggcgttcaacacgacgactgaaaagttcacggttatgtgccctcctgtggttcggtggcacatgtcgctagctgaggtgggcaacgagctcgcgttgttgagctgcggccaccaggtcccgatgctcgagctctggattctgaaggattacgagaacaagagctgggtctgcacgcactggattcggctgccggagttgaagatgagcaccttcgcgttcgatgacttctcgcgaatgattttcgtgtcagaaaagggagttctgatagccaccccggagcagaagctgttgcgctatgacctgaatgggactctgctggaaagcttcccttgcaataatggcagccatctcaagattactccgtacaccttcaaggagagcctcgttcggcatgcattctttgagacaccggattgcaatgccgatggtcatgaagatgaagatgaaccagaaccaccacctttcttcctggggctgtagacccggacccggtggtgatggatctcatgggaacccttggttggagttgatcagcggttcatgcttcagatcggtattacagcctcggtagatgaactgagagtaagctacatttttcttttgtctctcttttatacccatcattccatcaataatgtcactatgtttgtctccttgatgggatgcgggccatgcggcattgtgcaaactgactcccatctctcattagttcgatgttctgaaactatttctgttgcagttttgagtactcctgaacaattgttactgtaaatggctgagttcgtgcttcttgcaataatgcaataccatacatgaaaactgtc

SEQ ID NO: 155608 - DNA, 411 bp, Zea Mays
gacacaagagtactacaggatactttaataacttatgcggacaggttccctcatccaccggaaggtaaatactatcttgtcgattcgggttatccaaatagaaaggggtaccttgcaccttataaggggcagaagtaccacattacggaatggcagaatacgaggcaacctattgggagtaaagaagtattcaactatgcgcactcatccctacgaaatgttattgagcgatcatttggggtgctaaaaatgaagtggagaattctattaagtctcccttcattttcgcttgagaaacaatcgaagataattattgcatgtatgacactgcataactttattagagatagtgctctacacgatagagattttgatgaagtaggacctaatagcctaagtcatgatctacct

SEQ ID NO: 155609 - DNA, 1070 bp, Zea Mays
ctctccattccgaactccaaacgaaccaattcgtgtccatcgaaggttccatgggatcaggcctctcaagcagccaccggaggagcagcgcgtcgcttcaccagccggcggcggccccggccccggccccggcgctggtcatcgcggccgacggctcgttgagggagttcgcgccggcgccactccccgcctccgtctccgacgcgctcgccggcgccaatgcggcggccgacggccggttcttcgtgtgcagctccgacgcgctctgcttcgactccgacgtcccggcgctcggcgccgacgagctgctccggccggggcagatatacttcgtcctccccgcggccatgctcggcaggccgctctcgagcgccggcatggccgcgctcgccgcgcgcgcgagcgaggcgctggcggcgggagcgggctggcgtgggcgccctcgcggccgccgcgggttcacgaaggcgcgcgtcgtgccggcgcaccaccgccacgcggacggcgaccgagaggtcaacgagaagctgaaccagaggactcttggcggcatcgagacggcttcacgtggtccggcgaccaacgccaggaagtccgctgtggcggcgcgaccggctccgcctctgaggagggcgctcagcaccattgaagaggatgccgagcgatcaaattggctttgaagcgcgcgtgttggacgcgaccgagtgatcacagagctgcgcgagggcatgtgccgtattgatgataactttggattgatttttttttgtgtgtgtataggatgttagagattttgtgctattcaaatagcttgaaaggatatggaaatttgttatttggttggtcgacgtttgtgtatttaaacaaatcacaaagattaaatgaaaattttagttgctgacttggttctttatcaattccctttgttacttctgagtgaagcccatttgtggttaattttgttaacgattgtatctaacaatgtccatttgtggttaatttttttaacgattgcatctaagcatgtttttcaataaaagagacgaaaaggactagttaagcaactcgtg

SEQ ID NO: 155610 - DNA, 821 bp, Zea Mays
tatatgtgtatattcatcccctagctcatcgatcgacgtgcgcggtttaatttccagctgggagggatgcagtgggacccgagcctgacgttcgccatacggccgaaacgcgggcagggatccggcgacgacggcggctccggctccgacgactcgttcagccccaagaagccacggaggatggccgggttcgacctcggccgcttcgagcggccgggcggcatccggtggtccgacgacgagggcagcaggtccaacaacgggctcatcacgccggggacaccgccgatcaaccggtgccggccgtccaggaggaagggcatcccccaccgcgccccgttctacggttagctcgctcgtctaagctcctccagcggttggagtgcaacacccagtcgtcgtcgtcgtcaacctttaaaataatacagtaaaactcttcagccagcacgagatgatgctgtgtgacactcatcaggtctgagcagtgaagtgatccaaaatctgctgctggtggtaggtcaccatatatagctaggtacatatgtttagagctatagcttgttacataatagatatatagttgtatacatgcatacatacactacacaaataatgtaggcgaaagatatatgtacatgccagtatattgacaagggttgtcagtatctgtatagacataatctcaaaaaaggagatagaaacgtaggtagggtttggatttcattattagcttggctagtagtagtagtggtcgagattgatatgtgaaaaggaacaagcatcatgtatttatctcagtttgtagtatttgcctgcttgcc

SEQ ID NO: 155611 - DNA, 968 bp, Zea Mays
cgtaccacaacgtgatccgggtgtcggaggtggggaagctgatcgacatctcccacgtgcagacgtacgtgatcaacagcgccaagatcgtgttcctcaacggccgcccgcaggccaggcccggcaagggcgtcaccaacacctgccagatctgctgccggagcctcccggactcctttccgcttctgctccctcggatgcaagctgggagggatgcagtgggacccgagcctgacgttcgccatacggccgaaacgcgggcagggatccggcgacgacggcggctccggctccgacgactcgttcagccccaagaagccacggaggatggccgggttcgacctcggccgcttcgagcggccgggcggcatccggtggtccgacgacgagggcagcaggtccaacaacgggctcatcacgccggggacaccgccgatcaaccggtgccggccgtccaggaggaagggcatcccccaccgcgccccgttctacggttagctcgctcgtctaagctcctccagcggttggagtgcaacacccagtcgtcgtcgtcgtcaacctttaaaataatacagtaaaactcttcagccagcacgagatgatgctgtgtgacactcatcaggtctgagcagtgaagtgatccaaaatctgctgctggtggtaggtcaccatatatagctaggtacatatgtttagagctatagcttgttacataatagatatatagttgtatacatgcatacatacactacacaaataatgtaggcgaaagatatatgtacatgccagtatattgacaagggttgtcagtatctgtatagacataatctcaaaaaaggagatagaaacgtaggtagggtttggatttcattattagcttggctagtagtagtagtggtcgagattgatatgtgaaaaggaacaagcatcatgtatttatctcagtttgtagtatttgcctgcttgcc

SEQ ID NO: 155612 - DNA, 215 bp, Zea Mays
gatcgaccgaggcggcgaatcatccgtccactcgctggcctcaccacctccccgtgcgcagccgtcgtcgtcctctcctcccttatcgatcgggttccggttccggccgctcaactcttctagtcttcttccttcctttccttcctttctcccccgtcccgctctggcctcctgcgtcctgctgccctgtgattgaagcaggcaacggccggctg

SEQ ID NO: 155613 - DNA, 2057 bp, Zea Mays
ccacacctcacactctccgacactcccgctccgcttcacccagtcccataccccagccgaccagcccggcgcgcggtggcactgtggcagcgctcacacggcaatgcggaaggacgctgccgccgccggcattgcgccgggttcggcgcccgcgtttctctgcttcgaccttaagcccttcctcgccgcgctcaccgtgctcacgctcctcgccgccgcctggcagctccggccttaccaatccctcctcgcttccccattctccgctgcgtgcccgcaacccaccgccggcgtctcgcttccccgcgcgctggccgtccacgccaagaaggcctcctccgccaccaactccaccgtttcgtcctcgccgtcgccgccgcccggccccgagcggcgggagttccacgccgtgggcagcgcggcggcgctgttcgtgcagatgggcgcgtaccgcgggggtccctacaccttcgcggtcgtggggctggcgtccaagcccacgcacgtctacggcaagccgtggttccgctgcgagtgggagcccagcgacgcctcgtcgccgccgatgcgcgcggccaagacgtaccacatgctcccggactggggctacggccgcgtctacaccgtggtggtcgtgaactgcacgttcccgcgcgtccccaacgccgacagcgcgggcggcaggctcgtcctgtacgcgcactacgggccgtcgcggtccccggcctcccgccgcgagcggatcgtggcgctggaggagagccccggcgcctacgacgaggccgcgttccggactacgccgccgcaccggtacgactacctctactgcgggtcctcgctgtacggcaacctgagcgcggcgcgggtgcgggagtggatggcgtaccacgcgcgcttcttcggcgcccgctcccacttcgtgttccacgacgccggcggcgtgggccccgccgtgcgcgccgcgctcgagccgtgggtgcgcgccggccgcgccacgctgcaggacgtgcgcgcgcaggccgagtacgatgggtggtaccacaaccagttcctcgtcgtcaacgactgcctgcaccggtaccggcacgcggccaagtggaccttcttcttcgacgtcgacgagtacatgttcctgcccgacggccgcgcgctcgaggatgtgctcgccgagcttgagccgtacacgcagttcaccatcgaacagaacccaatgtcgagcaagctgtgcgtcgatgatccggcggccgactattccaaccaatggggattcgagaagctggttttccggaactcgatcaccggggtgaggagggacaggaagtacgcgatccaggcgaagaacgcgtacgccacaggcgtccacatgtccgagaacgtgatcggcaacaccacgcacaagacggagcacctcatccggtactaccactaccacaacaccatcaacgtcctcggcgaggtgtgccgcgagttcgtctccgttccaccgaagaagggcggcggcctgacgtggtccgagaagacgccctggtactacgacggcagcatgaagcgcgtcgccggcgctgtgcgcgagttcgagagggagaccatcggcgacgtgcggctatgacggaccagcaggagtgctgctgatgtacagtttttgtggtatggctgtgagccattcaggaaggagctaggctgccttggcttactgcgttacctgttgggttcggagctatctgagctgacagagatgcagcgaaagcgaagctgctgcaaccttgtgtgccggtggtgttgtgttggcccgtgattctgatgtgatgatgatgagaggcaaagatgacgttcttgtaaaacatatatatgtctgcagtgtaaattccattgcatttttttgttgttgctgttgttgttttattgttcaaatatacacattgtattctgttcttggaagtttcagcaatgtagaaaccattcagaaccgtgttctgttttatggcttttattttgaacttggtcattttttgttggagccataagatggtcttgggataataaactgtatagaggtc

SEQ ID NO: 155614 - DNA, 1506 bp, Zea Mays
atgtgttttctgatggacccagtgttgggagagaagatttgttatgttcaatttccgcagagatttgatggcattgatcaacacgatagatattcaaaccacaatgttgtgttttttgatattaacatgaaaggtcttgatgggatccaaggaccaatatatgttgggactggttgtgttttcagaagacatgctttgtatggttatgatgccccaactgcaacaaaacctcctagcaagacatgtaactgctggccaaagtcatgctgcttgtgttgtggatcgaaaagaaaatgttccaaagctaagaaaaaacaagaacaccaaaagaaagtgaaatgcaggaatgcgtccaagcaagtgcatgctctcgaagtagctggaagagaaactgcacctcctgtgcctcgagaaaagtttgagaagagatttgggcagtcagatgcatttttggcttcaacattgcaagataatggtgaaggttgtcacttcgacatgctcaaaagccttgatgattgcatccatgtgctaagttgtgggtacgagaataagacacaatgggggaaagaggttggttggatttatggatctgtcactgaggatatcctcacgggcttcaagatgcactgccatggttggcgatctgtgtactgcatgcccaagagaccagcattcaaaggatctgcacctatcaatctcactgatcgtctccatcaagttctaagatgggcacttggctctgtggagatcttccttagcaagcactgcccaatatggtacgggtatcgatgtggtctgaaaccattggagaggttgtcatatatcaactgtgtcatctatccatggacatcaatcccgctgctaatctactgcgccctgccagcgttttgcctgttatcagggaagtttatggtgcctgagatgaatgtctattcgagcatattgttcatagctctatttgtctccatagcagctaccagcatcctagagatgcagtggggaggagtcggaatcgacgattggtggagaaacgagcagttctgggtcattggcggtgtctcctcgcacctctttgcgctgtgccaggggctcctcaaggttctcggtggcgtgagtaccaagttcagggtgactctgaagggaggcggcacggacgagttctcagagctgtacgagttcaagtggacctggctactggtccctccgatgacactgctcctgctaaacgtcgtcgcggtcttggccggcgtgtccaaggcggtgacggacgggtacgaagcctggggcccgctgctcggcaagctgttcttctccttctgggtcgtcctccacctccacccgttcctcaagggcgtgatcggcaggcaggacagggtgccgaccgttgtcgttgtgctgtcaatgctactggcatccatactctctctgttgtgggtccgggtgagccccttcgccaccaagttcgatggacctgttctggaggtctgtggcttggattgtgagtga

SEQ ID NO: 155615 - DNA, 1347 bp, Zea Mays
atggacgctggagggctcggcttcctcgtcgcgggctcccggcgcgagttcgtcgtcctcaacgtcgacgatttctccaagcaaggatcttcacagggctgtccagactatatttgtcagatatgtggagatgacattgacatactccaggaagaaaatgagtatttcgtcgcatgtaatgattgtgcttttcctgtttgccgcacttgctatgagtacgagcgtcaggagggcacacaagtatgccctcggtgcaagacccggtacaaacgccacaaaggtagtcctcgagtccatggggatgaggaagaagaaggttctgatgacattgagagtgagtttgcttccagtatagctggacgatcaaatatagtgcatccataccgtgtctctgtggcagaaagctccatcaactcatgggacattgatagtgtcagtatcaccaacagtggagctagtgtccatttttatgaagagcatgttggaactccaacaaatcatcatgctcttgttgttcaccctaacaccggagaaattatgcgatataatcccttgcaaacaagaccaataaatcccaatagagacctagcattgtatggctatggatcagttgcctggaagaacagagttgagtggaaaacaaaacaacagaataaaatgcaaaaggtctcatctgatggtgaaggatctgatttaaatgattttgacagcgactgcgatattcccaggtgtgctgaaattatttgtgaaatttggttcgccttttcatggattttagaccaatttcccaagtggcacccaatacagagagaaacatacttagatcgattatcattaaggtacgagaaggaaggaaaaccaccagaacttgctcggatcgatgtatttgtcagtacagttgatccaatgaaggagcctcctttaattattgcaaacacagttttgtccatactggctgtggattatcctgttgataaagtttgctgctatgtgtcggatgatggtgctgcaatgcttacttttgaagcacttacagaaacatgtctatttgcacgaaaatgggttcccttctgtaagaaacacaaaatcgagcctcgggctcctgaatggtattttgctcagaaaattgactatctaagagaaaaggttcacccagagtttgttcgagaacgacgtgcaatgaagagagaatacgaagaatttaaggttcgcataaacacagtagttgctaattcatgcaaagttcccgagggaggatggtccctaccagaaggagctccatggcatggaaataatgttcgagaccatgccggaatggtccaggttgggtgctttatttgtctctaa

SEQ ID NO: 155616 - DNA, 951 bp, Zea Mays
atggacgctggagggctcggcttcctcgtcgcgggctcccggcgcgagttcgtcgtcctcaacgtcgacgatttctccaagcaaggatcttcacagggctgtccagactatatttgtcagatatgtggagatgacattgacatactccaggaagaaaatgagtatttcgtcgcatgtaatgattgtgcttttcctgtttgccgcacttgctatgagtacgagcgtcaggagggcacacaagtatgccctcggtgcaagacccggtacaaacgccacaaaggtagtcctcgagtccatggggatgaggaagaagaaggttctgatgacattgagagtgagtttgcttccagtatagctggacgatcaaatatagtgcatccataccgtgtctctgtggcagaaagctccatcaactcatgggacattgatagtgtcagtatcaccaacagtggagctagtgtccatttttatgaagagcatgttggaactccaacaaatcatcatgctcttgttgttcaccctaacaccggagaaattatgcgatataatcccttgcaaacaagaccaataaatcccaatagagacctagcattgtatggctatggatcagttgcctggaagaacagagttgagtggaaaacaaaacaacagaataaaatgcaaaaggtctcatctgatggtgaaggatctgatttaaatgattttgacagcgactgcgatattcccagaccaatttcccaagtggcacccaatacagagagaaacatacttagatcgattatcattaagagagaatacgaagaatttaaggttcgcataaacacagtagttgctaattcatgcaaagttcccgagggaggatggtccctaccagaaggagctccatggcatggaaataatgttcgagaccatgccggaatggtccaggttgggtgctttatttgtctctaa

SEQ ID NO: 155617 - DNA, 1263 bp, Zea Mays
cccgcccctgttgctccctatcctattcttatagtctagaactctagatccacaaagaaggggaggcaacaaggcaggaagctttggagctgtaggaacactgtagatccagcagcagccagtggcagatttggaaggagaggagggtacgtgcatggccagcagcaagtggtgggagcaggcggcactggacttcccgccgccgcagcagcaccatcaccagcagccgcagccgcagcagcagccgcaccaggcggtgcccatgccaccggcgctagcaacggcgccagccggggccgtgggggcctcgccggagggcaagcagcagggccagcagcaggcgggcgccatcgtgccgctgcggaggccgcgggggcggccgcttgggtccaagaacaagccgaagccgccggtgatcatcacgcgggacagccccgacgcgctgcactcgcacgtcctcgaggtgtcgccgggcgccgacgtgtgcgcgtgcgtggcggagtacgcgcgccgccggggccgcggcgtctgcgtcctgggcgcgtcgggcgcggtcggggacgtggccgtgcgcggcgccgcggcgccgctccgcggccggttcgagctcctctccgtgacgggcaccgtgctgccgcccccggccccgcccgaggcgtccggcctcgccgtgctggtctccgccggccagggccaggtcctcggcggcagcgtcgtggggcccctcgtcgccgccgggcccgtcacgatcttcgccgcgacgttcgccaacgcggtctacgagcgcctcccgctcgccgatgcccccgagctcgaggtcaagcccgacctctccaccgccacctcggctggtgggcaagatgtgcagccgcagctcccaatggcgccctcccaccagcaacctccggacatgggcgcgggctacgctggccaccgctcgcctccgtacccgtggggaggcgacgtatgagcagccccggcggtcttggttttcttggtcctaacattgactagagaactaggttttgtcaaggtaattgttgttgggctggtggtactgcatgcagcatacatggaattgattcattggagcccttcttgggctcctgtaatttccttctccttggatttgtggtttttgttgcgggaaatggactggttttggccacagggagccaaagaatatggagcattagatcggcatggtgcttgcaaattactctagcaaatacagcaggttcggcgctggagccaagtgttttt

SEQ ID NO: 155618 - DNA, 1278 bp, Zea Mays
atgcccgggcccgcccccgtcgcggcgccgccactcaccatcttctatggtggcatggtggtggtgttcgaggacttcccggtggagaaggcagccgagcggttcctggccaagcgcaaggaccggctcatcgagccctacgcccgcccgtcgtcccccacggaggagccggagaagaagacggtgggccccatcttcgagcgtctatctcctgctgcagctcgcccacagaaccgctcccgccgcccactcccaagattttcgccgtgctcgctacctagtctgccccgccgtcttcccccagatcgtgcgagacctgggtccacccaatcgccgctcgcccgctcctcccccacaacctccaagcccagatgccacaaggaagggggagggatgcggatggggacgatctacgtcgtcgcggcactggcgctcgacgtggctagcgacgtggtggtggactgcaaggacaacctcatcaccgcaaaagggtcacctctggcacttcgacatcgacatcgcctcgaccatagtggagagggcgggatcagttccgtagacagctcccatgtcttcgaagtcccagatctgtcctgtgtcgcatgggcagtacgcggctatgggcctggtggtgtgcgccgccttggggagcggctggacgacggggtcgggaatggaggggccaccgacggcgagcagagtcggcgggacaggcagacgggaggtgttgacactaccttggtccctcttcacaaaatcaccacagtggcacatgcgggtggtgttgacactaccttggtccctcttgacgaaatcaccacggtggcacatgcgggtggccttcgcctgcagcgtgtgcggggtgttcagaagcacgaagaggtcagtaaagtcaaggatgacagtgttctcagcagcagttggccacgtgctcctagccgcacgctgccgccgctctctgcttggagctctcctctcccgaccatagctacaccacacgactgtgagctcgtgaagggattcgatgagtacatgaacttggtcctcgatgatgctgaggaaatcaacgtcaagaaaaacactaggaagacactgggccgaatactcctcaaaggtgacaacataactttgatgatgaacagtggcaagtgaaggttcttatggcaggaacgatgtttggtgctcgcgttgagtatttctggcacgttgtactccatccattcagacttacatgtatcatgtcattgtggattagtgagggagttgtacctgctgtta

SEQ ID NO: 155619 - DNA, 322 bp, Zea Mays
aggaccgcctggtcgtgtgctcgtcgggattacagagagggcagagagagagtagagctcgcgggagtcgcgttcttcgccaccaggccgccgctttggggacttcttcaacaacgccatgtgggctcgggaatcaggccggtgaccttcgcggggtcgccgtggattcgtctggtaccgcgacgggtgtgtccgagagctggggcaccgcgaatcgctcgccggacgtctggcgccctcaccaaatcaccgtgcgccgtgggcagaggcctgggctgcgcgattcacgaagatcaacacagagaggacacggtgatttatc

SEQ ID NO: 155620 - DNA, 3546 bp, Zea Mays
atgacgtcaagggaggcgaggcaaagcccgaggaagacggtggggaatccacgcagcacggaacacagggatggtgacactcggcgtgggcgagggatccggcgccgagcgaggcgcatccgccatgaaggaccacgcagtggagggaaggagcaacgagttgtaggcgacacgctggtcatagaggaaggaggcggttgtccaaggagtggtgctgcaggagagggtgggggctgcgctgccacgggcgagggcgggaggtacgtcgtcgtagtagagggcaggggaaagtgccacaccgctgttggtgaaggggagcacggggggaggagcggcgtcactattggtgatggtggtggccgcggccacgccgtggaagggagaaaggcagaagagaaaagggacattcttgttccacaaattccagtctcaggcgtcgccgacgataaacggccggtggttccgtcaatcgctaccataggtcgccggcgagctatcccggtgccgccccagcctactcgatctgggctgcggcctggaactcgttcctatcaacgggaacacccatatcaactggtatcggattcaggcggttctggtgcatcccttcccatggcttccgctgaggatcgcgtggggcatctggaggcatcggtcgcgcaactggcggttgctgtgcaggacatccagtccaacatagcagagctcgccaaggttgtcgccgactcagtgcagctgacgggtggcgaggcgtcgggggtggacggccggcaccgtcctcaacagcagggacgccgggacggacgagacgccgacgcgatgggcggtgagtgtggcggtcatcgcgggtttccacacgcgccccgttacgacttgtcgctgttcgatgagtcggaggacccattgctgtggctgcgtcagtgcgagcggtatgggcggctgcatgacattccaagggaggagtgggtgcagatggccggcatgcatctgcgcggcgaggctcaggaggttttggacaattgggaaactgaggatcaattcatttcttggccggagttctatgacaccttcttgcagcgcttcacacggcattcaacctcgggaccgctgggagatctggccaatttgaaacagcacaacagccgagcagacgtatatgcaagggagtttcagcgacttcttgcccgcacaccaaggttgtctcggcaggatcagatcgagctctttaccgcggggttatcgtccaccctcgcggccgaggtccatcgggatcgcccccgagacttggctgacgccatgggtttggctcgtgaagcagaacggcgggaagatctctttcttgccaaggtggcccaggccacgcggtcacgcgggtctcgtagcacatcttgggcatcgggcaccgatccatcggcaagtaatcgggcgacagcgcagtcatccagtgccctcccggtggcgcctgggggatccaagctagaagggggtcgagtgttgacgacggcttcacagacttcagggactattcccactgctccaccatatcgtcgtcgtctcagtcctgcagaaatgtctgaccgaagggagaagggtctctgttataactgtgatgaggtttactcgcgtggacatcgttgtcagcgcctgttccatttggaagtgctcagcgagggtgaagaggatgattcactggaggaggaaccaaccctatctgctatagccatgaagggtctgaaggccagtcgcactatgcaggtcattgtagtcatgggtggacaacgtctggtgggcttagtggatagtggtagcacccataactttattagtagccatgctgcttctgtggtgcagatcacacaatcgtcagggactggacagcaggtgcaggtagccaatggcgctcggttgccatgtcttgggcggttgaaagatgtccagttctgcattcaaactcacatcttctcagactcctttttggtgattcccttggaaggttttgatgttgttttgggggtgcagtggctgcagaaattgggtgatatcaactggaattttgattccctccaaatggccttctctttggatgggggccacgtgagtttgcagggcatcacacctcatgggcggccagtacatctgaacagtcttgtagtgggtagagaccctcggttgcaggagatcttgactgcatttgatgatctgtttcaagaaccgcagggcctgccaccctctcgtcagtgtgatcatcgcatctgtttgaaggaagggtctgacccagtggtggtaaggccgtatcgctatccccaccgccagaaggatgaaattgagtgtcagtgcaccgacatgttggcacaaggtattattcagcccagtcgttctccattctcttcacctgtgcttctagttcgcaaggcagatggttcttggcggttttgtgtggattatcgtgaactgaatgccacaactatcaaagacaaattcccaattccggcagtggaagaactgcttgacgagttgcatggggctatatttttcaccaaacttgatttaagatcgggctatcatcaagtccgtatgcatgctgcagatgtggagaagacggcattccgcactcaccatgggcattttgaatttctggttatggcatttggcttgtgtaatgccccttctacctttcaggccttaatgaatgaggtgctctctaagttccttcgcaaattcgtgttggttttcttcgatgatattcttgtatacagcccctcctgggaggatcatctgcaacatctttcttcagttttggctcaactccgtcatcatcaattatatctgaaacagtccaagtgtgcttttgctcaagcaacagtgggttatctgggacatgtcatttcagcaaaaggtgtggaagctgacccaaacaagattcaggatgtggagcgatggcctattcccatgtcagtggcagatatacggagtttcttgggtttagcggggtattaccggcgcttcattcatcattatgcatcgatcgcagaacctctcactactcttcttcgccgtcaacaattccactggtctgatgaggcggcagcagccttccagcgcctgaagcatgctctccaaactgctccagtcctccgtcttccagacttcaatattctttttgtggttgaatgtgacgcctctagtacggggattggagcagtgctacaacaagaagggcatccagtggcttattacagccgtaaactagcagatcgacatgtgaagcttgcagcttatgaaagggaattaattgggttatcgaaggctattcgtcattggcggccatatttgtgggggcgcccctttgttgttcgcactgatcatgcaagtctgaaatttttacttgatcaagctttggtgactccgccgcaacaacactggctcaacaagttaatggggtttgatttctcggtggaatacaaaccaggacgggctaatgtggtcgcggatgcgctgtctcgcatccatgacccactgggcacatgtgccgctatttcatcccct

SEQ ID NO: 155621 - DNA, 1248 bp, Zea Mays
cttgtcttcttgctcccggccggtgaactggcgcgtgcgtgcgtgcggcgtgccgacatgtggataacgtgcgtggcgtggcgcgcaggcgacgccaagaacgcgcacctggcggcgatggacggcgccgcggaccggctgcgcctgttcagggccgaattgctcgactacggcagcgtggcggcggccatcgccggctgcgacggcgtcttccacgtcgcgtccccagtccccatgacctatccaatcggtgaccccgaggcaccacacctcagctcccgctgctgccctcttaatttcttccttcggcttcgccatgcgtccgttcagacgttcagtctttattggccgacaccaacatcttgctgcaggtagagctgctcgctccggccgtgacgggcaccaagaacgtcctgaaggcgtgctcggaggccaaggtgaagagggtcgtcgtggtgtcgtcggtggccgccgtgatggtgaaccctggctggccccagaacgaggccatggacgaggcttgttggtccgacgtcgaattctgcagaaccactcaggtcagaactggtactgtctctccaagacactcgcggagctggaagcgcttgattacgcaaagaggagtggactagacgtggtgtccgtctgcccgtcgctggtgatcgggcccttgctgcagtcgacggtgaacgcaagcagctccgtcatagtcgattgcttgaaaggagatcgtgaggtgaagctgaagctgaggaacttcgtggacgtccgcgacgtcgccgacgctctgctcctggtgtacgagactccggaggcgtctggacggtacatctgcgacgcaaatgcaaggcagatgtctgaggtcgtagcgctgctcaaggactggtaccctgcctacagtcatgctgccaccaagttcgtgcaggtgagcgatgagcctttgttcagctccaagaagctgcaggcgctgggctggaaattccggactctggaggagagcctcagggacagcgttgaatccttcaaggcggcaggtgtcctggtggattgaacagaacaggcagcgccctattcctggatgaccttcgcattttgtaaaccgaagttgctgtcttgtgcaagagcatcccgacgtcctcggataatgtaataaaaaaagcaaaagcgacaaagtttgccgtgtattatagcggcattgttacttaacgctgttttattttgtggaaatacttaacggtgttttagttt

SEQ ID NO: 155622 - DNA, 1477 bp, Zea Mays
gctatatctgttcaggaatcaggacgtcgctagcaacaagttgtcaactacccaaatctgcacgaggtcaataggagtatctcaaatcggctaacaagtaataatcctctcgatacccgaatcggtgaaggaaaacaagacgagtccgtcggtcgtgatcggtaccaatggaaggcgcagcggggatcaggacgaggccggcggtgtgcgtgaccggcgcgggcggcttcgtggcctcgtggctcgtcgagcgcctcctcgccggcggccgatacatggtccatggcaccgtccgtgatccgggcgacgccaagaacgcgcacctggcggcgatggacggcgccgcggaccggctgcgcctgttcagggccgaattgctcgactacggcagcgtggcggcggccatcgccggctgcgacggcgtcttccacgtcgcgtccccagtccccatgacctatccaatcggtgaccccgaggtagagctgctcgctccggccgtgacgggcaccaagaacgtcctgaaggcgtgctcggaggccaaggtgaagagggtcgtcgtggtgtcgtcggtggccgccgtgatggtgaaccctggctggccccagaacgaggccatggacgaggcttgttggtccgacgtcgaattctgcagaaccactcagaactggtactgtctctccaagacactcgcggagctggaagcgcttgattacgcaaagaggagtggactagacgtggtgtccgtctgcccgtcgctggtgatcgggcccttgctgcagtcgacggtgaacgcaagcagctccgtcatagtcgattgcttgaaaggagatcgtgaggtgaagctgaagctgaggaacttcgtggacgtccgcgacgtcgccgacgctctgctcctggtgtacgagactccggaggcgtctggacggtacatctgcgacgcaaatgcaaggcagatgtctgaggtcgtagcgctgctcaaggactggtaccctgcctacagtcatgctgccaccaagtaagcagaaacatactgcagaagctatatgcttgtgttgtgttagtcaagctatcagtgcttgatgaatcgcaagctgctagtgcatagtaggttgcattgtgatcaagggcaaagtgcatggcacaggttcgtgcaggtgagcgatgagcctttgttcagctccaagaagctgcaggcgctgggctggaaattccggactctggaggagagcctcagggacagcgttgaatccttcaaggcggcaggtgtcctggtggattgaacagaacaggcagcgccctattcctggatgaccttcgcattttgtaaaccgaagttgctgtcttgtgcaagagcatcccgacgtcctcggataatgtaataaaaaaagcaaaagcgacaaagtttgccgtgtattatagcggcattgttacttaacgctgttttattttgtggaaatacttaacggtgttttagttt

SEQ ID NO: 155623 - DNA, 620 bp, Zea Mays
caggactggtattgcctttccaagacactggcagagatggaggcatttgactacgccaagagaaccggagtggacgtggtttcagtttgtccatccctagtgatcgggccaatgctgcaactgacagtgaacgcgagcagttcggtcgtggttgacttcctcaaaggagaccgtttggtgaaaatgaaactcagacacttcgtggatgttcgcgacgtcgccgatgctcttctcctggtgtatgagaccccggaggcatctgggaggtatatctgcaattcgcacgcgaggctggtgtctgatgtcataaggctactcaggagctggtacccgacctatcaatgtgccaccaagttcgtgcaagtgagccacgagcccgcgttcagttccaacaagttgcaggcgcttggctggaaattcaggccgtttgaggagaccctcagggacagcgttgaatccttcaaggctgcaggcgtcatccactgaggaaacaccactgccgtgagcatttgaaaaatccaagccattgcctcgtgcagtacaccagtcttgatcgataattgggatgagtaatgtgtaatcatcaaaaggggatcaatgtttgttcgtgtcatagactg

SEQ ID NO: 155624 - DNA, 5398 bp, Zea Mays
atgtcgtcgtcggagcccgatgccgagggcgccctcggcggcgcctccccatccgcccgcgtgctcgcccgcgccctcgacaagatcatcaagcactcctcctggcgcaggcacgccgctctcgtcgccgcctcccaagtcagcgctcgatctcctctcctcctccccagctcctgatgacgagcccgagacctcctcgccctcccccgtccccggcctcccagcgcccgccgcggaagccgccctcaccgcacttctcctcgcgctcgacccggcgtccccgaaggtagccgagcccgcgctcgagtgcgtcgccggcctcctctccctgcgccttctcctcggcgacgtcgacgcggctgacccctccctgatctcgaaactcttcgccgcggtgctctcctgcgtctcgctgggtggcagcggggacgaagcgctcgagctgtccgtgctgcgcgttctcgtcgctttcgcgcggtgcccgggagtctccgtcagcggggagtgcctgggccaggtggtcaaggcgtgctacaacgtctacctcgggagccccagcggcggcaaccagctctgtgctaaactagctctcgcacaagtgctggtcatcgtgtttgcgcgcgtcgaggctgacgccatggacgtccgcgtgcgcactgtctccgctgccgacatgatggacctctctgaccgcagcctcaatgactccagcgttgtacaggcggcacaagtgttcataaacgaggccatggaggggagcgacgtgccggaggaggcaccacatgtagatgaggcgtcagttgaggcggaaggcgctggggaggatggtggaataagcaagataagggaggatggcctggctttgttcaagaacctatgcaagttgtcaatgaagtttggtacgcctgatagcccggatgatccaatgctattgagggggaaggtgttatcgctggagctggttaggatggtcattgacaatgcagggctattctggaagacaaatgaaaagtatcttgaagcagttaagcagtacctttgtttatccttgttgaagaatagtgctttgtccgcaatgagtgtcttccagttattgtgttccatatttatgagtctaatatcaaggtttagatctggtttgaaagaggaaattggaatgttttttcctatgcttatcttaagagttcttgaaaatgttctccagcctagttttttgcagaagatgacagttctaaacttcttggagaaaatgtctaaagaacctcaggttatcattgatatctttgtgaacttcgattgtgatgttgatgcaccgaatatttttgaaaggattgtcaatggacttttaaagactgctttaggtgtccctactggatctacaacaacattaactgttgcacaagaccaaacatttaggcttgagtctgtcaagtgccttgcaattgttgttaagtcgatgagtgcatggatggaccaacaactgagaattggtgaattttcaccaggcaattctgaaactctaagttcagctgataaccataatattcataatggagaagaatggagcggaatagattatgaactgcagtttgacactagtagttctgacataaccgactcttcctcacttgagcagcgacgtgcttacaagatggagcttcagaaaggaattaccttgttcaacaaaaaaccttccaaaggtattgattttctcattcggagcaagaaaataggcaattctccagaaggtgtggcatctttcttgagaagtactgctggattgaatgcaacaatgataggcgactatttgggtgagagggatgactttcccctcaaagtaatgcatgcttatgtggacgctttaaacttcgaaggcatggactttggtcaggcaattaggttcttcttgcaaggtttcaggttaccaggagaagctcaaaaaattgaccggatcatggaaaagtttgctcaaggctactgtaaatgcaatccaaatgcttttattagtgcagatacagcatatgttcttgcatattctgtgatcttgctaaacactgatgctcataatccaatggtgaagaacaagatgtctaaggcagattttatgcgcaacaatcgaggaatagatgatgggaaggatttgccagaagattatctgagtgcgctgtatgaccagattgtcaacaatgaaatcaagatgagtgctgattcttcagttgcacaaaccaagcaatccaatagtgtagggaggcttctaggcttggacaacattatcaactttgtcaattggagaccagcagaagacaaggcagtaggagcaaatgacttgctcattaagcacatacaggaaaaaatcaaagcaaaacgtgggaaatcagagtccacgttttatgttgttgctgatgcaaccattttaaggttcatgatggagtcctgttgggcacctatgatggctgcattcagtgtgcttcttgatcagtgtgatgataaggctgctacatcacagtgtttaaagggattaagattttctgtgcacatcacttctgttatgtgcatgcagacacagagggatgctttcttaacgtccatagccaaattcacatctctccattctgccgcagaaatgaagcaaaaaagtattgattctatgaaggctataatatctatcgcaatcgaagatggcaattacttgcaggaagcttgggagcatgtattaacatgtttatcacggtttgagcatttacatctgcttggagaaggggttcccactgatgcatcctttctgacagttcctctgattgagtcagaagaaaaaactaagaagtctacttctgttctatcttctaagaagactagtgctcttcagaatcctgctgtgatggctgctgttagagggggtacttacgatagcacagtggcaaaaggcagtgtgtcagcactggtcactcctgaacagatcaataatttcctatcaagcattaatttgttggatcagattggcattgttgagttaaatcatatctttgcccatagccaaagattaaacagtgatgctattgttgcttttgtgaaggctctttgcaaggtctcaatgactgagctgcagtctccaacagatcctcgtatcttctgccttactaaaatagtagagattgcgcattacaatatgaatcgcatacgtctggtgtggtcacgtatttggaaggttttgtcagatttttttgtgtctgttgggttgttggaaaatctttctgtcgctatatttgtgatggactctctgaggcagctggccatgaagtttcttgaaagggaggaactggcaaactataactttcaaaatgagttccttagaccttttgtgatcgttatgcagaggagcaatgctccagaggtacgagagctgattgttaggtgcgtctcacagatggttctgagtcgggttaataatataaagtctggttggaagggtgtttttatggtttttacttttgctgcagctgatgatacaagaagtactgtcctattggcatttgagacggtggaaaaaattgttcgagattattttcatcacataactgaaacagagacaacggcatttactgattgtgtgacttgtcttattgcatttacaagtagtcaatttaacagcgatgccaatctcaatgctattgcgtttctgcgattctgtgctgttaaacttgctgaggaaggattttcttgtcaagatagggcttttgaacaacccaggaattcagccatggtgtgtggtggaaatgccactgtgcaaaaagatggtcatatttccctctggatgcctctccttgcaggtttagctaaactgacaagtgattcaagactgaatatcaagaaaggtgctgtaggagtactttttgacattttaaaggatcacggacacctgttctcgctgacgttttggaccgatatctttgaacatgttgtttatcctctatttagcaatgaaaggtcgacacccagtgaccagatttcaacatcaaattctgcagagtataatttacctgatcttgaaacacaaacgttggcagtgaaatgcttggtgggtttgtttgttaatttctttgatgtgatccggccagaacttggtagaacagcatcaattgttacatctttcatcagaagcccctacaaacattgtgctaccattggtgtatctgcaatcatgcgtttagcagatggggttggtaacaaactttccaaagaggaatggaaagagatattgatcttctttagagaatcagtgacgcataccttcatcacgttttctaaaattgtaaggatgatgcaagatattgatatcccagatagaattgattcttattccgaaaccgagcaatatttggatcatgagatgtatgttaacgatgaagaggaagcgaatatggagacagcttcttatgctattgtcaaactgaagaatcatatggctctactgctcatggtgattcagaacattatcaaactatacgaggagcacagcaaatatcttcatgccgagcatattagcattcttttggagatgatgtcagctattgcgatacattcaagtgaagtgagctctgagttatccttgcagtcgaaatttcataaagcatgttcccttttggaggtatctgagccagcaattgttcattttgagaacgattcctaccagagttacctcaaacttcttcaagctctgcaacatgattatccatccttgtcagaagagatgaacatagagtctcaagtgcttgatacctgtgagcaaatattgcaaacatatctgaagtgcgcaggacacaaaccatgtgatggggcgtcccaaagaaatccgcctttacattgtgcagtgccgctgagcgcttctaagaaagaggaattggctgctaggactcctctggtccttcaagtgatgaaattgttgggtgatctggagagagattcctttaggagaatattaccctgctttttcccattattggctgatctgatccgctgtgaacatagctctggagaagttcaacatgcactgtacaatatcttccaatcagccattctccccatgataagggtttaataacagattgtgacccaccaattgtacagtttttgttaccccactttggtgttgtaattcagttcattgtggcgtcattccattacgaggggttgtatacctatgaggttggcacctcagccctaactgattatacctttgcaataccatatacaaggtgaaatgtatcggtagttctaggcgttctcttactgtgttgtaacgcccgaatgtaattgagccggttgtgttgtcttgcaggatgacgtataaaaatgctgcagggtctgtcattcagcttaaggactatggagcatcttttta

SEQ ID NO: 155625 - DNA, 113 bp, Zea Mays
ttaccaggaacttctacaaggtatattagcatgtttcaaacacttcttgtaattataaacactatacaacaacatggatgcaacaaccaaaatacttctagggctcacgccaa

SEQ ID NO: 155626 - DNA, 1336 bp, Zea Mays
gagctggcagaacccgcctctcctattggccaggccacggcaccacccactaaactgccactctgccaggaacgaggaagcttccttcctgtccttcctcgcgaagcaagacacagataagagagtccactataaagcaacacagctgcgatcatagcgacaaaatatctcgccgttcccatggacatcgacctcttccccgacatcgaccttgacgccctcctcgcctccttctccggcgaccccgccgccgtctccggcctcatcatcccgtccccgcctccgccggcgccggcgacggcgcacgatgcggaggcggggtcgccggagtcggtgacctcccggacgaacccgctcggggaggtggcgctctcggagatcgagaggctcctgatgcaggagggggaggcggaactgggcggggaggtcgatgggatcagcgtggaccagttcttcgacgcgctgtacgacggcgaggaggcgaaaggtgagcgggaggcgggggcaagcgcggatgtggactccggcagggacgatgtgctggaagtcgtgacgccagaggcggggacggtggaggtggatggcgatgatcccatcagcaagaagaagatgaggcaaatgaggaacagagattccgccatgaaatccagggagaggaagaagtcgtacataaaggacttggagacaaagagcaagcacttggaggcagagtgccgtcgcctcagctacgcacttcagtgctacgcagctgaaaacatggcactgcgccagagcttgctgaaggataggcctcttggtgctcccacagccacgcaggagtctgccgtactcacggaaaccctgccgctggtttccctgctttggctggtgagcatcgtctgcctgttcctgatgcccgttctgcccaaccgaagcccagctgctccaagcagcggcggaagagacctcgtgatggcagccggaaagacaagcagtgagaccccagagatactggaactcatcctccatggaaggcgttgcaagagcacgagggcgaagattaagctatgtattttaccatttcatgcaggagctgcttgctagtagttgctaggctttgagcctcttgcaagcttacctctatatgtagtgtacccgcaaatcttaccgtgctcgctatgcgcctgtcttgcagagaagcctgtcgatatccatggagtagtaccttttttttgtttaatagctcctgtgctacccagaatatgtttaaaatctggattttgtgttattttctatttcttcaccttatctctagttgctcctgatataaagttccttcgctcgaaaaatcttagga

SEQ ID NO: 155627 - DNA, 1059 bp, Zea Mays
aaaatatctcgccgttcccatggacatcgacctcttccccgacatcgaccttgacgccctcctcgcctccttctccggcgaccccgctcggggaggtggcgctctcggagatcgagaggctcctgatgcaggagggggaggcggaactgggcggggaggtcgatgggatcagcgtggaccagttcttcgacgcgctgtacgacggcgaggaggcgaaaggtgagcgggaggcgggggcaagcgcggatgtggactccggcagggacgatgtgctggaagtcgtgacgccagaggcggggacggtggaggtggatggcgatgatcccatcagcaagaagaagatgaggcaaatgaggaacagagattccgccatgaaatccagggagaggaagaagtcgtacataaaggacttggagacaaagagcaagcacttggaggcagagtgccgtcgcctcagctacgcacttcagtgctacgcagctgaaaacatggcactgcgccagagcttgctgaaggataggcctcttggtgctcccacagccacgcaggagtctgccgtactcacggaaaccctgccgctggtttccctgctttggctggtgagcatcgtctgcctgttcctgatgcccgttctgcccaaccgaagcccagctgctccaagcagcggcggaagagacctcgtgatggcagccggaaagacaagcagtgagaccccagagatactggaactcatcctccatggaaggcgttgcaagagcacgagggcgaagattaagctatgtattttaccatttcatgcaggagctgcttgctagtagttgctaggctttgagcctcttgcaagcttacctctatatgtagtgtacccgcaaatcttaccgtgctcgctatgcgcctgtcttgcagagaagcctgtcgatatccatggagtagtaccttttttttgtttaatagctcctgtgctacccagaatatgtttaaaatctggattttgtgttattttctatttcttcaccttatctctagttgctcctgatataaagttccttcgctcgaaaa

SEQ ID NO: 155628 - DNA, 835 bp, Zea Mays
aagacacagataagagagtccactataaagcaacacagctgcgatcatagcgacaaaatatctcgccgttcccatggacatcgacctcttccccgacatcgaccttgacgccctcctcgcctccttctccggcgaccccgccgccgtctccggcctcatcatcccgtccccgcctccgccggcgccggcgacggcgcacgatgcggaggcggggtcgccggagtcggtgacctcccggacgaacccgctcggggaggtggcgctctcggagatcgagaggctcctgatgcaggagggggaggcggaactgggcggggaggtcgatgggatcagcgtggaccagttcttcgacgcgctgtacgacggcgaggaggcgaaaggtgagcgggaggcgggggcaagcgcggatgtggactccggcagggacgatgtgctggaagtcgtgacgccagaggcggggacggtggaggtggatggcgatgatcccatcagcaagaagaagatgaggtacgttgttagcgcagttgcgctggacatacgaaggttctttcctcttcgcttgagaaattgatcgaggggagttgtgtcctcatgcttgctagtgaaatttaggagctactacctggcagttagggatgggacagaccctaggtttgggtgggtttttggagatgggaatacttaaaactccttggtatttgtgttgttgtgaactctaccgaatggaagaaatatctgcgagtgaataactgctatatacatgcacaaatgcttactttggtttcaaactgctacgtcgaaatttggtcagcggacgggaggaatctgattcatg

SEQ ID NO: 155629 - DNA, 2014 bp, Zea Mays
gttcaaaaccattctccactgttgctcctgtcctgttcctccgcttcctctgtctctgtctcgtcgtctcccccatctggccatctccggctagggtttgccctcccaccacgtccgaggtctagctcgtctccgccactgccggaccaaggatgtcgcaagagcaaggtatggaggagccgccgccgcaggcggtaggcgaggcacaatcggccgccgatgtccccatgagcgaggccgcagcggtggaggatgaggatgaggaacccgtcatgggggaggggcagggcggtgaaagcgggaccgccgatgccgttgattccgtcaaggcttcagtgaagcccgaagcagagggcgcggaggaaggggacagagaggagcttaatggtggcccgacggcggatttgactgacgaggttgtgaaattggagaacggggatggccccgtgccggtgggtggctccgcggatgagtgcggagctggagatggcggtgttgataagggcctggttggtcagaatgagcctgttgtgaaccagcttgtgctggtgcaggctgaggaggagctggcattgtctaagatctcaaacagttccttcatgttcgattacaccactgggggtgatgactcagggactgaggaggagcaggctgccttcatgaaggagctggagcgtttccacagggagaaaatgttggagttcaagccccctaagttttatggtgaaggattgaattgcctcaaattgtggagacaagttactggattgggtggctatgatcaggtgacatcatgcaagctgtggcgtcaagtgggagagtcattcaaacctccaaagacatgtacaactgtttcatggactttccgtaacttctatgagaaggcactccttgaatatgagaaacacaaaatcgaaacaggagagttccaagtagcttcatctgctctaccagatcgagttggttctgagagccaggtgggtggaagccacgtatctggttctggaagagccagaagagaatctgcaactcgtgcaatgcaaggctggcattctcaccgcctactaggcaatggtgaaaatgctgatcctataattaaggataaagggcctattgtcttaaagaaggataaaactcctaaaagcagtggttctgccaagaggaaaaggataccatcccttgaagatgacatggtgataccttataaatccgataagctacaaaatgactcaatggttattgacatgggccctcctgctgattgggtgaaaataaatgttaggaaaaccaaagattgctatgaagtctatgcattggttcctggccttctgcgtgaagaggtacatgttcagtctgaccctgctggtcgtttgatagttactggagagcccgagcaattggataacccatggggtgtcactccattcaagaaggtcattaggttgccttcccgcattgatcctcaccaaacctctgcagttgtcaccctccatgggcagctatttgtgcgtgcaccatttgaacaatcaaaataatgttgatgccacaatgaagcacaatactacaagtttgccttatgagtgggattataccgttatgacatgagcttagaagtgctcaccctgaccgtcctccaaaactagttccttgctgattttaatgcttcaagcctcctccatgctagatctctcatgtatcaagttaaactcattagttgacatagttctgtgtgtattcggttgtgcccgttggctgtgaattgtagctaaagcaaagttactaagcctagagtttaggatgttgatagtctgatgctcaacatgtccatggtttcttttcaatttagtcggcatagaatgtactgtttgtagcaatgtagtatgtagcttgttcccagtatttaagctccggaacatggagagcggtagagattcattgtatgtaactgttgctggtgcattgcaattgctattcaacttgtattgtcaaacaatctgaaactctatggcctcct

SEQ ID NO: 155630 - DNA, 83 bp, Zea Mays
attttcctttaacaaagaattgcagctatttggatcacgatctctagcgacgagcaaacaatcgatgcgcgatataataaacg

SEQ ID NO: 155631 - DNA, 465 bp, Zea Mays
atgaagaggagcagtgcaccatgggatggagagggactcggcagggcgcgtcccgtgcagagggatgagcacacaggagcacgacgagtagaagtcggcggactggagaagagaagcggcgctggagagagatgcgtgcggcaaacagaaggccgaaagtgcgcgcggccatggcaaacgcagggcgcgacgaactggaggagcagggagggcgcagcccaagctcggccatggaaccggaaggcgcgcggcatgggcgagtgcagggagctcgccatgggcgccgtgagcagaggagcagggagctccggcgatggcgagggggccagaggaaagagagccgcgagcgctgagagagaagcagggggcgcggttgctggtgccatggcaggggacaagaccgagcttggtgctggggcgagcgccggccatggaggagagcagaaatccgacagggagcgatga

SEQ ID NO: 155632 - DNA, 321 bp, Zea Mays
atgggcactgtggtgctctcatggctccacggcaccatcatcgtcgaactccaggacatcatccgcgaccaggcgcacacgggccgccaggcgtggctcgctcttgaggaacaattcctcgggaaccgtgatgctcgagctctacacctcgacgctcagttccacgagttctcccagggggtcctctctgtggagtactgccgccagatgaatggcatggcggacaccctccgcgacctcggcgatccagtggcagaccgtaccttggtgctgaacctcctgcgtggcctcagcccccgctacggccacctgtttgcctga

SEQ ID NO: 155633 - DNA, 2084 bp, Zea Mays
ctactactacacaacccgctacccgccggttctcccctctgcccccgctctgtcatctttgactgcccctgtccggtctcctcccctccatcccactccacgccacccccacaccccaccggccaagcaaacacgctgcacatttcagttcagacagtccaagaacagcaccaagaaagactccttgccgctcttcttgcttggctactgactaggagagctccctgccgctggttgatcaacagagaggcaggcggacggcatggtcagctccctgccgctgtcctcgttgctgctgctgctgctgctgctctccgcagccagcttcggcggcggcgtaaggctcggcgatggtggctacgaggactggaggctcggcaccgccacctacgtcaaggagttccagtcacaccctctcaatgacggcggtggcgcctgcgggtacggcgacctggacatcttcaggtacgggcgctacacggcggggctgagcgcggcgctgttcgggcgcggcggcgcctgcggcggctgctacgagctgcggtgcgtcaaccacatccagtggtgcctccggggcagccccacggtggtggtgacggcgacggacttctgcccggccaacatgggcctcgccgacgacgacgccggcggctggtgcaacttcccgcgggagcacctcgagctgtcggaggccgcgttcctccgcgtcgccaaggccaaggccggcatcgtgccggtgcagttccggagggtgagctgcgacagggcgggcggcatgcggttcaccatcaccggtagcgcccacttcctgcaggtgctcatcaccaacgtggcggcggacggcgaggtggcggccgtgaaggtgaagggctcgaggacggggtggatcccgatggggcggaactggggccagaactggcagtgcgacgccgacctccgcgcccagccgctgtcgttcgaggtcaccggcgggaggggcaggacggtcaccgcctacagcgtggcgccggcggactggatgttcgcgcagacgttcgagggcaagcagttcgccgagtagagatcgacgccgaaaaccaagtctccggcggtggtgatgtaagtagaattatacgggtggcttcttgctcgcgagtcgtgaccggtgactcgacaaaacgagacgtattgaatggcgaaaggatttccagtcataagaaagtggcagtccaaatatgcgtgatgatggatcgtcggtaacggtacaagattaggcgatcaccgtgagttcagacttgtgtactctggcttaacgggagagaacgcaatgtgaaaaagtgtgtctggtatcgtaattaggggtatctagattatgtaccataaaccgcgtttcatccgaggcctttctcgggggtcgccttaattcggcttcgtccgagcctgccctcacacaaggtatgttttcgagagaatcctcgttcccgccgaggtcccctctctctagaacggttgtctccatctcgtcatagactcatagcctgtctcaggctaagcagacaaccctgaggcaggacaaccctgaggcaggactcagccgaaggccgcaggagaagtatgaaatgggctttacacttctctctcggggcagcgtgtctgcgtcccatagactttaaatagagatcaataaggtgactagggatacaacatttctttgtgatgtggttaaaccaaccacattctatgacaattttgtttgtcagttctttgtttggaaatgttcttacccttgttggaaacacgtggcatttgcctcttgttgtgtctgtgtttgtttttaccacgagagtttctttgatagttcttagtgtgaacatcatttttgggtttatgctgagtattggtatgtacttcaggcaatgggcagacccaagagggcgatgctgattattccacaccacaagttcatgatgtctttcagcctgaagtaatgtttgaataagctcagcataaactgtgaaatgtctcacggcattgttgttgaaagattctttcggcgggaagcataaaagacaaagtcttttcaatttcatccgcatctgaaagtg

SEQ ID NO: 155634 - DNA, 798 bp, Zea Mays
atggtcagctccctgccgctgtcctcgttgctgctgctgctgctgctgctctccgcagccagcttcggcggcggcgtaaggctcggcgatggtggctacgaggactggaggctcggcaccgccacctacgtcaaggagttccagtcacaccctctcaatgacggcggtggcgcctgcgggtacggcgacctggacatcttcaggtacgggcgctacacggcggggctgagcgcggcgctgttcgggcgcggcggcgcctgcggcggctgctacgagctgcggtgcgtcaaccacatccagtggtgcctccggggcagccccacggtggtggtgacggcgacggacttctgcccggccaacatgggcctcgccgacgacgacgccggcggctggtgcaacttcccgcgggagcacctcgagctgtcggaggccgcgttcctccgcgtcgccaaggccaaggccggcatcgtgccggtgcagttccggagggtgagctgcgacagggcgggcggcatgcggttcaccatcaccggtagcgcccacttcctgcaggtgctcatcaccaacgtggcggcggacggcgaggtggcggccgtgaaggtgaagggctcgaggacggggtggatcccgatggggcggaactggggccagaactggcagtgcgacgccgacctccgcgcccagccgctgtcgttcgaggtcaccggcgggaggggcaggacggtcaccgcctacagcgtggcgccggcggactggatgttcgcgcagacgttcgagggcaagcagttcgccgagtag

SEQ ID NO: 155635 - DNA, 1233 bp, Zea Mays
gcagaagcagtcgccgaggcagctgtcccggcactgctgctccgtgaccgacgacagcttcttgtagtatatcgaggtctcccaggtggtgttgagcagctccacaagggtgaactcgtcggagccgccgttctcgccgtcgcagctctgtggctcgaaccccggcgtgcagccgctgtccctatgctgctcgtcggtgtacttgtacccactcgggcacgtgcactcgagcctgtcccttgagctcggcgtcggcgcagacacgcagtacgaccccggcccgcacatgtcctgcaacccggaggtcctcttgacgcagccgtagtcggggaacgcgccggacacggtccaagacgcgttgccggtgccgccgttcttggggctgacgtaggtacggacgatgccgtcagggtccatccgggcgaacttcaagtactcgccggcggcgaagctcgccgccggtttaaccaagctgttaaccgtgccgttgtggagggtgtagttgaggcggccctggccatcgaaggtgaccgtcgtgttgccgtcggggctgttggtgtacgcctgccagtaggcgttttcggggtcgttgccctcgaggagatcgacgtagaggacgacgttgccgtcgctctggacgcccatgctgaaccggccggtggtgaactccgcgtccgcgcgcctggcgaagagcttcccttccgacccggttggctcgtaggacagggactggcccggcaggagcgtgtccgtcgggtacgagaagctctcccacagcacctggttgccggagtcgctcaggaactggaggttgccgtagtcgaggagcgcgagcacggatccacgatctgtggtaggcgtccacagcacctgctggccgtcggtgagcatgagctgcccgtcggacgtgatgctcagaaccgactgcgcggtggcgttggacgtgctcccggagggcgactgtttggcaaaccacaccacggactgcggctgcggctgtggctggaattgggaggaggcgttgccgtcggcgaagtgaaaccacgtggcgaggaggaacttggtcgggtcggagtcgagggcgaggaagccaaagctgaaggtgccggaggggctgctgatgtagtcggccggcgtcaaggtggcccccgctgtcaggttggtccgcgccacggccaacgcccggaaacgagcttgttgcagtagcatcagcagtagcacagcagcgaaggg

SEQ ID NO: 155636 - DNA, 602 bp, Zea Mays
gccctgatttccgctcgtcttgctctcgcacccttcccactgccggcggcggctgaaggcggcgcggtatcagcttggtgatttgtgagcgatggcgccgccggggtcgcggcggtgggcttacgtgcgcgtgatggccggcaccatcctcggtggcgtacttggattctacgtcatgcaccgcgtcgagacctcgtacaaggcgagaatggaggagaggctgcggagatacgaggcgcatctgcttgccaaagccaaggagtcgcagcagttgcaggacgaggcacagcgggaggataaagcccagttcctgcccgactcgtgacaccgacattcttcccctcttgcgcctgctcttttccaagctgttagaataacatagggcactggggccaaggagtccgtccactcgttttttcagatgtagagacataagatcgacatgtactttttgcttgttgctgtcttctttttttggtatcaagaaaaatgcaccattcgagcgcaaggttggggtcaatgtatgaacgccaaatatgaatatactttgatgtctatccgcacgtactctgctttgcaatctattggttttcatcaacatt

SEQ ID NO: 155637 - DNA, 1250 bp, Zea Mays
aagaagagaccaaaacatggtcccggccgagaaaatccccgaactctggccccccatcactagcgggccgtcaccgcccactctgcaacggcccagccggagggtggcgcgcaggacgtaacccgggagcgggtggggcacaacgaggggatttttttaaccaagccagaaattcgcccccgagggggatcgaacccaggacctggaggtgctactcggaagccttaaccattacgctagaggccctttcgcaacgctatgacagcatcaccctaatccatctcccctcgatttggcccgatcccttagagctagtgcacagaatagtcatcaacaccgcaagccttaaaaaaacgcatgggccattgcaacgggatcccctttcctctttatgggctcaccagtcattggctcgagatcgatggattaggtgcaaaagtggatcgcgggccgacgccagtacagctgtcagctcggcccaccttctcggcccgacgccctgatttccgctcgtcttgctctcgcacccttcccactgccggcggcggctgaaggcggcgcggtatcagcttggtgatttgtgagcgatggcgccgccggggtcgcggcggtgggcttacgtgcgcgtgatggccggcaccatcctcggtggcgtacttggattctacgtcatgcaccgcgtcgagacctcgtacaaggcacgccagatccagccctgccctactcccccacccctatggctatggctagcgctgtcgccagtttccagcggactcgctcagcatttctcttgcaggcgagaatggaggagaggctgcggagatacgaggcgcatctgcttgccaaagccaaggagtcgcagcagttgcaggacgaggcacagcgggaggataaagcccagttcctgcccgactcgtgacaccgacattcttcccctcttgcgcctgctcttttccaagctgttaggtacgagctgccactactagcttccatttccgagggatcatatgtgagatacatattgaatttatgggttaattccggccatttttatccccttttagctcgcattgttcagttttgagtgcattgtattgtgacagctgtaatctatacattttgttgaagcatacatagtcatctggtacagccgaaaatccaactctgccagggcacagtgctttggttctctctgattgaactgtaaacaactaaagcatatgttatggagcgacctatcctgttccaga

SEQ ID NO: 155638 - DNA, 801 bp, Zea Mays
ggccgtcacgacatccccagtctatcgcgtcatgctccgatcgtcaatcggctgaccgtcgtgttccttgtttccctcgtcggtccacctcgccgcggctaagtccatccgccgtgctatgtgcttcggtctctggtcgaaggacatcaataccctatgtcccttgctcacctccctggtcgtgctcgctgggacactattctctagccaactactgtggtgagctcgcgagacctctgcctcatcatcgtcctcgcctctgatcgtgcccctggtgcgcctgccgccggttatctccacccatgcgtccctgctctcctctagttgagctcaatcccaagtgctcgcttaagctgtgtggccaggttccctttcctagtcgccgtcgatggaagccctgccatcgatatcgcatgatattggttgtcttcttcaaccacgtcaatgcctcacaggatttggacaccttgtcgacactcgaccatgtgttcgctcgttaccacgccatcttcagcatcatggttctataaaactctgcgcactcgtcggcacccggctgtcaatctccaccacgcagcgctgcatcggacttaccctgtatgatgttcgatgacaagcccgaaccaggacttatcagcattctcgcgagtagtgagtcacgtttgatgctggtacgataattactcgcgtgatgcggaagacgacccaagtcgaccccaagcgcgggctaatccgcaggataaagcggatgaactaatctgaagacggatagatgaaacaagtatcacaacaaggataatc

SEQ ID NO: 155639 - DNA, 719 bp, Zea Mays
agttgtcaaatggcgtaggcccgataaagctctcacttgaagagataaaaaaagaacttgaatcgggtaaatacgaacgtatgttgcaatatttggatcagctcacacatatatttgtaagttgtgataagcataagtcaccatcagtagccgcgtatcgtgccaatattagatgtgggaacttaagtagtgcaagtactggaaagcgcaggattgacgagacctcttccagccatgttcgtcagaagagctcgaaagttcatgtggctcagtcattacaaaatggcatgacccacgaggatgcaatgaaatatcttaaagaccatggcatcttaggtggtactttaaaattttgtatagccaataagttacttaaagactatcaaaatctgagtacgttctcccgtctggaatcccttgaggaaaagatcagtttcctggaaggaacctggaaattagaatctgatggatcagtttcctggcagtaacctggaaattagaatatgatccctcttccttaaaggtaagccagtttgtttaggtcttctatagtcatgtcagttatttatcctgttcctcctgtgtttttttactagtctagtctggccttaaaatctaaggggccagctaaaagcaaatacatgtcatggagactgcgttcagccttggtttctttctgtttacatgtttttctatcttctgaaagtaatgatgattgt

SEQ ID NO: 155640 - DNA, 890 bp, Zea Mays
aaaataaagggaaatacccataaatggacaacaccaacgccttcccccacctctgtgccgccggctccgacgccttccaccgcaccgacgccgctggctccaccgcctacccctcctcgacgccactggtcctgttcacgccttgagccctctactggacgtcaagagaagtgctgccctgcgagttcgaatccaggcagaggctctccatgacttcatctgtctctggctcttcaaaatcacctcgtaagcctccggtgtcgtaccggaaatggatggatgcagataatcctgtttgttgcaagtgctcaggtgttatgttggagctgacctcgtggaccgattccaacccaagcagaggattccttcgttgccaaaagggatcagaagggtgtaatcttttccaatgggtgagtccccccccctttcggactttgataaaaaactgatgttacaagtgcaggataagatttatgctttgagagaggccaacaacgatctgagagacagacttgatgaatcgaacgaacgtgtggttgtgcaggaagctgagatcgccagactgagaatgcagctagagaagatcactagtgatcgccagactgaaaatgatttcagctgtagtgtttgttgtaatcttgtgtttgctcacgcgcttgtttcaacatggggctgtggtcgacagtagcaaatcttatgaactgatgtagttgttttggtcagcaatggatagccaagcagtggtgaactgatgtaggtattttggtcagcagtggttatgaattgatgtagttcttttggtcagcaatggatagccaagcagtggtgaactggtgtgtggaatgagctccaccggggcaagggtatttatagagggattagggatgaaa

SEQ ID NO: 155641 - DNA, 879 bp, Zea Mays
aaaataaagggaaatacccataaatggacaacaccaacgccttcccccacctctgtgccgccggctccgacgccttccaccgcaccgacgccgctggctccaccgcctacccctcctcgacgccactggtcctgttcacgccttgagccctctactggacgtcaagagaagtgctgccctgcgagttcgaatccagaggctctccatgacttcatctgtctctggctcttcaaaatcacctcgtaagcctccggtgtcgtaccggaaatggatggatgcagataatcctgtttgttgcaagtgctcaggtgttatgttggagctgacctcgtggaccgattccaacccaagcagaggattccttcgttgccaaaagaagggtgtaatcttttccaatgggtgagtccccccccctttcggactttgataaaaaactgatgttacaagtgcaggataagatttatgctttgagagaggccaacaacgatctgagagacagacttgatgaatcgaacgaacgtgtggttgtgcaggaagctgagatcgccagactgagaatgcagctagagaagatcactagtgatcgccagactgaaaatgatttcagctgtagtgtttgttgtaatcttgtgtttgctcacgcgcttgtttcaacatggggctgtggtcgacagtagcaaatcttatgaactgatgtagttgttttggtcagcaatggatagccaagcagtggtgaactgatgtaggtattttggtcagcagtggttatgaattgatgtagttcttttggtcagcaatggatagccaagcagtggtgaactggtgtgtggaatgagctccaccggggcaagggtatttatagagggattagggatgaaa

SEQ ID NO: 155642 - DNA, 93 bp, Zea Mays
ccacactcaagttcaaatgcataaacagaatagattccagcatgaaatgcgaaattgtattttattcataatatttggttatctatatgcctc

SEQ ID NO: 155643 - DNA, 1118 bp, Zea Mays
ctactacgccatggccaccaaagcaggctcctcactgtcgccatgcatcaggctcgtggaggaatccctgctcctcccgacgcaagacgccggcctcttcgcaaaggccttcgtgctcatcttcgcccacaccttcctcttcatcgcggtcgccgtccacttcgctcacccactcgccacggacatcctcgccgacatcaaagcacaaaggagcagcagcaggaccactaccactaccggcgccgcgagctcaaaccactccaaggagcttgcgttgctagcgatctacctctgctacctcgcgagcaaactcgccacccagctcgtcaccgccctcgccaccgccacgacctactccggcgagcgcctcacgcgtaaggtggtcatggagaggatcgccggaggcggcggccttctcggcacggctgccgtcgccggcgtgctggagctgtcgttcacggctctactcgcggcgctactcgtatccacgtggacctacgctgacgactcgatcgtaaagtctgtgtgtggctactcgatgttctcggtggcgcttctcgtctacatctacctcgccacggtgatcccggtcagcgtcggcgtgtcggcggtggacagaggctgccacggcgtctgggcgctccgccgggcgtggcggctcttgagagcaagggggaaggaggctgccgtgctcgtgttcgtcgtcaacatcctgcctgctttcatctacccagcccccgtgtacgcgttctcgtacatgtacccggcggacgagtactccctctactacggacaggacatggcggtcaggttttctctccacggcccggcgatgtggaggcagtggagccagggcgtgtgctggttcatgggcgtagttttcggatctggtcttccctcggttggtgcgcagctgttctccatggtggcagccacggtgttctgctgcctctccatagaaaccaacgatgatgcagcgcgcgcagtagtataaaactgcttgacaattttgtattaattgtcgatcacacctaagctagtcaaaatttacctactttaattttcgtcatgttgtggccaagactttatcgttgttttatacgagagagagttttaca

SEQ ID NO: 155644 - DNA, 1284 bp, Zea Mays
actcaaccatgcccttaaaggtcatcatcttctattcgacctcagcttgtctgtctctctagttagctagctagcgcgagcttcaagcctccacctccagccatggcaaccgggcaaataagctcgaccccaccatcgttcttcaatttcctcaaagaaggcctgctcctcccgagccacaaccggaggctcttcgcggctgtcttcacagttatcgccgcctccacctgtctactcctcgtcggcaacgacctcgtcgtccagcccctcgcagtcgagcttaatctcgacacaaaggcgctcaacagcaccgatttccgtagcccggacttacttccactcatccggaagacccaagctgacaccagggctctcttgctcaccagcacagcctattttctgtttggcgccgtcatcagatcagccatccagatcgtcgtcttctttgccgccgtctcgacatattccggtgagctgcacaccttcgggtcgctcctcggcagagtcaaggcgcaggtgaaaggccccgtgcttacgttcgccttcgtctgcgcactggagatcacctacgtcgcgctccttgtcgccatgtctactctggtcatggtcctcatgatcaagaaatactacggtttgttcttcgtggggtcgctgctcctcctgcctctcttcgtcttcctcgtgtacttctccttcctctgctccatgagtgtcgtcgtggcagtggccgagcccggctgctacggcgctggtgctcttgggagggcgtggcggctgctgaaggggaagcgcagacgggtcatgcttttcatttctgtcactggcgtgctcgccgcagccttgacccctatgtacactctggccaagagacgcgagcttactaacatggcagcagggttgctcctggagtttctgtacgtcatcttgatgtccgccttgcagctgtttgcgacctgcaccatggccgcgttctactacgagtgcaaggggagcaccgaggcatcggcggcggagtacgtcaaggtttctaccaaggagcaaattgctgcttgattattaatgcatacgatctgttaatatcggtcgatgttaccctgttttctccaattcatttcagttttcgtggatgtgaatatgtgatttgataaaaggaataagtgcagtttgcttaattttctggtggggtaaaggtcattactatactgtctatacaaaagactacttcctccatctacatgtgtcttaggtttgtcctaagttaatcactatcaactttgaccagtt

SEQ ID NO: 155645 - DNA, 236 bp, Zea Mays
tttgacttcatgggacttattttagaaacttgagctcacaaactttgtcttatttggtctctgtatgatggaattatgtcattttataatctttgttcattcagtcagtcgttgtgaactcttttctaatcgctcacttcattggtcgtgttgtactaagacatattgcatggagtaaataataacatcagttagccaaatcaaaaaatattatacagagagcggagacaatcaat

SEQ ID NO: 155646 - DNA, 203 bp, Zea Mays
tttgacttcatatgacttattttagaaacttgatctcacaaactttctcttatttggtctctgtatgatggaattatgttattttataatctctgttcattcagtcaatcgttgtgaactctcttctaatcgctcacttcattggtcgtgttgtaccaagacatatttgcatggagtaaacaataacatcagttagccaaatc

SEQ ID NO: 155647 - DNA, 2445 bp, Zea Mays
ccgcatgcattcggatccccgctcctccccaaatcccccttggccctgcaataaatctcacctccccctcgcactcgctgcattgctcttcgcccggaaatcgtctcgcttacttcgttccttctctgcctctgttgctccccagaggttcttggctggaaaacattgcagcaggtaagaaaattcgagtcttctcgggttccttgcggggattatttttggccggcagttgtttccttggaactgatcgtgtacgttttcgatataggagaagagatggacgcagacaccttcccagtggggctgcgcgtgctcgccgtcgacgatgaccgcgtctgcctcaagatcctagagaggcagctgaagtgttgcaactacaacacgacggtggtgacggatgcccagacggcgctggacatgctcagggagaggaaggacgggaaccagttcgacctggtgatcagcgacgtcgtcatgaccaaaatggacggcttcaagctcctcgagctcatcggcctggagatggatctcccagtcatcatgctatccgcaaacagcgagacacagactataatgaaaggtataaagcatggggcctgtgattatatggtaaagccagtgcgcctcgaacagcttaggggcatatggacacatgtggtgaagaacagtaagattgatccaaggaacaacatcggcagtgacagtgatgatgttgttcagaagttgccatctggggatggtgataaaggtgagaaggttggagaaacccgccaaaagaagtatccaaagaaaaacaaaaagactgtggatgttgctgatgaggataacgaaaaaacatcagcccagaagaagcaaagggtccaatggtgtggtgaactacatcagaagtttgtacaagctgtccgtcagattggcattgatagggctgttcctaagaaaatattagaaatcatggatgtggaaggccttactagagagaatgtcgccagtcatctgcagaagtaccgaatctaccttagaaagctcggtgatggcacactgaggagttctagtccatttgctgatgaaactgaagcatttcggagaaacatgaatgtcccatccttcattagctcttcgagctcaagcaaccattttgcaaagatgaattcctcatcactaattggaacggagacattgctacccacagagtcagtttatatcatgagcccccagaaaaacttgggcatttctcggtcaaacatggaaccagttagccatggtgttaacttacccaaagatgttattcctatgccagtgcaggatattagcagattcatttcttctggcaagtcctatgcacctgtatggagtgatgggctgctaggtagaagccagtgcttcccttctggtccttctggcagctcctttgcaaatatttcaaatagtgtggtgttgaacgcaagcaaacctttctctgttgatatttctgggagatcattagcaaatggctcaaatgacaggccaccattgacctcgaacatgtgcttttcttcgtctcattcttgcagctcctatgcgagcatattgggtggcaagattttgggatcaagcagacgtattcctttcgaagacatagcagatggtgagatgttggctcctggtaatttaccattgcagtctcctcagttggtgaaacagccttcttctgctggcctatttaacgaggttgccagagacgttcaccaatttgcaggacttagcaactcctggaaagttgctgtgccgccaaggttttctgatcttggtcataatgttggaacatctgaaggtcattcgcagggtaacattttcaagatcaaccggttgtcaagacttgcacgctcctctgcacagattccaacgttcagaaatgagtatcagaagaaaaccacaggaatcatggggaaagccgtaccagtggtaggtttcagagagcaggtggcaccattcagctttgaaaacaacacacgctctacagtgacgctgataggcaattctgctttgtctagttcttcaagcaccagacctggccttaacatcaacaattctgccatgctgacccaggtgctgaatggcggtggtgcaaatgacaacctccatggagttagcaccgttaatcagcaagctgttaatgaccaagtgaataacgaattcttcatgggaacaaatgaggcacataatgcggagagtgatgatttggatgatttccttgcgtacttagttaatcaagatttcatcaacaatggtgattctttcattgacagggactgagaatctgccccttgactctggaagagagatgctgctgaccaattcatggttcttgcatgttgtatgaacaaatttgcactgtttgtagtaggctagctaggagcaggccatcttggatggaatccccatgtttctctagtgtagtcatgctgg

SEQ ID NO: 155648 - DNA, 1759 bp, Zea Mays
cttgagctcactggtcaactctgagcggcaggcagagagggagtcaccatggaagtggtcacagcacgagaactcatcaaccccacaggcctccccattctcctcctcgttgccggcctcaccgttttctttgtgctgcgccgccgcagcagtggcgggcttcggctccctccgagcccgttcgctctgcccgtcctgggccacctgcacctcctggccccgctcccgcaccaggcgctgcaccgcctggcagcccgccacggcccgctcttgtacctccgcctcggctccatgccggccatcgccgcctgctccccggacgccgcccgcgaggtgctcaagacccacgaggccgcgttcctggaccgccccaagcccacggcggtgcaccgcctgacgtacggcgggcaggacttctccttctcgccgtacgggccctactggcgcttcatgaagcgcgcgtgcgtgcacgagctccttgccgggcgcacgctggagcggctccgccacgtccgccgcgaggaggtgtcccgcctcgtgggctccctgtcccggagcgcgtgcgacggcgcggccgtcgacgtggacgccgtgctcatgggcgtcacgggcgacatcatctcgcggatggtgatgagccggcggtggaccggggacgacagcaccaccgaggagatgaggagcctggtcgccgagaccgccgagctgacgggcacgttcaacctgcaggactacatcggcatgttcaaacattgggacgtgcagggcctgggcaagcgcatcgacgcggtgcaccgcaagttcgacgccatgatggagcggatactgacggcgagggatgccgagaggcggtgccggcggaaggcgtctgcggacggcgccggcgagggggacaagaaggacctgcttgacatgctctttgacatgcacgaggacgaaggtgccgagatgcggctcacaagagataacatcaaggccttcatgctggacatcttcgcggccggcacggacacgacgacgatcacgctggaatgggcgctgtcggagttgatcaacaacccagccgtcctccgccgggcgcaggcggagctggacgccgccgtgggcgcgtcccggctcgccgacgagtcggacatcccacggctcccctacctgcaggccatcgcgaaggagaccctgcggctgcacccgacgggcccgctggtggtgcgacgctccatggcgccctgcaatgtgtccggctacgacgtgccggccggcgcgacggtgttcgtgaacgtgtgggcgatcgggcgcgacccggcgtcctgggcgccggacccgctggcgttccggccggagcggttcctggaggaggaagggggaggagagagcgcggggctggacgtgcgcgggcagcacttccacctgctgccgtttgggtccgggcggcggatatgccccggcgcgtcgctggccatgctcgtggttcaggcggcgctggcggccatgctgcagtgcttcgagtggacgcccgtcggcggcgcgcccgtagacatggaggagggtcccgggctcacgctgccgcggaagcgcccgctcgtctgcaccgtcaaggccaggcttcacccgctgccggttcccgccgccgccgctaataacggcgtggaagaaactgcgggcgtgtgatgtaaacgtggctgactggctgcggctttcgtccgtcaggtgctgagctcgatttactactacgcgtcgcttgttaacctgtaagcaagca

SEQ ID NO: 155649 - DNA, 2134 bp, Zea Mays
accggccaaagcgggcagtagcagagggaaacttttgaaaagccttttcaaaatttggagtaaggcactgaggcgagcgcgggtggcggccggcagcgaggaaggctactgttaggatcatctcgctacaaaatcgggttcccgagatggaggggaaggcggtagccgtcggttgcggtggcgcccgcgtcgatccggcggatgatctcaagtacatctccgggctgagcaccattctcgtggccaccatccaggaagtgaaggaccaggtctcccagatggagttcatcttctgcagccagctcttcccgcacatccaggccaagtcgaagcttgtccaggcgcatctcgccgacacgatgaaggccagtgaggttgagtggaggaagacggaggctggcctggtgaagcagctggaggaggtcagccgtggtaagatgctcgcggaggagagattgctgcaactgggcacctctcttgaggagatgaagaggaagcttgtggattcggagcaattggctgcgaggcatgaggcggagaagaaacagcttctggggaggttggaggatgaaacgaggaaaggtgaggtggtacgtcagctccaaagggagattgaggagaaggacgctgaggtggtcagggagagagaggcacatcagcggctgctgcaggaatttgagcaattggctgcgaggcatgaatctgagaagaaacagcttctggggaggttggaggatgagatggggaatggtgaggtggtacgtcagctccagagggagattgaggagaaggccgctgaggtggtcagggagagagaggcacaccagcggctgcagcagcaggttgacctgaaggataagaatctgcttctggagcagagcaagcggagggacttgattgaggattacactcagctgaagacaaactacaagcatttgaagtctcagtacacctttcttcttgggaagattgaccagcatgaaggctccaagcctcctgaggacattcctgcagatagaagaaacactgaaagtcctccaagtaagaggaaattcaaagatttggagcacacaaacaaggagcgcatccaaatccttcccaacacaagggacctgaagaatgactctgctccaggtgccaaagcccaagctgcccaacatgctagttcagtcaggagtccaatcagaaactcacaccttgccgtgccatctcgcccaatgaatccattggcaaatcattctgccaacaattcaaaactacaagcttcaaccagtgtcgccagcccatgtctaaattggagggagacccgtgcacgcaaagaacaaggtgttgctgatccacacgatgatttccttgatacacctctggaagctgtcaagaataccatcaggaaccctgcaactcccgaagaagcactggcacttgccgcctctcctcaagttatggatttcgacaattcagatgatgaaacccaagatctgaatattgcaactcaagccctccggcacatccccaatatgccagttaccaagcagcaaaacacaatatcggtacatccaccaaagaaagacttcaaatatagagaatcagtgagaaagaaagctgaccgggagaacctgaaaggtgtcgagtgcaagcaatgcaagaagttttatgatgctgttcttcctggtggtcgtgcagatggcgatggtgcaggctctacaagcttacgatgtgagcaccacgatggtgtgtcaaggcatcggtacaggtacgcgccgcctctgacgccggaagggttttggaacattggtttcgaatcagaaatgtagcactacatcaagtagcaggaaaccttcagtgtcctcggtcaccccaagatattgtagcaatgactaagacaagttgcatgtcgctgctcaagttgcagaaatagtcattctgtgattaaggttgatggtaggcagtagctactgtgaatatgttggagatagaaagcactgtcagctatttacctttttgtggattacatcaagttgatcattttgtagcgaaccacctttaacataccattggaaagcaattcttttttatagaaaggagacatctgaataacagcttacaatcaacagcaaaacctctggccttgtac

SEQ ID NO: 155650 - DNA, 1247 bp, Zea Mays
agcttcgtcatttccggcgccctcctcctttcctttatctctctccccacgcccccacgtttcgccccccatttcgaagcccaccgaattccctgcgattcctctcccctcgcctcctcgtctccccctagggttagcacctcgctgcctccgattcaatcataatatggtctcttctccctttgatctgtagatttggggctttggctccgcctcgcgcgcccgatccgggccgtcctccttttttcccctcttatatttgatcggtttctttgcgtcgttcacgcagggatcgtcggagaggaatcgcaaagagggccgtctcatccgagttaaggaagccatggagcacaaggaggctgggtgccaggcccccgagggacccatcctctgcatcaataactgtggcttcttcggcagcgcggcgaccatgaacatgtgctccaagtgccacaaggagatgataacgaagcaggatcaggccaagctggctgcctcctctatcgacagcatcgtgaacggcagcgacgccgtcatggagccggttgttgctggcagcaacacggtagtagctgttgcccaagttgagttgcaaacaatgaacgtgcagcagcccgctgatgttgccggacccagcgagggggtggcggcgatctccaaaggggggaaggtagggccgaaccggtgcagcgcctgcaggaagagggttggacttacgggattcaactgccggtgtgggaacttgtactgcgcactccaccgctactccgacaagcacgactgcaagttcgactaccggactgctgccagggacgccattgccaaggctaatccggtggtgaaggcagacaagctcgacaagatctagggggggttccctacggttgggtatcaggaagattgtaaaccgcggtaactcgtcatgcggaactgctgccttgccccccgcgcctttctcttccatgtttgctgctacaatcttgttgttgggcattgcagtgcacggtgcacacttgtgtagcccgcctcgagaattcctgcctctgcatctggtcagttctaaaatgatttgcatgttggctatgttgtgtaagctctatttatggtggtctcgctgagacgggtatttggcttcgcagttatctagctatgtgatgtactgttgtcttgtccctgggtattatatggtacactgcagccagtaatagtaatctgcaactgtgcgttaaatggtccgtcgttttcct

SEQ ID NO: 155651 - DNA, 1127 bp, Zea Mays
agcttcgtcatttccggcgccctcctcctttcctttatctctctccccacgcccccacgtttcgccccccatttcgaagcccaccgaattccctgcgattcctctcccctcgcctcctcgtctccccctagggttagcacctcgctgcctccgattcaatcataatatgggatcgtcggagaggaatcgcaaagagggccgtctcatccgagttaaggaagccatggagcacaaggaggctgggtgccaggcccccgagggacccatcctctgcatcaataactgtggcttcttcggcagcgcggcgaccatgaacatgtgctccaagtgccacaaggagatgataacgaagcaggatcaggccaagctggctgcctcctctatcgacagcatcgtgaacggcagcgacgccgtcatggagccggttgttgctggcagcaacacggtagtagctgttgcccaagttgagttgcaaacaatgaacgtgcagcagcccgctgatgttgccggacccagcgagggggtggcggcgatctccaaaggggggaaggtagggccgaaccggtgcagcgcctgcaggaagagggttggacttacgggattcaactgccggtgtgggaacttgtactgcgcactccaccgctactccgacaagcacgactgcaagttcgactaccggactgctgccagggacgccattgccaaggctaatccggtggtgaaggcagacaagctcgacaagatctagggggggttccctacggttgggtatcaggaagattgtaaaccgcggtaactcgtcatgcggaactgctgccttgccccccgcgcctttctcttccatgtttgctgctacaatcttgttgttgggcattgcagtgcacggtgcacacttgtgtagcccgcctcgagaattcctgcctctgcatctggtcagttctaaaatgatttgcatgttggctatgttgtgtaagctctatttatggtggtctcgctgagacgggtatttggcttcgcagttatctagctatgtgatgtactgttgtcttgtccctgggtattatatggtacactgcagccagtaatagtaatctgcaactgtgcgttaaatggtccgtcgttttcct

SEQ ID NO: 155652 - DNA, 1090 bp, Zea Mays
agcttcgtcatttccggcgccctcctcctttcctttatctctctccccacgcccccacgtttcgccccccatttcgaagcccaccgaattccctgcgattcctctcccctcgcctcctcgtctccccctaggggatcgtcggagaggaatcgcaaagagggccgtctcatccgagttaaggaagccatggagcacaaggaggctgggtgccaggcccccgagggacccatcctctgcatcaataactgtggcttcttcggcagcgcggcgaccatgaacatgtgctccaagtgccacaaggagatgataacgaagcaggatcaggccaagctggctgcctcctctatcgacagcatcgtgaacggcagcgacgccgtcatggagccggttgttgctggcagcaacacggtagtagctgttgcccaagttgagttgcaaacaatgaacgtgcagcagcccgctgatgttgccggacccagcgagggggtggcggcgatctccaaaggggggaaggtagggccgaaccggtgcagcgcctgcaggaagagggttggacttacgggattcaactgccggtgtgggaacttgtactgcgcactccaccgctactccgacaagcacgactgcaagttcgactaccggactgctgccagggacgccattgccaaggctaatccggtggtgaaggcagacaagctcgacaagatctagggggggttccctacggttgggtatcaggaagattgtaaaccgcggtaactcgtcatgcggaactgctgccttgccccccgcgcctttctcttccatgtttgctgctacaatcttgttgttgggcattgcagtgcacggtgcacacttgtgtagcccgcctcgagaattcctgcctctgcatctggtcagttctaaaatgatttgcatgttggctatgttgtgtaagctctatttatggtggtctcgctgagacgggtatttggcttcgcagttatctagctatgtgatgtactgttgtcttgtccctgggtattatatggtacactgcagccagtaatagtaatctgcaactgtgcgttaaatggtccgtcgttttcct

SEQ ID NO: 155653 - DNA, 1085 bp, Zea Mays
agcttcgtcatttccggcgccctcctcctttcctttatctctctccccacgcccccacgtttcgccccccatttcgaagcccaccgaattccctgcgattcctctcccctcgcctcctcgtctccccctaggggatcgtcggagaggaatcgcaaagagggccgtctcatccgaggaagccatggagcacaaggaggctgggtgccaggcccccgagggacccatcctctgcatcaataactgtggcttcttcggcagcgcggcgaccatgaacatgtgctccaagtgccacaaggagatgataacgaagcaggatcaggccaagctggctgcctcctctatcgacagcatcgtgaacggcagcgacgccgtcatggagccggttgttgctggcagcaacacggtagtagctgttgcccaagttgagttgcaaacaatgaacgtgcagcagcccgctgatgttgccggacccagcgagggggtggcggcgatctccaaaggggggaaggtagggccgaaccggtgcagcgcctgcaggaagagggttggacttacgggattcaactgccggtgtgggaacttgtactgcgcactccaccgctactccgacaagcacgactgcaagttcgactaccggactgctgccagggacgccattgccaaggctaatccggtggtgaaggcagacaagctcgacaagatctagggggggttccctacggttgggtatcaggaagattgtaaaccgcggtaactcgtcatgcggaactgctgccttgccccccgcgcctttctcttccatgtttgctgctacaatcttgttgttgggcattgcagtgcacggtgcacacttgtgtagcccgcctcgagaattcctgcctctgcatctggtcagttctaaaatgatttgcatgttggctatgttgtgtaagctctatttatggtggtctcgctgagacgggtatttggcttcgcagttatctagctatgtgatgtactgttgtcttgtccctgggtattatatggtacactgcagccagtaatagtaatctgcaactgtgcgttaaatggtccgtcgttttcct

SEQ ID NO: 155654 - DNA, 98 bp, Zea Mays
aattttagctagacgtccgctgtacgggggaatgagaatgagaatgtgctttgcggggaggaggaatgagaatgatagatatagaatggtggcagaac

SEQ ID NO: 155655 - DNA, 309 bp, Zea Mays
atgtcgccgaggttgccgaccttctcctccaccgtcatccagccgatgaggtcgcgcacacggtcggcgtacggcagcgacgcgtcgcagtacgggaacgccgacatgttgaggcccatctccgcgaaccgctccgcgtcgcacaccttggtgtacgccttgccgaagctggtcacgttcacggtggtggtggcggcggtggagggcagggttcgcgagcaggccacggggatggggctgatgctgcacagcagcagcgccgcgagggcgaggaggagatgggacggggacggcgccatagttggatga

SEQ ID NO: 155656 - DNA, 1244 bp, Zea Mays
gggggccagggcgaatcgtcatctagtgtgggacttataccagggaaaattggatcgagggagctcaattacttgctgaagacattcggcgctgtgaatctgccctccgacgagttcgggtgttcctgcgacattgactacggaatgtggcagatgttgttgcagatatgatgtactatgcttgaatcccggtgattaatcaagctatgttgagtagttaagggtgacgtccagacattaagagagatgtgtcgcagtatggactaaatatgaccgagcaacaatttcttcagcattcgatttcatatgtcgctgccaattatgttgtttggtgcgccttatgtcgttattgggcttcgaatgagttcaatgcaaagtctgtgcgataaagttccaatcgtggaatcgagtcataccgcagggggcatagaggaccagatcctgcaaacctagatgtgttgtgcaaccaagtggcaacatatcgtctttctgcatatggcgagctgatgtctagtcagcatgcgcggatcaaactatgacaagaggaccgcatctaatgatcctcaggctgtgtatgcaagtggaggaaaaccttatggaaggtactcgatgttcgataatgtcattgacacgagtcaggtgagggttcagaggagaggttcatcgaggtctactgctcgtagctcctatctctccacctcaaatccaactaaagttgagcgattacgagaggaacttaggaaccaacaggagtaacaaagggtccaggaggattccttgaggcaagttgtgcaacaataagcctactatgcttctcagtttcaacaacaacaagcattccttaacaactagcacaaggccaagggatatcgctcctagtgcccccacctccacctcccatacagtttccttggccttcacctggacattgggtatgtgaattcatcatcattcgaggaagaattacttgttatattacaatgtaacttgccaaatgtcatttgcacaaatatattagacccatccacctaaccttgccggtgtagcaacaagttgacgattatgactttgtcaatgcattctacgccaatggagataatgaacatcactcgccttagttccccgatgatcatttgatgtgttttgtgagacgtgagacgtttgtgtcttgtcaaagctgtgacttatgagattgaatttgacaattttgtgacttttgtgcaatgaaatgagttgttattgtg

SEQ ID NO: 155657 - DNA, 491 bp, Zea Mays
tatttcaagtgatatgggatgaggttggtgaagcgatgaagattgtgaaagggtgttactttagcttgagcttgggtgctcagatgtttataggagataggttgatcaagcttatctcctctaacaactttccaactccaaataggaactgactagactcctttctgtgctaggagagtcatctatttctggcattgatgattagacatctgatgcaatcaaggagcaattattatttatgtcaccatctttagaaatactatgcaggaaaagagatagtagagttaaagagtttgctgatgtgcaacttctgattcagacactttgtaatgaaatcgctgggaatctgcatgttggtgaacacttggaaacacccccatgttaatgaggatgatcttttagtgaggaaattaaatgaatatctttctgaactacaagccctgcaaaaggaaaaggttgttactaattttatagtttgctttgccttttgc

SEQ ID NO: 155658 - DNA, 193 bp, Zea Mays
ttgtgtgttactacaaggtcgagctgctgctattgctggttcatctctactccacagggcaagttacctccgactcttttcacaatttcttgtgatttctcattgtcgagacaatgagccaagtttctctagaaccttttagtccttgtgttgtgtaaaactaaagacctagctttttttacttatctttact

SEQ ID NO: 155659 - DNA, 1633 bp, Zea Mays
gtggccccgcggatgcggcctcatctccccggcgcggtttagatttccctgggccccgcacccctctcgtggcacagtcacatactttccgcgcctcttcttctgcgcccctctcctcccaaactgcggatagagcagcgagccatcgacacgatcgcgagcgcaagcacgtacgttgtcggaagctcaagttagaagaagcaccagtgcctgatcgatggcggcccaggctctcctctccggccggcagctgctgggccgccccgtgcagtcggccgtctctaggtcgtcggcgaggaaggcgcccttcgtcgtcagggccagctccagccctccagccaagcaaggtgccgacaggcagctgtggttcgcgtccaagcagtccctctcctacctcgatggcacgctgcccggcgactatggcttcgacccgctgggcctctcggacccggagggcaccgggggcttcatcgagcccaagtggctggcctatggcgaggtgatcaacggccgctacgccatgctgggcgcggtgggcgccatcgccccggagatcttcggcaagatgggcatcatccccccggagaccgcgctgccgtggttcaagacgggcgtcatcccgcccgcgggcacctacaactactgggccgactcctacacgctcttcgtcttcaacatggcgctcatgggcttcgccgagcaccgccgcctccaggactggtacaacccgggctccatgggcaagcagtacttcctcggcctcgagaagttcctcgccggctccggcgacccgtcctaccccggcgggcccctcttcaacccgctcggcttcggcaagaccgagaaggagatgaatgagctcaagctcaaggagatcaagaacggcaggctcgccatgctcgccatcctcggttacttcatccaggggctcgtcaccggcgtcggcccgttccagaacctgctcgaccacctcgccgaccccgtcaacaacaacgtgctcaccagcctcaagttccactagaacgtggtgcatcagcatacctgctgctgccgccgccgccgccagttgtttgctgtggaaagctagatgcatgcgtgttgtaaaggaacctgaagcgttgcatcggtcatgattcatgcatggccagcctgctgcctgtaacaacaaactagtattgatcttattgagaccggaaactgtattgcacatggtaaatcaatgtacaattcctccctagatgcggacaaatttctcctaaggccatgaccatggtggatgcacgtgggacgtatttgtagcagaagagagtatgcactctgtgtgtatatccaacggtgatgcgcatgggagcatgtgtgcttagagacaaaaacaacattggctttcattctgttctatcaccaatatttgcggacagtgagagagagcaaggtcccttgtaaaaaaatgagtatatttggtgtagctaaagtcccatgttttgggggtttgaggatctacgaacaagtatagtttactcatagtacagaatgcttagagattgtttagagctctcaaggaagcttctagcttgaatctaataagaagatgccaaacatttcttctaggctgaatctagaaaaatgccaaaca

SEQ ID NO: 155660 - DNA, 1676 bp, Zea Mays
acagtcacatactttccgcgcctcttcttctgcgcccctctcctcccaaactgcggatagagcagcgagccatcgacacgatcgcgagcgcaagcacgtacgttgtcggaagctcaagttagaagaagcaccagtgcctgatcgatggcggcccaggctctcctctccggccggcagctgctgggccgccccgtgcagtcggccgtctctaggtcgtcggcgaggaaggcgcccttcgtcgtcagggccagctccagccctccagccaaggtctgtgcgccgtaccctactatagctagtaatccgtccgtcgtcaatctcaacgatggcaagctcgttcgttcttgagaggactacgtactgctgagtgctgactcgattgttttcgtttcgcagcaaggtgccgacaggcagctgtggttcgcgtccaagcagtccctctcctacctcgatggcacgtacgtacctgcgctcgttgcccgccccgcgcgcagcaaaccttctgctagcgacgatagaaaccctatgctcacctgcctcattgttgctgctgcatgcatgcatgcaggctgcccggcgactatggcttcgacccgctgggcctctcggacccggagggcaccgggggcttcatcgagcccaagtggctggcctatggcgaggtgatcaacggccgctacgccatgctgggcgcggtgggcgccatcgccccggagatcttcggcaagatgggcatcatccccccggagaccgcgctgccgtggttcaagacgggcgtcatcccgcccgcgggcacctacaactactgggccgactcctacacgctcttcgtcttcaacatggcgctcatgggcttcgccgagcaccgccgcctccaggactggtacaacccgggctccatgggcaagcagtacttcctcggcctcgagaagttcctcgccggctccggcgacccgtcctaccccggcgggcccctcttcaacccgctcggcttcggcaagaccgagaaggagatgaatgagctcaagctcaaggagatcaagaacggcaggctcgccatgctcgccatcctcggttacttcatccaggggctcgtcaccggcgtcggcccgttccagaacctgctcgaccacctcgccgaccccgtcaacaacaacgtgctcaccagcctcaagttccactagaacgtggtgcatcagcatacctgctgctgccgccgccgccgccagttgtttgctgtggaaagctagatgcatgcgtgttgtaaaggaacctgaagcgttgcatcggtcatgattcatgcatggccagcctgctgcctgtaacaacaaactagtattgatcttattgagaccggaaactgtattgcacatggtaaatcaatgtacaattcctccctagatgcggacaaatttctcctaaggccatgaccatggtggatgcacgtgggacgtatttgtagcagaagagagtatgcactctgtgtgtatatccaacggtgatgcgcatgggagcatgtgtgcttagagacaaaaacaacattggctttcattctgttctatcaccaatatttgcggacagtgagagagagcaaggtcccttgtaaaaaaatgagtatatttggtgtagctaaagtcccatgttttgggggtttgaggatctacgaacaagtatag

SEQ ID NO: 155661 - DNA, 2201 bp, Zea Mays
aattctgctcggtgcactcgaagctactgctattgccaattccgtctctattattatctgataatactcgtctctctgctcacaagtcacaaggaggggagcgaggcggcggccaacacctagcagctccgaaccctagctccggccactggcggcgatggctgctgctacggcgttccggtcggggacgaggcggggcgacgctctcgcgcccgtagaggacgcgggctccgccactcgcgagcgccaggccgcgggccgcggcggaggcagcgtccgccggtcgaagagcctgagccggttcccgccgccgtcgccctccaccgaggacacggcgacgccgtcgtcgaggttcgtcaacaaggtgcggggcgggggaagcggcggcgtcttcccgccgcaggtcagcctcgacgacctcgccgacgagttcttccgggccagggccgagtccgaggacgacgacgacgaggagactgctgcgcgcggccggtcaaggcttccagcggccgcagagcgtgggggcggtggcgctggcggtcggcggagctccaccgcgcggtacgctaggcagacggagtcttcgcggcagcgcgggcgctccgtgtcgcggccgccagccgagcggcgaggcgtagcggccaatgcggtggatggcggccctgcagccaggaggcagcgttatgcgtcggtcgaccggcgcgctgccatggatcgacaacggtggtgcgattcggataatgatatggaagttcctcaccagtatgtttctagggggatgcataccaaaagtagcagtggcaatagcctgcagagttcattccataagccatctaaagcaaatcaagctttgaagaggtctacaagtcaaaaggatttctttcattctagagacagcagctccagccattcttcaattactgatgatgagtctaggagttcactctctttccatagcagaaatcagaaggctgtctgtgcagtttatggtcttgacaaggagcacggaattgatgatggggctggaaatgtattgtacgatgtaatgcgaaaagaagttaggcaagctgttgaggaaataaggaatcagcttgaagaggccatgacaaaatctgaaccttcagaaaaggcaataaacagtgatgcacaaccaacccaagttattactcagctccgaaggagctacactagtaaattggaagagtcagagaagcggaagcaggaactgttagctcaattggcagcagaagaacaccatggtcatgagctcacaaaaatagttagagaattgctacctactcctaaaaagactgcaaacttacaaagacagccacactacagaagagtaagtttatttagttgccgttccatcgcttccactttccagttaattatgtgcatctatgaattagaatttgacatgaatttattgcagaggagcaatgatagatcaaggatgtcaaaacgacttactgaagaggctgaacaatactttgaagatttcctgtcgaatgttgaagacactgacttttcttcttttgatggagagaaaagtgactcaagttcaaccaggaaagacctgttgttacttcatgctatgacagaaactccagttaagctcccagaagttgctttacctgcagaggcagatggcgttgtccttccctggctgcaatgggaaactaccaatgactttcagacctccccgtgcaaaaccaaggcccagggagaaagtaccagaggcagcactagcaatcagactgcgagcagccgtgggagttggagccctggagaccatgccacttcatcagttgcctctaaaaatagtttactgaccagatttggtgaggttgggatttgccgaagcagcttgtctgactatgctcgaaccttgtcgtttcacatcgacgactatttgcatttaaggcagagtgaggatctcctcttggagacgtggatgcagaaacaaaggatcgactctggcggcctagtcctgtgcagtaaatcgacgatattgtagagtgcagccaaataggtagttgatggggttgagttagactaataattgcttggatttttacctttagctgccatggctcctgccgcctagtgtgtatagatgcatgcattatagttaacagattggataagctttttttaacgcttcatcgtgattaagaaaatttattttttacaccatc

SEQ ID NO: 155662 - DNA, 2085 bp, Zea Mays
gaagctactgctattgccaattccgtctctattattatctgataatactcgtctctctgctcacaagtcacaaggaggggagcgaggcggcggccaacacctagcagctccgaaccctagctccggccactggcggcgatggctgctgctacggcgttccggtcggggacgaggcggggcgacgctctcgcgcccgtagaggacgcgggctccgccactcgcgagcgccaggccgcgggccgcggcggaggcagcgtccgccggtcgaagagcctgagccggttcccgccgccgtcgccctccaccgaggacacggcgacgccgtcgtcgaggttcgtcaacaaggtgcggggcgggggaagcggcggcgtcttcccgccgcaggtcagcctcgacgacctcgccgacgagttcttccgggccagggccgagtccgaggacgacgacgacgaggagactgctgcgcgcggccggtcaaggcttccagcggccgcagagcgtgggggcggtggcgctggcggtcggcggagctccaccgcgcggtacgctaggcagacggagtcttcgcggcagcgcgggcgctccgtgtcgcggccgccagccgagcggcgaggcgtagcggccaatgcggtggatggcggccctgcagccaggaggcagcgttatgcgtcggtcgaccggcgcgctgccatggatcgacaacggtggtgcgattcggataatgatatggaagttcctcaccagtatgtttctagggggatgcataccaaaagtagcagtggcaatagcctgcagagttcattccataagccatctaaagcaaatcaagctttgaagaggtctacaagtcaaaaggatttctttcattctagagacagcagctccagccattcttcaattactgatgatgagtctaggagttcactctctttccatagcagaaatcagaaggctgtctgtgcagtttatggtcttgacaaggagcacggaattgatgatggggctggaaatgtattgtacgatgtaatgcgaaaagaagttaggcaagctgttgaggaaataaggaatcagcttgaagaggccatgacaaaatctgaaccttcagaaaaggcaataaacagtgatgcacaaccaacccaagttattactcagctccgaaggagctacactagtaaattggaagagtcagagaagcggaagcaggaactgttagctcaattggcagcagaagaacaccatggtcatgagctcacaaaaatagttagagaattgctacctactcctaaaaagactgcaaacttacaaagacagccacactacagaagaaggagcaatgatagatcaaggatgtcaaaacgacttactgaagaggctgaacaatactttgaagatttcctgtcgaatgttgaagacactgacttttcttcttagcctaagcatctcaagtttgctttagacaagttaaccaagaatacacctagaattgcattcgtttgcagatagaggtaatatttgtagggtagggatgctgagtcaaatgatgaggtgatttttttgttgttgttaatgacttcaacatgttaccttttctctaattgcatgttgaactcagggagaaagtaccagaggcagcactagcaatcagactgcgagcagccgtgggagttggagccctggagaccatgccacttcatcagttgcctctaaaaatagtttactgaccagatttggtgaggttgggatttgccgaagcagcttgtctgactatgctcgaaccttgtcgtttcacatcgacgactatttgcatttaaggcagagtgaggatctcctcttggagacgtggatgcagaaacaaaggatcgactctggcggcctagtcctgtgcagtaaatcgacgatattgtagagtgcagccaaataggtagttgatggggttgagttagactaataattgcttggatttttacctttagctgccatggctcctgccgcctagtgtgtatagatgcatgcattatagttaacagattggataagctttttttaacgcttcatcgtgattaagaaaatttattttttacacca

SEQ ID NO: 155663 - DNA, 2094 bp, Zea Mays
aattctgctcggtgcactcgaagctactgctattgccaattccgtctctattattatctgataatactcgtctctctgctcacaagtcacaaggaggggagcgaggcggcggccaacacctagcagctccgaaccctagctccggccactggcggcgatggctgctgctacggcgttccggtcggggacgaggcggggcgacgctctcgcgcccgtagaggacgcgggctccgccactcgcgagcgccaggccgcgggccgcggcggaggcagcgtccgccggtcgaagagcctgagccggttcccgccgccgtcgccctccaccgaggacacggcgacgccgtcgtcgaggttcgtcaacaaggtgcggggcgggggaagcggcggcgtcttcccgccgcaggtcagcctcgacgacctcgccgacgagttcttccgggccagggccgagtccgaggacgacgacgacgaggagactgctgcgcgcggccggtcaaggcttccagcggccgcagagcgtgggggcggtggcgctggcggtcggcggagctccaccgcgcggtacgctaggcagacggagtcttcgcggcagcgcgggcgctccgtgtcgcggccgccagccgagcggcgaggcgtagcggccaatgcggtggatggcggccctgcagccaggaggcagcgttatgcgtcggtcgaccggcgcgctgccatggatcgacaacggtggtgcgattcggataatgatatggaagttcctcaccagtatgtttctagggggatgcataccaaaagtagcagtggcaatagcctgcagagttcattccataagccatctaaagcaaatcaagctttgaagaggtctacaagtcaaaaggatttctttcattctagagacagcagctcctttgtatttttacctttaattatgcagagccattcttcaattactgatgatgagtctaggagttcactctctttccatagcagaaatcagaaggctgtctgtgcagtttatggtcttgacaaggagcacggaattgatgatggggctggaaatgtattgtacgatgtaatgcgaaaagaagttaggcaagctgttgaggaaataaggaatcagcttgaagaggccatgacaaaatctgaaccttcagaaaaggcaataaacagtgatgcacaaccaacccaagttattactcagctccgaaggagctacactagtaaattggaagagtcagagaagcggaagcaggaactgttagctcaattggcagcagaagaacaccatggtcatgagctcacaaaaatagttagagaattgctacctactcctaaaaagactgcaaacttacaaagacagccacactacagaagaaggagcaatgatagatcaaggatgtcaaaacgacttactgaagaggctgaacaatactttgaagatttcctgtcgaatgttgaagacactgacttttcttcttttgatggagagaaaagtgactcaagttcaaccaggaaagacctgttgttacttcatgctatgacagaaactccagttaagctcccagaagttgctttacctgcagaggcagatggcgttgtccttccctggctgcaatgggaaactaccaatgactttcagacctccccgtgcaaaaccaaggcccagggagaaagtaccagaggcagcactagcaatcagactgcgagcagccgtgggagttggagccctggagaccatgccacttcatcagttgcctctaaaaatagtttactgaccagatttggtgaggttgggatttgccgaagcagcttgtctgactatgctcgaaccttgtcgtttcacatcgacgactatttgcatttaaggcagagtgaggatctcctcttggagacgtggatgcagaaacaaaggatcgactctggcggcctagtcctgtgcagtaaatcgacgatattgtagagtgcagccaaataggtagttgatggggttgagttagactaataattgcttggatttttacctttagctgccatggctcctgccgcctagtgtgtatagatgcatgcattatagttaacagattggataagcttttt

SEQ ID NO: 155664 - DNA, 1041 bp, Zea Mays
cgcgcccagctgcacccgcgatcccggcgcgtccgcgacacccgcgcctgcagcgacccaagacccacccgcccaggtgcccgacgctgcgcacccgacagcagcagccgtcgagccagccccgtgtcgcgcgccccctgcctcccttcccagccgagcccctgcccgaccgcgccgaccgcgcgactcgctaggaccccacgcccccgcgcaccgcgcgtagcccgacgcgccaagctgccgtgacgccgcctcacccgacgcgtcgcgcccatggagccgaagaccccgcaaccgagccgccctaccgaagccacacactcgaccgcgcgcaggaccgaagctccgagccaccagccccaacacgacgctgccaggaagccgaccgaagcctgcgtccgttcgtctgcgcgttattggagcttcaatgccgtcattacctcccttcgttgatgaatgccatcaatggcagccatgaagaccgtccgttcatccctccccggcgccctctcatctcccctcgccctcgcctataaaatagatgccgagcctcctcccttgctcccccaagttctctctagctcctcacattcgtgccctgctctttggaccacgtcggacagcctcgactgagcccctacagccgaacccctccatgctcttcctctcgccaccggagctccgtccgtgctcaccgtccgccgtcaacgcgaccgcgcagcacctcgactggaccttccgcgcctcgttgttcgaacgccgtcaccggagctcgtccgcatagcacctcgaccgtgctcacgccgttcgtcgatcgttcgccatccgtggagactcaccggagttcgtccacgccgctcgacgtcgtacctcgccatccgaacgctcaccgacgaccgtgtccgttctttgccccccaagaccgccgttcatcccaaggttgaaaacaaccccaacccgttaatgtattttctaaatcgtgtttgaattactttattgatcttatgaattattgttgtaatattgatgcgatttggcgat

SEQ ID NO: 155665 - DNA, 1807 bp, Zea Mays
cacctgccggcgtcccgaagagcggaacacctgaagccaacgccggccgtgctgcttccgctgcctcatcgcaccaagccaccagtccgcagcacgaaagcttccccccctctcttctcctgctggttggctcatcaggcctgcccgaataatcctcctgcggattcccctcacggcaggccaaaacccgcacctttcccccgtcgacagattctcaaacccggcgaactccgggcagggctcacgtcgccgatcccgctcccggattctctttgccgccgcgaggagacggcgtccagtccaggccttcagcagctccgtctccgtgtgtatctgatcgggggattctttgcttgagaaactgctagcatgggcgcggtgcttggacggcatgacacgcacaagcggagttcccatggttcgaagctggaggtaaagatggtcgacgctatgcagcagagagcatcgcatggaacctcactgaaatcgttcgatagcattatcatgaagttccccaaaatagacgagagtttcagaaaatgcaagactatcttcgaacagtttgatgaagattcaaatggcgaaatagataaagaggaactgaaacattgttttcaaaagctggaaatctcattcacagaggaggagatatgtgatctctttgaagcttgcgatataaatgaagatatgggcatgaagttcaacgagttcattgtctttctgtgccttgtctatcttctcaatgaagcagctgtcttggaagcagtatccttcataagtcatattaattcacatagtaacatcctgattgcattattagtgttattgtcacattgtgttgtgttgctacagaggtatgcaatgtaattttacttcacttacaaaaaggtaattttactttgataatttttcttaaatccattagcgaagtcttggtttctttatataattacacgtggttcttattggcaaatttattgtgttgatggagacaccaattttcatcctaacataagcttgccgcaattttgattggattatgaaggtttctagatttactgtgagaatttttttgcactcggtgttttagttctcttagatcgtctcagcagtctacccatagtttacccaaaagcattgttttgcactgttctgcattataaattacactgttcgcagagtggagtttgaatatgggtatggagatcggtaagctgctggagatagtcttatgccatttctgttaggagcgtccatgtttcctttacatacttcacagaagataaagatgggactaggaaatcttgaggcaaccttcgagaccttggttgatgcgtttgtcttcttggataagaataaagatgggtatgtgagcaaggatgagatgatccaagcaataaacgagaccacgacaggagagcgctcttctgggcctatagccatgaaaagatttgaggaaatggactgggacaagaacggaatggtgacattcaaggagttcctgtttgccttcactcgctgggtaggaattgatgaaaatgaggatgaagatgacgatgaataaggactgtgaaggctggttattcttcaagggttagggccagatcagccttggagaagctggaaatggatggcggataaaagcagttgacgtttattggttgcttgttgatcgtaatattcatgccattgctaatagaatgtctcgacattatactcctagtagggtgacttgcatgtctgaacactggtatcaatgttacagttgctgtctactttcttccatgccattcagccattgttctac

SEQ ID NO: 155666 - DNA, 1276 bp, Zea Mays
cacctgccggcgtcccgaagagcggaacacctgaagccaacgccggccgtgctgcttccgctgcctcatcgcaccaagccaccagtccgcagcacgaaagcttccccccctctcttctcctgctggttggctcatcaggcctgcccgaataatcctcctgcggattcccctcacggcaggccaaaacccgcacctttcccccgtcgacagattctcaaacccggcgaactccgggcagggctcacgtcgccgatcccgctcccggattctctttgccgccgcgaggagacggcgtccagtccaggccttcagcagctccgtctccgtgtgtatctgatcgggggattctttgcttgagaaactgctagcatgggcgcggtgcttggacggcatgacacgcacaagcggagttcccatggttcgaagctggaggtaaagatggtcgacgctatgcagcagagagcatcgcatggaacctcactgaaatcgttcgatagcattatcatgaagttccccaaaatagacgagagtttcagaaaatgcaagactatcttcgaacagtttgatgaagattcaaatggcgaaatagataaagaggaactgaaacattgttttcaaaagctggaaatctcattcacagaggaggagatatgtgatctctttgaagcttgcgatataaatgaagatatgggcatgaagttcaacgagttcattgtctttctgtgccttgtctatcttctcaatgaagcagctgtcttggaagcaaagataaagatgggactaggaaatcttgaggcaaccttcgagaccttggttgatgcgtttgtcttcttggataagaataaagatgggtatgtgagcaaggatgagatgatccaagcaataaacgagaccacgacaggagagcgctcttctgggcctatagccatgaaaagatttgaggaaatggactgggacaagaacggaatggtgacattcaaggagttcctgtttgccttcactcgctgggtaggaattgatgaaaatgaggatgaagatgacgatgaataaggactgtgaaggctggttattcttcaagggttagggccagatcagccttggagaagctggaaatggatggcggataaaagcagttgacgtttattggttgcttgttgatcgtaatattcatgccattgctaatagaatgtctcgacattatactcctagtagggtgacttgcatgtctgaacactggtatcaatgttacagttgctgtctactttcttccatgcca

SEQ ID NO: 155667 - DNA, 1905 bp, Zea Mays
atggcggcacctactgtgctcgccttccttccgcttccgcttctgcttctcgcagccttctcatcagcatcagcctcagcgcaccccaactctttccggccaatcgttcccctgcgtctccaggctcttctgcagcagcagcagcggcggcgagcgagctcggacgccaagctcgtctccgcggccgccgacggcaccaacagcacggcgcagccgttcacgacgcactactttccccaggagctggaccacttcacctttacgcccaacgcgtcgatgctcttccgccagaagtacctcgtcaacgacaccttctggcggaggccccgccgcggcggcggcggcggcgccgggccgctgttcgtgtacacgggcaacgagggcgacatcgagtggttcgccaccaacaccgggttcatgttcgacatcgcgcccaagttcggtgcccttctcgtctttatcgagcatcggttctacggcgagtcactgccgtttggggacgactcctacagctcagcggagacggagggttacttgacgtcgacgcaggcgctcgccgacttcgccatcctcatcaccggtcttaagcgaaacctctcggcggagaccgcgcctgtagtcgtcttcggcggctcctatggcggcatgctggcttcttggttcaggctcaagtacccccatgtcgccataggggccctggcatcctctgcgccaatcctacagttcgaccacataacgccatggaacagcttcagtgatgccgtctcacaggactacaagtccgagagcttgaactgcttcagtgtgatcaaggcagcctgggacgtgctcgatgagaggggatccactgacacagggctcctggagctcagtaaactgttcagagcctgcaagagcgtcaagcacgctgattcgattgcaggctggctacagacggcattcacctacactgccatggtggactatccaacaccggccaacttcctgatggatttgcctgcctaccccgtcaaggagcctatccagatgtgcaagatcatcgacgggttcccggcaggcgccgacatcctggaaaaggtgttcgcggcggcgaacctgtactacaactacacaggagaccaggcctgcaaccagatcgagtctgattctgacgacagctccagttctcttgggctcagtggctgggggtggcaggcttgcacagagatgatcatgccgatgtcgacctcaaacgccagcatgttcccgccatccagcttcagctacgaggacacgtccaatgcctgcttccagtcgaccggggtccggcccaggccgcactggatcaccactgaatacggcggatatagaatcgacaaggtgctcaagaggttcgggagcaacatcatcttctccaacggaatgcgagacccgtggagccgaggcggggtcctcaagaacatctcgtccagcatcgtcgcccttgtcacggagaaaggtgagcatggaaacctcaggaggaagaagaagaagaagaaaaaaaaatgggcgcatcatctggacctcagattcgcgaccgatgaggatccggactgggttacagaacagaggaggcaagaagttgagatcatagagggatggatagaccagtatcatcgagacatggcgcaagtatcctaaaggagtaaaggtgctgtgttgcagatttacagttacagtcaagacaagttcacgtctggtctatgaaaaagaaaacataaaaaggaaaagttcctttatagcgcacaggacaatcacagggacattaagatgataaaaggtgaaaagccagtccaattgtttcacttatcaacataagctgtaaaacttgaacactcttggacgaatcatgaatgaattgttacacgatgctcagtgtttttcccc

SEQ ID NO: 155668 - DNA, 2559 bp, Zea Mays
atgttatcccaacatgtattgaccttgaccatcttcctcttcttcctggtctgtttctgccactccctccatgatcgcctaacctcagtaacaccactctaccccggtgacaagctcgtctccgacaatggtggcatgtttgctctcggcttcttcaacctcaccaccgtcaactcaacgcgaagcctgtacctcggcatatggtacaacaacatccccgagcgcacctacgtctgggtagccaaccgcaacagcccaatcaccacgccttcagcaaagctagtcctcaccaacacttcccgcctggtgctgtccgactccgagggccgcgtagtctgggcgacagacaacagcgtcgtcgccggcggcagcggcaccggcaccggaggctccggagtgctgcggagcacggggagcttcgagctggagctgcagctgcccaacggcacagcaggcgtggtgtggaagagcctcgaccaccccaccgacaccatcctcccgaccttcaggctgtggaccaactacagggcccacacggcggtgcgcgtcgtcgcctggaagggccctcgggacccttccgccggcgagttctccctcagcggcgaccccggcagccggggcctccagatcgtcatctggcggggcacaggcacaggcacagcgggcggccgctcgtggcgcagcggcgtgtggaacggcgcgggcgccttctcctccatcaacaggttcgtgtactcccaggtcgtcgacgacgggggcacgatctacgcggcgtacaacgccgccggcggccccacgacgcactggaagctggactacacggggaacgtgagcctccgcgtctggaacgtcgagtcgtcgtcgtggagcgtcctcttcgagggccccggcaccggctgcctgggctacggcgcgtgcgggccgttcggctactgcgacgccacggggcgcgacggcggcgtccaggagtgcaagtgcctcgacgggttcgagccggaagacggcttcttccgcgacttctccagagggtgccggaggaaggaagcgctgcaggcgtgcggcggcggcggcgaaggtggcggcgggaggaggcattatttcctggccttgccggggatgaaggtgcccgacaagttcctgtacgtcaggaacagaagctttgaggagtgcgctgccgagtgcgaccgcaactgctcctgcaccgcgtacgcttatgccaacttgagcggcatcgtcaccatgagtgccaccagtgacgtgtcaaggtgcttgctttggatgggggagcttgtcgacaccggcaaggacagtgatttaggtgaaaacttgtaccttcggctggccggctctcccggaaacaacaacaagaagaagatcggcagcatggctatggagattgtgctcccggtgatggcatgtctgttgatgctcacatcatgtgtatgtcttgtcactatatgcaagtcaagagctcgcacgcgacgatggaacaaggaagcacacgagaggagcgttcacggtttctgggatcaaaatccagaactatcgtgtacaagctttgcggagctcaaagcagcaacaaatagttttcacgaagccaacttgcttggacaaggcggctttggaaaagtatacaaggggacactggaagatggcagggaagttgctgtcaagaggctgagcaacggctctgagcaaggtaaagaacagctcagaaacgaactagtcctcattgcgagtctgcagcacaagaacctggtcaggcttctgggctgttgcatccacgaagacgagaagctgctcatatacgaatacctgcccaacaagagcttagacaaattcctcttcgatcctgcgctcaagtccatgctcgactggccaaaacggttcaacataatcaaaggggtagctcgtggaatcctttacctccaccaggactcaaggatggtgatcatccacagagatctcaaggcgagcaacatcctgctggacgcagagatggaccccaagatctccgacttcggcatcgccaggatcttcgggtgtagggagcagcaagcaacttgctttgcttgtgaaatggttcggacacacagcggttacatgtcgcctgagtacactatggagggcatcttctcggtcaagtccgacacctacagcttcggcatcttgctgctggagatagtcagtgggctgaagatcagtgcccctcctcatctactgacgggctatccaagccttattgcctacgcatggaacctatggaaagatgggacggcgagggagttcgtagacgccatggtcgtggagagccgctgctcgcttgacgaagccctgcagtgcatccacatcgggctgctgtgtgtgcaggacagcccgaacgacaggccgctcatgtcgttggtcgtgtccatgctcaacaacgaggccgcgccacgcccagtgcccagccagccgttgtttttcgcgcagaggtaccatgaagccctggcgacgagaggagactattcggaacactctgctaatgacgtcagcctgtcgatgctacaaggccgatag

SEQ ID NO: 155669 - DNA, 1496 bp, Zea Mays
accgagaacccagccactctggtctctctctagtctgactctgctctgctctggggtctcgcgctcgcgactcctcgggcggcgcgcctcgccggtcgccatggcctcctcctcttctgagttgaggcccgcgagcaggaggatcgtcgattacctcaacgacggcgaggagctcggggccctgggggcggtggtgacgccgccgtgttcccctgctgcggttgcggtggggaaacaggccaagtccgcgctgcccaggttcaggtggccgcggctcgtcaggttgcggagagagggaggcggcgacgaggggaagccgggggtcgtggtggtggagaagggcgacgacctccccgtggcggccgcgtctacctcaggatgcgaatcatcagcggcgagcgacaagaggcatcccgacctcggcgtcgggctaagcctgctgttcctgctggccaagacgtccgacgagttcaacaagatggccaaggtgcgcgcggagatggaggcgctcctgagagagttaaaagacggggttaggaccaagagcggcggcaccgagggccacggcgcgccgaaagaccgcaaccgcgagtccaccacgtcgagctgcgtcaccgacggcaacgaccagaccgcaagcgctcgcctggagtaccagctcgcctcgtcttgcgtggagccggcgggctacgagaggtcgtccgaggatgacggaggctgctgtgcgaggatggagttggacgtgcttgaggaggagttccacgccgagctggagctgcttcagggtaactatgagtcagggacaccatcgtttctgcctgaagaagaagaagaggaacactattccgagccctacgacgagatggccgactaccgggatggagttgatgaagattcaaggggaggtgttgaggatgaagacgacgacgacgaccatgacgctgagtacaacggagtttctgccgtacagttggagagaaggctccacgagcttctccacgaaagaaaccgggaccggattgaggagctggaagccgcgttgaggcgtgcggagaagaagcttgttgagaaagaaatggaggtgtccctgtggaaggacacggctaagtttgcgttgagacaggacaaggagttgcaatgagcatcgaatttctcctgttctctttcaatcgtacaactcttgcgcacgatttcatcggctgtccatgatcaccgaccgccgaaggaggattttggtcaaacaaggtttgccatggcgaactgcggtttgtggaagatatagtcaacctgttcataccaaagtttagtgctagcatattagatctccagtgaacgttttgggctccggtaaaaatcagtagaatgctgtgtaacagtgtaagttagcctactggtgtacggatcaatatgagatttgatacttcatgtttctgtatgcgcattacatggatggattatgtgtgaaatcagacttctcatgtgcgtcttttcccttt

SEQ ID NO: 155670 - DNA, 753 bp, Zea Mays
aaaaacaaacgacaaacccagggagaaaggacgcgcgagacggagtcgccggagggccccgcgcgcaggcggggcggatgccgtcccgtcccgccccgttcggccgggccgcactcggcactcgcaccggatggatgcggtcgccgtcgcgtggcgtggaccccgtcgtcgaagatgcgagcggaggcggcggcggccgcctggcctggcctgtggcatgtggcctggcttgcctagcgaagtagtcgccgcgcgtcgcgtggagtggatggagggaggctctggatggagttggagccccggccttccggtcggcaggtgggacttggccgctcgtcccagcgcctcgccccggcagcctgcaatgcaagtggccggccagcgacttgtcggtcctggagcttgaccggctcgctcccggtcccagtcccaggcccgtgcacggaggatgtgtgtgacttgtctgctcgcagtcacgtgcgcaaactgtgcgtgcggcacggattcgaagctttggtggtacagtacagtagctgtggtggggactgcgtggcaaaagtcaagtcttgtcttggccaaggttctggctttttttgtttttttttctacgcgctagctgttgcatcttgctgcagagtaaatctgtacacccattttttgatataaacggtcgatatatgtgggcttgagaaaatggtgtattcttcgttgtacaacccacatgatgtattacagtttttttttaaaaaaaat

SEQ ID NO: 155671 - DNA, 3042 bp, Zea Mays
aacacgcacccggcgtaccgcgaggggttccgggtccacctgtcagcgtcccgcctaaaccccgtcgccgcgccgcccagggccggcaggctggtagacccgtcaaatccaagcaaaggccaccccggccggcgacgacttccccttccaacacccacctcgcccgtccctccctccccgcaccctgatcccccggcatccatccatggcgacgaacagcgcggtgattgtgctcctcctcgtcgctgctgccgtactcgcctgcgcgggcggtgcgcgcgggttctacctcccgggcgtcgcccccgccggtttcctcaagaaggacccgctcgccgtgaaggtgaatcagctgagctccatcaagacgcagctgccctactcctactactccctccccttctgcaggccgggcacaatcgtcgatagcgccgagaaccttggcgaggtgctccgcggcgaccgcatcgagaattcactctacgtgttcgagatgatggagcctaggctgtgccagatcgtgtgcaagattgctccaacccaagatgaagcgaaggatctgaaggagaaaattgaggatgagtaccgcataaacatgatccttgacaaccttcctttggtcgtcccaattaagagattggatcaagaggcacctactgtataccagcaaggcgtgcatatcggcatcaagggacagtactcagggagcaaggaagagaagcatttcattcacaaccacttcacatttctggtgaagtatcacaaggatgacacaggtcttgccaggattgttgcctttgaggttaaaccatacagtattaagcacgaatttgatggcgactggaaggggaatgctacactccttaaaacctgtgacccacactcaagacgccttgtcgtagactctgattcacctcaagaagtagatgccaacaaagagatcattttcacctatgatattaactttgaggaaagtcctatcaagtgggcatcacgctgggacacctaccttctgatggcagacgaccaaatccattggttttctattgtcaattcactgatgatagtcctcttcctctctgggatggttgccatgatcatgctccgaactctttaccgcgacatctccaagtacaaccagttagaggaccaggaggacgcccaggaggagacaggatggaagcttgtccatggagatgtgttcaggcctcctgtcaatgctgacctgctgtgcgtatatgtcggtacaggcgtacagttcttaggaatgctgcttgtcaccttgctgtttgccatcctcggcctcctttcacctgcgaatcgcggagggctcatgacagcaatgctcctcctctgggtcttcatggggctgtttgcagggtacgcctcctcgcggctttacaggatgttcaagggctcgcagtggaagaatgtcaccatcaagaccgcgctgatgttccctggcatcgtgtttgcaattttcttggtcctgaatgcactcatctggggcgagaaatcctcaggcgccgtgccattcaccaccatgtttgctctggtactcctctggttcggcatctccgtgccattggtctttatcggcagctacctcggcttcaagaaacctgccatggaggacccagtgaggacaaacaagatagcacggccaataccggagcagccatggtacatgaacccggtcgtctcggtgctgatcggaggcatcctgcccttcggcgcagtgttcatcgagctcttcttcatcctgacatcgatctggctgcaccagttctactacatctttgggtttctgttcctggtctttgtcatccttatcctgacctgtgcagagatcgccatcgtgctctgctacttccagctctgcggcgaggactaccagtggtggtggagatcctacctgacgtctggctcgtcagcgctgtacctcttcctctacgccacgttctacttcttcaccaagctggaaataacgaagaccgtctccggcgtcctatactttggctacatgctcattgcctcctacgccttctttgtgctcaccggcaccattggcttctacgcctgcttctggttcaccaggctcatctactcttcggttaagatcgactagagagtaacagctgcaacactgctccgtgggttttcgaaatcagagatcaagagagaatactaggtaacgaaccatcagaatttgagagggtagtgtgcgttatttttataaggtggaacttcaaacgtagggtgcttattcagtgctttagggtttttacagtttgattctggaacactaagtcagtttacttcgaagtcagtattttcagtgtgtatcccttacagaagaggtgtctgatggtataattcaactacttaacaatttaaccatatgttatgtttggtgaaattatgatggtattagcagtttgattcagcaacattaaatgtataaattagtgtactggccacaccccacacaacaagtttcggttacagatgctacaatgaaacgagcttaacatttgaaccacatatcttccgtggttctaataattaaatcacaagggaggctacttattcagtaagaaaattggcatgttatacatacatggataacaagatagtagcactcgaggtttttgcacatatggaacacatacataacacccgccaaagagcctaatcctatcttattttcggaacatctcggtaagctagctaatcgacgatctccacgggccttttctaagctcggctggcctgctggtcgcgcccgttcttcttgctcccgaacatgacgtagctgaggccgccaacgacgatgaggccgccgaccgccagcgtcgttgggctgtagcgccgtagagggctcgacggatgcgccgatgccgaccccgcgcgcttgagcgggtcttctgccatggacgcccacgcgtacatcttctccggccacatcacgcacacacggtgctcctttctggattctgatgatggctacctccactacacggactaggaagctctgtgtcc

SEQ ID NO: 155672 - DNA, 2111 bp, Zea Mays
aaagtggtccttttccatccccaaacctcggctgccatggatttcggcttcggcgccggcgaccggaggccgctctgctcttccccggaccgacacttcgcaccaccgcgagccgagcttttccatggcggtccgccgccctcgctgttcgagtgtgaggccgcggcgtggcgcgagaggatcatccgcgaggaggtggagcggcggctcatcgagaaggaggtccgccgcgatctctcccttgcgcgcgcccgcggcggtttcggccccgtcccgttcgtcggacccaatggccacatcgtgcggtcaccacgccaaggcacgttcttcaggccggacggcccattcacgtcgccaatgccgctgaccccgatgccggtcggcatgcatccgaactggccaccgctgccttcgttcgggtcgtgggaggggtttggttctcggcggctcgcgggatttgggcagccgatgctcctcaacgagacgagaacgaggtccctgccgccgccaaagccgatgcatcagctccagctgcgcatggtcacgcccagcgagagctccgaggttttttcatcagaaacaaaggattctggtgtgaaaaggaaggcacatgcgatttctgcaactactgaatcaacaaaaatacaaaatgctgcaagggactggagctgtgcactctgtcaagtgagcgcaaccagtgagtctggtctgaatcagcatcttcaagggaaaaagcataaggcgaagctggttcaatgtggagcgatcaaggtgatggatactaataaaagtggtttacatgtaactactggaaataacaatggcgcaggcccaagtgacgcgcctaagaaaatccacatcctggtcgatggagaaatgcaccaggtcgtccaaaaaagcaagcgtgtatggtgtgagcgttgcagggtcagctgtaccaatgccggtgccatggctgaccatctgcggggcaagaagcacagtttattgaataaagtctgggcgtcaataaaagccgtgagaaggaacaatggaattaaggaagattcagctactgctacatgtgagagaaaggtaaatgaaagcggccctgctggaattccagaggaagaggaacatgaggaggagggagacacatacatggctagcgaattcagcggagatgcttcttccgaaattcctatggaaacgaaggaaaccactgacatggccgaagaagcagatgcagatagtcacagcgtaactcctgtgggaatcaacaaggaagacaccgacactgcgagcaaagcaaccagaaattaccccgcgggaaccaagcaggaagacactggcgtggtcatggatgtaaacaagaattctccgccgaaagttcatcagaaatcaaggaaggaatttccgttgaaagtccatcaggaatcaagaaaaaggaggcaaaataagaaatttctgtcgaaagtgcatcagaaggcaaacgagaatttgctgccgcaatgtgcatcagaatccaagaccgaaggattcgggaagtaaatggaagtagctctattgagattccagctgggggaagacacatagacgcatccactgattttaggcagaacctgtgcgggaggaggaataacacgccgcaccagtgttgtaatttggttagcagtaagcttttagtatcgtgcgatgaactctagtagaatctatccgtattatgggccttctgtagtattctttgtctctatgtagttttcaggtctgatgcttgcatggtctcggatcccctgcagctgatgtcttggatggtagcttgtggttacgttagaattccagatctgattgcaggctgcgggctcgtggatacatagctttactcctatattagatgctgctgttctgttcagtaggtgctgaataacatgtcttctgttacaatcatagcgatcgatagtcacagcaagtccagaatctgtcgccactacacacgaagacgtgctacaggcgggcatagctctaggtaggcctgcataattttaagccaactatcgaaccgaaatttcgaaaactgacccgaagttttggttttttggggttcggtgtcgatttcggttttaatacctgag

SEQ ID NO: 155673 - DNA, 1600 bp, Zea Mays
aaagtggtccttttccatccccaaacctcggctgccatggatttcggcttcggcgccggcgaccggaggccgctctgctcttccccggaccgacacttcgcaccaccgcgaggtaagcgcccttccatccagagatcgagatcccagacttgcagcttctgaaagtccctgctcccgcgcagccgagcttttccatggcggtccgccgccctcgctgttcgagtgtgaggccgcggcgtggcgcgagaggatcatccgcgaggaggtggagcggcggctcatcgagaaggaggtccgccgcgatctctcccttgcgcgcgcccgcggcggtttcggccccgtcccgttcgtcggacccaatggccacatcgtgcggtcaccacgccaaggcacgttcttcaggccggacggcccattcacgtcgccaatgccgctgaccccgatgccggtcggcatgcatccgaactggccaccgctgccttcgttcgggtcgtgggaggggtttggttctcggcggctcgcgggatttgggcagccgatgctcctcaacgagacgagaacgaggtccctgccgccgccaaagccgatgcatcagctccagctgcgcatggtcacgcccagcgagagctccgaggttttttcatcagaaacaaaggattctggtgtgaaaaggaaggcacatgcgatttctgcaactactgaatcaacaaaaatacaaaatgctgcaagggactggagctgtgcactctgtcaagtgagcgcaaccagtgagtctggtctgaatcagcatcttcaagggaaaaagcataaggcgaagctggttcaatgtggagcgatcaaggtgatggatactaataaaagtggtttacatgtaactactggaaataacaatggcgcaggcccaagtgacgcgcctaagaaaatccacatcctggtcgatggagaaatgcaccaggtcgtccaaaaaagcaagcgtgtatggtgtgagcgttgcagggtcagctgtaccaatgccggtgccatggctgaccatctgcggggcaagaagcacagtttattgaataaagtctgggcgtcaataaaagccgtgagaaggaacaatggaattaaggaagattcagctactgctacatgtgagagaaaggtaaatgaaagcggccctgctggaattccagaggaagaggaacatgaggaggagggagacacatacatggctagcgaattcagcggagatgcttcttccgaaattcctatggaaacgaaggaaaccactgacatggccgaagaagcagatgcagatagtcacagcgtaactcctgtgggaatcaacaaggaagacaccgacactgcgagcaaagcaaccagaaattaccccgcgggaaccaagcaggaagacactggcgtggtcatggatgtaaacaagaattctccgccgaaagttcatcagaaatcaaggaaggaatttccgttgaaagtccatcaggaatcaagaaaaaggaggcaaaataagaaatttctgtcgaaagtgcatcagaaggcaaacgagaatttgctgccgcaatgtgcatcagaatccaagaccgaaggattcgggaagtaa

SEQ ID NO: 155674 - DNA, 529 bp, Zea Mays
tgtctcattttgtacttctttccacataaaacaggcatacaatttgtcaagagaccataaaccagagcttgaggcagagagagaaaggatacaaagtgccgggggttacattaaaatggggcgtgtaaatggaagtttaaatttgtcaagagctattggagacatggagcttaaacaaaacaagttcttgtcccctgataagcaaattttgaccgcaaaccctgacataaacattgtcgagctatgtgacgacgacgaattcattgttttggcatgtgatggcatttgggactgcatgtcaagccagcagttggttgatttcatccgtgaacatataaacacagaggaaagcctttctgcagtatgtgaaagagtgcttgatagatgcctggctccatcgacggctggcgagggatgcgataacatgacgatgatcctggtgcagttcaagaagccatttgctcaggtaaaggatgccagtggtgcggaacaactaactggagatgcgggatgctctgagacccagtga

SEQ ID NO: 155675 - DNA, 1631 bp, Zea Mays
cctgcgctgcttcctttgtcaggttcagtcgctcaccaatctgccgttcacacctctctcgctgcctttatttcctgttggcgacgctctcgccaggtcttcggcggcccgttcgtcggcgactagcgcctccgtttgccaggtcttcgtcgtccgttcgccgtcgactggtgcccagcaggtacatctggaagaatggtgatttaccttagcacaccaaaaaccgacaaggtatccgaagatggggaaaacgataaacttaaattcggactttcatctatgcaagggtggcgtgcaactatggaagacgctcactcggctttgctagatcttgacaatgacactgcatcctttggtgtttttgatggacatggaggaaaagtagttgccaaattctgtgcaaaatatctacacatagaagttctccataccgaagcctatgctgctggtgacctgggtgctgctgtccacagagcttacttaagaatggatgaaatgatgcggggtcaaagaggatggcaggaactccaagcacttggagataagataaatcagttcactggcataacagaaggcttgatttggtcccctaaagcaagtgattcaaatgatagacatgatgattgggctttcgaggagggaccacactctgactttactgggccaaattgtgggagtacagcatgtgtagcattagtgagaaataggcaactcgttgtggcaaatgctggtgactcccgctgcgtcatctcaaggaatggccaggcatacaatttgtcaagagaccataaaccagagcttgaggcagagagagaaaggatacaaagtgctgggggttacattaaaatggggcatgtaaatggaagtttaaacttgtcaagagctattggagacatggagcttaaacaaaacaagttcttgtcccctgataagcaaattttgaccgcaaaccctgacataaacattgtcgagctatgtgacgacgacgaattcattgttttagcatgtgatggcatttgggactgcatgtcaagccagcagttggttgatttcatccgtgaacatataaacacagaggaaagcctttctgcagtatgtgaaggagtgcttgatagatgcctggctccatcgaccatgggtggcgagggatgcgataacatgacgatgatcttggtgcagttcaagaagccatttgctcaggtaaaggatgccagtgatgcggaacaactaactggagatgcgggatgctctgagacccatggggccgaggagaatgactctgacaagcagatatagcgaagacaggactcttttggagtcttggtacatggcctgacgctgaacctgggtaaaacaggagtacgatgttgcaatgtacataccaaccatgcgctgagttggcgtgaaggatatattcattgttccactgttgtctttaaccaaacgtgctgttttcttccggttgtgatttttggtgacctgatcatctgacaatatctaattatacatttgggaggaaatgatgttacaatagttattgtgggtgtttgtttgggattataatttgttcagattatataatctaacttattttaaattaaactgttagttcaaaataagttagattatat

SEQ ID NO: 155676 - DNA, 1474 bp, Zea Mays
atgaaaacaagttataccaatatgatatatagaaactgtagtaatatagacatctataaattttctctctccaccttcggttacctcctcgtttctacggtttaacgattttcaaattcggcctaatcaagtcaaggtactcctaattgatatacgtttaattaaaaaagtgaaaggtccgctgcatatgcttgtcgggttcacccaatcacccctgcgctgcttcctttgtcaggttcagtcgctcaccattctgccgttcacacctctctcgctgcctttatttcctgttggcgacgctctcgccaggtcttcggcggcccgttcggcggcgactagcgcctccgtttgccaggtcttcgtcgtccgtttcgccgtcgactggtgcccagcaggtacatctggaagaatgggggtttaccttagcacaccgaaaactgacaaggtatccgaagatggggaaaacgataaacttaaattcggactttcatctatgcaagggtggcgtgcaactatggaagacgctcactcggctttgctagatcttgacaatgacactgcattctttggtgtttttgatggacatggaggaaaagtagttgccaaattctgtgcaaaatatctacacagagaagttctccataccgaagcctatgctgctggtgacctgggtgctgctgtccacagagcttacttaagaatggatgaaatgatgcggggtcaaagaggatggcgggaactccaagcacttggagataagataaatcagttcactggcataatagaaggcttgatttggtcccctaaagcaagtgattcaaatgatagacatgatgattgggctttcgaggagggaccacactctgactttactgggccaaattgtgggagtacagcatgtgtagcattagtcagaaataggcaactcgttgtggcaaatgctggtgactcccgctgcgtcatctcaaggaatggccaggcatacaatttgtcaagagaccataaaccagagcttgaggcagagagagaaaggatacaaagtgccgggggttacattaaaatggggcgtgtaaatggaagtttaaatttgtcaagagctattggagacatggagcttaaacaaaacaagttcttgtcccctgataagcaaattttgaccgcaaaccctgacataaacattgtcgagctatgtgacgacgacgaattcattgttttggcatgtgatggcatttgggactgcatgtcaagccagcagttggttgatttcatccgtgaacatataaacacagaggaaagcctttctgcagtatgtgaaagagtgcttgatagatgcctggctccatcgacggctggcgagggatgcgataacatgacgatgatcctggtgcagttcaagaagccatttgctcaggtaaaggatgccagtggtgcggaacaactaactggagatgcgggatgctctgagacccagtga

SEQ ID NO: 155677 - DNA, 273 bp, Zea Mays
ggtgcttatggcatatgagttaaactaatgattaatgaactgtgtctgtgttaaattggtttatgcgaatataaatgtgggttaaattgataaacatatgtgtcaattgtgaattgatgatgatgagttatgttaatttggtgttacattgatgaggtctttaaaactacgagtataactaatattttatattgttaaatttgtttgaaattaactagaaattgattattattatatacatgtttttctctatctcacaggctaaacgagccg

SEQ ID NO: 155678 - DNA, 174 bp, Zea Mays
gtgaggatgcttatagcctgcttcaaaacttggacataaagaaacttctgcttgcaggtatcctgttagatacgaacaacctttccaagaagtgctcaaatagagattcagatgcagtgcagttgcttttgtttggaacctctgagcatatgaggcatgaattgtttcagcaat

SEQ ID NO: 155679 - DNA, 761 bp, Zea Mays
tcgtcctcgctaaactgatattccgcgcgtgtgtgcttgcaggcactggcagccaggaggtatcggcgacgagatactgcagcgcgcgtccatcgcctcgtcccctccacgctccgatcccttcgcctcctccgcgcctccctccccgtccccctccttacccccaaaccctcggcgcaagtctcgcttccgcgacgcccctacccccgattctccactcggtcgcgccacatacacctccacctcgcccatctccgccacgcattctcgccaccgccgccacgcctccgcttcctccgcccccgctttcgcggccgatggatccggtgacggtgtcgcccgcctcaactccttcctccgtcgacagcgtgccatggtcgctgacctagcggcaggggaccgccctgcgtcgaggtccaccaagctcgtgctctccgacccctccaaaagtctgagctcgattgtggcggcaatatgctacgcgtggatgcttcccagcaagggtgatggccaggcaacggtgccggtggtgaacatgagccggagcaggatggctaggtgcaggcaggcggcttggctcctgtatcacgtcggggtcgacgcctcagcgctgctcttcgccgacgaggtgcatcacgtgaccttactgtgcctcttcatgacgtgaatggtactatgtgtttggttggatacaaggaggtataaaaggaggcggtcatattttatacagtgtttggataagagccactcggggataaggt

SEQ ID NO: 155680 - DNA, 126 bp, Zea Mays
aacttaaactcaatttcaattataagtttaagattgcaagattaaatgcacaagcaataaaactccaatatgatgtctggcttatttatttatttttttattagatattttgttctcggagttatg

SEQ ID NO: 155681 - DNA, 930 bp, Zea Mays
atggacagaaaagaggaaaaagaagagcacgacaatgcagatgatgatgaagacgatgatgaagacgatggcgaggaatgtgagcattcagatgagtgtatggtttctaatgtgaatttcgatgccaatatgaagcaagaaacaaagggatttgaatccaaaggtattcagtgtactgaagcaccagaaccttgcaagacagtagaacttgagataaaggcacacaagaaagagttgatgagaaacagagtagcaaatgcagaagaaactcctggtttcatagtatatctgaatcgaaggccagcaagcttggttgaggccatgaaggatatcgactgtcagttctcagggatatgtgacgctgctcggaaaatctcagtaatgttggatgcaagtagagctcagtactcaacctcaaacgatctttctgcgaagatgctgaacccagttgcacttttgcgttctgcgtcatcccattcatcatcatctcgtttccttcttgctccctctagctcaatagatgatctctttgacaatgagactagcagctgctactctgaagaatcttgcagtaccatgtctggaagtcaccactctaccttggatagactctatacatgggagaagaaattatacaaagaagtaaaggcaggtgagcggttaagaatcgagtatgagaagaggctgacacatttgaggaaccaagatgtgaaaggcgaagaacctacctctgttgataagacttgtgcagcattgagaagcttgcatactcggctgaaggtgtcaatacacacagttcagtcggtatcaaggaggattgaaattctaagggatgaggagctgcatcctcagcttatggagttgattctggacacggagacgatcagcaagcacgacgtgatcagggattttccttcgcatctcctgtag

SEQ ID NO: 155682 - DNA, 157 bp, Zea Mays
gaactggaatattggataatattgatggtaaagtatcaaagtgtgtacaaagtacctggttgatgagtcactggacgtgagatgacctgataagattagtgagactgaacttgttgacacgggctatgatttcgaactccagtttatcctggtctgt

SEQ ID NO: 155683 - DNA, 1036 bp, Zea Mays
atgccttgcttccctccctccatttctcctttgcctcctcagctcaaaaagcggagccacccacgctccctggtccacatctccttccacacctgcaccggtgatgcccatgcacaggctgcacagcacaactgctgctgccgcgaggctaaaaacccatctgctctcctgccgcggcttcctccgcaagcacacccgggcatgggcaacattgctgcgtccggaggagtgcaggtccgtcggcggccgcctgcggtggacgagcgcctcacgcggccgcgccgcctcgtccgcgaactacccgaccttgacgccggccgccttcgtcgtctcatccgcactggcgacctcgcgccttgctttgaccccgccgaggacgccagcgccggcctcaccgaggagtgcccgatttgcttctttttctacctgagtctgaatagatccaggtgctgcggcaaagggatctgcactgaatgcttcttacagctgatgccatccggggcttctaaagttatccagtatcctactttgcgacttccgatctgaacagttggcttaacatctgatatgtacactgactgtagtacatgtacattatatacagcactagctctcgccatcgccactaggtactgcccaactgtgagggaaggtggagatttcagacttgcagtcgcaggctcgcgcgatcgcgcacgtttctgccggcaggattcgttggtggttttgcggatcccgatgccggctcaactagcgtagctgcgaaggccggccggccggccctcggagaggtttgcggggaaggagggccgggtccaccgccggggatctaatctattccggggggtgccacggaaccagattggaaatggggcgctctgcttcatcccggggtcgctcgctgttcactgggaataattgggctcttccggatatcgctgtcatgctcgtttggtgctctctcagagagtacatgtatagaggataatcactaatgcagaggtctcgctgttctgggcgcgaggctaaggttctt

SEQ ID NO: 155684 - DNA, 274 bp, Zea Mays
gatttatcaatctcaacaaccgaaaaaatgacttggaaggaaaagaaggtatatgttaccttgggagagaaacatgtttcctgtcaagcgcgacattcctctctccattttcttctaagctagcaaattgcctacggaacctgtcaacggcgctgcaaaaccaaaaaaaaaatcaagaactattaaggatgtatgtcatgaatattaccgcactgaaacaaaataacaagagagaaaagtaactaaaaagatatagtcaaggtaagaacctggg

SEQ ID NO: 155685 - DNA, 1431 bp, Zea Mays
caactcacaatcacccagcgacagcgacagacaacaactacccagtccgtcgtcccggcttccgtgcgggccggggtttcccacgagcgcgcacggcacggcgccgccagcaaggtcacgagtcgggtggaggcatcggacatggccaccacgacggtgacgacgactgcggaggcggcgagcgcgcccgggaagcggcgcggcggggggtgctgccgctgccgcggctggtgcggttcgaggagctgccggactacctgcgcgacaacgagttcatccacgcgcactaccgctgcgagtggtccgtccgcgacgcgctgcgcagcgccttcgcctggcacaacgagacgctcaacgtctggagccatctcggaggcttcttcctgttcctgtacctcgccgtcgccgagccaacggggacggtggccggcgccggagccggagtcggagccggagccgccccgagtatcgtgacgttcgtgctcgcgtcggccaacacctcatggtcttcgtgggaggccagcagtaactcgagcttgacggccagcaagggtttgatggccgtgttcgggagcagcgacggcgacgcccacgcggtgccgaggtggccgcggacggtgttcctggcgggcgccatggcgtgcctggcggtgagcgcggcggcgcacctgctggcgtgccactcgcgccgcttcacgcgcctcttctggcagctcgactacgcggggatcgcggtgatgatcgtcgcctccttcttccctcccgtctactacgccttcctcggccgcgcccgcacgcagctcgtctacctgtccgccgtcaccctgctgggcctgctggtggtggcgctgctcctggcgcccgcgcgctcgtcgccgcgcctgcgccacctccgcgccggcctcttcgtgtccatggccttctccggggtgctgccggcgctgcacgcgctgtggctcaactgggcacaccgcgagtgccacctcgcgctggcgctcgagctcctcatgggcctcgtgtacgccgccggcgccgggttctacgtcacccgcgtgccggagcgctggagccccggcaggttcgactgcgtcggccacagccaccagatcttccacttgctcgtgctcgtcggcgcgctcacgcactacgccgccaccgccatcctcatcgactggcgagaggcgatggccgtcgccgccggcggggcatcggtgctctcgtgatccgtgactgtgcaaagcagtgcagtgtatgtaggtgaagggggtgctatcgattcgttcattctttgtacgcgatgtcgatttatttacctcaatcgaaatatttgttcgtggcattccagatgggaagtggcccaatataattgagtctgaaaacgtgcgcagctattttgccactttgttacgcacaactcacaggtcacaatag

SEQ ID NO: 155686 - DNA, 1718 bp, Zea Mays
cgatcagggcatttaggcagagggagtatcccgcgaatccgaatccctgcccgtccaagaccatagtgacgcagcagaatccgagctgtaaagggctaacaaaagccacaagtactctccctgccggcagagcacctgctgcgtgggtggctgtgtccggtccgggtgtctacataagctgcgccgggcgtgagcgtgagcagctcggtcacaactcacaatcacccagcgacagcgacagacaacaactacccagtccgtcgtcccggcttccgtgcgggccggggtttcccacgagcgcgcacggcacggcgccgccagcaaggtcacgagtcgggtggaggcatcggacatggccaccacgacggtgacgacgactgcggaggcggcgagcgcgcccgggaagcggcgcggcggggggtgctgcgccctcgcggcggcggcggcggcggcgagcgtcgtgcccgtgaaggcggcgggtgagcaggggcagcagccgctgccgctgccgcggctggtgcggttcgaggagctgccggactacctgcgcgacaacgagttcatccacgcgcactaccgctgcgagtggtccgtccgcgacgcgctgcgcagcgccttcgcctggcacaacgagacgctcaacgtctggagccatctcggaggcttcttcctgttcctgtacctcgccgtcgccgagccaacggggacggtggccggcgccggagccggagtcggagccggagccgccccgagtatcgtgacgttcgtgctcgcgtcggccaacacctcatggtcttcgtgggaggccagcagtaactcgagcttgacggccagcaagggtttgatggccgtgttcgggagcagcgacggcgacgcccacgcggtgccgaggtggccgcggacggtgttcctggcgggcgccatggcgtgcctggcggtgagcgcggcggcgcacctgctggcgtgccactcgcgccgcttcacgcgcctcttctggcagctcgactacgcggggatcgcggtgatgatcgtcgcctccttcttccctcccgtctactacgccttcctcggccgcgcccgcacgcagctcgtctacctgtccgccgtcaccctgctgggcctgctggtggtggcgctgctcctggcgcccgcgcgctcgtcgccgcgcctgcgccacctccgcgccggcctcttcgtgtccatggccttctccggggtgctgccggcgctgcacgcgctgtggctcaactgggcacaccgcgagtgccacctcgcgctggcgctcgagctcctcatgggcctcgtgtacgccgccggcgccgggttctacgtcacccgcgtgccggagcgctggagccccggcaggttcgactgcgtcggccacagccaccagatcttccacttgctcgtgctcgtcggcgcgctcacgcactacgccgccaccgccatcctcatcgactggcgagaggcgatggccgtcgccgccggcggggcatcggtgctctcgtgatccgtgactgtgcaaagcagtgcagtgtatgtaggtgaagggggtgctatcgattcgttcattctttgtacgcgatgtcgatttatttacctcaatcgaaatatttgttcgtggcattccagatgggaagtggcccaatataattgagtctgaaaacgtgcgcagctattttgccactttgttacgcacaactcacaggtcacaatag

SEQ ID NO: 155687 - DNA, 1896 bp, Zea Mays
tctttttttctcaggaataacttctatctgatgtatgtatttaacaagatatctagagttaatctcatcttcaataagacgttgttcggttacacgaatttgagtgaattgagggatattaaattcttttctattcaatcttgactacaatgatttagtctctttctaaccgaacatgtcctaatgaagaacacgggaataagctttcacgtaggatatagtattgccaggcacacatgagttactgactacccaatacattccagaaaatgttatttcccccctctgaacttctctagtaagttcatctgaagacagttacttctgagttgatagaagtgcctactcaaacagtggttacccaaatacaaaaacagtcgcatactaattggccttttgaactcttggatccaaatcatagcattacaatcagttgaaagcaacatcttctttgatcagatgttcctctcaatgtgatcagtagagtacaaactaaaggaaatgaagcaatggatgtttctgaacacattgtggtatctcagaaatcaaacagagcttggtcagcaagcagttgtttctagaccaagaacatcaatccatcatcatcttggtcattaaacttcctctattcaacaaaaagtgttccagatcaattatgcttgtagcagtatactaacttgacccacagattattcaggtgaggcaacacataacataacaagcctcttctatgtgggttaacttaaaactgataaccgtatgatcagatatccaaccaccttgtggaagcagcaacggagagcaagacagcaccactggcatgtcacggccctacttcttgttcgagatgacattctcgacgtaccatttgtaggtttccacgaggccttccttgagggcgatcttgggcttccaccccatcccctgtatcttggagctatccatgagcttcctgggtgtgccgtccggcttgctggagtcccacaccaggttcccctggaagccgaccacctccttgactagttcggcgagctccttgatggtgacctcactcccactccccacattgacatgctccatgccggagtagtgatccatcaggaagatgacggcgtcggcgagatcatcgacgtgcaggaactcgcgcagaggcgagcctgatccccagacgacgacctcgggggcgttagtagccttggcctcgtggaagcgacggatgagcgcgggcaggacgtgcgagttctccgggtggaagttgtcgtgcgggccatacaggttggtgggcatggcagagacggcgtcgaggccgtgctggatgcggtaggcctggcacatcttgatgccggcgatcttggcgacggcgtaccactcgttggtgggctcgagcgggccggagaggagcgcgccctccgtgatgggctgcggcgcgaacttggggtagatgcaggaggagccgaggaagaggagcttgcggacggagccgcagcgcagcgcggcgtcgacgacgttggtctggatctggaggttggcggcgatgaagtcggcggggaaggtggagttggcgtggattccgccgaccttggcggcggcgaggaccacgtagcgcgggcgttctgcggcgaagaaggcctcgacgtccgcctggcgagtcaggtcgagctcggcgtgggtgcggacgacgacggaggtgaagcctagcgagaggaggcggcgcacgatggcggagccgacgaggccccggtggccggcgacgaagaccttggcgtccttgtcggcgaggaaggacgggtgcggatctgcgaggggggagaggggtcggaggtaagcccagcacgagaaatcgagcttgcggagggtgagggagaggacgccatttacctgcggcagtgacggtgc

SEQ ID NO: 155688 - DNA, 103 bp, Zea Mays
aaaagcacatatgttatttgaattcagaatcgtaccagtttaaacattttctcagctataggccattaagcattcaagtctatagtatccaaaatgcaaccgg

SEQ ID NO: 155689 - DNA, 547 bp, Zea Mays
cggcaaccgaatggcttgtctccgaagcgtacttcttagagatggcaatgggtacccgaaacccgaaacccgatggggttttaccccattagggtacgggtttgggtcaattttcatacccatgggtttgttaatgggcataaatgtatacccgacgggttcatgggtacgggtttgttcctatagtacccaaacccgtgaacccgtgggttttttaaacccgaccaaacctagtgtatattgtcattttattttataaacgaacaacaaacttgttaactacctatttacttcctatttttttatcaaatagtgaatgtataagtagttggtgagagtgttgcttgcttgctattatagttattattagcgttatatatgtggtggatgtataacttagtgtaaggtaacttgattatacaacttattatttgtatttaattctctctactaatatttttataccaaatcatgaactcgttgttcattacataaattttggaccatgatctcattaatcattacgatacttattgattataaaaag

SEQ ID NO: 155690 - DNA, 417 bp, Zea Mays
ccagttctgcgagttctccaccctcctttgcagccaggtggagtagtccccgaggcggtactccttgtaccccctgccggagacgacccacccggcgccgcggttggtgacgacgaacgcgaagacggtgaatgcgaagaggagcaggatgaggaggaagagcgcgaggaggagcacgcccagcgcgatgacgggccgctcgaggaaccgctcgcagtcggtggtggacgcgcggtggctgagccaggcgccgccccccagcgcgacgatggcgaggaccagcacgcccgcgttgaggagacccaggaggccgttgctgcaccgcgccatggcggccgccgctcgcgttcggctcttgggagttgggacgggatggggcttcggagttggtccacggcgaggagtgcgtgcgcttgt

SEQ ID NO: 155691 - DNA, 642 bp, Zea Mays
atgacgcggaacagctgcctccctacgccgctaaacaaccacggagaaacccccgcgcaccgtgcctacgccactcgcgaaccgcctccatcgccgacgacaacggccgcgacacggagttcatccaacgctgcgtgtatcgggacaagtcgcggtgctacgagtgcggcgaggagggccacctctcctacgagtgcccaggcaaccagttcgggccccgcgagaggcccgcacagtctaagaaattgcgccgcggtggtggtactggtggggcactggcgggcgtggcgcggtcgcgggggagaggttgattggcattcagatgacgttgaagatgtcggtgccgccgccgcgttcgaggatgacaggtgggcgtcggtggtggatacgaggggagaggaggagaagtcggctggcaaggaagagggaaaaaagggaaaggcggcgaggaaggagaagatatgctggaaccaaaagagagttggctgctgcaaagaagaaggtcaggctgataaccttttcaacgatgacattctgccgcagattgctgacagaagagatcaggagcggaaggcatttgctaggattttccaaccttctagaaagtctgacaagagcaacgaagtaatttcccagtactga

SEQ ID NO: 155692 - DNA, 974 bp, Zea Mays
caaagagacagcatgcgaggccctaacgctgctaccgcaacaagcaaaggcggcgccatggccggcttcaagcaagacctgctcaggaacctgctgctgggcatccgggcgtgccgccccttcgacgccacgagcctggaggaccggaagcgtgccgtcaagcgatccgccgacgtcgccatggcggcagcgcgcgccgcggccggcggcgggcgcgcgaggtggcccaaggccatcttggccgccgccgcggcgtccggacacagccccggcggcatacgcaaggcgaggaagagtgcgtgcaagagggtagtgaggagaccgaggcgcgccactgcgagctgcgacgtcgtcgcacggaggctggtgcggagcaggacgatggcgctccggaaggtgatacccggagcggacgccaccgccgccatggacgacgaggccgtgctgctccgcgaaaccatcgactacgccgtacacctgcgcgcccaggtcgacgtgctccgccgcgtctcggcggcggtgcagagatccaccttcctccgggacggtcctgctcaaagcatgggaggaggatcgtagtggtggttcctggttcagaggaccgagaaggaaatgcatcgaagctcgtgcagtgctcgatcggacggtgctggtcagagcacagccacagacctccgagctcgtggtagtggtgaagaattggtcatggttttgtcttgcttcgttattggaaatgggacatgtacatgtgttatgtgtagtggtgggaatatggaccgtttttttttaccagcaagaccacgaccgaaagtaggagcacaaagtacggtctggcacgaaaaaaatatgggtcagactatcacggcacgaaggggctgtaccgggcctcaaattctagcccgtcaggtcctagcacggcctaataaagctcatattatttaatttctttaatttattaaattatagattttata

SEQ ID NO: 155693 - DNA, 721 bp, Zea Mays
actacaccccaccaaagggtttttgagttttgacaatcagaacaatagcctccaccgtccaccctcacgcaactgcctcttcgcggcggcgcaaaacaccaacacgtcttctctccggttgcgaggagggtataggatttcgccgcggcgagatgtcggcgtacgacgaggtggagatcgaggacatggagtggaacgcggagctgaaggcgtacacgtacccgtgcccctgcggcgacctcttccagatcacgctcgacgacctccgcatcggggaggagattgcgcgctgcccgtcgtgttctctcttcctcaccgtcgtttacaacgccgaggactttgctgacgccaaggagccgacccacaagccgtccccgagcccagtcgccgtcgcctgatgtggcccgtgcccggcgagatggacgcatggaaatggatctcagagcaggataacgaatgagtttttgtttggcacacaccactacgggagcatttgtactactcttagatgagtcaacccactgcatattttcagagctcaggttgttgaactatcttttttttgtgcttgacattgtaaggtgacatggacagaacatgctatgaaaaaaattgtttagtcactacttatcgttgatcgttgtcttaccaagtttgagacccgatcgatcttcggtgaatattcatcattgggtcgtgcagaaattctctgcatgaatct

SEQ ID NO: 155694 - DNA, 240 bp, Zea Mays
atgggggacgtgaacgactacgacggcgatgcgtggacgacagatggagcagatgcgagcgacagactatattcgggcttagggaacggtatatggaaccaagcacggacgcgacaggggcgtggcgatggcgcgacgaaggcgcgtcgggactacatctaccaggggtgctgccgggggcgcgacagggcaggcacatcggcgcaccggggagggcacgacgcaacagagcttgaatga

SEQ ID NO: 155695 - DNA, 1098 bp, Zea Mays
acgcttaatcgcttcgcttccgccctccatcgatcacctccaaagatcgagagcggctcgctcgtcaagcgctccatcgagccgtcggtgcaggagccaaatcatatatatataggcggacaggaggaagacccgccgatgggtcaccaccgcggcggctgccgctgcgagctctgcggcgcgcccgcggccgtgcactgcgcggcggacgcggccttcctctgcgccgcctgcgacgccaaggtgcacggcgccaacttcctcgcgtcgcgccaccgccgcacgcgcctcctcctcgcggcgccggacgagtgcgggtacgagtccggggcgagctcctgcgtgtccacggcggtcgactctgcggcgccgccgccgcggcggacccgcgggggcggcagcccgggcccgcgctcgcgcggcgaggcggtgctcgaggcgtgggccaggcggacgggcctgacggcggcggacgcgcgccggcgcgccgcggcggcggcgcgggcgctccgggcccacgcccacggcctcgcctccgcgcgcgtcgcgccgcgcgtcgccatggccgccgcgctgtggcgggaggtggcggggcgcggcgggaccggcggcggcggccacggccacggcgaggcgctgcggcggctggaggcgtgcgcgcacgtgccggcggggctcgtggtggcggtggccaagtccatggcgcgcgcgcgcgggcggggggacgaggccgacacggacgccgcggcggagggctgggacgagtgcgcctgggccgggcccaagtccagcccgccacgtccttgatcttttctcgtgctcgctgatgaaatgaagaacgaaaccgaacgaatgggaggacacagacttcgggatttgtggaccttgtttgttttgcgcaaggcccaacaaaacttgtggttttagaataggagacacagcatatattaaagtattgattagacttgtgagctaatgtggctccaaatgcggtgcccgggtgcccacaatgttcgctaaactgcaattatccgcatcactattacatgatatatatctagacataaatctaaagaagataaagcatcttatacttca

SEQ ID NO: 155696 - DNA, 101 bp, Zea Mays
caatgggtaggttctctctctatttcacttgggcaacctgtatcgtcgacacttgagcaatggcccgggcatgagagattgaataaaccgaagacagatac

SEQ ID NO: 155697 - DNA, 1245 bp, Zea Mays
gcgttgcagatttctcccttcttgtaggatgtgatgttctcttctctctaatatattatgatgcgcaactcttctgcgcgtttcgagcgttttatatttattgatggtatattttaaaagaaataaatggtcagagttctgctctaaagaccgtgccaaaaaagtatgtcttattttatgggatggagggagtatgttgattaccttatcggctcaaggtcgatgcttatgctttcctaggctcatcacaaatgatggcttcgtttgttttatgttgctaggtgtgacaaaatgcatcttcttgtgttgaagggcagaaattgcaagttgactagctcttgtttattcattgcagctgtcaggtcggatgcgtgcattactgaactacgaagcacctgagttgcaggattctggggtcgtttcagaaaggggtgatgtatacagctttggtgtagtgatgctggaacttcttactgggcgtaaaccatatgacagttcacgcccgcgtcatgagcaacatcttgttagatgggccagttctcagcttcatgacatagaatccctgtccaagatggtggacccatctatacgtggacaatgttctgagaaagcattgtcacgtttcgctgacataatcagccgctgtatccagcagccagaattcaggccaccaatgtctgaaattgtacaagacctagctagacttgtaaatgccaccggtgaggaatcagagtaacccccaaaaaaagcatggagccatggaaggcatacaatacaaacgtcgcgaccaagttacgtgctgtacaatttttttgggaagataattgtcttgcttggtctggggagaatactgtgaagatgtattttcctcagagagcattgcacactaatgtcagattggaatttcatttagacctggctggggagtggaggtgcagccatctgtgcacctgattgttgatcaaatccatgtaatatttttgcagacatgatattatatatagcgacagtggcggagcctccgccaagcgccaaggcccggcctgatcgggcacgtgtccaggcttccgccgaggaacacttgggtgggctctcgatcggcctagcacacggatgtttggatgggtcaggcagtggtgtcgatttcaggccggctccgccactgtactgtatagcaaggtgtatatatagcaagaccccggattcttgtaataatagtcagggattcgttaaatttgttactct

SEQ ID NO: 155698 - DNA, 933 bp, Zea Mays
gcgttgcagatttctcccttcttgtaggatgtgatgttctcttctctctaatatattatgatgcgcaactcttctgcgcgtttcgagcgttttatatttattgatggtatattttaaaagaaataaatggtcagagttctgctctaaagaccgtgccaaaaaagtatgtcttattttatgggatggagggagtatgttgattaccttatcggctcaaggtcgatgcttatgctttcctaggctcatcacaaatgatggcttcgtttgttttatgttgctaggtgtgacaaaatgcatcttcttgtgttgaagggcagaaattgcaagttgactagctcttgtttattcattgcagctgtcaggtcggatgcgtgcattactgaactacgaagcacctgagttgcaggattctggggtcgtttcagaaaggggtgatgtatacagctttggtgtagtgatgctggaacttcttactgggcgtaaaccatatgacagttcacgcccgcgtcatgagcaacatcttgttagatgggccagttctcagcttcatgacatagaatccctgtccaagatggtggacccatctatacgtggacaatgttctgagaaagcattgtcacgtttcgctgacataatcagccgctgtatccagcagcagccagaattcaggccaccaatgtctgaaattgtacaagacctagctagacttgtaaatgccaccggtgaggaatcagagtaacccccaaaaaaagcatggagccatggaaggcatacaatacaaacgtcgcgaccaagttacgtgctgtacaatttttttgggaagataattgtcttgcttggtctggggagaatactgtgaagatgtattttcctcagagagcattgcacactaatgtcagattggaatttcatttagacctggctggggagtgg

SEQ ID NO: 155699 - DNA, 2693 bp, Zea Mays
ccatctcctctgtctccgcctcgtcgcttccgcccactcttcctcgccgctgcctcacggccccattgctccgagcgcggcgccggtcgcgatccgaccgggggtgcgcggcgccgaatggtgtgatcgaccccgtcgggaattgggatcgaggtcatgcagcgggctccggagcgccgccgcggcgccgggccgctcctgctgctggcgctgctcgtcgcattggcggccgcgcccagactcgtgcgcgcggtcaccgacgctaccgacgtctctgccataaacggactgtacatgtcactgggatcaccacttctacctggatggactggaaatggtggagacccgtgcggtgagagctggcagggtgttgtgtgtaccggctcttccataactggaataaccatgaatgctgcaaacttgggaggacagttgggaagtttaggaaacttcactgccatcaccagcttagagcttaacaacaataatattggtggaaccataccggaggacctacctgttacattgcagagtcttttcctctctgctaatcaacttactggaagcatcccaagttcactgtcaaaactcgaaaacttaacagccatgtcagtcaacggcaaccatctaaatggagacctaccagacacttttgattcactcaatagacttgtaaatttggatatttcttcgaacaacttgagtggtgtgttaccatcttcaatgaaaaacctggcatctttgacttcattgcacatgcaagataatcaactgtctgggacccttaacgttttgcaggatctcccactgaaagacttgaacatagagaataatcttttttctggaccggtgcctgcgagtttgcttaacataccaaacttcaaaaaggacgggaatccattcaataccagcatcgtcccatctgcatctccgccttcaacaggaccagctccaacaccagcagcatcaaaaccagctccaacaccagcacccaccacttcaaattcaacgcccccagcaccagcaccctcatttccttcaagatctcctcccccgcctaaaacaacctcaaactcttctgaaggatcaactacccgagatagcacttcaccatctaagaaacacagtacatcaaccctcaagattgttggctttgttcttgccggagtagtgctgtttattatcatagtcctcctagtattattttgtctatccaagtaccaagagagacggtcgagatatgatcataacagaagtcagcaggcaagggtgcatcatagggttgaaccgcaaatcaagccacctccagtgcaacaaagcaatgatcttaaaaaaggttcaggtgaggtacttgatagaaggggccatgaactaagttcatcaacggcagctctcgcaaagaaatctcctgaaaaccaaaaggagcatgtaattaattttgatcgaacagattcagatctgtttcctgtttctctaccaccaccacctcctccacctccattacccccaattgaaagagttattgcaaatcccattgttccaccagaaaagcgatatagtcctccaccaaagacaagtagctctacttctgccacatcattctctattgcatctcttcagcaatatacaaatagcttcagagaggagaatgtgataagagagagtagattaggaaaggtttacctagcagagcttcctgatggcaagttattggaggttttgaagattgacaatgctaatggaagaatatcagtagatgacttcctagaagaggttgaatgtatcttagatatcaagcatcctaacattcttgagttagtcggatactgtgctgaatatgggcagaggttacttgtgtacaatcactttagcagaacgacactagatgacacacttcatgatggagaggatactgaaagtgcactgtcatggaatgcccgcctccaggttgctcttggttctggaaaagccttagagtatctccatgctagcttccaacctccaattgtgcaccagaattttgaaccagctaatgtgctccttgacaaaaagttctcagtgtgtgttgctgaatgtggactggcagaattgatgccaccaagttcagtcactcagctgtcaggtcggatgcgtgcattactgaactacgaagcacctgagttgcaggattctggggtcgtttcagaaaggggtgatgtatacagctttggtgtagtgatgctggaacttcttactgggcgtaaaccatatgacagttcacgcccgcgtcatgagcaacatcttgttagatgggccagttctcagcttcatgacatagaatccctgtccaagatggtggacccatctatacgtggacaatgttctgagaaagcattgtcacgtttcgctgacataatcagccgctgtatccagcagcagccagaattcaggccaccaatgtctgaaattgtacaagacctagctagacttgtaaatgccaccggtgaggaatcagagtaacccccaaaaaaagcatggagccatggaaggcatacaatacaaacgtcgcgaccaagttacgtgctgtacaatttttttgggaagataattgtcttgcttggtctggggagaatactgtgaagatgtattttcctcagagagcattgcacactaatgtcagattggaatttcatttagacctggctggggagtgg

SEQ ID NO: 155700 - DNA, 483 bp, Zea Mays
tagcgcacgttgtgggacttcgcttgcttcatcgacacacgcaaatcgctccacactggaggcagtagcaaggtaatgacgagacgaacagagctatgcgggttccaaggcgttgagcgctatggggagaaaaacagaacacggcgaaatgggcaggaccgagcgcgcaggctccacggcgcggccaacagaggagcatcgagcgccataggaggacgtcgagcacagcgcgcgccgacagagagcagaggagcacgacgcgcaggggagcaaacagcagaatcggctggggaaaatatatttgcgcgcgcaggaaggggccaggacgaaggagaacgcgcgcagggagagctgaagaccgatccgagccggaggttggccggaacgcgaccacggaggggctcggcagagaagattggagctggggaagggaacgccgagctgagcgcgcgcgcaggggtaaaacgccggcgagccggagaa

SEQ ID NO: 155701 - DNA, 1577 bp, Zea Mays
agttggttctcatcaaagctcgcaactacttcctcccctccccttccttcccttccggccgcctcttgtcctcctcacctcccaaattgaaatcctcctccctccccgcctagggttccgcttcctcccccgtccgagcaccactcaagcggcggcagcagcggtggcagcctggaagcagtcccatctcgtcgccctagacttccctgccgccgcacgtctcagtttcttgttcgcccgctctcctgccggtccgcccatcgcctgaggttcttacggtgccacggagttggcaactgcaaggagtgatattgtggtacaacactagttctaattgaagtaataaggcgggggtgaaactgtctgctaccattgcttccatggcaactaatgagaacctcccgccaaatgtcatcaagcaattggctaaagaactgaagaaccttgatgagtcacctccagaagggattaatgtgattgtcaatgatgatgacttcactactatttttgctgacattgaaggccctgctggaactccatatgagaacggagtattcaggatgaagctattattgtcacgcgatttccctcaatctcccccaaaagggttcttcttgactaaaattttccatcctaacatagctactagtggtgagatatgtgtaaacacactgaagaaggattggaatcctggccttggattaagacatgttcttctggttgtgagatgccttctgattgaaccatttcctgaatctgcacttaatgaacaagctgggaagatgttacttgaaaattatgaggaatatgcacgacatgcaaggttatacactggcatccatgcccttaaacctaagaatacgtccaagaccggagctatatctgagtcaaccacagctctgaatgtcgacaagtcaagtactgcctctagcaagaacacaccatcgatgccaccggcggtatctacctccagtgcatccagagcatttggtacgagtttgcaggatcagaaccccactgtttctgatcctgctgtaggagctgcggcggcacgaaagaaggatggcccaatggcttccaaagttcctgtggataagaaaaggctggatgcgcggaagaagagcttgaagagattataggcggaacgtcctgggaagaagagagagggtttagagttcagaatttttatcggaaactcagcagatgcttatttaagctgggagacaaacaattaggggaggagaggcatctgatgacctggctttcgggagaagggggtccggggcggggccaaaggtgaataatgtgaagcaactgagtccttcgggacaactgtatgtgcaatgcccaatcatttggaagaacacttgcctatttctttttgttgtctctccttgtctgcattcaatcagcatgcatgcctgccatttgcgagcaatccgctgccatcgttcttcatggagtacacaagctatgaattgaaaagatgtgaccttcaaaatttctttaacttgtggcgcagagatcaattaaactaacagggcatttggatctcttcattttagatgaattgaaat

SEQ ID NO: 155702 - DNA, 1736 bp, Zea Mays
agttggttctcatcaaagctcgcaactacttcctcccctccccttccttcccttccggccgcctcttgtcctcctcacctcccaaattgaaatcctcctccctccccgcctagggttccgcttcctcccccgtccgagcaccactcaagcggcggcagcagcggtggcagcctggaagcagtcccatctcgtcgccctagacttccctgccgccgcacgtctcagtttcttgttcgcccgctctcctgccggtccgcccatcgcctgaggttcttacggtgccacggagttggcaactgcaaggagtgatattgtggtacaacactagttctaattgaagtaataaggcgggggtgaaactgtctgctaccattgcttccatggcaactaatgagaacctcccgccaaatgtcatcaagcaattggctaaagaactgaagaaccttgatgagtcacctccagaagggattaatgtgattgtcaatgatgatgacttcactactatttttgctgacattgaaggccctgctggaactccatatgagaacggagtattcaggatgaagctattattgtcacgcgatttccctcaatctcccccaaaagggttcttcttgactaaaattttccatcctaacatagctactagtggtgagatatgtgtaaacacactgaagaaggattggaatcctggccttggattaagacatgttcttctggttgtgagatgccttctgattgaaccatttcctgaatctgcacttaatgaacaagctgggaagatgttacttgaaaattatgaggaatatgcacgacatgcaaggtcagcccttggacttacattagtgacttggattgctcagagatatcctctttttggtcattatttattgccagaaatactcagcaattatttgacaaagcagatcataattgttttataggtatgttgctgatggttccattgtgctccataatgcaggttatacactggcatccatgcccttaaacctaagaatacgtccaagaccggagctatatctgagtcaaccacagctctgaatgtcgacaagtcaagtactgcctctagcaagaacacaccatcgatgccaccggcggtatctacctccagtgcatccagagcatttggtacgagtttgcaggatcagaaccccactgtttctgatcctgctgtaggagctgcggcggcacgaaagaaggatggcccaatggcttccaaagttcctgtggataagaaaaggctggatgcgcggaagaagagcttgaagagattataggcggaacgtcctgggaagaagagagagggtttagagttcagaatttttatcggaaactcagcagatgcttatttaagctgggagacaaacaattaggggaggagaggcatctgatgacctggctttcgggagaagggggtccggggcggggccaaaggtgaataatgtgaagcaactgagtccttcgggacaactgtatgtgcaatgcccaatcatttggaagaacacttgcctatttctttttgttgtctctccttgtctgcattcaatcagcatgcatgcctgccatttgcgagcaatccgctgccatcgttcttcatggagtacacaagctatgaattgaaaagatgtgaccttcaaaatttctttaacttgtggcgcagagatcaattaaactaacagggcatttggatctcttcattttagatgaattgaaat

SEQ ID NO: 155703 - DNA, 264 bp, Zea Mays
atggccgccgtcattctgctcgcagccgtgggcagcgctccaccagccacctccgaccgagctacgaccctccagcagtgcgcactggccccctcgtactccccctccatttccccgtcgtcgggagagcatcccatcgccgggaatcgcgaaggcctgaggaattcggctaaaagcagtgggttacgtgcaaagggcatgactcagctccagtgctctaaatggattgaaatttttacagtagaccctctgtgtgatgcttag

SEQ ID NO: 155704 - DNA, 1657 bp, Zea Mays
attttatttgagttgaattgaattagctaaagagcaacttcgacgagttgtttgttcttgtcatggtttcatgacgacggacgagactcgagaggcgccggagccgacggcgcgctgtcgcacctccagtatatatatatatgcagccacgcaggcacaaccaagcatgcagaatgccggcggcactaagcgaggccagcgatggtgagactgccaccggcggtggcgcgcttgacgaagcggcccttcatccgtggccgcttctcggcgttgagcttgcgcacctcgtaccggatcttcttggagaagagccgcgtcctgcgcttctcccggtaccgcgacactcgggcctcccggccaacgtcgtccatgccctgccccagcctcggcgtgcccagcaagtcctcaccgccgtggccgaccattcctcgtcccacaacccacattcgtggggccagctgtcgtcgagcttgacatgtggtcgttcggcgccgccggtccacggcgagctcccccagctctggatgatggcctcgtagttgagggtgagcgagaggctcgtctgcaagaactggccgtcggttcccgtgtggctgctgctcgcggcattctcggtcgtcgtcgtgtcctgaggcgagccgtagttgaagtcgatgtccagcatctcgtcagatgcatctgggtccagcagctcgagggcgcacgccagcgtgccactggcttcgcaggcactgccggcgtcagtctccaccttgactcgcgacgcgtcttcacccacttccaccggttccaggaggcccagcgtctccatgcagaacgacgagctctcctcgttgccgtcgtccaggccgtacccgagcaaggcctccatgtccgcggcgaactccctgagctcggcgtcggtcggcccgaagttggcatgacctccgtcggggaaaaactgcaccagcggcgccgctgcaggtgtctctcgatctgtcttcgccgggtcctcgacggcgccgtcttcgttgcaggacgacgcgagagcggccgcgtcctcaagaggctggggcgagcagaactctgccagggcagggtcaaagacaggcacgcggtaaagcacctcctcctccggctcctcggcctcgaactccccctcgtcgttccgaccatctggcgagtccccgcccgccgcatggggcacaacgaggcgccgcgacaacgtccgcacatcgcttttggcgcgcccaccgcgcggggtgcgcgccttgcgcttgaaccacgccggcaccacctcgtcgtggctctcgcgattcgctgacgccggcgtgggaggcggcggcgtctgcagcggagacgtggggcgcagacgcagcctctcgtgacgccgcgcgagcgagttcgcggagtgcaccgacgtgtcgcagacttggcacaggaacgcgtcgtccgctgcgcagtaccacctggcccgccggcgcaggcacgcgtcacaggcgcgcgcctccttgccacccaccgccgccgccttcgccgagctgccggtcgtggtcgtggcaatcatttcccttcaaagcggtgtgccggcgtgctactcagtgatggcttcttctacgctgaatgtagtaggatgggacctatagtatccacatgtgccgacgtacactctgagttt

SEQ ID NO: 155705 - DNA, 411 bp, Zea Mays
atggccgagagggaaaatccgagcgcaggggcgagctcggggaaatgggcggccgagctggggattgggcagagcgcggacgggcgagcctgccagggagcagcgatggccaacagagaagctcgcgcacgcggaagctccacggctgggagggcgcggcagccatggcaaacaggagcagtgtcgcggtccgcgtgccggccagggagaatcgacggcggccgtgggagagggcagaggaactcgaccggcgaagttggccggagggcgagctcggctgcgcgcagggaggagcaccggcgagcagggagcgggaggaacgccggtgagctcgtggcaccagggagcagggcacgacgctggagggcgagcagggcgcggctgccaggacgagcgcagggaggaagataa

SEQ ID NO: 155706 - DNA, 813 bp, Zea Mays
gacatttccctgctcccttatctccctcccccacacggtgcttgcccctgctccctcctttctgactgtaaggttgcaagcctcggtgccagcaatttcctcgttggtcgagcccctccctatcaccatcctcgtcatggcgccctggtggttgtccttgtcagtcgtgcctctcctgtgtgctcgactcgcctgtgccatgtctaactcctgtctcctctctagccctgatgtcgtcgctggtcctccccacgctagagaagaccaccgtcggtcctcatccatacatcgagttccctcctctcagtgctcgaacttcgcctccctctgatccccccccccccccccccccactcaccccttgcgctcatcgctgcaggatcatcatcgtgggcttggctttgccaagccatcatcgctcaccatctcgttgatgccctttctctgtcttcatattcgtcagcaccctagtcttctctctctacacaacaaataggttactggactcgccatgttctctggtcgagtttgaccctccttgctgacagatttgtcgtcattctgtatgtcgtcgaggagcaactcctgggatggttgggtggagaagaagaaaagaagctccagcgcatcgcacacctggtgctcgacgtaatggttgaatcgaaatcgtcgtcgtttccgtagtctgatttagttatggtgagctcctttgctatcctcgttagttagcatgaatggttgattggatagatgttctacctatgatgtttattttatttgtaaagcaggtgtgttgcggtattgatttctaga

SEQ ID NO: 155707 - DNA, 908 bp, Zea Mays
ctctccgtctccggtctccagtctcgctgcttccacaagtccacaaccgtaccagcaccaccgcgccatggcgtcctccgccgatcccgatgccgccacgccaccatccgcgccgcagccggagcccgcacggaaggcagtccgcgtggtggtgaaggggcgcgtcacgggggtggggttccgcgactggactgcgtccacggccgagtcgctcggcctcgccggctgggtccgcaaccgccgtgacggcagtgtggaggccctcctctccggagaccccgcgaagatcgaagacatgataacccgccgcctccccgtcggccccccagccgccaccgtcaccgccgtcgtcccgtccacggccgagcccgtggatccgtccaccggcttcgagatcaagttcaccgtctgaccccccgtcccgcgacaggttcgcgtctcgccgcgcggtcttgaacggtctattcgtgcactactactgcgaatctgcgattaaagatcagaggcgacatctaatgtaccgtagtctgtttacctgaattcctgaaaagctttgctatctgcttgggttggaattcatgccagattgtgggtataaacctgtttccttactacctagtgtccaagtcggaatattaataagctatgccaggattcagatcgaaatatttctgtcactgagaaatgtgttgcgtgacaactttcgaagactgttgcctctctgtgtttatccctagatcctaatgtacaaacagagtcttatacagtactccctccgttttgcactatccagcgactaataaaaagaaacggagggagtactgtgcattaacgtcaagtttcagagttcagacatgtgcctcgtgcctgctttctaattacaaatatagtcagttgtgttttgcacc

SEQ ID NO: 155708 - DNA, 186 bp, Zea Mays
ctaacactacttggtatacattctgtgtcttttctgaacaatttctgaaatcttacacagggaactatcacctagagctattgtattttttttaacttgtataaactacatgcctttaaagaaatgaaataaagggtctcttgaataaaagccattactatagcaatagaagaatgatattacaac

SEQ ID NO: 155709 - DNA, 1075 bp, Zea Mays
aaaagagtaattattagtataaataaaaattgccaaatcctaacgggcgagaaaatacaacgatcctctcagatctctacgcggtccacgagtattcacgtctgggttttagcccaactcgaatgttggctcggccttcggtccacagccaccgcccaggcgcccaccagaccgtcagacactcagactcggactggctccgagcctccgagtgagtccgtggttccaaccagcatcgcattcttcctgctgctcgcctgctccagaatgttcccctccagctccgccaccggcccccgcttccttcgccccttcaccgccaccgcaccccgccgtgccatggcggcatgcacgggcgccccaagcgacccgccgatgcagcagtcttctcccaccaaggcggtgcgcgtggtggtgaagggacgcgtgcagggcgtcttcttccgggactggaccgtggagatggcgcgctccctggggctcgccgggtgggtccgcaaccgccgcgacggcaccgtggaggcgctactctccggggacccggacaaggtggacgagatggtgtcccggcggatccccgtcggcccgcccgccgccgtcgtcaccgctgttgtaccctcccccgctgaaccggtctcccccgacgatggcttccaccgcaagcccaccgcctgatttatggctggttcatcggccatccgtggggcgtggtcattggcgagcggcgccactcgcctgtggtaatcaatctactgaagaacactgaagaacacgtacattcttttcctggagattgctagcgctaatttatggtgttgaatcaaataatctcaatcttgacgaggagctgcttcgatgagtggacaaggattgtgactgctcgatacactcggttcttgtgatcatgtcttatgcagacctgtgaactgtggtgtttctgacaactatgccgtgcctgtaattatctactatgttccgagagaaacggttatgtacggcttatttgcgcttactttgctttaatatttctatggattgtttcaaaaaaaaaactatggagattgcctagtgttca

SEQ ID NO: 155710 - DNA, 2314 bp, Zea Mays
atgccagctagcccacggcggcagtgcgcgctcgcgtggctagcctacggcggcggcacctgctcgctcgtgctgctggcccgcatcggcgcctgcgcgcgctgctggcttgcggcggcgggtgcacagcttgcccgtgctcatggccgtgtgggccttggtctggcggcggtcctgcggatgccaatgacgagttcaaggtggcgcgactgctggtggtgggtcgtgggccagctggttctatgcactaggtcgtggggtgagaggtcctccggcgaaagccatgcccgcttgcgagaggacggcggtgacgcctacgggcgccactcctaccctattgagggtgccgtccttggacccctcgtgcttcatttgggagtccttgcctcggactttttggggtttctcgctggctgctcggtcgacgtcgagactctgaaggttggggcctactgggttggtgcgtcggtggatggcaaaaggtggcaacaagcggcggcttggcagggtgacatcggtgtggttgttcctgcaggtttctccttggttctggtgatctccattgctctactgggtcttcgaagaaaacttttcttagttggttctaggcgggtggcaacggcgtttcgacgtcatttctccttcttgaaggtgctgcccagaagaccttcagtttgcatggttgtcagtggtatggaggcttttcgtcgctccacttagctcggtggtgcttgggcctttgttgctcttggcgtctgcttgctcccggtgttcggcgatatggacccttgctcgtggtgaagaatcggagctgcctcgcgtggagcgtgtcgagtcttggcaatgatggcgcgccgcagtcttcctccttgtgtgtcattgctgagtgtaggcatcgtcgagttcctttggccgtgtgcaggccgtcttgggaagtcggagttgctcgtcccttgtgttgagctcagcaatgatgactctaaatggggtttgtgtgggggggggggctgtcgttgtctaggttgtttgtgggggccttcgcgaaaggacctctagcgtaatggttaaggcttccgagtagcacctccaggttctgggttcgatccccctcgagagcgaatttcgggcttggttaaaaaaaacctcgttgtgccccgctcgttcccgggttacgtcctgcgcgccaccctccggttgggccgttgctgtgacaccccaggtgtctatttcgcgttatgtcgggagattaatcctaatctcggatgctcagtaaaaatttctatttctcgatcgtgcctatctctgtttatcaggctttctcttggaagttcaccgaattcagagttaatcgatcgcgagaaacagccaattttggagcgtgttaaaacttttaattctcggaactaatgcagactcgaagatcattctcgaattataaatctcatctgaagctctttaaatcaaactctcaacgactgttatctgatctaagcccgaatctaattcctcgaaacttcgatctatgttcgactattttatctgggtccgtattctccaacgggatactcagtatgtcgccctctaattaattcttatccgactcgacttcatacctttgtgttcgatcccgatttaaaaatcaacatcggcgatgattttaaatgtcgcgatttgtctctttcaatcaaaaatccgaaagctggtcgtatcccgagacaatttattttcgaatcatgcgtaggaaattattgccgagcgaaatcaaatcaaactctcggccgagttaatcgcccgatcttccgaaaactatttcgctctgttctccgtagagacgaattccgcaggagcatttttattctgggaaagaattagcattccgataatccatgtttgatcaaaatgccacaaaataaaatggaaaataattagcgtgacccggtttagtgttttgggccaaacccattctagccaatttggcccactaaagaaccctaaccctagcccatgtctataaataggagccctctcccttgcaaattggaaaatttccatctaccccccctagccgccattttcttttctcccagccatctccacttcttctccccacgccatcctccttcctgctcctcacgcacaccagtggagggcctcccatggcgtctcctcccctttcctcaagccagccaccctagcttccattcctctcgccactagccatgggggtcgacatcccctcctccccctctgcaccatggtcggttctttgctcccctcggaacccagcagggagagcacgcatggagctccctag

SEQ ID NO: 155711 - DNA, 720 bp, Zea Mays
atgccagctagcccacggcggcagtgcgcgctcgcgtggctagcctacggcggcggcacctgctcgctcgtgctgctggcccgcatcggcgcctgcgcgcgctgctggcttgcggcggcgggtgcacagcttgcccgtgctcatggccgtgtgggccttggtctggcggcggtcctgcggatgccaatgacgagttcaaggtggcgcgactgctggtggtgggtcgtgggccagctggttctatgcactaggtcgtggggtgagaggtcctccggcgaaagccatgcccgcttgcgagaggacggcggtgacgcctacgggcgccactcctaccctattgagggtgccgtccttggacccctcgtgcttcatttgggagtccttgcctcggactttttggggtttctcgctggctgctcggtcgacgtcgagactctgaaggttggggcctactgggttggtgcgtcggtggatggcaaaaggtggcaacaagcggcggcttggcagggtgacatcggtgtggttgttcctgcaggtttctccttggttctggtgatctccattgctctactgggtcttcgaagaaaacttttcttagttggttctaggcgggtggcaacggcgtttcgacgtcatttctccttcttgaaggtgctgcccagaagaccttcagtttgcatggttgtcagtggtatggaggcttttcgtcgctccacttag

SEQ ID NO: 155712 - DNA, 2247 bp, Zea Mays
ttccctgcctaaaactcccatttcgccgtccgtgacgcgagagacctcttcgcatcccgaggcggcgcttttggggtcggaagcgacacgggcgccgggcgggtccgcgggtggtggtgctactgctagcaagcagcagcaggcgacgctaggcgagagccccagtcggagcaggccaccatgtgcggcatcctcgctgtcctcggcgtcgctgaggtctccctcgccaagcgctcccgcatcattgagctctcgcgcaggttacggcaccgagggcctgattggagtggtttgcactgtcatgaggattgttaccttgcacaccagcggttggctattatcgatcctacatctggagaccagcctttgtacaatgaggataaaacagttgttgtaacggtgaacggagagatctataaccatgaagaattgaaagctaagttgaaaactcatgagttccaaactggcagtgattgtgaagttatagcccatctttacgaagaatatggcgaagaatttgtggatatgttggatggaatgttctcctttgttcttcttgatacacgtgataaaagcttcatcgcagctcgtgatgctattggcatctgccctttatacatgggatggggtcttgatggatcagtctggttttcttcagagatgaaggcattgagtgatgattgtgaacgcttcataacatttcccccagggcatctctactccagcaagacaggtggtctaaggagatggtacaacccaccatggttttcagagacggtcccttcaaccccttacaatgctctcttcctccgggagatgtttgagaaggctgttattaagaggctgatgactgatgtgccatttggtgtgcttttatctggtggactcgactcttctttggttgcatctgttgcttcgcggcacttaaacgaaacaaaggttgacaggcagtggggaaataaattgcatactttctgtataggcttgaagggttctcctgatcttaaagctgctagagaagttgctgattacctcagcactgtacatcatgagttccacttcacagtgcaggagggcattgatgccttggaagaagtcatctaccatattgagacatatgatgttacaacaatcagagcaagtaccccaatgtttttgatgtcacgcaaaatcaaatctttgggtgtgaagatggttatttctggcgaaggttcagatgaaatttttggtggttacctttattttcacaaggcaccaaacaagaaagaattccatgaggaaacatgtcggaagataaaagcactacatctgtatgactgcttgagagctaacaaagcaacttctgcctggggtgttgaggctcgtgttccattccttgacaaaagtttcatcagtgtagcaatggacattgatcctgaatggaagatgataaaacgtgacctcggtcgaattgagaaatgggttatccgtaatgcatttgatgatgatgagaggccctatttacctaagcacattctctacaggcaaaaggaacagttcagtgatggtgttgggtatagttggatcgatggattgaaggaccatgccagccaacatgtctccgattccatgatgatgaatgctggctttgtttacccagagaacacacccacaacaaaagaagggtactactacagaatgatattcgagaaattctttcccaagcctgcagcaaggtcaactgttcctggaggtcctagtgtggcctgcagcactgccaaagctgttgaatgggacgcatcctggtccaagaaccttgatccttctggccgtgctgctttgggtgttcacgatgctgcgtatgaagacactgcagggaaaactcctgcctctgctgatcctgtctcagacaagggccttcgtccagctattggcgaaagcctagggacacccgttgcttcagccacagctgtctaaccttatgtttatcacccagcaatgcttgaaacagcaaaggttgtccattgcttgtttcagtttccttccgatcatgtttttagttccatcaatcaagcaatggagacatgcttgtgcttcatacttggcagcatcgtgtttgggttttcactgggcagtactgtttaatttttatggactgaaaagactcagttttgtaaatattcgtcactgtgaccaattcctgtggtggtttatgtgatttgcagattgcagtggttagtgtatcttcccaattttcactcctttaac

SEQ ID NO: 155713 - DNA, 1146 bp, Zea Mays
ttccctgcctaaaactcccatttcgccgtccgtgacgcgagagacctcttcgcatcccgaggcggcgcttttggggtcggaagcgacacgggcgccgggcgggtccgcgggtggtggtgctactgctagcaagcagcagcaggcgacgctaggcgagagccccagtcggagcaggccaccatgtgcggcatcctcgctgtcctcggcgtcgctgaggtctccctcgccaagcgctcccgcatcattgagctctcgcgcaggttacggcaccgagggcctgattggagtggtttgcactgtcatgaggattgttaccttgcacaccagcggttggctattatcgatcctacatctggagaccagcctttgtacaatgaggataaaacagttgttgtaacggtgaacggagagatctataaccatgaagaattgaaagctaagttgaaaactcatgagttccaaactggcagtgattgtgaagttatagcccatctttacgaagaatatggcgaagaatttgtggatatgttggatggaatgttctcctttgttcttcttgatacacgtgataaaagcttcatcgcagctcgtgatgctattggcatctgccctttatacatgggatggggtcttgatggatcagtctggttttcttcagagatgaaggcattgagtgatgattgtgaacgcttcataacatttcccccagggcatctctactccagcaagacaggtggtctaaggagatggtacaacccaccatggttttcagagacggtcccttcaaccccttacaatgctctcttcctccgggagatgtttgagaaggctgttattaagaggctgatgactgatgtgccatttggtgtgcttttatctggtggactcgactcttctttggttgcatctgttgcttcgcggcacttaaacgaaacaaaggttgacaggcagtggggaaataaattgcatactttctgtataggcttgaagggttctcctgatcttaaagctgctagagaagttgctgattacctcagcactgtacatcatgagttccacttcacagtgcaggttctcgattcctttttctgtacactacagcaaaaaacttttaatttaaatttattataaaaaataccaggaggg

SEQ ID NO: 155714 - DNA, 1702 bp, Zea Mays
ctctgtcctgtcttcctctccttcctcctcgtcgtcctccgccatagtggcgagcacgacaacagccacgcctcacgccctcacctccaatcattggcctccccaacccaacctctccccgccccgtcctgttgagccgggtgattgacggattattagttaatccgggggcttcacctcgttttagcggcctcgttcgttcgcctccgcaaaaggctaacgccagcccgggcgcgcgctaacggcagcaacgacagcaacccgctggctagctagtcctccccacgattcgactccgccaccgtccccggcccagcacaccttttcttctctcctgaagcaaaaaccaccaaagactagtcctacaaaatctaggggttctatggctgtttcaatgagggaggtggatcctgtttttcaaggtgcaggtcaaaaagatggattggaaatatggcggattgaaaagttacaggctgttcctgttcccaaggaatcatatgggaaatttttcacaggagattcctacatagtactgaagacaactgcccttaagaatggttcttttcgtcatgatatccattattggcttggcaaagataccagtcaggatgaagctggtacagctgcaattaagactgtggaactcgatgctgcccttggtggaagagctgtccaataccgtgaaatacagggaaatgagactgagaaatttctttcatactttaagccgtgtattataccagaggaaggtggtgttgcatctggtttcaggcatactgaagtaaatgagcgggagcataaaacacgattatttgtctgcagaggaaagcatactgttcatgttaaagaggttccttttgcacgagcatcactcaaccatgatgacatatttattttagatacaaaatctaagatattccaattcaatggatcaaattcaagtattcaggagagggctaaagcacttgaggttgtgcaacatcttaaagatacaaaccatgaaggaaaatgtgaagttgcggcagttgaggatggaaagttgatggcagatgctgatgctggtgaattctggggtctctttggcggatttgctcctttaccaagaaagacattttctgaactcaacgggaaagattctacttccacttcaaaattgctttgtgtaaacaagggccaatttgcccctattgattgcgaaattctaaaaagggagctattagattcaacaaaatgttacctactagactgtggttctgaaatttatgtctggatgggtagagaaacaactcttgaagaaaggaaacgaggcggctcagctgctgaggaattactacgtgaaggaaaccggcaaaaatctcatattattcggctcatggaaggatttgagactgtcacattcaaatcaaagtttgataaatggcccaagaaagctgatgcagttgtgtcggatgaaagcagaggaaaagtggcagctcttcttaagcgacaaggatttaatttcaaggatccagcaaaagctgctcctgtaaagcaagagcctcaacctcagattgattgcactggcaacttacaggtttggcgcgtaaatggcagtgataagactttcctttcgttttctgagcaatgcaagttttatagtggagactgctatatctttcaatacacctaccctggatatattggagatgaatgtcttattggt

SEQ ID NO: 155715 - DNA, 657 bp, Zea Mays
atggctccacggccagccgccaaccaccaggccacggccgagcagggcgccaagcacctaggccggccgagcggtgcgccgagcgcccgagcacccaggccaccgcccgccgcaccagagcggccaacggggcgccgagccgagcagagtttcaacagtgttcctgaccgtgtgttcttgatccaggtggctgccagcaagacgaagatctacatggtgcttgagctcgtcaacggcggcgagctgctggacaggattgcgaccagtgagggaaagctcccggagcaggatgcaaggaggctcttccagcagctggttgatggtgtcagctactgccatgaaaagggcgtctgtcacagagacctcaaggtgcagtgccggccggacgttcctcatcccgctccgctcctatcagttaagttttgctgtgtccgtggccctggtcctttcctctactctactcactcactcatcactcccaggcggccaaacagctccccaggtgctaattccttatgccgaatgcctgcaggttctgcagaacagagggcagccaaggcaaatgaaagtccatatgcaagcattacgcagaggtatgaagtctggtccaaccacgtggaaaaaatacctctgatccttacagatttcactgactag

SEQ ID NO: 155716 - DNA, 691 bp, Zea Mays
gcgagcgccatctgactcttcatcgtcgcctttgcccacctcccaagcttccgcctcctcccctcccgcgctttctccgattcttccacgagcttccagatcgcgaaaccaccatagccgcagtcaggcgagacgagtgcccacccgcgccgcgggattcatcggaatggcgtacgtggaccacgccttctcaatcaccgacgacgaagacctggtcggcggcgcggtgggaggcccgcgtggcgccccggtcaaggaaatcgcctttgctgccgcgctcctcgcttttggcgtcctcggtgtcgtcgcgggatccttcatggccgcgcaccaagtcggcggcgaccgcgcccacggcattttctttgcagttctgggaggggtgatgttcatcccagggttctactacacaagaatagcgtattatgcttacaaagggtacaagggtttcaccttctccaacatacctcctatctgaagaagcaattggattggctcatccaactatccaacacatggctgtctctctctctctctgtctctcttttttgtttcttattaacctttgtataaagtcgacagcgtggcaagtgatctgtacatataaaaacaccaccgtaatgtaatgtgtcatcacaacattatgttaccacgtgaagttgttcgttatgagatataaacgttgacctat

SEQ ID NO: 155717 - DNA, 1253 bp, Zea Mays
ggccttttgtgttgctgttgcagctgcctgcctgcctgcatataattctgttgcctttagctgcttgcttgctcatctctctccccattgccaccatcatcacctccatatcccctcgccatcacgcctgcctgcctgcctccctccctccctcctcctttgcactaccgccgctacaaaagagcacaccgcctgcgacctagtgctgccctgttcgtcacaattcacgtacacgacgacgagacgacccctgcgggcagatcttatcttccttgacctagccagttgtgcaggcgcctcgggggccggggcctctccatctgagtgttagattacccacccgatgggcgtcgagctcgacctctccgacttggccgtgctccggccggtccagaccgcggcggcgggcgacggcccggacgccgccgacacgggctgcgtcacgccgacggccgcgagctcccttctgccgcgcctgggcctgggcggcggcctactggacatcgactccgccgcgtgcgtgaccccgacggcgtcgccgtgcctgctgcggccggccacggtgtgccctccggcgccgcggaagccggtggcgcccggcagcaagaggaggaagcgctgctgccgcctgcagcgcgccttcttcttccccgtgccgctcgacctctccacggtgttcgtcccgcgcggcgccgccgccgcccccgcggacaggtcctcgccgcctcctagggccgccaagaagatccgcctgcacgttgtgggctgaagccgtgccgcgccgtgccgtgccgccgggcgcctgctggctcgtcggagccagacacagctagctagcccacgcgcgggatgcatgcatgtccattgccacgccaccacgcgcgcgccatatggtttcttctccaccaccagtactgatcagttgcggcgggcgggcgggcggcaagccatcattggccgttcgctgcgagtgcgatcgatcgaggacaaattataattcttggcttcctgacaagacacaaggcacgatcggaaggcaggcaggccggccggccggacagtacaatcgccacgccacgcgccaacgttttcatcagaggttgttaccgagtgggtagtagtgagagcactttgatcgatcgatcgatcgagcctgaatctgaataaccgaattgtaaataccgccacattattgttggctgcacatggttgtcttggcgcgcgtggagggtataaaaaggccgcagttcgtc

SEQ ID NO: 155718 - DNA, 1975 bp, Zea Mays
cttcactcatcacttccacttatgtgcacacattgccgtgccgtgcggtgcgtgaaaggcacggggccgccggccggactcttctgacttggcaaccgccgcgcagcgcgacgagcgccacctgcttgctgccgcgtgcctgcgtgcgtgtgcgtccaccactgaccccgcgcccgcccgccgcccctgcccctccactccacttgctcactcgtcggctcgtcgcggcccgcttcccccccggccaagggatggacgcgcttcgcctacggccgtccctcctccccgtgcggcccggcgcggcccgcccgcgagatcattttctaccaccatgttgttccatacaacgaaatggtgaaggacgaatttgcttttctagccaaaggacccaaggtcctaccttgcatcaccatcagaaattcttcgaatggaaatcctcctattgtaggatatcacatcggtcattaaatacttctgttaatgcttcggggcaacagctgcagtctgaacctgaaacacatgattctacaaccatctggagggcaatatcatcttctctagatgcattttacagattttcccggccacatactgtcataggaacagcattaagcatagtctcagtttcccttctagctgtccagagcttgtctgatatatcacctttgttcctcactggtttgctggaggcagtggtagctgcccttttcatgaatatctatattgttggactgaaccagttattcgacattgagatagacaaggttaacaagccaactcttccattggcatctggggaatacacccttgcaactggggttgcaatagtttcggtctttgccgctatgagctttggccttggatgggctgttggatcacaacctctgttttgggctcttttcataagctttgttcttgggactgcatattcaatcaatctgccgtaccttcgatggaagagatttgctgttgttgcagcactgtgcatattagcagttcgtgcagtgattgttcagctggccttttttctccacattcagacttttgttttcaggagaccggcagtgttttctaggccattattatttgcaactggatttatgacgttcttctctgttgtaatagcactattcaaggatatacctgacatcgaaggggaccgcatattcgggatccgatccttcagcgtccggttagggcaaaagaaggtcttttggatctgcgttggcttgcttgagatggcctacagcgttgcgatactgatgggagctacctcttcctgtttgtggagcaaaacagcaaccatcgctggccattccatacttgccgcgatcctatggagctgcgcgcgatcggtggacttgacgagcaaagccgcaataacgtccttctacatgttcatctggaagctgttctacgcggagtacctgctcatccctctggtgcggtgagcgcgaggcgaggtggtggcagacggatcggcgtcggcggggcggcaaacaactccacgggagaacttgagtgccggaagtaaactcccgtttgaaagttgaagcgtgcaccaccggcaccgggcagagagagacacggtggctggatggatacggatggcccccccaataaattcccccgtgcatggtaccccacgctgcttgatgatatcccatgtgtccgggtgaccggacctgatcgtctctagagagattggttgcacaacgtccaacatagcccgtaggtattgctaccactgctagtatgatactccttcctagtccttgccagcaccagtgacccaaacttggtcggctgagctcagcgctcagcagctttacgtgcatctgcgccttgacttgtgcagtgggcgtcgctagcatgaatgatgtatggtgcgtcacggcctgacggttcgtcagtctgggccgtgttttgtgtccgaggaagatcgtctgtcagagatctggattgcctcgctgct

SEQ ID NO: 155719 - DNA, 1950 bp, Zea Mays
gcacgcgcctcctctcatggagtcatccgccgtgaggggcgacacccctcgccggccgtcggcgtttgccggggcctcgccgcctcctcccccgcccccgccgccgaggggttggctcgcgggtctcgtctccggcgccggccggatcctcgccgccgtgctcgggcccgagccctcctcttccggctccggctccattgcctcatctgcagcgtcggacggggactcgccgtcggcctcgtactcgccggcatggttcccgcctcctggcccgcacggcgagggttgcaatgacgccaccgataacaatgattccccagtctttcccctgagtaataatcagtcaaatcagggtaaaaaggagactgctctaaaagactacacggggtccctagcaattatctctgagattgaaccaaaggatgccataatgcaattgcttatgcaggaaacctattcaaggtccgagtgcagcaagtttataaagataattcaagagcgggttttagattcagattcaggtgatatagatgctggtgggtttgctctcactagtgctcggaaggctagcagactagccgtagatgggtactcttcatttagtccacatgaatcctcacctgcaacttctagtcttcaaatgcatggctgtgataatagtgctgctgtgggcacaattccaaaattaactcataccaaccaaagccctttcatcaacaatgctaagaacataaacccagttctcaaacgaaattactctgttagagaggatccatatggggagattcgaagagtgagaccaaagatcaatggaaattcatgggacatttcaaaattcaagcaagttgatattattcgaaatcatccagctgcaaattcacgtgaagagctcactgccaggaatccaaatgcttccagagatggaaagaaactattaaaggatattatgggagccagcaatttaacataccctaactttatttcaaaagctgaaaccgctgatgaaacatcagatgtccccgataaaccttcagctgtaaccccacaacaacatgattccagcttcccgcaagctggtaagaaacaaaaaggttttgctgctacaacacttaatcagtgttctaatgaggacctgaagaaaggctttgctttgaaggtggagcctttgaatgcatttattcctttcgagcagcagatgatggacctatctcacaggaagcaagagaatgctgcctgtgacgattcatgctctctctcaaaactaatgttgaaggaggatattgaggctgcacccagcctgccgacgggcattcaagtacagaatggctccaagaaccgcaggaggaggcagcccaacgtacagaagaccacggcgactccaacaaggtcgcctgcaaggggtcagcgtcgaaagaacaacgatgccatggtcaaatcggagatgggcttgattgagcagagtaaacttgtgctgacggaacaagagccagagctgggagacgttccggtgaagagacccgttgggaggcccaggaaggcgaggaacggacctagctcagatgacccgggcacccctgcttcgtaggcttgagctccgtttggcttggattccggcgccttttccagtttcctgtgacttctgtacagtgcaagccatcttaacgccgccaaggttaacttatcgaaacatttggagaacctggaagcaaacggcgaagtttttccgtgtgcgttaatgtttcagagaagggagtccgagggaaaaaaaggttgccactacgcagctcatgtactgtttttttttgtaggatgtattgacatcattgtaccaaatcagctccatataatcctgtttgatagatataataccattgtatcaaatctcgagttttgataggcaaagattactagtaatcttgaagagcccgcggtcgtcagagacggcggtaa

SEQ ID NO: 155720 - DNA, 111 bp, Zea Mays
gttaatgtgttttttaataattacaatagtttaattgttcttttcatttgtgtgtgcatgtttattaatttactagatgtctagtatttcaagattcaactatggaacatc

SEQ ID NO: 155721 - DNA, 679 bp, Zea Mays
tttaacgatgtggtacagggtgccagaggtttttttggcgccacacactattcacgccggttgacattggtccgtggggtgcatatttgctgagttggttactaatcagccacttttccctggcgactccgagttgcagcagctcctccacatcttcaagttgctgggcaccccaaatgaggagatgtggccaggagtaggcaagctgccgaactggcacgtgtacccccagtggaagcccactaagctgtccactcttgtccctggtcttgactccgatggctatgatttacttgagaaaatgcttgcatatgagccagggaagcgggtctcggcgaagaaggccctggagcacccgtacttcaatgatgttaacaaggaggtgtactgaagcgacccgagtagtagggttcatcgagagaggatcattgtcaccttattcttcgcttagtgtgttaatatggctaccctgaagcagtacttgaagtatctctgtgttcaagctgctacttttctatttgttgtgccattcactttggttgtgatggataaggcagggagagttttcagcatgagtgagcttatgttgacactgtttcttgcaaattgtagccggaaagcttgcgatcatcttccatttgatttataaagcttcactatatggctctgaagcacaaaa

SEQ ID NO: 155722 - DNA, 186 bp, Zea Mays
ccgtgcggaggctgcttgggagggagctcgccactggagttttgaaggtagagcccgcgcgtaggtgcaaccagatggcccatagaggaaggcggaaatgggtgggtggttcacccctcggcaccgacacgatgattcccggctgcagaggccggtggagccttcgatcccgccggcagcgcccat

SEQ ID NO: 155723 - DNA, 1102 bp, Zea Mays
gcaggggtcgcgtcgcgtgggggaaacgccgccgaaaaccactgggtgcccgctctcgctcggcacgtcccgcgcgcgcccacgcccacgcccacgcccacgactggtcacaagcgctagccagcgttcttcacgcgcctcgcgcctgcctgcagccgcaggggaatcgatcgtggcaagggcttgcagtcgcagctactggtagcagagcgatggcggccgcggcgagggtgtcggaggtgaaggccgagggcctcctgcggggcgcgtgcgcggcgctggccgcggcggccgcgctgctggtggggctcagcacgcagacggagacggtgctgctcgtcaggaagaaggccaccgtcaaggacgtccaggccctctgggtgctggccatggcggccgcggcagcggcgggctaccacctgctgcagctgctcaagtgcctctacctcggccgcgtcggcggcgcgcgcccctgccgccggagcagcagggctctggcctggacatgcctcctgctcgacaaggcgtgcgcgtacacgacgttcgcgacgacggtggcggcggcgcaggcgtgcgtggtcgcgctggacggcgcgcacgcggtgcagtggaccaagctctgcaacatctacacgcgcttctgcgagcaggtcgccggcagcctcgtgctcgggatgctggccgccgtcggcaccgccgtcctctcggccgcctccgcgcgcaacgtcttccgccactactcgtcgttggagacctacgccgcgcactaggctcgcggcccaaggcgtcgtcagctgggccgggtgcgccactcctctaaaacactgggccgtaacgaatttcaggcccagatgaagggtgacctgggctattaaagctggagctagtagagttctactccagagtgtactcctgcctacagtcctactgctctctccctccctctcgaagaggtgtgtacttttatttttcttttgcttctgttgcatttgatacattagtgaagacatgagtatgtacgttcgtcagtgtattttcttagatctttcctgtagactacattgcagctaaggaataaaaaaaccagcaattgctgcgcact

SEQ ID NO: 155724 - DNA, 1156 bp, Zea Mays
tgtactatgttgttcagttcgtcggagctgtcactcaggacatacctatgatgattgtttctgaactccatgaagagacttatgagatgtatccagaagaaagcaaagttacgtgcgcaaaaggtgctaagaaatggccttgatatttccagtgcatggttcgaagagcttcacaagcagagttcagagagttgctgaattgaaaaggggaattggagaagtcagaaaattctatcggagatttgagatctcctttttagtcttctacgtcttttcaatctgtgattgggatttgggagcttcagcaaatataacatgtttatgggactgggagttttgaatgcggcaccagtcatactgaatcaggttcacactccaaaaaacacagcagataattcttcaggccaaggcacatccaaagatcacgagcattctattatagttactaggcctgatggcatgccagcacatattaggatgctagtgtttggttttgccttgacgaactctctacatgatggatatctcaatatgggcacctggaaggtaagggaaacacacgcccattctcacaattgagcagatgttcatgcttcctgcaactccccattttgcattcagaaggtcataatttggtaatacatggcaaacggatgtgagtttatagtataactgtctgtattgaaactataacatcttaggaaatagtcaaattaaatttgggcctggatataaaattgggattctgtttcaagtgtaccatgtactaaattgaattgtaacatatgaatggatgctagaaattccaataaattcaccgctacaattacctgcgtggtttttgccttaggtgatcgttactattctcatcatttcatacattgtccagatcattactattctcatcattgcatacattgtccaatatctctcttttttatgcggggcatgccagattgttcaccgtctgaaaatctataggttgttaagatttcacatttaaacatgagttatactctaattgccattctttgtggagagtcatgtaatagtgatgttgcaaacatcacgctctcgacgtaacttttttgagaggagtacaacacgcgttcacacacgttattgtggcatctttttctcgttgcaagacatgcgc

SEQ ID NO: 155725 - DNA, 91 bp, Zea Mays
ggtcatcctagatgagcccaccattggtttggataggtatgcacttctatttcatctcttttggaagctaccgtttgctagagtgactcat

SEQ ID NO: 155726 - DNA, 172 bp, Zea Mays
cacctcggggggcaccccggtgccggccaccatccgccactcgtcccgggcctcgtcgtaccgcttcagccgccactccccgtactccgccacgatatacatccggccgccggcgacggcgcaggagcccgtccacccctcccgcatcccgcgcgccatctcgcaccacgag

SEQ ID NO: 155727 - DNA, 766 bp, Zea Mays
attcgtaacactactacagcaagaacacaagctaggcgcggtgggtacggtgcaagtgagctagcagctctaccgccatgaggccagcagcagagttcccgaccatgagccacggcgcgcccatgggtgcgaacgcgaacgtgcctcactccccgtggcagtcgccggtgccgtacctgttcggcgggctggcggcgatgctggggctcatagccttggcgctgctcatcctggcctgctcctactggaagctgtccgggtacctcgacgccgaccgcggccagcgggccggctcgtccggagaagcgggcgccgacggggagaagggctcggcggccggcgcggccaggccggcggcggggttccaggagcacgtggtggtcatcatggccggcgaggagaggccgaccttcctggccacaccggctgccagccgtgcggtcgtggagctcggggccgcgccgggctccggcggctcggccgaggcgcccgaggaggaggaggcccacgtggacggcgacggcggctgcggcgactgtgagcacgaagtgccccggctcggagccgacgccggcaccgtgagccggagcagtgaaggcaccagcagcgcgacgacggcgctggctgagtgatcgctcgttttttctcttcgcatttttctcctgctggagtggtgtgttaggtttagcttgtagttgtatattcttgacttgattggttcagactgagggtgaaattaaagaaacttcaatgcgagttttgctaa

SEQ ID NO: 155728 - DNA, 150 bp, Zea Mays
atgggatcgaggaacgggaacgtggtacgcggaacgctacaaaaactaggatttaatactactggaacgagatcgttcccacgttcccggaacggaacgaacgttcccggaacgaggaacgtggccaagttcccggttcccggttactaa

SEQ ID NO: 155729 - DNA, 886 bp, Zea Mays
aaactccaaaaactgatgtaaaaaataaatagctaagttaaaggggagctgaatagggagaatgattggagagaaggagaaatatgaggaataatagaatataaagtagggttgggagggggaatggttggagaggtacttccatccccatcataggtgctcgttctgtaatgactgcctgtctggctggtgagacttctactttggagatgagcataggtcaattgatttcctcgagccttcaattgttcttagtaataatcgcagaaagtttgtatctgcctgccatctctcagctaatttcccctccaattctagagggaatttgagttcccaaactagccgtaaatgaatcaagacatttactgacgccgcgaaaaaaacaaacctaacggcctcgcacaatgcttcaccctagattccaatccacacaagacagccattcgccatggaaccaacaagaacatagatgcaagcaagagacgcccgaatattaggacaccacaacggttaatctacgcgaaacaaaaccaccgtcgaaatggcaaccacgggcaagggaaggaaacgtcacgtctgtggcaaacttcgccgctactcggggctagttcgccagattggtcgtcctcctatatacaaaccaggatatgaaaaagcgcagaggaaacacctgaacgggagaaggaagcaccgaagctgcggacagcggggaagagggagacgtcaggcgtggagacaaaccgctccgctccgctctgccccgcccccgccgccccccgtccggccgcctttgctcttggcgagcgtgcgtgcgtgcgtgcgtgaagggaaagcgaggagagccgggctgtttgcccccaggtatttatccgggagaggatgctgg

SEQ ID NO: 155730 - DNA, 1924 bp, Zea Mays
accccctcacttctcaaaactcccaactaccactaccagtccaatcaagaaatgctccactacatctcctcttcccctctccgtccccgattcctcctcctcccgagcccaccctccaatcttcgcttcctcaccatgagcgcctccccctcgagctcctcgtcccgttcggtgcgcggtgcggcggtgtcggtgccttccctcggcgccgacgaggcctgcgcagtggcagatgaagccttccggaggtacacgtcgccgagcttattgaggagaggcggcgtcggggtggccgtcgtgtggttcaggaacgacctccgagttatcgataacgaggcgcttctgcgagcatgggcggcttccgaggcggtcctgccggtgtactgtgtcgatccgcgggtctttgcggggagcacgcattactttgggttccccaagaagggagcattgagggcgcagttcttgatagagtgtttaggagacctgaagcagagcctgaggaaaaagggcctcgatttgctagtccggcatggcaagcctgaagagatccttccttcaattgcaaaggccgtcagtgcacacacaatatacgctcataaggaaacctgtagcgaagagctcctcgtcgaacgcctagtgagcaaaggcttggaacaagtccagattgctcaaggaggagcatctgtcccgaagaggcctctgaaccccaggttgcagctcatctggggagcaacaatgtaccacatcgatgacctcccgttcccagttagcagcttgccagacgtgtacacacagttcagaaaggcagttgaatcgaagtgctcagttaggaactgcgccaagttgccaacgtcgctcggtccaccccctagttccagcatagatgagattggaggatgggggacagtaccaacactggagtcactaggccccagtgttacgaagtctgagaaaggaatgcatttcataggaggagagagcgcagctcttggtagggtacatgagtacttctggaagaaggatcagctgaaagattacaaggtgaccaggaacggcatgttaggtccagactactccacaaagttctctccttggcttgcttctggcagcctttcgccgcgttatatttgcgaagaggtgaagagatatgagaagcaaagagtggcaaatgattcaacatattgggttttatttgagttgatatggagagactacttcagatttctatcagcaaaatatggaaacgccatatttcacctgggaggcccgaggaaagtagtatcgaagtggagtcaggaccaagcactgtttgaatcatggagagatggtcgaactggataccctcttattgatgccaacatgagggagctttcagccaccggttacatgtccaaccgtggtcgtcagattgtctgctcatttcttgttcgagatatgggtgttgattggcgaatgggagccgaatggttcgagacatgcttattggattatgacccagcttcgaattatggcaattggacatatggagcaggagttggcaatgatccacgagaagatcgatacttcagtatcccaaaacaagccaagtcatatgatcctgaaggggaatacgttgcatactggttaccagaacttcggtcacttgcaaaggaaaggagaaatttcccaggagcctcatacatcaggcaggtagtaccactgaagtttgatggtggaaatcagaggaaggatcagcaattcaaccggcagagaagaccaaacaacgtgtacataagacaagtaaaataggaggctcttgattcacttgaaattgaaccatctatcagtaggagatgaagcaaatttttacacaactgattgtggtgtaaacatacgcgaattactctatggtcttatgcaatgttcattgatgcattcagataca

SEQ ID NO: 155731 - DNA, 1961 bp, Zea Mays
accccctcacttctcaaaactcccaactaccactaccagtccaatcaagaaatgctccactacatctcctcttcccctctccgtccccgattcctcctcctcccgagcccaccctccaatcttcgcttcctcaccatgagcgcctccccctcgagctcctcgtcccgttcggtgcgcggtgcggcggtgtcggtgccttccctcggcgccgacgaggcctgcgcagtggcagatgaagccttccggaggtacacgtcgccgagcttattgaggagaggcggcgtcggggtggccgtcgtgtggttcaggaacgacctccgagttatcgataacgaggcgcttctgcgagcatgggcggcttccgaggcggtcctgccggtgtactgtgtcgatccgcgggtctttgcggggagcacgcattactttgggttccccaagaagggagcattgagggcgcagttcttgatagagtgtttaggagacctgaagcagagcctgaggaaaaagggcctcgatttgctagtccggcatggcaagcctgaagagatccttccttcaattgcaaaggccgtcagtgcacacacagcaccaaaggttaagtcagtaagcgatgtgtctccagatatacgctcataaggaaacctgtagcgaagagctcctcgtcgaacgcctagtgagcaaaggcttggaacaagtccagattgctcaaggaggagcatctgtcccgaagaggcctctgaaccccaggttgcagctcatctggggagcaacaatgtaccacatcgatgacctcccgttcccagttagcagcttgccagacgtgtacacacagttcagaaaggcagttgaatcgaagtgctcagttaggaactgcgccaagttgccaacgtcgctcggtccaccccctagttccagcatagatgagattggaggatgggggacagtaccaacactggagtcactaggccccagtgttacgaagtctgagaaaggaatgcatttcataggaggagagagcgcagctcttggtagggtacatgagtacttctggaagaaggatcagctgaaagattacaaggtgaccaggaacggcatgttaggtccagactactccacaaagttctctccttggcttgcttctggcagcctttcgccgcgttatatttgcgaagaggtgaagagatatgagaagcaaagagtggcaaatgattcaacatattgggttttatttgagttgatatggagagactacttcagatttctatcagcaaaatatggaaacgccatatttcacctgggaggcccgaggaaagtagtatcgaagtggagtcaggaccaagcactgtttgaatcatggagagatggtcgaactggataccctcttattgatgccaacatgagggagctttcagccaccggttacatgtccaaccgtggtcgtcagattgtctgctcatttcttgttcgagatatgggtgttgattggcgaatgggagccgaatggttcgagacatgcttattggattatgacccagcttcgaattatggcaattggacatatggagcaggagttggcaatgatccacgagaagatcgatacttcagtatcccaaaacaagccaagtcatatgatcctgaaggggaatacgttgcatactggttaccagaacttcggtcacttgcaaaggaaaggagaaatttcccaggagcctcatacatcaggcaggtagtaccactgaagtttgatggtggaaatcagaggaaggatcagcaattcaaccggcagagaagaccaaacaacgtgtacataagacaagtaaaataggaggctcttgattcacttgaaattgaaccatctatcagtaggagatgaagcaaatttttacacaactgattgtggtgtaaacatacgcgaattactctatggtcttatgcaatgttcattgatgcattcagataca

SEQ ID NO: 155732 - DNA, 1325 bp, Zea Mays
accccctcacttctcaaaactcccaactaccactaccagtccaatcaagaaatgctccactacatctcctcttcccctctccgtccccgattcctcctcctcccgagcccaccctccaatcttcgcttcctcaccatgagcgcctccccctcgagctcctcgtcccgttcggtgcgcggtgcggcggtgtcggtgccttccctcggcgccgacgaggcctgcgcagtggcagatgaagccttccggaggtacacgtcgccgagcttattgaggagaggcggcgtcggggtggccgtcgtgtggttcaggaacgacctccgagttatcgataacgaggcgcttctgcgagcatgggcggcttccgaggcggtcctgccggtgtactgtgtcgatccgcgggtctttgcggggagcacgcattactttgggttccccaagaagggagcattgagggcgcagttcttgatagagtgtttaggagacctgaagcagagcctgaggaaaaagggcctcgatttgctagtccggcatggcaagcctgaagagatccttccttcaattgcaaaggccgtcagtgcacacacaggttttatttgagttgatatggagagactacttcagatttctatcagcaaaatatggaaacgccatatttcacctgggaggcccgaggaaagtagtatcgaagtggagtcaggaccaagcactgtttgaatcatggagagatggtcgaactggataccctcttattgatgccaacatgagggagctttcagccaccggttacatgtccaaccgtggtcgtcagattgtctgctcatttcttgttcgagatatgggtgttgattggcgaatgggagccgaatggttcgagacatgcttattggattatgacccagcttcgaattatggcaattggacatatggagcaggagttggcaatgatccacgagaagatcgatacttcagtatcccaaaacaagccaagtcatatgatcctgaaggggaatacgttgcatactggttaccagaacttcggtcacttgcaaaggaaaggagaaatttcccaggagcctcatacatcaggcaggtagtaccactgaagtttgatggtggaaatcagaggaaggatcagcaattcaaccggcagagaagaccaaacaacgtgtacataagacaagtaaaataggaggctcttgattcacttgaaattgaaccatctatcagtaggagatgaagcaaatttttacacaactgattgtggtgtaaacatacgcgaattactctatggtcttatgcaatgttcattgatgcattcagataca

SEQ ID NO: 155733 - DNA, 2001 bp, Zea Mays
gcctgctttggacattgtagatcacctacctcgacacattttctggattgtcgaacaacttgcgaagctttggatagagtggtgctcgtccaatgttagtagcttgccatcacaatttccggaacagatcgtgactgggtggcgtactagctagcgcatcgcaatacgtactagaaccaccaccgaatatcactgggggtgggtggactgctcggttgttgtagaattgtagggacaaatcttgggggaaaaaacattgcctgaaagttcttcaggccctggtgtagcagctgaattacccagtttaatggcgaagaacgagctttagatggtctaaagatggagatgagatagaagcaccacaaagtgtacagtggggtagcaaggatatgactgtcatgatgcctcagcgccaccgggctacagccaagaagcccatgtggataatcgtgctcttgtgcatggtttgcatcgtgctgattggggcttacgtcttcccaccgcggcgcttctctaactgctacctctctgcttcaagtgtatgcgcacctttcaaggattggctcccttctatgggccgtcgggagagaactgacgaggagattatttcatctgtagttattagggatatcctttcaatgcccatgcctatgccaaaaaatccaaagattgcccttatgttcttgacaccaggttcattgccctttgagaaattgtgggagaagtttttacagggacatgagggaagatactccatctatgtgcacgcatcacgtgaaaagcctgttcatactagttctttgtttgctggccgggatattcacagtgatgcggtagtatggggattgatttcaatggttgatgctgagaaaagattgttagcgaatgcactggaagatgttgataatcaagtttttatcttgctttctgacagttgtgttccactgcattcatttgattatgtgtataattacctcatgggaacgaatgttagcttcattgattgtttcaaggatccaggtccacatggcagtggaaggtactctattgagatgtatcctgaaatagacgagagggattttagaaagggtgcccagtggtttgcagttacaaggagacatgctttaatgattctggctgacagcttgtactacaagaagttcaagctatactgcaagccagcagaagggcgcaactgtattgcagatgagcattatttgccaaccctgttcaatatggtagatcctggtgggatctctaattggtctgttacacatgtggattggtctgagggaaaatggcatccaaggtcatatagcgctgatgatgtcacctatgatctcttgaagaacattacagcagttgatgagaacttccatgtaacaagtgatgacaagaaacttgtgatgcagaagccgtgtttgtggaatggatcaaagagaccgtgctatcttttcgctaggaagtttaatcctgaagcacttgacaacctactgaagcaatttaccagttacacatctgtttgagtcctaccggattctttgccttgtgctgtcaaatccgacaagcttttttctcttcctgtttatatgtaaattgtgaagtccgtacttattaggatctgggcctgaagataccggtacaactgcaacagctgtgatggcttggagctgagtcatgggtaaaacggccacagcgatgtttatagaatggcactgccctcatagtaatttatcgtgttcaatgtatgtctccatagtcttccacccaactcccaactcattagttctttattcttggagaacagtttttgtcagagtgttatactgtcatgatatgatccattctttgtagacacagagattacaacagatgtatcacaaatgcagtcttaattttgtcactattaaatcttttatcatgcgttctactgaattaggtgttagcatttcttaaatttcactgtgatcaattttcagcaaagtaagcgtatttgagctg

SEQ ID NO: 155734 - DNA, 2023 bp, Zea Mays
agcttccacctctgacccaaacccaaccccattcagcagaacatccagttatagcttaattaatccttttctttataccgactccctcgtggcctcgtcgcctcagctccaccaccaccacctccacccgcgcctccaaaatccaaatccgatcgatctccgcggcctccagatcccccggcgggcggagacggcgagctccaggcggccaagaagcccccccctcgcagcgctcctctcctctgcctctccgaatcccttaccagggggaaaaaacattgcctgaaagttcttcaggccctggtgtagcagctgaattacccagtttaatggcgaagaacgagctttagatggtctaaagatggagatgagatagaagcaccacaaagtgtacagtggggtagcaaggatatgactgtcatgatgcctcagcgccaccgggctacagccaagaagcccatgtggataatcgtgctcttgtgcatggtttgcatcgtgctgattggggcttacgtcttcccaccgcggcgcttctctaactgctacctctctgcttcaagtgtatgcgcacctttcaaggattggctcccttctatgggccgtcgggagagaactgacgaggagattatttcatctgtagttattagggatatcctttcaatgcccatgcctatgccaaaaaatccaaagattgcccttatgttcttgacaccaggttcattgccctttgagaaattgtgggagaagtttttacagggacatgagggaagatactccatctatgtgcacgcatcacgtgaaaagcctgttcatactagttctttgtttgctggccgggatattcacagtgatgcggtagtatggggattgatttcaatggttgatgctgagaaaagattgttagcgaatgcactggaagatgttgataatcaagtttttatcttgctttctgacagttgtgttccactgcattcatttgattatgtgtataattacctcatgggaacgaatgttagcttcattgattgtttcaaggatccaggtccacatggcagtggaaggtactctattgagatgtatcctgaaatagacgagagggattttagaaagggtgcccagtggtttgcagttacaaggagacatgctttaatgattctggctgacagcttgtactacaagaagttcaagctatactgcaagccagcagaagggcgcaactgtattgcagatgagcattatttgccaaccctgttcaatatggtagatcctggtgggatctctaattggtctgttacacatgtggattggtctgagggaaaatggcatccaaggtcatatagcgctgatgatgtcacctatgatctcttgaagaacattacagcagttgatgagaacttccatgtaacaagtgatgacaagaaacttgtgatgcagaagccgtgtttgtggaatggatcaaagagaccgtgctatcttttcgctaggaagtttaatcctgaagcacttgacaacctactgaagcaatttaccagttacacatctgtttgagtcctaccggattctttgccttgtgctgtcaaatccgacaagcttttttctcttcctgtttatatgtaaattgtgaagtccgtacttattaggatctgggcctgaagataccggtacaactgcaacagctgtgatggcttggagctgagtcatgggtaaaacggccacagcgatgtttatagaatggcactgccctcatagtaatttatcgtgttcaatgtatgtctccatagtcttccacccaactcccaactcattagttctttattcttggagaacagtttttgtcagagtgttatactgtcatgatatgatccattctttgtagacacagagattacaacagatgtatcacaaatgcagtcttaattttgtcactattaaatcttttatcatgcgttctactgaattaggtgttagcatttcttaaatttcactgtgatcaattttcagcaaagtaagcgtatttgagctg

SEQ ID NO: 155735 - DNA, 1633 bp, Zea Mays
acgtaccaccgggtttctgtccgcgccccgcccttcaaaagcaggtccgcacgccggccggcgagacgagacgacaccaccacgccgggacgggaggcacaggtgcggtctgcgtcgagagttggtccactggcaggccggaatgaagaagtgcgcgtcggagctggagctggaggcgttcatccgggagagcggcgaggacgcccgcgccgccgccggaggtagcagtccggggtgcggtggatcaagcgatcccggagggagcggcgtcttctcacccggcttcggtttcgccgactcggtgagcactgccaaccacgagcaatgtgattgcagcaacagcggcaactctcgcaactgaaaatgcatctgtgcttatacaaagaagataggtagagttcgctacacttaattgtgatttcattaacgaaggatcttctcgcgcccgagcaggacaccatggatggaggcagttggtggtacgggaacgtccgcacgccgaacccagtcatgtcgcaggcggcgtccatatccgctagccccgggctaaccacctcagccaatcatgctcttgaaagcgagtcagactccgacagcgaatcactgtatgaggtagagggagttccatacgagcgaggtaacagatccattgagacgaagcgaataagaaggatggtgtccaatagggagtctgcgcggcggtctaggaggaggaaacaggcacagttgtctgaccttgagtcacaggttgaacgactcaaaggtgaaaacgcaacactgttccagcaactttcagatgccaaccaacagttcagtactgcagtcacagacaacagaatcctcaaatccgatgtagaagcgttaagaattaaggtaaagatggcagaggatatggtagcgagaagtgctgtatcgtgtggcctaggcgaccttggcctggcaccatacgtgaactcaaggaagatgtgccaagctttgaatgtgctcacagggttggatttactagggagtgatgcgttcaggggtccaaccgcaggtacacgagtacagaactcaccagtacagagcactgcaagcctagagagtctggataaccgaaagtccaacgaggtgaccagttgcgcggcggacatttggccttgagcttcaagccattgatctgattcaaagcttgctccaccctcaaaaaaaggaccagagtttgtcaactcaaatagctggtggcttgagcagagcttctggcacgagttctcttgaaccatatttccacataagctttataggatgcatcactcttttgatgtcacttagtttcaagtataaaatgaagctgtctttgtacaaagctgcaaatgagaagtaaatgaaacgtcctggacaaacttgtgaagtaggaatgatacataggctctatttccaggtcagatgagacagttatgtttacaacaaaaagcaatacatgttgtttagaaaccgctattaattcacaggaatgttcaatccagtacaagtcatctagtagatttgcacccctaccttctagtagattcaaccatgttttcactactacttgctgggactacaactgtacatcatgatggtaaaatgcataactagtgaggttcttgactcg

SEQ ID NO: 155736 - DNA, 1468 bp, Zea Mays
gcgtcaccatccatttgacgaggcggtttatcccccagcaccccaaccaacctttccacgtaccaccgggtttctgtccgcgccccgcccttcaaaagcaggtccgcacgccggccggcgagacgagacgacaccaccacgccgggacgggaggcacaggtgcggtctgcgtcgagagttggtccactggcaggccggaatgaagaagtgcgcgtcggagctggagctggaggcgttcatccgggagagcggcgaggacgcccgcgccgccgccggaggtagcagtccggggtgcggtggatcaagcgatcccggagggagcggcgtcttctcacccggcttcggtttcgccgactcggacaccatggatggaggcagttggtggtacgggaacgtccgcacgccgaacccagtcatgtcgcaggcggcgtccatatccgctagccccgggctaaccacctcagccaatcatgctcttgaaagcgagtcagactccgacagcgaatcactgtatgaggtagagggagttccatacgagcgaggtaacagatccattgagacgaagcgaataagaaggatggtgtccaatagggagtctgcgcggcggtctaggaggaggaaacaggcacagttgtctgaccttgagtcacaggttgaacgactcaaaggtgaaaacgcaacactgttccagcaactttcagatgccaaccaacagttcagtactgcagtcacagacaacagaatcctcaaatccgatgtagaagcgttaagaattaaggtaaagatggcagaggatatggtagcgagaagtgctgtatcgtgtggcctaggcgaccttggcctggcaccatacgtgaactcaaggaagatgtgccaagctttgaatgtgctcacagggttggatttactagggagtgatgcgttcaggggtccaaccgcaggtacacgagtacagaactcaccagtacagagcactgcaagcctagagagtctggataaccgaaagtccaacgaggtgaccagttgcgcggcggacatttggccttgagcttcaagccattgatctgattcaaagcttgctccaccctcaaaaaaaggaccagagtttgtcaactcaaatagctggtggcttgagcagagcttctggcacgagttctcttgaaccatatttccacataagctttataggatgcatcactcttttgatgtcacttagtttcaagtataaaatgaagctgtctttgtacaaagctgcaaatgagaagtaaatgaaacgtcctggacaaacttgtgaagtaggaatgatacataggctctatttccaggtcagatgagacagttatgtttacaacaaaaagcaatacatgttgtttagaaaccgctattaattcacaggaatgttcaatccagtacaagtcatctagtagatttgcacccctaccttctagtagattcaaccatgttttca

SEQ ID NO: 155737 - DNA, 2361 bp, Zea Mays
aaacgcgccggcctcggtaacacagcccccgcccctattctttagcccgccacgaggcctgcgcgggagccgtgtccgcccgcgcgccatcctccccgcgccatgcccatgcgcacgcgcacgcgctccaccccttgagcacgcacgcacgtcgccgccgccacacgcatccgtctccgcctcccgtacgtgtccatggccgccgccacggcggccgggcggctgctcctggccgcggcggcgctcatcctcgcggcggcgtccagcggcgtcaccctggcggcggctcaggccaagtcggaggccgatgtcctgagcgagttccgggcgacgctgcgggggccggacccggacggcggcccgccggcggagctgaaccagtgggcgacggggggcgcgccctgcgacggcaacgcgaccagctggcctcgagtgaggaggtgcgtcgatggccgagtggtggtcctgcagctggagggcctccggctgcagggcgccgcgccggacctggccctgctcgcgccgctccggagcctgcgctcgctcagcctgagcaacaacagcctcgcgggcgcgttcccggacgtgtcgccgctccccgcgctcaggttcctcttcctctggcagaacaggctcgccggggagatccccgacggcgcgttcgcggccctcagggggctccagagggtcgacctctccgggaacgagttctccggcccgatacccagctccatcgcgtcctccgccaggctgctgtccgtcaacctcgccaacaacaacttctccgggcccgtcccggaagggctccggaggttaggcgccaatgtccagctccaagggaacaaatttctctgcggggacatggtcggcaccccgtgccctccggcccctccctcgtcctcctcggcttcgtcatccggcggcatgaaggtactgataaccatcgccatcgtggtgatcgcggtcggcgcagtcttggccgttgccggcgtgatcgcggcggtccgggcccgctgcaacgagccatgctattccggcggcatcgaaacactaggcgatagccccgacgccgccaaggtcaaggtcacctcggctccggccgttaagatcgagaagggtggcacggatcagcatggcggcgcgacgcccgcggccgggaagcgcggcgggcggcgcgacgaccacgggaagctggtgttcatccaggaggggcgagcgcggttcgggctggaggacctgctccgcgcctccgccgaggtgctgggcagcggcaacttcggcgcgtcgtacaaggcgaccctgctggacggcccggccctggtggtgaagcggttcaaggacatgaacggcgccgggcgcgaggacttctcggagcacatgcgtcggctggggctgctcgtccaccccaacctcctccccgtcatcgcctacctctacaagaaggaagagaagctgctcgtcacggactacatggcgaacggcagcctggctcacgcgctccacggcgggacgaggtcgagcctaccgccgctggactggccgaagcgtctgaagatcatcaagggcgtggcgcgcgggctggcgcacctgtacgaggagctgccgatgctgatggtgccgcacgggcacctcaagtcctccaacgtcctgctggacgcgacatgcgagccgctgctgagcgactacgcgctggcccccgtggtgacgccgcagcacgcggcgcaggtgatggtggcgtacaagtcccccgagtgcgcggcgcagggcgggcggccggggcggaagagcgacgtgtggagcctgggcatcctcatcctggaggtgctgacgggcaagttccccgccaactatctccggcggggccacgcggacaccgacctcgccggctgggtcaactcggtggtgcgggaggagtggaccggcgaggtgttcgacaaggacatgcgtgggacgcggagcggcgagggggagatggtgaagctgctccaggtcgggctcgggtgctgcgagcccgacgtgcaccggcgctggggcctcgaggaagcgctcgcgcgcatcgaggagctccgggagcgcgacactggcgctgacgacagcagcaccgcctcgtcgttcttgagcgacggggaggcggcggcgtcgcggccagcaggcgagcagcagtcgcactccgcatagagaccaaaaaaaaagtgtggtttcggtgcaaacgtcgtgtgcgtgtgatgtccggtggcattcagaaacgtgcgtgacggccggagatcgtcgagcgcgtgtaagcttgttgaccattttcagcgtgtgtaaattggcggttagatttcgttcaacaaagagggaagttgtcgtcgtcgtggt

SEQ ID NO: 155738 - DNA, 1998 bp, Zea Mays
atcttggaggttcccatgggcggatgcctctcgcaggaggagcaccggctccagagcaggccagctgaagctgctggagcagatggattgcggaagtctaaatctgattctaaagctgtagcaagtgttcttgctcctccaaaagatgtggtggacctgcaagtagaaggatatggaaatgtgaatattttcacatatgacgaattaagagcagccacaaaaaacttccggccagatcaaattcttggagagggtggatttggagttgtttacaaaggtgtaattgatgaaaatgttagagcaggtttcccatcgagacaggttgctgtgaaagaactaaacccagagggctttcaaggggacaaggagtggcttgcagaagtcaactatcttgggcaacttagtcatccaaatcttgttgaattgattggctattgctgtgagggttcacatagactgcttgtctatgagtacatggcttgtggaagcctcgaaaagcacctttttcgccgggtttgccttaatatgccatggtcaacacgcatgaagattgcattgggtgctgcaagggggctcgagtaccttcacggagctgagagatccatcatttatcgagatttcaagacatcaaacatcttgctagatgcggattacaatgctaagctttcagactttggtctcgcaagaacaggtcctagtggagaccaaacccatgtgtcaactcgggtcatgggaacttatggatacgcagctccagaatatgtcatgactggccatctgacggcacgaagtgatgtttatggcttcggagtggtgcttctagagatgattatcggaagaagggctgtggacaagagccggccaagccgtgagcataacctagttgactgggcacggcccctcctcgtccataacaggaagctgttccgaataatcgatccgagaatggaagggcaatactccaccaaggctgccactgaggtggcaagccttgcataccgctgcctgagccagaaccccaagggacgaccaaccatgagccaagtcgtcgagacctttgaggccgtgcagaacatgcctgaatgccaagacatactcctccagaacagcatcacaggtgccgtgacgctctatgaggtccccaaggagcctgcagacagagttgagctggagaaggccaagcaggaaccggcagtaaagagcgccgcgatgccgcccatgaacggaaagccagtcccccagagcaggcggacgcggcctgggaatggccggagcaagagcgagccatcgttggagtgcaagatgtacatcccgtcaccggactctgatggacaccagctcggcctggaggcagtcgcatccccagatggaagcataagggaccctcctgatgaggatttgtacaagatataacaccagggcagtttttcttcaacaacgaggggcagatctggcgcagtgttgagttgtgggttttcaaaccagcctcttcgcatttagggaggaagatttgcatctgtttatctctttctcatacctcatttacgtgggagcctcgatctgcctttttaacgtgagcccgcgttgctcacctttggcgccgccactcccgttcttaaagatcaatcagctgtaattttttctctgatggccactggccacggtagcgttcatattcttccgattagcaattgtatgtagaggagagttgtgatggaaagcatgtgtgtgtttgccatgacgacgctgtaaaaacctgaaacacttatttctaggggggtttccactccaaaatggaagtggagagatgtgtcctgataattggtgccgttacccgtgtgttgagtttttacccccctccacaatccccttctttcaaacaaggctggtttggatccatgggcaatcaccatgccctgaagaacgttgcaatctggaacagttctgcgggaaatcaacaccaccatggaaattgatactccaaacctgatgtgatga

SEQ ID NO: 155739 - DNA, 569 bp, Zea Mays
aagaaagtagttgcaggatcacattagcactgacggccatgctgtctgcatcgtttcccgttgtcgtctgcaggatcgccatcgccgtgctcatagtttctaccctgtcatcctatgcggaggcgaggtacgactgctacgccccgtgcaaggactgcccgaactgcagcagctggtgcaaggggaaagggtaccccaagggcgggcggtgccacccgaaggacggcggcggcgacatcgtgttctgctgctgcgacagggcagacgttaggaagctgctagtttcagcagatgcgaatgcgattctctgatggactggcaaacaaataaacggggctggacgcattgagaataaaatccacggcatgctgctcagtttagcaacgcatggcgtactgttaacgagctggcttttgtgggtttatcacatgacgaaacagcaaaccaccaagcgtgcctgtcacctttctttatggtggcagcaggaggggttcctccctactggcctttattatataaaaggtaaagggaatccgaaaattttaaaaaaaagattaaaaacaaataaa

SEQ ID NO: 155740 - DNA, 1181 bp, Zea Mays
tcactgaaccgacgcgacgggcttgggcttttctctctctctctagcacggcccaaactatctccgtcacaagttcaccgcggaaatcgccagcagtccaccacaattcagaagcgccgacccgcgtcgccttatcgggagcaacggcaacggcagcctctcctccgcgccatcaggcagccatgggtccgggcgcgtccacctccgcgcagccgctgtcccggctcctcctcagcctcccgaagccaggcgccgcgaagcacccccgctcctcctcctcctcctcctctccttcgcagcctcgcccggacgtcgccgcggccaggagccccggcctcgtcctccggcggcgcgaggcagcggccgccctgctgtcgaccgcctttctctcccgcttcgccctccccgcggccgccgcggacggcggggagtgcccgctggaggtggcgccgtccgggctcgccttctgcgaccgcgtcgtcggcaccggcgccgccgcccaggagggacagctcatcagggcgcattacacggggaggctggaggacggcacggtgttcgacagcagctacaagcgcgggaagccgctcaccttccgcgttggcgtcggagaggtgatcaaaggatgggatcagggtattgttggcggcgaagggatcccgccgatgctcgctgggggtaagcggacgctgaagctgccaccggcgctggcctacggcgagaagggtgctgggtgcagagggtgggagcccacctcgtgcgtcatcccgccgaactccacgctcctcttcgacgtcgagtacgtcggcagagccaccggctgaggtctccggaaactctgaaagtctgaatgcgcgaggccaaggttcagactgatccatgtggacaacgatcgtagttgcccgggcactaagaggttttcttcttctcgtcgtatgtttaagagagctatagattgccagagacaagagtctatatagttttcaatgtcgtgaaaggtgtagagaaatgtgccaaaagaagctacaaaaatgctgacccagttctgaaactaacagaagcattttgtttctctgttttccggattctcggtcacaaaaccaggtacccgtcacatctgattttcagagatgttaggctcaaacacgctgttcgtttggctataattcgaaatggtttct

SEQ ID NO: 155741 - DNA, 1604 bp, Zea Mays
cagatggatgcaatgcaaccttttccggtttcctctcctatatgcattcgccgaccaagtgaccaacacgcgccatccattccaacctggggctgaaccgccgaactatgccgttgtcgtctttctccttcctccgccaccacctgccgctccctcttcagctcccgccaacttcaaatcgtcagccaccacacccccgcctcttccacctcctcctccctccgttcacaccgcgccgcaccttcgtctgccagccgctcaccgcggccacggacgatatggctgctgcggccgcggcggcgtcgccccccacactgctcgagcacatgggccaggcgggcacggccgctgacctcactgtccttgtggcccatatccagagcgcgtgcaagcgcatcgcggctctcgtggcgtcccccggcaacgccgagctgtcgcgggccaaggcgaggggtggggctatggcggcagggcgtgacgcgcctaagccgctcgacgaattgtcgaatgatatcatcttgtcagcgctccaaagttctggaaaggttgcagcgctagcatctgaagaaaacgatctgcccatttggatatctgatggcggtccatatgttgttgttactgatccgcttgatggttctcgcaacattgaggtctccatacctaccggaacaatatttgggatctacaataggctggtggaggtcgaccatctccctttggaggagagagctcagctcaactcactgcaaagtggaactcgccttgttgctgctggatatgtcctgtactcatctgccaccatcttgtgtatcagctttggtgcaggtacccatgccttcacattggattggtcgactggagaattcatccttacacatccttccatccaaataccacctagagggcagatatattcagtgaacgacgctaggtattttgactggcccgagggcttaaggaagtacattgacacaatcagacaaggcaaaggacagcatccgaagaagtactcagctcgctacgtgtgctcactggtggctgatttccaccggacgctcatatatggcggggtcgctatgaacccaagggaccatctgcggctggtttatgaggcgaaccctctcagtttccttgctgaacaggctgggggtagagggtcagatggcaagaacagaatcctcaccattcagcctgtgaagttgcaccagaggctgcctttgttcttaggaagcatggatgacatgcttgagttggaaagctacggagatgtgcagcagaaggtcaatcctggatatgaagtttaacgatatgtaaaaaaaggttcagattttttcaagcgcccaagcagaaaataaggtaacactcgtgtggcaaccctgtatctgccgatactataccttgtcttttcctctcggtttttagcccaccgcaacttgattgggactaaatccagttgttgttattgttgttcactcttttctgccaaaaattgctgtacttctcagtgaatgtaagttttatgattggcagcttcctcaaccctgcacgcttatatgtgaataatagaaagcttctaaagtctaaggctacaacaacaaaaaaaa

SEQ ID NO: 155742 - DNA, 170 bp, Zea Mays
ccatttagtttagacttgtcgtttgtattaaccttttaaatcttgactaaacttgattttataaggatccggggttatgggccacaacacgccaccaccggcgataccagcaccaggaggagcttatataggggagggagctactacaggatagaatccaaaccagttac

SEQ ID NO: 155743 - DNA, 525 bp, Zea Mays
atggagacgagaggtgttaacaaattggtatcagaggtaccgatctctggcgaattgagtttccgcgcactggattcatcggcgcatcacgagcacttcaccaggctgcgccgtcgtcaagttatcatgaatcccgacacgcaaatcatcctcgacgagatcgcacgccgcttcaccgataacgacgccaagtgggatcgacgcctcgctgcacaggacaaggcgatctcaacgctcgtggcagcacaggaagggtttgtggcggcgcaggaaggtcgtatcaacgccttggagaagaccgcaggcctgttcgaagattggcgccagaacctggagggaatcgtcgatgacttgcgattggaagtcggaagggtttccaagcactgggagcgcgcgctgatggacaagccgtcatccatgccaagcgtcctcgtgcctgccccatcagctggcgagtgtcctccggctggatcgacagaggacgctcgccagctgcttcgccctgtgggcaccgcttcgaattag

SEQ ID NO: 155744 - DNA, 158 bp, Zea Mays
cttaattgggttgcttctcagtttatcttcagttttaattctcggtttatatacaatatatgtgatgttatttgcaaatactcgagtttaggataataaacaaagattcaaaaaaattctctcacttgttattcccgtccttttagtatgaattttaa

SEQ ID NO: 155745 - DNA, 370 bp, Zea Mays
gttaaatgtcacctccattctgatgtagcgttccttcaggaaaggggaagatctcagttctatatccaaacaagactaccacccccaagtcagttaaagaccttgaatttgatggtttctccttcactactgaccttcgtgaggtttctccttgactactgaccttgaatctgcaaaactttattttattgaatccattctatggttgttaatttagttttcacattgaaattttgtgtattgttgttttttttttatgtttacatgtgcatagtgtttccctgtacttaaattggttgttctgttaagaagctatatacagatcgtgtttagaaattcattgacaaagtgctatgatccgtgaacttaa

SEQ ID NO: 155746 - DNA, 1698 bp, Zea Mays
catggaccagcaccgccggtatcccgttcccaattccacagatttccgctccccactccgcactcccagtacttaaaccacctaaaaaccaagcaaaatcccacctcccgaaccctggactcatagacaaggaattgggagattcgatttctgctattcagcccacgcccactggttcaaccggtttcttcaaatctcaggcttcaaggccgcaacttttcccccgttggggttggacttggacagctgccgtgcttgggaggcattgccggcaacgggaggtccaatcatcgatccttcgatagattgtatataaggaccacggttcagattactgtcaagcatgtctctactttcaaagttgcgcttgatcaccgtggatgttactggtacactgattgcttacaaaggacaccttggggattactactgtatggcagcaaagtctgctgggatgccatgtcctgactataaccgcatgcatgagggcttcaagcttgcatacactgagatggcaagacagtacccttgctttggatttgcagctaagatgccgaacatcgaatggtggaggacatgtgttaagaattcattcgttaaggctggctatgattatgatgaagagacatttgagaaagtcttcaggcgcatttattctgcatttggctcctctgcgccatactcggcgtttcctgattcgcagcccttcctaaggtgggcacgcgaaaagggactcactgttggcatcgtcagcaatgcagaataccgctacaaagatgtaatcctgccagctttaggattgaatcagagctccgaatgggactttggggtgttctcaggtgtcgttggcgttgagaagccagacccaagaatttacaagatagcgctggagatggcaggaaacgtcgctccggaagaagcgctccacataggtgacagcatgcggaaggactacaccccagctaggagcatcgggatgcatgcgctgctcctggaccggttcaagactgccgacgctgagagctggaggcagtcaggcgccacggtgctcccggaccttgtcgccactcaagagtggctcaccaaggatcagaatgacgaacaggaggaaacagtggcagcacgagtgctgaagagaatgtccgaaaagctatagatgggggctttaaccatgcattaattctacgagtgttcctttatattatctagctatggactgaaggtccaaaagcaacttatgctgatgagaggttggtgacgattcttggctactggctactgtaattagcttgagctactattctggttgcagcatctgtggctgaacacgagtaccatatctgagtgtcataagtcatgttgcgaagaacatgagtagcatatttcaggtgccgtttggttcatatatttgtaatgtaatgggtaacggataacgttaaatcatgtttgttttagtccaaccgtaatcaaataccaccctaaaatttgataccagcctattcaaatttgttaccgccagtaatcgagtcgaaaccattaccatttgcgttacattttttgaaccaaacatcacctcagtgtcatgagtcatgttacgaagatctcgagttgtcttacattcacctgcgtggagcagtagaggagcaagtggaaatgaatctgaacatgagcacaataataaaggacgaagcagtgaat

SEQ ID NO: 155747 - DNA, 684 bp, Zea Mays
gtgcaatatccactggatcacacgtcacagttacattacatgcttctatagcagtatgctttctttgtggtatgaatgcagtagtctactaaatactaatgcatgtctcggtttgcaactagagctccgaatgggactttggggtgttctcaggtgtcgttggcgttgagaagccagacccaagaatttacaagatagcgctggagatggcaggaaacgtcgctccggaagaagcgctccacataggtgacagcatgcggaaggactacaccccagctaggagcatcgggatgcatgcgctgctcctggaccggttcaagactgccgacgctgagagctggaggcagtcaggcgccacggtgctcccggaccttgtcgccactcaagagtggctcaccaaggatcagaatgacgaacaggaggaaacagtggcagcacgagtgctgaagagaatgtccgaaaagctatagatgggggctttaaccatgcattaattctacgagtgttcctttatattatctagctatggactgaaggtccaaaagcaacttatgctgatgagaggttggtgacgattcttggctactggctactgtaattagcttgagctactattctggttgcagcatctgtggctgaacacgagtaccatatctgagtgtcataagtcatgttgcgaagaac

SEQ ID NO: 155748 - DNA, 631 bp, Zea Mays
catggaccagcaccgccggtatcccgttcccaattccacagatttccgctccccactccgcactcccagtacttaaaccacctaaaaaccaagcaaaatcccacctcccgaaccctggactcatagacaaggaattgggagattcgatttctgctattcagcccacgcccactggttcaaccggtttcttcaaatctcaggcttcaaggccgcaacttttcccccgttggggttggacttggacagctgccgtgcttgggaggcattgccggcaacgggaggtccaatcatcgatccttcggtaggtaatggagcattttggatttgttccggccactttatggttgagatttgctatttgtcctcattaagcaagcaggtctgtgatggccttacttttcttgtgaaataaaatgaatggggatctcaaccaggatagattagatggcctggaggtgttagtaacaattgatgagagagaaatgttgcaaattaggagttacatgtggtttcgagcgtttcttggtagaaacagaatattcgttgttactcccttcctgcctggttcctgagataagggatgctttgcttggcgttcactgctgaatttgtttcactgcattatctccaa

SEQ ID NO: 155749 - DNA, 103 bp, Zea Mays
gcatgctgaaggcttcataaaaaggaccgcaattttaaggtctgaagttgttccccgttggtctttaaacagtagctagctcatctgcaactgtgccacagac

SEQ ID NO: 155750 - DNA, 1673 bp, Zea Mays
atgatgcaccagcaccaccctcaccaccttccgcgcttccactcgccgttgtcctcctcatctgaggcggtggacatggatccccgcgtgtggggccggctgccgcagccgctggtggatcgcgtgctggcgtgcctaccgacgccgtccttcctccgcctccgggccacctgccgccgcttctgcagcctcatctactcgtcgccgttcctccattcccacctcctcctctccccgcacctccccttcttcgccttcgcggtcccttctgcggggtacctcctcctgctcgaccccaccaggcaggcgccttcctggtcccgcctcccgctgccgctgcccgctcccggcgctggccaagggttctccccggcggccgcgtcggcgggcctgctggcgttcctgtcggacgcgtccggccacaagacgctgctcctcgccaaccccatcacgcgcctcctcgcgccgctgccgctctgccccacagcgcgcctctctcccactgtcggcctcgccgcgggacccacctctttcatcgccgtcattgccggcgatgaccttgtgtcccccttcgcggtcaagaacatctccgcggacacattcgtcgccgatgccgcctccgtcccgccctccggtttctgggccccaagttccatcctgccccgcctctcctccctcgacccccgcgccggcatggctttcgcgtccggaaggttctactgcatgagctcgtcgccgttcgcggtgcttgtgttcgacgtggcggccaacgtctggagcaaggtgcagccgccgatgaggaggttcctgcggtcgccggcgctcgtggagttcggcggcgggagggagcgcgaggcgagggtggcgctggtctccgccgtcgagaagagccgcctcagcgtgccacggagcgtgcgcatgtggacgctgcgcggcggagggcacggagtcgccggcggaagcagcggcagcggggcgtggaccgaagtggcgcggatgccagctgacgtgcacgcgcattttgcggcggccgagggcgggcgcgggttcgagtgcgcagcgcacggcgacttcgtggtgctggcgccacgcgggcccgcgagccccgtgctcgtgttcgactcgcgccgcgacgagtggcgctgggcgccgccgtgcccgtataatccgtacgtcggggggatcgccgcgggaggcccggggttcagggtgttcgcttacgaaccccgcctggctacgccggccatcggtctcctggatgccacggcgccggcggcgtttttgcatgggatgcagggctagcttggtgctagctagctcgtcgatcatcaatcgtttaattactggttccctgcatgcattttctagatagtgggtcgaaatcattcgggtttgatctgcgttgtgaggtgaacaacatgaaatttggtgttttcctgtgaaggcctgaaggctactggtaagtccgctagtttgaggcgtctgtctttgtgaaagcctctttcgtatatgttccttagcactattaagtatgtggtatttcatgattcatgtatggggataactatatgaacatttaaacttggtttcttcgcataagtatttgcaatccagaataaaccatgcaagagcgatgtcttgtctgctgactccattctggcttgtggagagtg

SEQ ID NO: 155751 - DNA, 1289 bp, Zea Mays
tacttttgtaggtttttgtgtggatggttaggtgcatatccaaattcttgggttgctgaaaatagcaattgctttgtcttctctctcatgtttgccatatctgttgttgttattgcttgcccttgtgcccttggtttggcaacaccaactgctgtgatggtagcgactggaattggggctaatcatggagtacttgtaaaaggcggagatgctttggagagagctcaaaatgtaaattacgtggtttttgataaaacagggacactaacacaaggaaaggctgttgtaacagctgcaaaggttttctcgggaatggacctaggagatttcctcacactggttgcatcagcagaggcaagcagtgagcatcctcttgccaaagctattttggactatgcattgcatttccatttctttggcaagcttccttcatcaaaagatggcattgagcaacgaaaagacaaggtattatcccagtggctgcttgaagctgaagacttctctgcagtacctggcaaaggagttcagtgctcgatcaatgggaagcatgttttggtcggaaaccgttctttgatgactgaaaacggtgtgaccattcccccagaagcagaaactttcttgatagacctggaatcgaatgcaaaaacaggcatacttgtggcatatgatggcgattttgtgggtttgatgggcataaccgaccccctgaaacgggaggctgctgttgtagtggaaggactaaaaaagttgggtgtccatccagtgatgctcacaggagataattggaggaccgcgcaagctgttgctaaggaggttggtattgaggacgtgagagcagaggtgatgccagccggaaaagctgacgttgttcgctccctccagaaggacgggggcaccgtcgccatggttggcgatggcatcaacgactccccagccctggcagcagccgacgtcgggatggccatcggcgggggaacggacattgccatcgaggccgcggactacgtgctggtgcggaacaacctggaagacgtgatcaccgcgatcgacctatccaggaagacgttcagccggatccggtggaactacttcttcgcgatggcctacaacgtcgtggccatccctattgccgcgggcgcgctgttcccgtttaccgggctccagatgccgccgtggctggccggcgcctgcatggccttctcgtccgtaagtgtagtgtgctcgtcgctactgttgaggaggtacagaaaacccaggctgacgactgtgctgcagataactgtagagtg

SEQ ID NO: 155752 - DNA, 110 bp, Zea Mays
ttttttttataatttttgaaaccgtgtggttttcgaatttggattcttatgccatctctaatagattctctatcatatcacctatcacatccctgattttaaacttcact

SEQ ID NO: 155753 - DNA, 922 bp, Zea Mays
cgtccgcattctgcagtatggctcgccgactctgccgtctccctcgcctctttcccctcgtctcgtctgcatccgcctccgccgccccaagacctcatcacctccccttcgccgtgaaccctaaccccgcgcccctcgccccctccttctcgtcgtcatcgccgcccgcttttccgggcccccatcgcctcttctcttccacgagtggttcaagcatggtggtcgtgggctccgcggactccttcaacagcatcttttccaaggtgcaagatgaaaagctaccagctgtcttttactacacggcggtgtggtgtggaccatgtagggcgatcgcacctttagtatcaaagctgagcagccagtatcccaagataccggtgtacaaagttgacattgaattggaaggactgggaaacaaactccgtgatctaaacatatgttcagtgccgacgttccacttctatcacaaggggcagagaattagtgaaatcgtgggtgctgatgcaaagaaaattgaagctaccatggaaagtctccacaagcagcagtagaagtttcagagcagagcctcaacctcacaccaatggaatggtttaatctacctcgcatgagaagtgttgcgcacttttggattcgtgtttttctttacgtgtcacaccgtgtgaacgccagcgtttcgtcatcagatgcttgtgattcgtgccggcttgtttcatgtgaagacatcagatgcttgtgtttcgtgccggcttgttttgagttttgggtcttgagcttcggcgactctgtccagagctgcggatgtttctcatgcttggaatgagtgagatgggttgaaaatggccacccatatgcagttctggttcgagtcgagcgccgggtgtttggttcgattgaactatcattgcacaagctttgtcag

SEQ ID NO: 155754 - DNA, 775 bp, Zea Mays
aatcgtcgaggagtccaggccttaacggcgccgaccgctccacgtccgcattctgcagtggttcaagcatggtggtcgtgggctccgcggactccttcaacagcatcttttccaaggtgcaagatgaaaagctaccagctgtcttttactacacggcggtgtggtgtggaccatgtagggcgatcgcacctttagtatcaaagctgagcagccagtatcccaagataccggtgtacaaagttgacattgaattggaaggactgggaaacaaactccgtgatctaaacatatgttcagtgccgacgttccacttctatcacaaggggcagagaattagtgaaatcgtgggtgctgatgcaaagaaaattgaagctaccatggaaagtctccacaagcagcagtagaagtttcagagcagagcctcaacctcacaccaatggaatggtttaatctacctcgcatgagaagtgttgcgcacttttggattcgtgtttttctttacgtgtcacaccgtgtgaacgccagcgtttcgtcatcagatgcttgtgattcgtgccggcttgtttcatgtgaagacatcagatgcttgtgtttcgtgccggcttgttttgagttttgggtcttgagcttcggcgactctgtccagagctgcggatgtttctcatgcttggaatgagtgagatgggttgaaaatggccacccatatgcagttctggttcgagtcgagcgccgggtgtttggttcgattgaactatcattgcacaagctttgtcag

SEQ ID NO: 155755 - DNA, 622 bp, Zea Mays
cagttttgctcttttacaacttaagtacaggacaattaccgatatataagccacatgtctctattttggaagtggagaattcggccactattattaatggatattgttgatgtgtataacttgattgcctactttctcgtaacattttaagcttttgggttgaattggttggtgcatgcaacttaacatggtatcaaagccagaggtctcaagtttgaatcctggcagaggctttatttgtgcctttgtccccttatttccacgtttgcgcctttctctctggctgtacgtgagcgggggtgttgaattgtataagtggaagtggattgcctaccttctcctaacagcttaatcttttaggttgatttggttgatgcatgcaacttaacatacatgacatcgagagggagggatggcaggccacagtagctattgctgctgtttggagcttgtgtggagagcatggggagaggaaggactgggaaacaaactccgtgatctaaacatatgttcagtgccgacgttccacttctatcacaaggggcagagaattagtgaaatcgtgggtgctgatgcaaagaaaattgaagctaccatggaaagtctccacaagcagcagtag

SEQ ID NO: 155756 - DNA, 549 bp, Zea Mays
atgagctccaccctgtgcagctgcgttgagcgcctgagctccgccctgctctgcgcgggagcacggcacaccgcccttcagggtatcgccaatgttgttgggttggcacttgctgagaagcacctggctgcccgcttcaacaagcctgacagtgagatcgtcgaccactacacgtacgttattttgggagatggctgccaaatggagggtattgctaatgaagcttgctccttggctggacactggggtcttggcaagctgattgctttctacgacgacaaccacatttccatcgacggagacacggagattgcattcacagaggacgtgagcacctgcttcgatgcccttgggtggcacacgatctgggttaagaatggaaacaccggatatgatgacatccgcgcagccattaaggaggcgaaggcagttactgacaagcccaccttgatcaaggtgactaccacgatcggttttggatctcccaacaaggccaactcatatagtgttcatggaagtgcactgggtgccaaagaggttcggtcataa

SEQ ID NO: 155757 - DNA, 575 bp, Zea Mays
gctatctttgtcaggatatccctaccacgactccaaggaagacgaggactacgcgcgtgacagagagctaggacgactgcaaagcctctcaacgtgttgtcaggtccagtggtgttcagagtcaagttcagtcatctacctctgttaaaatatctggatttcacaagagagttatagctaattcaatctaagcagagattcttgtactgctggacacataggatgcttggaaacctcggaccacagcaccgttcatttcaacccagatcatcacactacataccacttgaagactattcgaggttcgttgattcaaatttccaaggagtcgtttcatcgatagatttcttaagaacagacgggcacatttcacaactgtgatatggggattgagacatgtgttctagcttgttatagtagatactttgttagttatgtatcagatgaaacttagtaataaatgatttgtgctctatttgtattagtcgtgtgtctgatcttaatggtgattgctttgtataaaactatgtgacatctctgtgagctaataaataagttcaccatcattagttttc

SEQ ID NO: 155758 - DNA, 1389 bp, Zea Mays
gaggaaagagagagggggaggtcgacgagacagagagagaaggccaagaggcttcctctccccattcctcccttccgtgccctagccgagccagccgcgaggaaggaggcatcccgccgtctcgcctggcgcccgcccgtcggccgaccttctgccgcagcttccaattgtaaaaagatcatagatttttgtgcaagagcgagtggatatggaaccatcccctcagcctatgggtgtcgctgccggtgggtcacaagtgtatcctgcctctgcctatccgcctgcagcaacagtagctcctgcttctgttgtatctgctggtttacagtcagggcagccattcccagccaatcctggtcatatgagtgctcagcaccagattgtctaccaacaagctcaacaattccaccaacagctccagcagcaacaacaacagcagcttcagcagttctgggttgaacgcatgactgaaattgaggcgacgactgatttcaagaaccacaacttgccacttgcgaggataaagaagatcatgaaggccgatgaagatgttcgcatgatctcagctgaagctcctgtagtctttgcaaaagcttgtgagatattcatactggagctgacacttaggtcgtggatgcacactgaggagaacaagcgccgcaccttgcaaaagaatgacattgcagcagcgatcactaggactgacatttatgacttcttggtcgacattgttcccagggatgagatgaaggaggacggaattgggcttcctagggctggtctgccacccatgggagccccagctgatgcatatccatactactacatgccacagcagcaggtgcctggttctggaatggtttatggtgcccagcaagggcacccagtgacttatttgtggcaggagcctcagcaacagcaggagcaagctcctgaagagcagcaatctgcatgaaagtggctgagaatattgctcagaagctatcacctgattcagagttctcattttaggttgtccaaactgcaggttttcttagtaatatcgttggttatcaaactgaaacaggcgattctaagtagggtgtagcatcatggtagtttcatttctgcttgtgatgttagttgaaaggataatgattagtggctagtggattaaagttaccataccatttccttctattccgaaagtttgcctccatgaggcctctgatatgacgtgctagttgttaatgcttctatgctctgcttgtgctgtacagttcaagctgtttttttggttgctcttgatttgtagcatgtaaggtgctgttaattcttgggaaattcgttcgagacctcaatatagttgaattctgagatccagtagagttggggcttggataagaccaa

SEQ ID NO: 155759 - DNA, 348 bp, Zea Mays
ccggcgaaggaattcattgtccggagcctccacggtgctttgccgcccttcgctggttgcgagagagtgaagctgcaacatgatctggtgaagcgccaccgatcgagcacttgggaggccggcggcgtttgagcagccagatcatgctggcagcttcaagctctcacaccagcgaagtgttctttcttccccacccggatttgggactcccagacgagcagaagaggagtgaggagagcatatgtgcagctaaagttttggcgtgtgcgaaggcaaggggacggcgggaggacgagacgaaatcagagcacgactgcgcgagccatgcacggacggaggttgcattgg

SEQ ID NO: 155760 - DNA, 1617 bp, Zea Mays
atctgttgtcatccctgttctttgcccactttcaccttgctttccccatttcacacgctttccttccgcccattgacgagttgacgaccaacagacccaggcctccgaccagatcgaggtgagcgaacgtgccccgcctgcgctggtgacggtgagggtgaggccgcacgccatccgccatcctcactgatggttccgtcccgccgccatcggagagtgtagaagtggaagcaagcagataaaccccagcacaagtagttcgtaacgccatccatgggatcctccttatcgaacctcaccgacgccgcttgcatcgtgcaccagtttaagatcaacggctactcggctaccaaatccatggcgaggacggactcgctcccgtccaagcggctggccgtgggagggtacgagtgggaggtccactacaccccaagcctcctcgtcgacggcagctacatgatagcgttcaggctcgtcctcctcggcgcgccgcgtcggaacgacgtgaaggcggcgttcagatgtcggctgctgtatccttccaccaactacggtcatcaacgcggtgcgtgcgtcagcgattcaatggggaacgtggaaggtcagatgtctcatgcgttcaagcgggcgaaggagagctcgggatggattccgctccgcaaaaggaatgttgtggaggcggcccgggtcatcgagaacgactctctcactgccgaatgtaccatcacggtggtcaccgagctacctgaacctgatacagcaaagactaacgccgtcttgccccgaattcggcgattgacgggcgtgcattccttgcaccatgatctcggtgagctcttgggcaagggaaccggatccgatgtcgtgctggtggtttgcggtgagtccttcgcagcgcacaaggccatacttgcatcgaggtccccggttttcatggcccagttctttggccccatgaaggagacgcactcgcagtcgcagagggtggagatcatggacatggaggcggccgtattcggggccatgcttcgcttcatgtacaccgacgtggtgcccgagcttgagcggcaggagaacggcgacgtcatcgcgcagcatctgcttgcagctgcggacagatatggactcgacaagctcaaatcgatgtgcgaggacaagctctgcggtggcaccacagtggagacagcagcgacgactctggcgctggcagagcagcacggttgcccaaagctcaaggcttggtgtgttgagttcatcgctgcaaaccttgatgccgtcatggtgaccgagggttacaagcatctgatgacaagctccccgttggttctgaatgaccttctgagagctgtgcgtggaacgaagaactgaagaacattggtagttgtattgtatctgctctctatgaattcggtgtttaagtttatattccttcccattgaggaagggtggattgctggaaggctgtcatttgagaacttggcttcatttctagtcgttgtcccagctcatgggtttatgggtattttctaggagaaaagaggtaagacttaactatcctaatgctacagaaaagatagttaatgaccattcgcacgtagtaaaaaacttttacagaaa

SEQ ID NO: 155761 - DNA, 1669 bp, Zea Mays
ctgttgtcatccctgttctttgcccactttcaccttgctttccccatttcacacgctttccttccgcccattgacgagttgacgaccaacagacccaggcctccgaccagatcgaggtgagcgaacgtgccccgcctgcgctggtgacggtgagggtgaggccgcacgccatccgccatcctcactgatggttccgtcccgccgccatcggagagtgtagaagtggaagcaagcagataaaccccaggttctgtacttctgtcaactgtcctgtttttcagacgaaatcgaaacatgttagatcaatcaatggagacctctttttagtgtcgcacttgttgaaacggatccactcgagactttttcagatcgattaggcttattcttggggctggtaatgtgagcttctcactaccggattttcctgctgttttctgatgcccatgcccgtctctcgcccgtgcagcacaagtagttcgtaacgccatccatgggatcctccttatcgaacctcaccgacgccgcttgcatcgtgcaccagtttaagatcaacggctactcggctaccaaatccatggcgaggacggactcgctcccgtccaagcggctggccgtgggagggtacgagtgggaggtccactacaccccaagcctcctcgtcgacggcagctacatgatagcgttcaggctcgtcctcctcggcgcgccgcgtcggaacgacgtgaaggcggcgttcagatgtcggctgctgtatccttccaccaactacggtcatcaacgcggtgcgtgcgtcagcgattcaatggggaacgtggaaggtcagatgtctcatgcgttcaagcgggcgaaggagagctcgggatggattccgctccgcaaaaggaatgttgtggaggcggcccgggtcatcgagaacgactctctcactgccgaatgtaccatcacggtggtcaccgagctacctgaacctgatacagcaaagactaacgccgtcttgccccgaattcggcgattgacgggcgtgcattccttgcaccatgatctcggtgagctcttgggcaagggaaccggatccgatgtcgtgctggtggtttgcggtgagtccttcgcagcgcacaaggccatacttgcatcgaggtccccggttttcatggcccagttctttggccccatgaaggagacgcactcgcagtcgcagagggtggagatcatggacatggaggcggccgtattcggggccatgcttcgcttcatgtacaccgacgtggtgcccgagcttgagcggcaggagaacggcgacgtcatcgcgcagcatctgcttgcagctgcggacagatatggactcgacaagctcaaatcgatgtgcgaggacaagctctgcggtggcaccacagtggagacagcagcgacgactctggcgctggcagagcagcacggttgcccaaagctcaaggcttggtgtgttgagttcatcgctgcaaaccttgatgccgtcatggtgaccgagggttacaagcatctgatgacaagctccccgttggttctgaatgaccttctgagagctgtgcgtggaacgaagaactgaagaacattggtagttgtattgtatctgctctctatgaattcggtgtttaagtttatattccttcccattgaggaagggtggatt

SEQ ID NO: 155762 - DNA, 3174 bp, Zea Mays
atggaatccgacggcgacacgtcgccacctcgcccgcctacgccggcgccagtgcgtgcctgcggcgcgggccacccggcatcgcactcgctgccgacctcggcgggcggccgtgtctgcctctcctgtgtcgtggcgctcctctcctccgcgggcaacgcctccacgccatcccaccacgtcgcgcacgcgctggccaacctctccctggcgctcgccgacccggcattcctcaggccgctccgcgccgcgcacccacacctcctcgcggcgccgctcgccgaggcgctcgagggcgccgccgaacgccgcgatgccgcgctcgccgcgcaggcgtgcgacgtcgcggccgacctcgccgccgtcgtgggcgccccggctgattcagagctcgtcgcccgccttgcccgcgtcctctcctccggctcactcgtcaagcacctccatacgggcatggcccctgaggtggagcgtgtggggcggacccagagtgtcagcgcggaggttgaagtcgttgtagtaccagcattgctccttactttagcaaagaaggagccctttgatcatttgctgatcagcaaccagagttctaacaaatgcatagaagcagagtccatgcagacggattatatgtccctaaatgcttctcttgttctattcgctgaggctgtcaaaggatctctgctatctactaacctagaagttcaggcagggacattggatttgatctttcatttcctgtcatctgatgcaaatatttgtgctctacttcaaactttgatcgatgaaaatgttgctgattacatatttgaggttctcaggttatcagagataccatttcacccagtccagtcccatgttttacgacttgtttggatttgcatggccaattgttctggtatcctctcactgccccaagaagaacagatagcctgtactttgactgcaatcttgagaagaaatctcaatggtgaacttgacatgagttctgaaacttttattctggtttgctcaatattaatagagattctgaagtcacctcatgctcatgatattgagaaactaccatcatttattgaagaagcatcaaaatatgcgatatcttctacattgtcacatgggtatgattctacgatcctcagtactcattctcttcttcttctgaaagaagcacttatattctgccttgaagggagcaaatacaatattgctagaacgaaggatcttgaggatagcatcatgggaacttgtggaacaattttactgcaatggcttgaaagtgctgtggttgacggtaatgatgaagaaacattggctgagatccttcagattttccaaattattttgtcaagggcatctgacaaaaagccattaaaattcgctgaattgctagcatcatcatcatggctctgtgctaacaaccaaattctggcttctgttgagcaatacatcctcctcaatggtgggacctttccatatgaaatcaatggttccattatgcttacgcttctggtccatctttatgccttcatcagaggcctttcccatagctgcagcattccacacagtccagaagccgagaatacactattccacttaatcatacacaaggactgggatttgcttgtgattcgagtccattcggtagcaataaaatggctctttcagaagcaagaaattatggaaccactcgccttccagatgctaaagttttgtagaactttctgtgaagatgaaactgtcatgctttcaaacagcagtcagttggttgacatgcaaatgattgcggagcttgcactttctggagaaaccaccatctcgtctttgctggtgtccttgctagaccagatgctaaaggagggtacagaagatgagttattttcagttgtcagtgttatcgctgaaatcctcatgatctctccatgttcttccgatcaatttatatcatgtgcaaatgcatcaacatttggccaggaagatgaatggcttcctcttgttctaaagcaaagtaggttggcgtctaggtgtcggttgcttggctcagttctaacagatgttgtagtaaacaacgcttgtgttaaaggcccatctttatttcaacacaatcaggagacaacctttggagaattcctgattcttgtacttctattggtgttcttctctctaagaagtttgcatagcattctagaggtaagtattgactggcaggacttccttcagcattcagacgatgtccagtcattttctgttctcggtattccatgccatgatttatgccgtctcatgcacttcggttcaccttctattaagcttattgcttcacaatgcctgttggagttgctcacgagaatttcagatcaaaggtcatgtaataatgctgagttaagatgctctgtgggatatttgaagtccattattgcagtgacagagggattggtgttcagtgaagacagtaaagttgctggaaattgcagtgcctgtctctctgtgattttgggatgggagaaatttggaagccaagaaaaggtggcagtcagagaatctaaatggtttaggctaataatggaggaatttgttgtggccttgactgctcctggtttgacgtcgaaatctttctccagtcagcagaagtttgctgcgaatatggctgtttcgttgctcaggctgagccaagtgccagattggctgacatcgttgtttgatgggcatctgatatctggcatcgtggctaatctttctgctaggaatgttactgcagaaatcatcaatctcttcagtgagctcatggctaggaagtatctcagtcaagagcacattgttgatctacataacttgttgcaggtgtgcagaagccaggtctacgagggaagctccaaagcaccgttgccagagcaaagggttgaaaaagtcgcgagaagcaccaatgacgtgctcgcatctctctttggcctgatggtgaaccagtgcacagactctggcacggcgcaagcggagcagcagagactactgcatgcgattgacgtgttcttccaggagtcgggcaggagacaacagcaacatgctacagctcgacaagagacagtgccaggggattatggaccaagacagggcagcagggcccgtcgccccaaagagaagatatccggtccaggatggatccggatccggcactag

SEQ ID NO: 155763 - DNA, 2498 bp, Zea Mays
cccaaaaccccgagatgtgggctcatctcttccttatcgacgctgtggccaccgaaccgcccacgtcacccccttccgtcctcccccgagacaatccccacgcaaccgcgcaccggagcggcggagcctgacgagtctacacaagcggtggggggagcaaaatctgcgccagttcgcctcgcctacttatacactccgatcgcccccgtaagcaaagatggcaccaccatccatgtgtcttgcggcaaagggggtgcttcccttctcggcacttatttcaagtggtgttacacaaaggccagtgtcagtgaccgcttccttggagcacaaaaccagcgatgctagaaggaagttcctaaaacttgcgcttgggaatatcggagttggactgcccaccttgttgggtgttaagaaagctctcgctgatgagcaaggaatctcgtcctcgaggatgtcttattcaaggttccttgagtatcttgacaagggtagagtgaagaaggttgatttatttgagaatgggacaattgctatcgtggaggccatttctcctgagcttggcaaccgcgtgcagagagtccgtgtgcagcttcctggtctaagccaggagcttcttcagaagttgagggaaaagaacatcgattttgctgctcacagcaaccaggaggactctggttctcttctgttcaaccttattggaaatttggcattcccacttattcttatcggtggtctatttttactgtcaagaagggcacaaggtggccttggtggacccaatggccctggttttccccttggttttggtcaatctagggccaagtttcagatggaacccaacactggtgttacatttgatgatgttgctggtgtggatgaagcgaagcaagacttcatggaggtggttgagttcttgaagaaacctgaaaggttcactgctgttggtgctcgcattcctaaaggtgttctgcttgtcggtcctcctgggactggtaaaactttgcttgccaaggcaattgcaggagaggctggcgtaccatttttctcaatttcaggttctgagtttgtggagatgtttgttggtgttggtgcttccagagtacgtgaccttttcaagaaggccaaggagaacgctccttgcatagtgtttgtcgatgaaattgatgctgttggaaggcaaagaggtacaggtattggtggtggaaatgatgaaagggagcagactctaaatcaactactaactgagatggatggttttgagggcaacaccggaattattgttattgctgccactaaccgagctgacatcttggattccgctttacttagacctgggcgctttgacagacaggtgtctgttgatgttcctgatgtacgtggaaggacagagattctaaaagtgcatggtggcaacaagaaatttgattctgatgtttctctcgatgtcatagcaatgagaacacctgggttcagtggagcagacttggcaaaccttctgaatgaagcagccattctggctggacggcgggggaggacagcaatttcttcaaaagagatagatgattctattgacagaattgtggctggtatggaagggactgtgatgacagacgggaagagcaaaagtcttgttgcttaccatgaagtcgggcatgcaatttgcggaactttgacacctggccatgatcctgtccaaaaggttaccttaatcccaaggggtcaagctcgtggtcttacatggtttatcccgatggatgacccaacactcatctccaggcagcaactttttgccagaattgttggcggccttggtggtagagctgctgaggaggtgatatttggagagcctgaggtgaccactggagctgctggtgacttgcagcaaattactggcttagccaagcagatggtggtaacgttcggtatgtctgaaattggtccatggtctctgatggagggtggggcacagagtggggacgtcatcatgcgaatgatggcaaggaactccatgtcagagaagcttgcggaggacattgattcggcagtgaagcagttgtcagatgaggcctacgagatcgcattgaggcacattagaaacaacagggaggccatcgacaaaatcgttgaggtgctcattgagaaggagacactggccggagacgagttccgggcgattctttctgagtttgtggagatccctgtagagaaccgggttcccccagccacaccggcggccgccctccctgcctaaagtcaagtcttgtagggggtgaaatttgttgttgtaagatgttcatattttggattcttggtgtacactaattctacttcacctgccgggtttttggtagacgacatgtaacttgctcatggtgaactatagtaaaatgtaattagcttaaaaggcctggcgcaacattttcggtttctagcttctggcgagtgaattctcttgctcgtagattaacgagaaaattgcacggttcctacttcataaa

SEQ ID NO: 155764 - DNA, 2511 bp, Zea Mays
cccaaaaccccgagatgtgggctcatctcttccttatcgacgctgtggccaccgaaccgcccacgtcacccccttccgtcctcccccgagacaatccccacgcaaccgcgcaccggagcggcggagcctgacgagtctacacaagcggtggggggagcaaaatctgcgccagttcgcctcgcctacttatacactccgatcgcccccggtagttactcgacttcgctccctttccctcctcccagctccggccccggctccggttctcacgcagtaagcaaagatggcaccaccatccatgtgtcttgcggcaaagggggtgcttcccttctcggcacttatttcaagtggtgttacacaaaggccagtgtcagtgaccgcttccttggagcacaaaaccagcgatgctagaaggaagttcctaaaacttgcgcttgggaatatcggagttggactgcccaccttgttgggtgttaagaaagctctcgctgatgagcaaggaatctcgtcctcgaggatgtcttattcaaggttccttgagtatcttgacaagggtagagtgaagaaggttgatttatttgagaatgggacaattgctatcgtggaggccatttctcctgagcttggcaaccgcgtgcagagagtccgtgtgcagcttcctggtctaagccaggagcttcttcagaagttgagggaaaagaacatcgattttgctgctcacagcaaccaggaggactctggttctcttctgttcaaccttattggaaatttggcattcccacttattcttatcggtggtctatttttactgtcaagaagggcacaaggtggccttggtggacccaatggccctggttttccccttggttttggtcaatctagggccaagtttcagatggaacccaacactggtgttacatttgatgatgttgctggtgtggatgaagcgaagcaagacttcatggaggtggttgagttcttgaagaaacctgaaaggttcactgctgttggtgctcgcattcctaaaggtgttctgcttgtcggtcctcctgggactggtaaaactttgcttgccaaggcaattgcaggagaggctggcgtaccatttttctcaatttcaggttctgagtttgtggagatgtttgttggtgttggtgcttccagagtacgtgaccttttcaagaaggccaaggagaacgctccttgcatagtgtttgtcgatgaaattgatgctgttggaaggcaaagaggtacaggtattggtggtggaaatgatgaaagggagcagactctaaatcaactactaactgagatggatggttttgagggcaacaccggaattattgttattgctgccactaaccgagctgacatcttggattccgctttacttagacctgggcgctttgacagacaggtgtctgttgatgttcctgatgtacgtggaaggacagagattctaaaagtgcatggtggcaacaagaaatttgattctgatgtttctctcgatgtcatagcaatgagaacacctgggttcagtggagcagacttggcaaaccttctgaatgaagcagccattctggctggacggcgggggaggacagcaatttcttcaaaagagatagatgattctattgacagaattgtggctggtatggaagggactgtgatgacagacgggaagagcaaaagtcttgttgcttaccatgaagtcgggcatgcaatttgcggaactttgacacctggccatgatcctgtccaaaaggttaccttaatcccaaggggtcaagctcgtggtcttacatggtttatcccgatggatgacccaacactcatctccaggcagcaactttttgccagaattgttggcggccttggtggtagagctgctgaggaggtgatatttggagagcctgaggtgaccactggagctgctggtgacttgcagcaaattactggcttagccaagcagatggtggtaacgttcggtatgtctgaaattggtccatggtctctgatggagggtggggcacagagtggggacgtcatcatgcgaatgatggcaaggaactccatgtcagagaagcttgcggaggacattgattcggcagtgaagcagttgtcagatgaggcctacgagatcgcattgaggcacattagaaacaacagggaggccatcgacaaaatcgttgaggtgctcattgagaaggagacactggccggagacgagttccgggcgattctttctgagtttgtggagatccctgtagagaaccgggttcccccagccacaccggcggccgccctccctgcctaaagtcaagtcttgtagggggtgaaatttgttgttgtaagatgttcatattttggattcttggtgtacactaattctacttcacctgccgggtttttggtagacgacatgtaacttgctcatggtgaactatagtaaaatgtaattagcttaaaaggcctggcgcaacattttcggtttctagcttctggcgagtg

SEQ ID NO: 155765 - DNA, 2309 bp, Zea Mays
tctacacaagcggtggggggagcaaaatctgcgccagttcgcctcgcctacttatacactccgatcgcccccgctccggccccggctccggttctcacgcagtaagcaaagatggcaccaccatccatgtgtcttgcggcaaagggggtgcttcccttctcggcacttatttcaagtggtgttacacaaaggccagtgtcagtgaccgcttccttggagcacaaaaccagcgatgctagaaggaagttcctaaaacttgcgcttgggaatatcggagttggactgcccaccttgttgggtgttaagaaagctctcgctgatgagcaaggaatctcgtcctcgaggatgtcttattcaaggttccttgagtatcttgacaagggtagagtgaagaaggttgatttatttgagaatgggacaattgctatcgtggaggccatttctcctgagcttggcaaccgcgtgcagagagtccgtgtgcagcttcctggtctaagccaggagcttcttcagaagttgagggaaaagaacatcgattttgctgctcacagcaaccaggaggactctggttctcttctgttcaaccttattggaaatttggcattcccacttattcttatcggtggtctatttttactgtcaagaagggcacaaggtggccttggtggacccaatggccctggttttccccttggttttggtcaatctagggccaagtttcagatggaacccaacactggtgttacatttgatgatgttgctggtgtggatgaagcgaagcaagacttcatggaggtggttgagttcttgaagaaacctgaaaggttcactgctgttggtgctcgcattcctaaaggtgttctgcttgtcggtcctcctgggactggtaaaactttgcttgccaaggcaattgcaggagaggctggcgtaccatttttctcaatttcaggttctgagtttgtggagatgtttgttggtgttggtgcttccagagtacgtgaccttttcaagaaggccaaggagaacgctccttgcatagtgtttgtcgatgaaattgatgctgttggaaggcaaagaggtacaggtattggtggtggaaatgatgaaagggagcagactctaaatcaactactaactgagatggatggttttgagggcaacaccggaattattgttattgctgccactaaccgagctgacatcttggattccgctttacttagacctgggcgctttgacagacaggtgtctgttgatgttcctgatgtacgtggaaggacagagattctaaaagtgcatggtggcaacaagaaatttgattctgatgtttctctcgatgtcatagcaatgagaacacctgggttcagtggagcagacttggcaaaccttctgaatgaagcagccattctggctggacggcgggggaggacagcaatttcttcaaaagagatagatgattctattgacagaattgtggctggtatggaagggactgtgatgacagacgggaagagcaaaagtcttgttgcttaccatgaagtcgggcatgcaatttgcggaactttgacacctggccatgatcctgtccaaaaggttaccttaatcccaaggggtcaagctcgtggtcttacatggtttatcccgatggatgacccaacactcatctccaggcagcaactttttgccagaattgttggcggccttggtggtagagctgctgaggaggtgatatttggagagcctgaggtgaccactggagctgctggtgacttgcagcaaattactggcttagccaagcagatggtggtaacgttcggtatgtctgaaattggtccatggtctctgatggagggtggggcacagagtggggacgtcatcatgcgaatgatggcaaggaactccatgtcagagaagcttgcggaggacattgattcggcagtgaagcagttgtcagatgaggcctacgagatcgcattgaggcacattagaaacaacagggaggccatcgacaaaatcgttgaggtgctcattgagaaggagacactggccggagacgagttccgggcgattctttctgagtttgtggagatccctgtagagaaccgggttcccccagccacaccggcggccgccctccctgcctaaagtcaagtcttgtagggggtgaaatttgttgttgtaagatgttcatattttggattcttggtgtacactaattctacttcacctgccgggtttttggtagacgacatgtaacttgctcatggtgaactatagtaaaatgtaattagcttaaaaggcctggcgca

SEQ ID NO: 155766 - DNA, 1707 bp, Zea Mays
ctgtttgccgttttctccctttacacgctcgattccccccgccgtttccacgggggccaggtgcctgcattactgggtccgggcctagcgtcagcgcaaccgaacacgccggcgaccgctgccgcccttctcccagctgcccaggtcttcgtcgggccctttgcctgcggcgtcggcgacgagcgcctgccacaccaggaatcccgttaagtttatttatgctcaccaatttaagggcagaacttacggacctcaagctcttggttactcctgatcttctctaggcgactaggcacaattgccctctggcaaaatgccatcagtttatctttacatccctaacattatcgggtattttaggatcatcataaatttcattgcatttgcggtttgctattccaacaaggctctctttgctatcctgtacttcatcagctttgtccttgatggtgtggatggttggtttgcaaggaagttcaatcaagcatcaacctttggagctgtgttagacatggttacagatagggttagcactgcttgtttgttggcccttctctcccagttttacagacctggtttagtcttcttgatattgcttggattggatattacgagccactggtttcaaatgtacagttctttcttgtcaggtaagactagccacaaggatgtaaaacacacaggcaattggcttctgaaattatattatgggtacaggccattcatggccttctgctgtgtttcttgtgaggttttatatattttcctgtttctctttgctgatgaggagtcaacaagcttgcttagtgtatgcaaaggcatcctgaaccaaagtcccgtcgttatcttggtgtttgtttccactctagttggctgggcagtgaagcaagccaccaacgtcatccagatgaaaactgctgcggacgcatgcgtggtgtatgatctgaagcgcagcaaatgaagcatgaaggcagcttcacggtttagtatcgacatatccaagggaaaactctgcgagggggcgggctacgtcttgcgtgccttgacatctttctgatgatgcggtcatatgtgggaccaggggatgacatgccgtggccaatgcaaacaattgttttgtgaaagcagcggccgttaagttgttgtcagtgtgagagtggtgatgcgatcatgatcctttttacctagagtagctcccctttgtgttagcctgaacgatgttttgcaagccgcatgttccgaactctaggattatttggattacaaaacttacatattccatcctcaaggccagttccctcgagagttcgatagttacttatagtcgctggaataggcactagctactgttcgaatgatttcccttttgctccttaagcatcctttgggtcagctttatcgataaaatttctttttttatgtgacatccctttgcttagaaggggattgaatggaataggagaggattgaggaagaaataaactaatttatctctcaatctcttcgaatccctttctaactaaataaactgctttaaatgataaacaatacctctatcctaaaatataataattcgttttagattaattatataccaatggagtttgtatatatatctatattaattatcatttgaatgtatatgaacagaaaaaatgggctagaagtaactatattttaggagaacggaggaagtaccaagttaac

SEQ ID NO: 155767 - DNA, 718 bp, Zea Mays
ctgtttgccgttttctccctttacacgctcgattccccccgccgtttccacgggggccaggtgcctgcattactgggtccgggcctagcgtcagcgcaaccgaacacgccggcgaccgctgccgcccttctcccagctgcccaggtcttcgtcgggccctttgcctgcggcgtcggcgacgagcgcctgccacaccagggtattttaggatcatcataaatttcattgcatttgcggtttgctattccaacaaggctctctttgctatcctgtacttcatcagctttgtccttgatggtgtggatggttggtttgcaaggaagttcaatcaagcatcaacctttggagctgtgttagacatggttacagatagggttagcactgcttgtttgttggcccttctctcccagttttacagacctggtttagtcttcttgatattgcttggattggatattacgagccactggtttcaaatgtacaggtcagtttcctctaccattttgttcagtttttgcaagttcccagtttgttttctagtcagcacctaatcctgttctttaggtagtcaaggcaacagaattaatctgttagcaattacattttcaataattgcctgatggtttcattatgcatgcgttctattcaagagtttctcactttcaattattttttacttatttattagtccttcaattccaaattataagtcttcgtg

SEQ ID NO: 155768 - DNA, 2787 bp, Zea Mays
caaaaaaaaaaaaaaaactcttcgtccctactcccctgcagagtgcagtgtgcagacacccgaggagccgagacagagaagcagtgaagggaacccgcgcgctttctcccgacgtgcaccggaaatggtggtcgtggacgcgtcggagttcggggcggagggcttcgacccgaagcggtggatcaacgcggcgctggacgcgcggcacccgtcggagcctctcgatcgcttcctcgccgacgccgaggagcgcctgcgttccgcggccgacgacgccgcggccgcgctcgagagggatagcggcgacgccctccgccgcgtcccgttggcatgccgcgacgcgctgcgcctccgcgacgacgccgtcgccctacgctcccacctcgcctccgtcctccagtccctctccctggctgagggctcatccgcagaatcaatagctgcactagcgcgtattgacactgtgaaacagcgcatggaagccgcatacacaacattgcaggatgctgctgggttagctcagttgagccagagtgttgaggatgtgttttctagtggcaatcttccaaaagctgcagaaaccctggcaactatgagacattgcttgtcagcagttggagaggttgccgagtttgcaaacgtcagaaaacaacttgaagtattggaagaaaggctagatgaaatggtgcagcctcgattagtagatgcactttctaatcgcaaggttgatgccgtgcaagatcttcgtggtatactgatccgtatcaataggttcaagtcactggaagtgcaatacactaagatccatgttaagcctctaaagaaactctgggatgattttgagctaaagcaaagatccagcaaggtagacatggagaaactcagtggtgaaagcattagtggcctctcattctctagttggctgcctaatttctatgatgagacactgctttaccttgaacaagagtggaagtggtgcttgactgctttccctgacgaatacaaatcacttgtaccaaaagtacttactgagaccatgagtgagttgaattcaagctttgtctctcgtataaatatagcaaccggggatgttattcctgaaaccagatctattgccaaaggtatattggatgttctatcaggtgacttaccaaaaagcaccaaattgcagaataagcatcttcaagcgctaattgaactgcacaatatgactggcacttttgctaggaacattcagtacttattttcagaatcagatcttgcagttgtgctgaatactttgaaagctatttattctccatatgaaacctttaaagcaaggtatgggcagatggagcgtgctatactctctgctgagatgacaagtatcgacatccgtggggccgtccctcgtggtgttggtgcacagggtatagagctgagcgaaactgtccgcagaatggaggaatccatcccagaaatgatagtactccttgaggcagctgtggagagatgcattagtctgactggtggttcagaagcagatgaactggtactggctcttgatgacgtcatgctgcagtacatatctaatctccaagaaacattgaagtccctgaggataatctgtggactggatagtgatgccttgaaaaaagatgcaggtttagagaaaaaggaagtacaacgattggtggatgtttctgaagaggaagaatggtctattgtccaaggtgctttgcaaattcttacagttgctgattgcctaactagcagaacctcagtctttgaagcttctttaagagctacacttgccaggattggaacaaacttttctgtttctggatttggctcaagcctggataaatcacctgcagcaactgctgatgagaatgcagacttgtcttttgctgggagggctgcgctggacattgcagctattcgcttaagtgatctgccagataagtctaagaagttcttaactgtgctagaacagtcaaaagatccaagattccatgctcttcctctcacatcacaaagagttgcagccttctcagacacagtaaatgaactcgtctatgatgtgctcatatctaaggttcggcagcgtctcagtgaggtcgcacgccttccaatctggtcatccgtggaggaacagggtggtcttcctcttccaagcttcagtgcctacccgcaagcatacgtgaccagcgttggggagtatctcctcactttaccacagcagctggagccactcgcggaaggtatctcaggcaatgaggctggcaacgatgaggcccagttctttgccaccgagtggatttttaaggtcgccgaaggtgccactgctttgttcatggagcagctccgaggaatccactacatcaccgaccgaggttcacagcagctcgctgctgacattgagtacctaaacaatgtcctctctgcgctctcgatgccaatccctccattcctgtctaccttccacgcctgcgtctccaccccgagggaccaggtccgtgatctgatcaaatctgatggtgcaagccagctcgacctccctactacccatctggtctgcaagatccggcggatcacattagattagtgaaatcgtcctaacttctccccctttccatgaggtttacctctgtaaaagcatgcattaccgcacgcttctgcgatcgtatgtttggcatgcgggcttgtagcttgttgcttcaccttttttttcttgccttgtaaccgtactgctggcacatagtgagaataatcctatatagaataattcattacttggagcctata

SEQ ID NO: 155769 - DNA, 1728 bp, Zea Mays
gagcgaagcgccccgaaacatccacatcggacatcgcgcacgcaacgcaaccgcagcgtcccatttcccctctccctccctggtcctcctcaaatcagctcagcgcctcagccttcaaccaaccaaccaaccaacccaactcgagccctcgacgagcacccgagagacacgagagtgaaggaaagaggaaaaagaagaagactacagccaaaaccctatctcactccggcgcgccaccggccgatggtttcgatgaacaccacgccgaatccgcttgactccgccgccggcagcgccgccgtcgccggcggaagcgtggacgagggaggaggaggaggcggcaggaagaagcggatgcgcggggcggtagcggcggcgatggtgccgccgccgatggcggtcccgctgccggccgcggcgcccgcggcgggggaggaggttcggaaggtcaggaagccgtacaccatcaccaaatcccgggagagctggacggagccggagcacgataagttcctcgaggccctgcagctttttgatcgtgattggaagaagattgaagcatatgtcggctcgaagactgttatacagataaggagccatgcacagaagtacttcttgaaggttcagaagaatggcacaggcgagcatctgcccccacccaggccaaaacggaaggcagctcatccatatccccagaaatcatctaaaaatgtttctcaaactattttattacaagaacaacctactcagcgggagcaaggttctgtcatgcctatggatactgctactgtgataaacacaaatgcgaatgtggcagtggcagtggcagtgccttcctgggacaatactcttgctcaatctctcagtgctggtcttgttccaggtgcaacaaataactgttcaagtagcatagagagtccatctggtacttggccaacttctgaagcagttgagcaagaaattgtggttccatcactccatgctatgccagattttgcccgagtatacagcttcctaggaagcatatttgatcctgatacaagtgggcatttgcagaggttaaaagtgatggatccaattgatattcaaacggtactactacttatgagaaatctttccacgaaccttaggagtcctgactttgagcaacatctatggtggtggggaccatgttaaacctgaaggcatggaaaatcatggatctcctcagagtggccatcttccattcctggtaacaagtgaatgagagcacactggcaatttgtggtcgaagctttggttgtttccacgagacacattcttgtgtgttctcagcaatcgagttgtggacggctggtctggcaatttatgaatgccatgtctgccaatctgtatagcttccaataatggtctgaccctagactagttttgttttccacgttcatgtagatagctagttttgtgtgctcatgcaattttttactgggtggagcctagatcgatatgtttttgttgtatcacttgtgcacgcgtgtatgtaagtatgtggaaccttgtaatgcttgaggtacttgagagtcttcggttaagacaaagcatatatgcgcaataatcaggagatcaccatcgtcgactatataatgagaagtttttttagttgtggacctatctaaaactgccctctactgaagttgcatgcgtggatatccttatgtttgttgattaatgatagtatgctactaattggtc

SEQ ID NO: 155770 - DNA, 763 bp, Zea Mays
aaagtagatctctatgtgcgaatgcattttttccttcactgcaaatgtatcttacttttgttgcatcttacttttgcttctccgtggttacacacacagctatgccagattttgcccgagtatacagcttcctaggaagcatatttgatcctgatacaagtgggcatttgcagaggttaaaagtgatggatccaattgatattcaaacggtactactacttatgagaaatctttccacgaaccttaggagtcctgactttgagcaacatctatggtggtggggaccatgttaaacctgaaggcatggaaaatcatggatctcctcagagtggccatcttccattcctggtaacaagtgaatgagagcacactggcaatttgtggtcgaagctttggttgtttccacgagacacattcttgtgtgttctcagcaatcgagttgtggacggctggtctggcaatttatgaatgccatgtctgccaatctgtatagcttccaataatggtctgaccctagactagttttgttttccacgttcatgtagatagctagttttgtgtgctcatgcaattttttactgggtggagcctagatcgatatgtttttgttgtatcacttgtgcacgcgtgtatgtaagtatgtggaaccttgtaatgcttgaggtacttgagagtcttcggttaagacaaagcatatatgcgcaataatcaggagatcaccatcgtcgactatataatgagaagtttttttagttgtggacct

SEQ ID NO: 155771 - DNA, 1067 bp, Zea Mays
ctagataacaagggatgactaaattcatttggcttctgcagtttctcaaactattttattacaagaacaacctactcagcgggagcaaggttctgtcatgcctatggatactgctactgtgataaacacaaatgcgaatgtggcagtggcagtggcagtgccttcctgggacaatactcttgctcaatctctcagtgctggtcttgttccaggtgcaacaaataactgttcaagtagcatagagagtccatctggtacttggccaacttctgaagcagttgagcaagaaattgtggttccatcactccatgctatgccagattttgcccgagtatacagcttcctaggaagcatatttgatcctgatacaagtgggcatttgcagaggttaaaagtgatggatccaattgatattcaaacggtactactacttatgagaaatctttccacgaaccttaggagtcctgactttgagcaacatgttcgccatgactttgcccagcaagtttatgctgactaattcaatgtatatgggtcacagagcctgctcaggcagactttctgggtgctattctatggtggtggggaccatgttaaacctgaaggcatggaaaatcatggatctcctcagagtggccatcttccattcctggtaacaagtgaatgagagcacactggcaatttgtggtcgaagctttggttgtttccacgagacacattcttgtgtgttctcagcaatcgagttgtggacggctggtctggcaatttatgaatgccatgtctgccaatctgtatagcttccaataatggtctgaccctagactagttttgttttccacgttcatgtagatagctagttttgtgtgctcatgcaattttttactgggtggagcctagatcgatatgtttttgttgtatcacttgtgcacgcgtgtatgtaagtatgtggaaccttgtaatgcttgaggtacttgagagtcttcggttaagacaaagcatatatgcgcaataatcaggagatcaccatcgtcgactatataatgagaagtttttttagttgtggacct

SEQ ID NO: 155772 - DNA, 345 bp, Zea Mays
tgttctgacacatgggaataggcatctaggataatattagcaatcgatgatgattgtccaggtcaagctctggccgagaaacttgctcgtcgacttggtaaagaaatgtttgtgcatcagcatggtttaactaatgtgaaaaaatgttacatgtccattcatttttcttttttcccatttgatttgatgcaatcagatgttggaaagtcaagtggccaaagaagaactatacaaatacttgcaaagatgcaaatgagcccttgtaacgccgtttttgacctacaggtactaatgtttttaagtccacaagcattgagaaaggttatagaaaatgcagaactatat

SEQ ID NO: 155773 - DNA, 75 bp, Zea Mays
atggccagtggcgtcctgtcgcagctgtaccaccagggcgtggaggtcgacgcgctggtgcgggtcgagatttaa

SEQ ID NO: 155774 - DNA, 204 bp, Zea Mays
atggggatgggtatgggatgctataactcggtggagaatttcccattgacatctctacccggatatcaggtatatcagacccctccacctaccttgctaacacagcaacaagatgatggcggtgactttgtcaatgcattcgtcgctagtggaggtagagaacatcactcatctcagttcctcgatgatggtcggcgacagtga

SEQ ID NO: 155775 - DNA, 430 bp, Zea Mays
tagctcgatctccaattcgccagctcgctccagacacaatcttgtcgccgttccgtgcgtcgtcatgtaatcccaagaatcaggtgaagacgaagctagcagcgcgatattccccaagccctcgacaattgcctggatcggaaaatcactaccgatctcgcggattgagtcggctattgaaatggtacgcttattaatcgcgcgatgcggaagaagagccaagtcgaccccaagcgcgggctaacccgcaggatgatgcagatggataacccaatcaagtaccaagacaaaggctgctcgtcaagtggacatcgcctaacaaacactaacctagtgttactcaggcaagccccggtgcatttgccacctcccttgatgtttttaaaatctttctcacttgtttgctgcattaggtgataggagttgattg

SEQ ID NO: 155776 - DNA, 273 bp, Zea Mays
atggcggctgccgtcgagctcccttgcgcgctggtcgcctctccctgccccagtccgtctccaagctccagccgcgcccctgtccctgctcctatggtggcgccggtcggatctccgctgctcgcccatggcgcccagtcgaggttgctcccacgctcgcccctgctccagttctcgcccgggtctgcatcagcaggtcaccagggtcgcctgaagatgttttccctattgctccttgtccacggccttggaactctgtattctcatccgtag

SEQ ID NO: 155777 - DNA, 762 bp, Zea Mays
atgagagggtttgagagaaaaggggtccggcagtacaaccggtcagaggtgccgaggatgcggtggacggaggagctgcaccggcagttcgtcgaggccgtcgagtgcctcggtggccaggacgaagcaactccgaagcgaattcttcagctgatgggcgcgaagggagttagcatatctcatatcaagagccatcttcagatgtacagagcctccatctccagcagcagcagtacccatcatcagcccagcctccagaagtcgacatcaaccgcagcgagcaacaacaagcgcgtgttcttcacgcgtgaagattgtgcgtcacaggaaggcaacgctccagcttcagacaagaacatctataccaccacggtccgtggttgcggccagtactcatcaccgtaccaaatcagaccgtcgctacagcaagtgttcagatgctgggaacaaaagagagggcgtgttgcttggaactccgacgtgctaacaacagagaagggggtgattattaggccaagtcacactaggaagcacgagacgcagcagcacacgggatgcgacctcacgctgtcgatcgggctgtgggaggacgcgagcagcagcgacgacgccgacggctcgagctccatcagcgaggagctgctgcctgctccggcagcgggcggcgctcgccgcgtcgccgccgtagtgaaggaggaggaggagagcaagccggcggctctgaacctggacctgaccatctcgtcgtcctggctggcctga

SEQ ID NO: 155778 - DNA, 193 bp, Zea Mays
atcagcaaacaaaagcagcaaacacccatttttactgtagtagtaatacaacaaaaccacagttctctttgtcggagataaaaaatctagctgctcgaagtatagtatcaggtcaacaaacttattaacgggcacatgcaaatttcagatttgaccatgtagctaaaaaatagaaaaccattgatgatagtgt

SEQ ID NO: 155779 - DNA, 168 bp, Zea Mays
atgagccaggatgatgacatggacatggacatggacgagcagtttggtccaggcctccaggggaaatttaaggctgacatgtacaggcaaggcattcgcgttcgtgttcgatcgcatggaaagggaggccggaagcgaaacggcgtggacggggcagacgctggctga

SEQ ID NO: 155780 - DNA, 972 bp, Zea Mays
acccaacagaaacgcgcagctttcctaacgcgcgcagagccgccttctcaacctcctcccggacggcacgctctccgcagcttcctcgccatctcatccacccataccgcgtgcagcttcttcaacctctccctccctccgatatctcgtctcccatcctacggcggagccctcggggacaaccacgagtgcctaagatcccgtcctctgcgttgaccatcgagggatcgccatggcgttgagggcgtcccccgtgtcgcatcgcatggcgccgaccgccgagggccgaggcagcgccactgccgctgttcgcgcggaggaggatggcccgtggggtgtaagtggccatggcgtccaccaccatcaacaggtgagcacagtggatccctcgcctctcgctgtcttcctgacctacagttcgaggcaagtcgcggcgccgtcgaccccttcgcgggtgccagagttactggacttggattatgcctcagcagttagcaggatctgctgacagaaagcagttggcgatggagcaactgctgtaagagagaagtgatcaggatccatatggccggccttggattgtccagccgtcttccatgtcgccccgcacaccatctttagattgttttgccaggtgagcatggcacatggattgcagatgcatcgcatctttgtgccaaggttgacatgtctggcgggttattcatggcattaaggattaatccttgcatgtatctgtgtttccctcttgccatgaccgtgatttggttcatatcactccataaaacattttttccgcttactatatgcagtgctggtgcgcagggagccgtaactgcaggtcatttcggaagatgccattctttggacattgaaaagaagcatgttaatttgatagatgagtagtcacaaaagctaatatccagtgggtagtttgatggaaaggaactagacaggtaaccctatttttcc

SEQ ID NO: 155781 - DNA, 818 bp, Zea Mays
attacagctacacctccactcgacgcaagaaagcaggtacctcacggttgcggcctcggatctgtgatggaagaaagcaagaccggccccggcggactgacggcccgtggcaaggggaaggcgccggccccgccgccgcctccgccgagccgtgaggaggagaacggcggtgggcaccgtcgcgggcagaggaggaaagtctggccgcgtggccgccgcgcggtcgtagctctcgtggcgatggtcgcggcggccctgtaccttctactcgctgacgccgtcgcggagccgccgccgggcgcctgggtgctcgtggcctaccttctctggatcgtcgggctgattatgcttttttcagttatgaagtgagattgatggtcggtgctggttggtgtggggactgagggccacgggatcgtttctttcagcctttctttttcttattatgtcttttccttttccttctccttttgtacatgcacttgcgccgtcttgatatgatcctgccatgcatgatgcatgcgctagattattacttgatcgagctaatttaaattgtctcttttaatttcattactcagctcttcaaatataataaaaaaatatcaatcatagatgtgctgggcatcaaataacacacgatcgatagagaagcacacaaggacattttttttgtttttttttttggctctagcgactccatctcctttgacttcagtttaaggaatctgtttcggttatctctgccggccggctgctgctcatccgcttggctccgagtcaggcggccctaccactccaaagcttcggcacgaagg

SEQ ID NO: 155782 - DNA, 587 bp, Zea Mays
aacttacaggttttgtatattatcctctttctctttgctgatgagaagtcaacaagcttgcttagtgcatgcaaaggtctcctgaaccaaagccccatcattatcttggtgtttatttccacattagttggctaggcggtgaaataagtcaccaatgtcatctagatgaaaactactgcagatgcatgtgttgtgtacgacctgaagcgcagcaaatgaaaagcatgaagggaaaactctatggtttaacttagtcctgtgtcgacgtatccaaagagaaaactctacgagggatacatcttacgttccttgacatctttctgatgattccatacgtggggccagaggatgacatgccgtgggaagagcatcatgtcataaagagaaccaacgcaaacaattgtttttgtgaaggtggctattgatttgttgtcaagagtgttttattatgtcatacaaatgatgaactgatgatgcgatcatggtacctttgttacctgaggtagccctttgtgtcaacatgaacgatgcttacgagccacatgttcggaactccaggaatatatgaaggttttgagttgcaaaaa

SEQ ID NO: 155783 - DNA, 522 bp, Zea Mays
acaagcagatacctgctataagagaagggttgcatgatatacaagaggatatttcgagggtcaggatggcatacgagcatgagaaacgtgcaaaagttgagcttcttgaggagagtcaggccatagagagtgattttatcaacataaaaatggaagcacagagattgcagacagagctggagaagaggaggtcaggtgtgttcaagcatcatgcatttggctcatactataaaagatagagcatggcattgcatcctctaactgataggtgggcgtcacaaagcgtagctaagggtttggtgtctatcagagaataattagtcgaacttaggagtcaagaccaaatgtgtttgtctttcggatgagcagctgatagttatttgcgaacacattgctattactatatctcattattaagtaggagtacaaattggacgattgaaataagaatattatcaatttggtctttattgtactcctacttatttttctctctcgaaaagtactcctacttatttttaa

SEQ ID NO: 155784 - DNA, 1555 bp, Zea Mays
atgacagagggtcaatctgaagaaactacaagtgcaccagagggagttagtgtccttagaagaaattcagatgatgtgggatgggagtatggggctcttgttgatataaacaataaggacaaggtaaagtgcatactgtgtgacaagcaaatgtgtggaggggtttatcggttgaagcaacatatcgcccaggaaggaaagaatgcgaagaaatgccaagacatgaagaccactaaagagaagttgctggaggctcaagaaaagtgcaagaaagcactagatgaagcaaaaaggaaaagggaggagaagactgttcgtgagctagaacttatagaggtagttcatgtgtctagggttggaggatcagaagaagtgacttgtgttggaagttcagagcctcacaaattaggccccatggacaaatggacaaaagctattgatcctacagcaaccaaatctaaatctttgactcaatagaggcttaacaaggaactttggaaagaaagattacatgaggtgcataaatatattgcaagatgggcctttaaccatggtaatttccttgttgttttttaatttcagatttcattttcatcatatttccttgatgttttttaatttccttgttgttttgtaatattgatagcaatatcattcaatgcatgtgacagctatgtttgacctccagctattggacatgatttcaagcaaatgtgtgaagcaattggacaatttgggtctggaattgaacctccagctatgtttgacctgcgagggagattgttgttattgagaagatggctggaagacatgattctccattgcatttgacagcttatttgttgaatccgcactacagttatgttgacccatcaatctttgatgttcccaaaataacagaaggttttatcaattgtgtggagactttttattatcatgacgacaaaatgcaagaactagcagccaacatcgaactccagaagtttcagaatagagaaggcccatttagcaagaagtttgcaaggacttttgaaaactttgattataatccagcgtcatggtggcagctttatggaactgaaacaccaactctacagaagatggctaccaagatcctatctttaacagcaagttcttctggttgtgaaagaaattggagtgggtttgatggggtgcacactaagaagagaaataggcttactacagaccgcctcaacaagttggtctacattcagttcaacaacaggctaattaatacaagtccaagaaaattactgatgttctcttgtctagtggtacaactgaagctcaaggtttcctccaagagaatggagatgattgtgcattagtttcctttagagatgacgaagatgaggaagaagtcatggaaggtacagggataccttggtctgtgcttggagatgcagtgggagcagaagaacaactagagttgcgtagaagtgcaagggtgagagagctcaatgaagaagagtttgagtccgaagaagaagagtttgatgaagatgagaatgagtatgagatggatgaaacctaa

SEQ ID NO: 155785 - DNA, 339 bp, Zea Mays
atggcactgcaagccgggatgatgcccgattaccagcgcgagcagccggaaccggaacagcaggtagcgatcctcgctgggcgccgcgagcgcgacgacggagcccggcgcctcttcctggacgccggccgcgtgctcatgctgctggggtggagcgcgctcgcctccgccgccggcccgaagaacgacgacaatcgtcccggcaattccggcgccgcgcacgcgtacgcgctcatcctcgccttggtcctgtggcttctcggcgtgtccctcgttgcgctcgtgcacgtggagcgccggttcccgcgcgccgcgggagtgggaggcgccgcggcctaa

SEQ ID NO: 155786 - DNA, 535 bp, Zea Mays
aaagatggtccggaaaaaactcccgaactctggcccccatcactaacgggccgattaactgtccactttgcaatgacccagtcggagggtggcgtgcaggatatcgattcctgagatcgggcgagtcacaacgaggggattttttaaccaagcccaaaattcgtcccgagggggatcgagcccaggacctggaggtgctactcggaagccttaaccattacgctaaaagctctttcgcagtgatgatgaattacactagaaggctttcaaaaatgccagatgaagttagagctgagataggcctgtgtttcagcagccataacaaatgagaaaagtgtaagctgggagcaattttgatggtgatactctgatgcagttcataaggaagggtcttactgagttggataatcatgctttcttgcttaactgccactcagttgttatgatcattcttttatgtaagatttgtcatggaactccagtgacagccctggggtgatctctttgtcaaccaacatgtgagcaatgtctgtat

SEQ ID NO: 155787 - DNA, 1074 bp, Zea Mays
atgccgctcgggttggggcgaattgcgtcatactgcactcaccgctctgggccttccaggtcctccctgccatgcatgtcgggcgcttgcgatgcaataacctcagcaaacaggctgattgggaagcacctgcgtgctggcagggtggatgctgtgcgggaggtgttcgacaaaatgccgcagcgggacatcgtgtcctggaactccctcatggctgtgtatgcccgttctggggtgcatgacagtgcagttactgcgttcctcaagatgagacgtgaggggttctgcgcagaccacacctccttctccactgtgctgtcggcctgcgcaaggatggagactctagctctagggaggtgcatccatgggcttgcgaccaagaccagatcttcgttgaacgtgtttgtggggtcctccttgatcacgatgtatgccaactgtggggtgtatagctgcctggagtggattgtggatgatgtcgacagtccaaacctggccttatggaatgctctcatatcaggtcttgtggtgaaccatagggtagaggatgctcgcagggtattcgatcagatgccagagcacaatgttgtgtcctggactgtgatgatcaaaggatattttactgtgcatgaggtggggcgggcattggagctgtttaaccttatgcctacaaagaattctgtgtcatggtgcgtcatgatcggaggccttgtcaaccacaagcgattcagagaagttaatgaactattcaacactttgatgagctgtagagaaatagtgacaaatgcaatcctcgttaagattgttaatgcctgtgctggtttgaaaagtattggaggaggcaggtgtgtccatgggtttgctgtgaagtctgggtttatccatgaccacatcatcgaggcatcattagttgtgatgtactgtaactccttagatattgatgaggcacagttagaattttgtaaaatggaaagaaagcatgttggctcatgcaagatcgatgaggctagaaagattttttattctatggatggcagagataagatctcgtggaatttgatggtcgatggctat

SEQ ID NO: 155788 - DNA, 2904 bp, Zea Mays
caagcaccaagcaggtgtgtgcgtcattttcacgtgtaaaaatagcacgcccagcggacaccatggctactcacttctcgctgacaatcgggtccacttttgaaggaggcgggctacgaaccctcctgaattgtaggtcggtgctgtggccccgtggcgaagggatgttgtttcccttcctgtatttgtcctcgcctcgccaaccggacaggaggcgggacaggcgcccagcctctgtcacgggcgttttcgccgcataatcccacgggttccgcgtttcaacccatttccttcgcctttccccttcgccctccattctccgcccaccgtttcctcgggtctgccacgctacgccacgcccatgaacctgtggacggacgacaacgcctccatgatggaggccttcatggcctccgccgacctccccgcctacccctggggggcgccggccgggggcggcaacccgccgccgccgcagatgccgccggcgatggcgatggcgccggggttcaaccaggacacgctgcagcagcggctgcaggccatgatcgaggggtccagggagacctggacctacgccatcttctggcagtcctccctggacgccgccaccggcgcgtcgctgctaggctggggcgacggctactacaagggctgcgacgacgacaagcgcaggcaccgcccgccgctcacgcccgccgcgcaggccgagcaggagcaccgcaagcgcgtgctccgcgagctcaactccctcatctccggcggcgcctccgccgcgcccgcgcccgcgcccgacgaggccgtcgaggaggaggtcaccgacaccgagtggttcttcctcgtctccatgacgcagtccttcctcaacggctcgggcctccccggccaggcgctcttcgcgggccaccacacctggatcgccgccggcctctcctccgcgccgtgcgaccgcgcgcgccaggcctacaacttcggcctccgcaccatggtctgcttccccgtcggcacgggcgtgctcgagctcggctccaccgacgtcgtgttccagaccgccgagaccatggccaagatccgctcgctcttcgggggcgggccggggggtggctcgtggccgcccgtgcagccccaggcggcgccgcagcagcagcacgccgccgaagccgaccaggcggcggagacggacccatccgtgctgtggctcgccgacgcgccggtcgtggacatcaaggattcctactcgcacccgtcggcggccgagatctccgtctccaaaccgcctccgcctccgcctccgccgcagattcacttcgagaacgggagcacgagcacgctcacggagaaccccagcccctccgtgcacgcgccgccagccccgccggcgccaccgcagcggcagcagcagaatcagggcccgttccgccgggagctcaacttctcggatttcgcgtccaatccttccttggcggcggccccgccgttcttcaagcccgagtccggcgagatcctcagcttcggcgtcgacagcaacgcccagaggaacccgtcgccggcgcctcccgccagcctcaccaccgctcccggcagcctattctcgcagtcgcagcacacggcgaccgccgcggcgaacgacgcgaagaacaacaacaacaacaacaagcgttcgatggaagccacctccctggcgagcaacaccaaccaccacccggcggcggcggcgaacgagggcatgctgtccttctcgtcggcgccgaccgcgcggccgtcggcaggcacgggcgcgccggccaagtcggagtccgaccactcggacctggacgcgtccgtgcgcgaggtggagagcagccgcgtcgtggcgccgccgccggaggcggagaagcggccgcggaagcgcgggcggaagcccgcgaacgggcgcgaggagccgctgaaccacgtggaggcggagcggcagcggcgggagaagctgaaccagcgcttctacgcgctgcgcgccgtggtgcccaacgtgtccaagatggacaaggcgtcgctgctcggcgacgccatctcctacatcaacgagctccgcggcaagctgacgtcgctggagtcggacagggagacgctgcaggcccaggtcgaggcgctcaagaaggagcgcgacgcgcggccgcacccgcaccccgctgccgggctcggcgggcacgacgccggcgggccgcgctgccacgcggtagagatcgacgccaagatcctggggctggaggccatgatccgcgtgcagtgccacaagcgcaaccacccgtcggcgcggctgatgacggcgctccgcgagctcgacctggacgtgtaccacgccagcgtctccgtcgtcaaggacctcatgatccagcaggtcgccgtcaagatggccagccgcatgtactcgcaggaccagctcagcgccgcgctctacagccgccttgcggagcccgggtctgtcatgggcaggtaatcaggcaggagagctcatcagctcgcctgtgcctgccggatagggacgataccgatacactgctacccaccacggggactgtcatcgcggtcaccatggttacaaaacacacacacgcacgataggccttagagattcaggaggtggaggacggcggcgacgatgatgatgctggtgttgttgaaaactctagaaggatggatggatgatgacacctagcttccggctgctgttcatcatcctcttgtgtttttgctagtagcctggtaattagcaggattaagcagccgtcaagcgtcacccccgttgttgttaattaagtacctgttgttgtgagctgtgacgacgatggatcgaccgatgttttagcgttggttgaatccaaagctgtatataggatgtatgtattattacagcaggaattcgcttgc

SEQ ID NO: 155789 - DNA, 237 bp, Zea Mays
ccatccctaatcacatcccacgagccatcaccgttgaagtgcacgcggcatagtagatctccacccgggtgtcgccgccctccttccgcaccacgtcggacttggggtgttcctggccaccatctcgtcggggttgaggtcccggaaaacgctgagcatgcccggcgcctcctcctgctactgcccgatctcttcctgcagcagcttgatcctctccggcaggtcctggaatataac

SEQ ID NO: 155790 - DNA, 112 bp, Zea Mays
gcacctctaccaaaagacgtatgcacccttgtttttttgtttgattacaaggttggagtaattacaattaaagctaattacaatctacagcagcagtatccaagcgacttgc

SEQ ID NO: 155791 - DNA, 553 bp, Zea Mays
atgttcttcgtgctacttgcagcatggaaaatgggcggtgcagccagctagtgcaacgaatgaatgcacgcttgccagctaaaccatcgtgtcagcagctgatcagtgtgtgcagtactgcgctcctgtcctcctgaacgcatcgcgaagagatcctgacgcgcactttgcgcggtggtttgaactctgaactgaacgagctcaccaaggcaaagctgagagagctagcctgggattgggaatgaaggaatggaactatggaggggaagaaacaaacactagtggacggaggagggcaagtcgccgccatgcgcgacctggcttcgcccccggaaaactattgctagctacgccagccagtccagccgtgttgggtggactgtggaccaggcagaggcagaggcaggcaggcatgcttcagaccgtcgtttccattgaatatatggagctcatgtcataatggctaggttgtcggaaaggctagaggtgcaatggcgcatgaagaatatgcgcatgagggtgaaagcgagcagggttgactgactgactggct

SEQ ID NO: 155792 - DNA, 4926 bp, Zea Mays
atggtggtgcgacgcggcgccggagctcggcgaggaggagggttcggcggcgacgttggggaagatgcagcgagccggatatgcatgggtggcgcggcgctgagggctgtatttttactttctgcaaatgatgcaaggcagaccttgcttgtgccggtgttcatttcaataacacagttgcccgctgcttgtttgattgctaacataacgagcactgtgactgacggtcgtgaaattagagtaggggattgtgctctttttcgggctgtcggtgctcctccgttcattggattgatacgttggattgagaaaaaggaagaagcacatcccaaattacgtgttagttggctttatagacctaccgacgtgaagcttaacaaggatatacaactcagcgctgccccaaacgagatcttctactctttccaccaggacgaagcatctgctgtttctctactgcatccttgcaaagttgcctttttacgtaaaggtgttgaactaccagctggaatttcatcatttgtatgttggcgcgtgtacgatatagacaacaagtgcttatggtggcttactgacaaggactatattaataaacggcaggaagaagtaaatcgacttctacacagaacaaggctagaaatgcgtgccgcattgcaatcaggtggacgctctccaaagcgtttaaatggtccatcagcttcccaacaactgaagactgcttcagttggtacgcaaaatggtggtttgtctaaaggaaagaagagagatagaagtgaacagggagttgatccagctaagcgggatcgggatcatctacttaaggttgacgagagtgagcctggaaactttaacttggatgatattaagtctgaaatatcaaagataacagaaaaaggtgggcttccaaatgcagaagcagttgaaaagcttgtacatcttatgcaacttgatcgaactgagcagaagatagaccttagtggtcgggttatacttgctgatgttattgcggctacagagagtcctgattgcctcggcagatttgtgcaatcaaggggccttcccgtgttggacagttggcttcaagaggcccacaaagggaagtctggtgatgggactagtcctaaagaagcagataagcctattgacgaacttctctcggccctgcttcgtgcattagctaaattgcctattaatctcagtgcattgcaaagttgtagcattgggaaatctgtcaatcatcttcgtagccataaaaatctggagattcagaagaaagctaagtgtcttgttgagaactggaagaagcgtgttgatgctgagatgaagtcaaatgatgtgaaacctttagtttcaggtcaatctgtttcctggtcaggaaaagcaggtttccaagaaatttcaaatgctggtaccaaacgaggtggttcaagtgagaacagtccaaaaaatccagtgcccactctttcatcatcaaaaattttgactgataagcctgggggcacagatgctgaagcgaagttgaaccctggggtatctgccttgtcaaattcacaacacgtgcaaccgacaaatgttactaccaatttgaaggatcagccctgcaaatcaactggtggaactggtcctgagctgcctactgtaaaagaggagaaaagcagcagttcaagccaatcaccgaacaacagccagtcaatatctagtgagccatcgaaggatgcaagaagttcaactgctgcttctggtggtgctagcaaaacttctgaaagttcttcacgaagccatcgaaaggcaaacaatggtcttgtttcagggaacctgaaggaagcttctgtaggaagatctgtctcccttgatcgatcattgctacaggacaagtcatctcaaactggaacagcttctgaaaaaggagttgatatgccacctgatcatggaaataatcatagattgattgttcgctttccaaatcctggtcgtagtcctgctaatagtgcaagtgctggatcttttgatggcccatctgtaactggggatagagcttcatctcctgtggttgcagataggcatgatcagactgagcgctgggtgaaagggaagactgaaaattctcggcctcatttagcatctgatgctaacacagagtcttggcacagcaacgacggagctgctggttcagaggaaggtgataaatcgccgtgtgctatattagatgatgacaacagcaggacacccgacgattctgttaaggatgcacatgcatcacgagttgcatgctcgtcacatatgaatgaaaaagatgtcagtgaaactaaggtgggaactctgttcagcccaatgaatgctcttattgaaatcaagtactctgaagctagtcattcacggcaagctggagatgacgcagctatgaatcttcttgctagtgtggcaggggaaatatctaaatctgaattggtttccccagtttcttcacccagaagttcttctgcaaagaaattggcccgtgagagtgacaacattggaaaggttaaagtagaaagtgacatgggcccatcacatccagggcaagcagatgctaagaaaggtgccatggggaaggaagtaaaaaatgatgcttgtttggtttcaatggatgaacaacgccaaactacgccatctcctgagctaccatattcaaaagcagttgtatcttcagctaagattgaaacccatgaagttgaagccaagattgcaaacaaatgcaactctcagcatgcttcaattgattccaaaggtgaacatgatcaaaacttcaatttgcgccactcagctaatactaaagttgtcaatatgtctaatatgtattcatctgcaggtgaaagtcaggatgcctgtactgcccatgggaatgttgaagatggcagtacagacaaggatggtgccatggaatctgcattgggcagccagtgtagcttggttgtttccagtagaaattcaagattggttcatgctggggaatctgcattgtctgctgctgacaaacaggcacagggtttgttaaaatcaactaatcataagcagcttctgagtgtatcggacaacccaggagcctttgatagacgtgacagtatggctggcaaattagatttgatggctgcagaggtgagaaaaactgatgtcctgggcaatagtagcatagtgcagaacgaggctgaaaagaaggaacatgcttcttcctttttgcctgatgttcccaaactagttgtagcagcagcatctccagttggtgtggcaaatgtgaataaggagattaaagaatcaaaagacagttcaagtgaatccaatagccatgtaaaatctgaaggtgtcaattctcatcaaagcgagcaaagtgcaaagcagagttcaaagaaatccagtgatggtgtgagtggaaaagaggacgaaaaagaagaccatgtcttatcagacgaaggttcttctctagccgctaacaccaagtcaaatgctacagccaagcttgatttcgacttgaatgaaggaatacctggagatgatgggcatcagtctgagccaactatctcgcctgttgtatgttcttcagcaatccatttaactgggattttgccattcacttcgcctattacaactgggttgcagccagcttcagttacagtagctgcaccagctaaaggaccctttgttcctccagaaaacctgctaagagcaaagccggagattgggtggaaaggttcagcagctacaagtgcatttcgtcctgccgaaccaaggaagattttggagatgcctgttgctgcacgcgacatttcagtttctcatgctgctggtaagcagtctcgtcccacgcttggttttgatttgaatgttgccgatgatcaagctcttgaggaagatatcccacagagttctgcacaaactacctgttctgaatctggaaatacgagaagtcgagatggctcttcacgaagcgctggtattgaatttgatctgaacagagctgatgaagttgcagataatggccaatttgtgccaagtgcttcgcacagagttgaagtgccattgttgtcaacaagatcgttacatggagttttctctaatgctggcctgaatagctcgagggactttgatcttaatagtggaccaggtcttgatgatgttggcactgaagctgcaccaaagagcctaccttctaaaaatacaagcagtattcaattcctaccacaagttcctgttaggatgaatagtgctgccatgagtaatatatcaccatggcttgcctctgccagcccttgtggtccagtagctatacaatcttttttaccaactagagaacagccatacccaattgaggcagcagctggggcccaaaggatcattgcgcctacagctgatgctggccaattcggaggtgatccctgcaggcctccagttgtttcaacgtctccagcgatggtttatcatccgcctgcatatcagtatccaggattcccttttcctcccagtgttcaccttcaaacaccggcattttcaattggatcagcaacatttaataattctgcatctccaggagttccatactttccaactgtctccccttcttttgttgggccagctggagcgttaactccccaacatttaaggcagtttgctataaaccttgctgagggtagcagcagcagtggacgagacagtaatcgtaaatgggaaagtcagggccttgatcttaactcaggccctggaagtatagatttagaaggaaaggatgaacgggtacctttaccagtcagacaaaatttgatcccacccccacacggctttgtggaggatcaaggaagaatctaccagatgccagttgtaggaacaaagagaaaggaacctgatggcagctgggactcagaaaggtctacatacaagcaattatcatggcaatga

SEQ ID NO: 155793 - DNA, 1770 bp, Zea Mays
gatttttatcagctcgtcttccacctccgtccgtcgtacccatgtggttgagctcggcttcgagctcccattccccatgcgtcgtccgtcacctcgccctcggcgcgcgcctctgcttcctggtagccacgcccagcttcctctcttccgcgcgccccctgcttctccttggctagggcttcttcctcttcctgctcgccatggctggtcgagttttgccccagcctcagcgctgtgatttctccctccatctctactgcgcgtgctctggtcccagcgccgcgctcctttctcccatgctgcgtgccgtgctcctactgctccctgcgcgctgcggcccgctgctcctcccagccatggagctcgccagccggcgctcctccagtcgcccagcccagcaggagcttctcccatggccgtgacgccctggctcctgctctcctcatcacgcgcgcctgggcgctgccccaggtggccgtctgtcctcccgtatcgcctagctcgtgaaggctgccgagtccgaccccgccgtgagctccctggtgtcgcgtcccgaccaagctccctactcggcgtccgtctcctaactcgcgccctacttccatggccacacgcccatctctctgttcgcctctgcgcacagctccccaagctccatggccggttccctgctcgcgtcgtggtctcccagctcgtcagcacttgttcaagtcgtctcggctcactccgcctcaaattccagcgcctcgccctgctctcgtggttcagcgacggccggcgcgagcctgaccgtggtggtgtcgtggcgtggcgacgtcgtgcgcgtcgcgacagctgtcttggtcgtgaagtagtccgcgccatagagttcgctcgaccacggtctcgttaaactgcgaagcttcctcgccgtgcgctctagcatcggctgccgccgattccgccataaaattcacgagcgctccttgctcagtttgtttcgcagtgggcaatttctccacgtttcaattctgtgctgcttgccctgtgtgcgctcgctcctcatccaccgggcttcgacgtgttcgcgtttactgtcgagtcgtcgaacccgtcatcccctgctcgaccctcacctcaccagctcgctccagacttcaattgaaggtcgtcgtcgttccgtgcgtcgtcaagaagtcccaagcgtcgagtgaagacgaagctagccgcgtgatatttaccaagtgctcgacagaagacctgaacaagaatcagcaacgtttgcttggaattttaattgaatcggtaactgttctctagtttgctagttctttaattgattgagccgatttactatttttactattgattttatgatcgtaaaataagacgcttagtttgtgtatgaagtttaagttagaaatactcatgatgcgaggcgtgcttcgaggagtttagttgtcgagtatattcggactagttctattttgcagagtgtagtacttcaacgacgcgtaggttaaatttagtattttatgcaattatcgataaaactgtcgatgtagttgtattcagtgcgcgtaagatgaagtcgatgtcctgcgctagtagttagtatcatctatgtttgtgatcgataatgttggagtagaatatgatcgacgatttttcttatttagtgattggtgtgatgtggtataatttataaagcgagggataagtttagaatttaattaattagctgataagttgtgttaggctaatcgtattaaatatatatagtttgttgtt

SEQ ID NO: 155794 - DNA, 132 bp, Zea Mays
atgttctttgagcttttttttatactgataaatcaatggcttggcttgaagccattaactacaggaggagccccactaattgacggggctgcacctctgttcttcttgaggtacgcaacatattcaccatag

SEQ ID NO: 155795 - DNA, 611 bp, Zea Mays
ggcccgcgctgtggccgctcgtccttgacgacgagatcgagatgtggacaccgcgggagaagcggcgcctcgacgaggactgtcagatcctcgccggagaccctctcgcctccaacatcgaggtggcccccgccgccgccagtgacgaaatcgcggtcgttgcggagcgaggaaagattgcgtgcagagattacccacatccgaggtctgcttgtgcaaagcacccatttagtagaacccctcatgaacgctattgtgaccagtgtttctgctatgtctgcgacatcgctgccccatgtgtgtcctggaagggacctggagggcactgcgacgcttcggacagggacaaacagtggaaggctttgaggcgcatgatgcaagtcaacaaaagcaaagcctagttgattttgcccccgatgctaggtctggcaatcggcattttggagtctcagcttgttctgatgggaaggttatcttggagtaacttgtaaatatggttagtgctggtgatagatctcatcccaagatttggtgcgtgcatctgtgtactgcctatcagaaactgaatgatgcgcctatataatataaccacctatgaagtactagtatca

SEQ ID NO: 155796 - DNA, 2053 bp, Zea Mays
atcgcagcccttaatcgagaagcccacgtgaccgtggactccgtcatcgtattcgtcaccaccgctctcgcgtcgccgccgccttcctccttcccctgcgattacaaaaccctaggacaattctccaccaattcctataatccctcgtcgctaggtagttcctgcgtctccatcccgatccccttgtcgattcagttgtaatcaggatgcagcccggatcggccccggcggccggcggcaccggcatgttcgtgccggcggcgacggctggcacggtgctctgctgcatgtgcggcgtgtccatgcagcccaacccggccaacatgtgcgcgcgctgcctgcgcgcgcgcgtcgacatcaccgagggcgtcccgcgccacgccgccgtggtttactgccccgactgctcctcctacctccagccgccgcggtcctggctccgcgccgcacccgagtcgcccgagctcatgcagatcctgctccgccgaatcaaccgcccgctcgcgcggctccgcgtctccctctccggcgccgagttcgtcttctccgagccccactccaagcgcctccgcctcaagctccgcctccgccgcgaggtgctccacggcatcgtcctcgagcagacgcacccagtggagttcgtcgtccacgaccggttgtgcgactcctgctcccgcgcgcaggccaaccccgaccagtgggttgccgtcgtccagctgcgccagcacgtgccccaccgccgcactttcctctacctcgagcagctcctcctcaagcacggccaggcttccctcgcgatccgagtcgcggccgcccccgaaggcctcgacttcttcttcggctcgcgctcccatgccgcccgcctggtcgacttcgtcgccaccgtcgctcctatccaaactcagacagcgaagcagctcgtctcgcacgacaccaagagcagcgtctacaattacaagtacaccttttcagtcgaaatctgccccatctgccgcgaggacctcatcgcgctcagcccccaggcgtcccgggacatgggtggccttggcccgctcgtgctctgtgtcaaggtcacaaatgccattgctcttcttgaccccctcacgctgcgagtgcaccacctggaggagaaaaaatacagggtttataatttcaaagcagctctcaccagcaagcagctcgtggagtacattgtgcttgacattgaaccagaatcgcctgaaatttgcatcgatgggtctcggtaccagttggcttatgcgcaggttgcccggatgtcagatttcgggaagaatgacgccatctttactgtgaggacgcatcttgggcatctgctgaatcctggcgatcacgcccttgggtatgatctgtatggtgccaacctgaatgatgatgacatggacatggctatgacccggtacagcttacctgaggtggttcttgtcaagaagagctatgagaagaggcctcgcacacggcgatggaagcttaagaggttgccggtggaggaagatgctgcaaataaggccaagggcgaggaagagaagaggctagatgagtacgaggctttcctcagggatttggaggtggactcagggatgtggtccaagatgaatctgtacaaaaatgaggactataggtctgagatggcatcaacagttggtgatgatatccctacggtgccaattgaggagctgattgaggacttgacccttggtgacgatgaggaggatgaagggaaagaaactgtggaagggaacactcatactggaatggtggaatgagcaataccgtctactatttgtttccgaattgctgactgggatgggttggcctacctgccccttctggtgatgagcctgtcagttatcatatatgttatctttgtttgttactgctacaagttagaattttggttgtagtgcttaagttttgaattctgctgtttgttcgaatcatcttttttttccaactctttccctgtattcccaacttttcattaatttttatataaaaagcttttatataaaaatgcatatatattttttctaaa

SEQ ID NO: 155797 - DNA, 109 bp, Zea Mays
gtgatatcttgttgaccattgtaacgatatttacgttatatctgtcactatttatacttaaagttgaggacatttacgctcaaacctggagtgtgtctactagtgtacc

SEQ ID NO: 155798 - DNA, 5106 bp, Zea Mays
ctctctcctcgcctctcctcttgtcgtcctctgctcctccgcggcgttgctgcttcctcgccacgccatacctgcgcgaacccctcccaatccgatcccctctcgtcttcgtttccttcccctcgccggactccgtctttcgccctagtatggaagagagctgaggctgttcggtgcccacgtcgggagttagggccggaggtgtggccgatcggcggggacggagtgagtgtaatgagcgggccacaggagcgtaacatgagggatctgtacaatcgcactcgccacaaagattttccggctctagaggaatcagccgaagggcgcagcggaggacgcccgtcgggatcggagcaacgggaactcgcctctaagatggaggacaaggctgtggtaaggaaaagattggtatcaagcaataacactcatgccaaagtagaatctggcacctgtaatgtctgttatgccccttgctcctcttgtttacacccacatattcgggttgtggattcgaatgttgaatgtgcatcctctcagacatgctccacaaggtcagaagtaaaaaacaattcactcgttcgtaatgagaaagggctttgtagtaaaggagaaaacgatgatgagtttagtgcaacctcaggtcatgtttccgactctgtggttgcaagagcatccattgcagacgattcatcagaggttaacatgccatcaaaacgcaggaggctgttaaatgaaaacacaagactacctagagcagaataccttgaagacagcaactcatgtgttactggtatatcagcagaaggcaaacttcatgtggataagaaaaaattatcaacttctgcatccagtcgagatttgactgctaaagattataaagtcaacagcatggctaaccacagcaaactaagaaaccaatgtattgatgaatcaaagaaaggatctgatggtcgtgacatgcatcctagctcatctggtagattttcccctgtagattcttctgttatgacaaaaaagatgctgcgaacccagtcttctgtcagtgcattgagcagattatctcctaacaggcaagctcatgaatttgggaaagcactggataatttatctcatcaaccttgtgagaaggcttctcttttgaagaataatgaacaactacgatgtgggcaattgaacccttgtatagctggtgaaaacaatcatggcacactggcaggctacagtaataggcatgcggacaaagatgttttctcattgaaggatctagacaatggtaccttgtgctcaaaagatgaaatccaagaacatggtggcatccattctaatgatgatgttaagaagaatgtgtgtggcgaacaagctttggatcaagattgttcaagggatatatccagtgacagaaagttgaatatacaacatgatgtgacagactgtgggaattcagaaggtttgatagatgttaatgtttgtgatatatgtggagatgttggtagagagtatcttttagctacatgcaccagatgccttgagggagcagagcatatttactgcatgcgagtgaagttggaaaaagttccagttggtgaatggttttgtgaagaatgccagcttaaggaagatcagaacaatacaagtaactatggtatctcggtggttaatgtgacagaaggaaagaaccaaaggacagaaagtcgaagcaagcctaagacattgcaaattgttgtgcctgattttgatgctctggaagtcacacacagcgcattgacagctgatcggtgtgatggtaacagtaaaaggttgcatttagcttcgactgatacacaaacacggcaactaaaggataccaccccagctgctcaaaggttggatgtgaagaacaaaaaatcattaagtgttacaaaccgtaacaaactgcaagttcttacatctgatttagacacacgaccacacaattatggaacatcaacatctggagtctataccaataaaagtcaaagttcagaatttttgttaaaccacaaaaagctgcgagtttctactgacatgcagtcgccactctcaagcgaaggcctacggagtccaccaatatcatgcaagagacatgcagagagtatgtcgtcccctaagcctaggatcgtcaaggcgggtacccttggaaaacaagatgtcatctctcgtgcgaactcatttaagaaatctaacaagggaggtttaagttcagttgataatattccagtgagaactacccaggctgtcaaaagttctgactctcagacattgtcacggtcatattccttggggaacatggtgaatgctaaagctccagttccttcaccaagaggctttttatccaagcagctatccttcaacagcaccaacaacggaccaaaggtcaaacagttggctgatggggtgtctagcaagttaagacctgcagaacattccccaagagatcctagagataagaaatccatcaaaaagattgtacaatcaggatccttcaaacacgagggttcagattccatagttgctggatcatcaaaaaaaaagcaaacatttcatttgtctcaagatgaaaaaccaggagtactgaaggtaataaaggaaaataatttaacagaaagaagggcttcatttagcttgaaaaaacgaaacattccttcatctccaaggcctgacagctgtatgaagtcaggggaaagaaaaaatgatcaggatatttcaaggtctggaacaagcatacttaaaagtagcaaaaaacctggatatgctgaaaagaagcagaacaatgatttgtccagaagtgataatggcaaggaagatgttaccgtgcatccaaaaacaatggaagtttctggtaaagatgcttacgtagtgaagacatctgatccaccagttcaaccccaatgtgccaaaaaggatagaccaaatgatgttgaggatgacgatttactcatttcagtgaataatgttaacatagcgccaaatgagcatgccgaggtggttcccacaacatttgctgccatgacttatgaatcagatttgcaagatgttccaagagaaagcacctctgatgattcagctccaaaagtggtatgttgccaacaaaagcttttggaaaacacaggagatgattctggtaaaatcgtagaggtggttcaagattcaggagatatattgtctgtgactccacatggtcttcagatggcacacaatctatacccccctgacaataaattgcataaaccagatttgaagaaggaagcttttgctgatcaatcttccgctcttgggaattgtttaaaagattttgttattccagagcagtcttacatctggcagggtgggtttgaggtttcaggacatggaaactcccctgaaatgttcgatgggtttcaagcttacttgtctacttgcgcctcatccaaagtacgtgaagtaggtgaacaattacctgacaaaattcagctagcagaagtcccacggcattcctcatggccactgcaatttaatgaagtaaatccaactgaagataatattgctctttttttctttgctaaagatgttgaaagttatgaaagggcatatggaaaactcttggataacatgcttcttggtgatttgtctcttaaagcaaatattggtggcactgaacttctcattttcccatccgataaattgccagagaggattcaacgttggaatggtttacctttcttttggggcattttttatgcccggaaagcaagtagtccactagagcttcctacaaataattgtccattagaacaaatcaatgaacctgttatccagcatgatattggttcgcctaaggcacatcagcctttgggtatagatttgaatgagtgccctaatgattatatatctgatctgtctctttcacttggatcagagagtgagaagtctggtgcatctttagatcgtaatattgtattagagtccaaacgtgaggatagaagtctgaatgcaagtgaaatacatcatgaagaaactgcaggcacaagacaaattataccggggcatccttctgttgcttcctgtggaactaatcttcccacaatctcaacaggaggtcatgacatgattcaggattatctggctgctgctaaaggtagcacaggaacaccaggtggaaacaaaatggagaaaacagatcagaatgaaactctgttccgtttttcgcagcaactaggtgcaactagatcaatctcacatgagatagaacttaataaacatggtcttttgccctcgcactgtcatttgagtggatcaaagatatgtgatgatcaaaccaaatcaactccaaattcagatatgggtcctttggattttgacatcaccaacaaaaggcagaagacttatgggaaacactcttgcatttttggagatgcaatgacacctatgaaatgcttgtccaagatacatcccttaccggctggacaggataatccatgcgatgttttacagcattgtcatcggggcccttcagatcctgcctctcttaaaaaacctttacctgatcatttcatccacgttctttcatctgacgacgaagattccccagaacctagtactagcttaaataaggcatcatcgaaggcagatgagggctcctccattttatgctcactttccctatccatggtggcaacgaagcgtaatctttctggttcagatattgtagatgatgaaccactgtctctctctcttgggctccctagtgttgtcggtgggagagcagatcaggagatgaagcaattcctgccggagaagccaggcataaacacttaatgcccctttagatttgcgagtgtacagttttgtgcagctgtatggagtttagacagggtagaagtatggtatagctgttaaattatgaatatttttcatttttttctctctcactgttatatgcatctgctgccgttgttagtgataatggtgtgatgatgttactatctgccatatctatgagatatatggtgttagtttcttgagatattatgggtatgacataaaaggatagatcaaaatgtgaatgtttgtgaattcattttgtcatggtttaacttgcattttctatcc

SEQ ID NO: 155799 - DNA, 119 bp, Zea Mays
atgtttatgttatcaggtatccatggccaattaaattttgatgtggtaggtatggttacaaagaaaccaagtgcgtggaacatgttttaattatctgacatcaaaactaaaaaaacaaa

SEQ ID NO: 155800 - DNA, 157 bp, Zea Mays
atgggcgccatgactctgccgcccggcttccgcttccacccgaccgacgacgagctcgtgggctactacctcaagaggaaggtggacaacctcaagatcgatctcgaggtcatccccgtcgtccatctctacaaatccgagccatgggagctaccag

SEQ ID NO: 155801 - DNA, 2532 bp, Zea Mays
aaacgaaagaaagccggaggtggggaggcttggtgttgcgggcgcacctacctaccggatccccacccggcaacccctgtgtactgccgcgcttctctcggtgccctgcctcgtgcctcctactcccaccttcatcaggagctcagtctgcggctgctgctccattccacactaccccgcgctggactggagtcgagttgagctcacgctctcgcacactcgcactcccattcccactggccagattgatcttgcttcgctaatcatcctagatctccattcccgcccatgggatgcttccagtcgaaggtggcggggcccctgccgcccaacgacgccgccgctctccccgccgacaagcctgcagatcctgaggcggcgaatggcggcgccgacggggaaggcgacggtgacgacaaggaggctgtgaagcgcgcggtgccggtgttcagggagtttgctctggccgagctgcgcgccgccaccaagggattcagcgccgacctcatcgtctccgagagcggcgagaaggcgcccaacgccgtctaccgcggccgcctcgacggcgggcggctcatcgccgtcaagcgcttctcgcgcctctcctggcctgacccgcagcagttcctcgcggaggcggcgggcgttgggaaggtgcggcacaagcgcctcgtcaacctcattggctgctgcgccgagggtgacgagaggctgcttgtcgccgagtacatgcccaacgacaccctgtccaagcatctcttccactgggataagcagccgttaccatgggaaatgaggctgagggttgcatatttcattgcgcaagctctcgaccattgcaatgctgagaacaggaaaatctatcatgatttgaatgcttatagggtactttttgatgaggaaggtgatccccgcttgtcaagttttggattaatgaagaacagccgtgatgggaaaagttatagcactaacctggcttacactccaccagagtttctacgaactggcagagtaattccggagagtgtgatctatagctatggaactgtcctgttggatcttttgagcggaaaacacattcctcctagtcatgccctagatttaataaggggaaagaatatactgttgctgatggattcctccttagaagggcagtatgctaatgaagatgcttcgaaattggttgatcttgcatcaaagtgtctgcaatttgaatctagggatagaccgaacataaagtatcttctgtcttctgttggtcctcttcagaatcaaaaggaggttgcatcacatgtgttcatgggtattacaaaagccacatcagtactgccaaccatttgttctccactcagaaaggcctgcactggtatggatctttcagcggtgcatgatattttgctcaaaacaggttataaagatgatgagggtgcagaaaacgagctatcctttcaagaatggacccagcaagtgcaagagatgctgaacacaaagaagtttggtgacattgcatttagagacaaggattttaagactgcaattgactactactccaagctagttgcgatgatgtcgacgccttcagctacggtttttgtcaggcgcagtttttcctacttgatgaatgggcaagcagagctcgctctacgggacgcaatgcaagcccaggtctgcatgcccgagtggcctacggccttctacctccaggccctggctctttcaaagctcggcatggaaaccgatgcccaggacatgctcaacgatggcgccacgtttgaggccaagaagcagaacggctggcgcagttaggagccgacgacgaacaaagtctctcttccaacgactccgtgccgttgccctttgagagaagaaggtacaatggcgagtctcctccaaatcagttcactgggacacgcctgttgcactactagtagtgggattgaaacgcactgttttatcgtgcaatctcctctcgaatgtcggtaacgagtgatgatcatgatcaggggtggaaaaataggtcagggcctttgaacgcatagcgtactcttccgtgggttgcgctttgtgttgctggcgatggtggcaggatctgcctgattgttgcaactgcagttgtaattaaagggatgctttctaacaccttctggttttacgtggaatctttgggccccagagcacatgagcggtgtgcaaaaagccgagttcattgtgattagctacgaagaataaactagagccgtcgggattccattcgattcagccatatttatatgcggtgttatctttttttccctttttttatgatcaattctgtttgtttcttgaatcttgatcggccgagtcgattcagacagccagttgcacatccaccgatttggtttcaaagcagcaggttaggttagagtagctaagctatttgagttgtattgctaataattagctagaccattagctggcccgttctaattctctctagttttagcggttaactattggtttgaggtttgctaattgtcgtaaagaacttgcaca

SEQ ID NO: 155802 - DNA, 1901 bp, Zea Mays
aaacgaaagaaagccggaggtggggaggcttggtgttgcgggcgcacctacctaccggatccccacccggcaacccctgtgtactgccgcgcttctctcggtgccctgcctcgtgcctcctactcccaccttcatcaggagctcagtctgcggctgctgctccattccacactaccccgcgctggactggagtcgagttgagctcacgctctcgcacactcgcactcccattcccactggccagattgatcttgcttcgctaatcatcctagatctccattcccgcccatgggatgcttccagtcgaaggtggcggggcccctgccgcccaacgacgccgccgctctccccgccgacaagcctgcagatcctgaggcggcgaatggcggcgccgacggggaaggcgacggtgacgacaaggaggctgtgaagcgcgcggtgccggtgttcagggagtttgctctggccgagctgcgcgccgccaccaagggattcagcgccgacctcatcgtctccgagagcggcgagaaggcgcccaacgccgtctaccgcggccgcctcgacggcgggcggctcatcgccgtcaagcgcttctcgcgcctctcctggcctgacccgcagcagttcctcgcggaggcggcgggcgttgggaaggtgcggcacaagcgcctcgtcaacctcattggctgctgcgccgagggtgacgagaggctgcttgtcgccgagtacatgcccaacgacaccctgtccaagcatctcttccactgggataagcagccgttaccatgggaaatgaggctgagggttgcatatttcattgcgcaagctctcgaccattgcaatgctgagaacaggaaaatctatcatgatttgaatgcttatagggtactttttgatgaggtacacaacaggaaggtgatccccgcttgtcaagttttggattaatgaagaacagccgtgatgggaaaagttatagcactaacctggcttacactccaccagagtttctacgaactggcagagtaattccggagagtgtgatctatagctatggaactgtcctgttggatcttttgagcggaaaacacattcctcctagtcatgccctagatttaataaggggaaagaatatactgttgctgatggattcctccttagaagggcagtatgctaatgaagatgcttcgaaattggttgatcttgcatcaaagtgtctgcaatttgaatctagggatagaccgaacataaagtatcttctgtcttctgttggtcctcttcagaatcaaaaggaggttgcatcacatgtgttcatgggtattacaaaagccacatcagtactgccaaccatttgttctccactcagaaaggcctgcactggtatggatctttcagcggtgcatgatattttgctcaaaacaggttataaagatgatgagggtgcagaaaacgaggtaactaatagtcaaatttacatctgacttgtgccatcgatttgtgatcaattttcctcagtcccctcttccgttttgattcatttttccacttgactcaattgataactttttcataaaggtttatttgttgattgttttcttgtcgtaactctgtgttctttccactccgaccctttcatcattgcatggttagaaaaaataagaaacaccgcgggtcaattagaatgtgaaatgtgtacatgtgacgttttctcttggctatgcacagaagtggacttatataaattgcagcatgacttgtttaatctgaaaggcaaataattttgcatggataaccacacattttatcagtatttaattcagaagattgtaatgccgactggactttggacttgtcttcacatatcattttgtgagcaaaaatctgatgtatgctttcaaatgttt

SEQ ID NO: 155803 - DNA, 2371 bp, Zea Mays
ggaggcatcgtgtggaccgcgccctgcacaccttgagcgtgggcctgcctcctccatctccctctgcggcgtataaagaagcgacccacggccaccgccacggcctcgccggaatatcatacgaaaaccctcgcggcggggagagcgctttccctcccacacactcgcgccgcagcatccgcagtccgcacctgcctgcctccacgacttgtcgtgctcgtgcgctactctcctcgagtgcggcgcgggagcacggggacatctaatggcggccgcggcggagatcggtggtttcacggcggccgcgctcaggccgcttgcgcacccagccccggcggcggcgcctaggagggcggtggcggcgcagtcgctgcggacgaccgccaccgagacgctgacggcggatctcgccgccagcacggccaacggcgcggtgcatgctcagatgtatagtgaggctagtagtgaaatcccttcacaggcagctattgcaaattctaggaggaagacaaagatagtatgcaccataggtccctcaaccaacactcgtgagatgatttggaagcttgcagagactggaatgaatgtagcacgccttaatatgtcccatggtgaccaccagtcacaccagaaggttatcaatttggtcaaggagtacaatgcacagaacactgatggaaatgttattgccatcatgctggacactaagggtcctgaagttagaagtggggatgttccagagccaattatgctcagtgaagggcaagagttcaatttcacaattaaaagaggggtgagcactgaagacactgtcagcgtgaactatgatgacttcataaatgatgttgaagctggtgacatactgttagtggatggaggaatgatgtcgcttgctgtgaagtctaaaacagctgatacagtcaagtgtgaagtagttgacggcggggaattgaaatcaaggcgccacctaaatgttcgtggaaaaagtgctactttgccatctatcactgagaaggattgggaagacataaaatttggtgtcgaaaacggtgttgatttctatgcagtttcctttgtgaaggatgccaaagttatccatgaattaaaggactacctaaaaggtgttaatgcggatatacatgtcattccaaaaattgaaagtgcagactcaataccaaatctgcagtccattattgctgcttcagatggggcaatggtggcacgtggagaccttggtgctgaacttccgattgaggatgttcctttgctacaggcagagattgttcaaacatgtcgaaacatggagaaaccagttattgtcgccacaaatatgttggaaagcatgattgaccatcctactccaactagggcagaagtttctgacatagctattgcagtcagggaaggtgctgatgccatcatgttatctggtgaaactgctcatggaaagtacccactaaaggcagtcaaggtgatgcacactgtggccctcagaacagaatccagcatttataacccaactacttcccctagtgttatagcatctgcacagggtctacagaacgaggagttttccccaagccagctaagtaaaatgtttggatcccatgcaactatgatggccaacacccttcggacaccaatcattgtatttacgcagacaggctccatggctgtcctcctgagccactatcgtccctcgtctacaatatttgcgtttacaaacgaggaacgagtgaagctacggctagcactctaccagggggtcatccctattcacatggagttctctgacgacgcagaagaaactttctccagagcaattagcagcttgctgaaagcacaatatgtgaagaagggagactacgtcactcttgttcagagcggagtgacttcaatctggagagaggaatccactcacaacatccaagtgaggagagctcaggtctgatgtgctggtaggaatcagtcgccggagaagttttgatagcgccgctagaagtgttatcatcatcatcaccatcatatgcgagtaattttaatgttttaccaggagattgctacgtcgagttgtatgttgtgtcgaattcacgtgtagactctggatctttaactctgtattcgttcattttcacttgtttcacactggagtgctataagttcacgcttactgcctttgcttttgcttttgctttcttgtgaaacttgattttagtttcttgttacaaaaggagctagcactaacagcgtgttaaattttgtaaaacggggccttcttgctccgagaactgctcagttaaaactgttgcaataataatgatatcgtccatgcaaggcgacaacatgcctggccagaaggccgaagtcagaa

SEQ ID NO: 155804 - DNA, 163 bp, Zea Mays
ctggaagacgaagcttttgccgtcccagatccctagccagtcgtcgccgccggtcttcacggcgagtcccaggaggtcggcgaagcggcgcgcgtggaggttgcgggggtggatgatggagccgccggcctcgaagctgtcgcccgcgagagtgacggtgccc

SEQ ID NO: 155805 - DNA, 501 bp, Zea Mays
atgagccacgcgcccaggttggaccggctcacgcggtccgtgcccggcgacgacacgaatggcgtcaccatggacgccatcgccacgggggaccccttcaggtcgtgcaccgtcaccgaccaccccttgcgctccttggccgacgcggcgtcgcgctcacgccgcatcccgggcctgcgcaggtcgctgttgctgcggcacccgaacttgcatgtgaacatgggctgcctcatgctgccgcgcacctgcagcacctgcgggctgcactccggctcgccgtcgaactcgaagacgaaccgcgggtccggctccgcgcgcacggtgaggcagagctccgccgccgacgggctgcccttcccggcccgcttcccgatggagatccagccgctgtgcagcacggcgggcttggcctcggcgcccttgaggtcgagcgggaccgtagccttcccgagcagccccccggagctgacgccacaggcactccccttccggccggcgtag

SEQ ID NO: 155806 - DNA, 1838 bp, Zea Mays
agcactcaggagagcggttacttctatcgagcactcaagagagctgctaaattttatattaagaaaaaaagggggcaataacccttacatttgggcgctctttgagtctttgtatacagcaaaacaatgacctcgaccaaaaaaaactacctactgctcgctcgcaggctcaagggcaagaagaacccgccaaactccaaaagaataacttctaggttatgtagtataggatgaagataataacattcatgaattggacaatcatttcaccttcaagacaaaagtaaatccatccaaaatcctaaccatactgtctctaatctaaagagtaaagggagacatcacgaactaccgcataaattaagtcaatttcgcacaaatttggaaaagcgttgattcttgtgatcagcaaacggctgtaaaatcatgcttacaatcggaacactctagacccaaacaagacgagatgggggcagaaggcgggagacctgagcgggggaggactgctccatcagctggaggaggttggaggtggaccgcactgcttgtgctatctgctcggtcactgccgccttagcccctccaccaccgccaccgccggccgtcgcagccatccccgccacgtcgacctgggagctcgccctacggcctacggcctacgcccagtacagagttgaaaatgtgtgtaaacaaataaccaaaggcccaaccaaccgcagggccgaatttccaatcgtcaagtgggacccgttcgaatttccgttatgcaaaatttcccgacccctctagaacgaccgcccctgccgaggagccgaccgacgggcgaagcgggagggaggcgatggcggcggcttgggggcagaaggccctgggggctctgccgcagctggtgaagtcgctgcggagtgatcccgtctccggcagcgcacgacacaggcgccttccgtctctcaggaggaccttctcgttgtacgatcagatcaacctcatcgacagcgtcccggaagacgagctccgattccagtcgtatgatgacactggattcaaaattaacaatgtaaaatatgaaggcagtgtattgattgtagagaacaagataatgacatgggcacccaaaacgttctcagagataactcctgaaagtttatcaatcttcaaagttgtgcaccctatcccagagatctttattcttggttgcggaagacacgtccagctggtcagtcctgagctgcggatgttcattcggtcaactggaatgaaactagaagcagttgattcgaggaatgcagcttcaacatataatatcctgaacgaggagggcaggccggtggcagctgcagttcttccctatggagtcacttgttaatgttttatcttctataccagttgggcaggcgttctctctttataatcgataaccaactgagctttgtttcgttcgtgctgtttcttggaagttctatatctgtcatgcatgtccaaagtagagttgtctatcttcctgcttttctacttcctctagcaagcccagatgcacagactgttggtatgttttggttgccgagggtacaatcatacatacaggcgaaacacttgccactctgctacgaactgggacgtgcgcccgcctggcgactggcgaggaccacggagtcacggacccggctgttttgccttctgttgatcgtcctaatttcagggctcaggcaggcagacgcgatgggatcctacgtggtaggagtactcgccagttcagatctcgcgggttaatatttactgtcacgtcatgttgtatcactatcgaccatatactataaattatgtaattgatttttgtc

SEQ ID NO: 155807 - DNA, 976 bp, Zea Mays
gcactatatgtttcgtttgacctgttaatagaatatggagtgattggctttttgtcttgagattcatagatgtttgtccaatgcagatctgttctgctattatgtttgttgtaatcagctgattatgaacaagttatagctaatttaaaacttacacaataattaatgggttgggcaagaaactattagcacctttttctgatgtttgtcaagtataggttatatgtaggtagtcacaccaaacgaaaactaaaactatgccaactgatttgcaacaggcagtgctcttgctgttagctctggctgtcagggcaatgaacaaacctgctgagtatgacagtgatgacgaaattatagcaattggccgaagccctaccatccggcagccactgatccatacccaaaatgttcctgccactggtgttcctgtcccaacacttgatcaacgtgcaagtagaaatgatgcctggagccaaaggatgcgagagaagtatggtctggacacgagccagttcacatacaacccttcagacccaagcaggtaccagcaaaatggcacgccacgggctgaagaaaggagtcgatgcactataatgtgaagaattcttcatgaggtcctacgagataatagactttcttgaaggggctactgtagtttggtgttaccagtgttgttcagactttacacagcggtgtgtggaatagaagaatcccgaccatattttttgtcacgctcgatatgacttctcagcaaatgctctatgcacctaattttactgtgaatgaggaactgctagccgttgacatcatctattttgaatttttttggggtttgtttcttgttggcaatccgcccccctttcatccttctacgtaagttccagattgtcgctccgtttaatttagatgccaaatgtgtgtaagatttggttgtgccgtgaagtgagatgggaatgggagaatctattttgctttc

SEQ ID NO: 155808 - DNA, 1602 bp, Zea Mays
gtcgcccgacagccagcgcatatcctctgcggactgcggcctgcgcacgggggcgatgggcgatggcgagcagccgagcactacccgccagcatcgccgaagcgataaaaaaactccaactcaaattcctaatgcagccagcccaatcgatctgctccgtccatcgcctcaggcgacggccctcctcacgccacctggcgggctcccccgtcgactccactccacctcctcctttcccccaatccaccctagtgatcttattttattcacgcgcaaaaacctaaaaaagatttagaaacggaagaacaaacagcaagcgaagcatcgccagattggtatatcgatcgattgatcggtggcggaggaaggggaggacggggggcagatggcggcgtgccggggcttcttcgagtgcctgctcaggctgctcaacttcatcctcaccgtcgccggcctcgctatggttggttacgggatctacctgctcgtcgagtggatgaagatatccgaggacggcatcggcggggcttcgacggcggaggtgctcgtctctggccggccgttgttgggggctgtcattctcggtgacagcttcctcgacaatctacccaaagcatggtttatttatttgtttatttgtgttggcaccatcgtcatcttggtgtctctgtttggctgcattggagcagggacaagaaacacctgctgtttgtgtttctatgctttcttggtcatattgttgatccttgctgaagctgcagctgctgcattcattttctttgaccatggctggaaagatgtaattccagtggacaaaacacataactttgatgttatgtatgactttctgaaggaaaactgggagattgcaagatgggtcgctctgggcgttgttgtttttgaggcagtgctcttgctgttagctctggctgtcagggcaatgaacaaacctgctgagtatgacagtgatgacgaaattatagcaattggccgaagccctaccatccggcagccactgatccatacccaaaatgttcctgccactggtgttcctgtcccaacacttgatcaacgtgcaagtagaaatgatgcctggagccaaaggatgcgagagaagtatggtctggacacgagccagttcacatacaacccttcagacccaagcaggtaccagcaaaatggcacgccacgggctgaagaaaggagtcgatgcactataatgtgaagaattcttcatgaggtcctacgagataatagactttcttgaaggggctactgtagtttggtgttaccagtgttgttcagactttacacagcggtgtgtggaatagaagaatcccgaccatattttttgtcacgctcgatatgacttctcagcaaatgctctatgcacctaattttactgtgaatgaggaactgctagccgttgacatcatctattttgaatttttttggggtttgtttcttgttggcaatccgcccccctttcatccttctacgtaagttccagattgtcgctccgtttaatttagatgccaaatgtgtgtaagatttggttgtgccgtgaagtgagatgggaatgggagaatctattttgctttc

SEQ ID NO: 155809 - DNA, 1933 bp, Zea Mays
gtcgcccgacagccagcgcatatcctctgcggactgcggcctgcgcacgggggcgatgggcgatggcgagcagccgagcactacccgccagcatcgccgaagcgataaaaaaactccaactcaaattcctaatgcagccagcccaatcgatctgctccgtccatcgcctcaggcgacggccctcctcacgccacctggcgggctcccccgtcgactccactccacctcctcctttcccccaatccaccctagtgatcttattttattcacgcgcaaaaacctaaaaaagatttagaaacggaagaacaaacagcaagcgaagcatcgccagattggtatatcgatcgattgatcggtggcggaggaaggggaggacggggggcagatggcggcgtgccggggcttcttcgagtgcctgctcaggctgctcaacttcatcctcaccgtcgccggcctcgctatggttggttacgggatctacctgctcgtcgagtggatgaagatatccgaggacggcatcggcggggcttcgacggcggaggtgctcgtctctggccggccgttgttgggggctgtcattctcggtgacagcttcctcgacaatctacccaaagcatggtttatttatttgtttatttgtgttggcaccatcgtcatcttggtgtctctgtttggctgcattggagcagggacaagaaacacctgctgtttgtgtttcgtatcctgttatgtgcctcttcggcgtcattatgttgtcctctctaaagaagattccatttgtcatgcacaagacactaaaaagtacttggaattatgctcaacattaattccagacgggatattattagttgctgaacatgtgaaccaacaaaattttgtttctgtgctactctgaacgctgatcttaattcttatagaacagcagtagcagaggcaataagattatcactatttctgcagcccaaaaaacgtttcgtccaaggcacttggcattttataatgatagggtcacagtattacacgcttgtttccttttacttgtaaacaagtatgctttcttggtcatattgttgatccttgctgaagctgcagctgctgcattcattttctttgaccatggctggaaagatgtaattccagtggacaaaacacataactttgatgttatgtatgactttctgaaggaaaactgggagattgcaagatgggtcgctctgggcgttgttgtttttgaggcagtgctcttgctgttagctctggctgtcagggcaatgaacaaacctgctgagtatgacagtgatgacgaaattatagcaattggccgaagccctaccatccggcagccactgatccatacccaaaatgttcctgccactggtgttcctgtcccaacacttgatcaacgtgcaagtagaaatgatgcctggagccaaaggatgcgagagaagtatggtctggacacgagccagttcacatacaacccttcagacccaagcaggtaccagcaaaatggcacgccacgggctgaagaaaggagtcgatgcactataatgtgaagaattcttcatgaggtcctacgagataatagactttcttgaaggggctactgtagtttggtgttaccagtgttgttcagactttacacagcggtgtgtggaatagaagaatcccgaccatattttttgtcacgctcgatatgacttctcagcaaatgctctatgcacctaattttactgtgaatgaggaactgctagccgttgacatcatctattttgaatttttttggggtttgtttcttgttggcaatccgcccccctttcatccttctacgtaagttccagattgtcgctccgtttaatttagatgccaaatgtgtgtaagatttggttgtgccgtgaagtgagatgggaatgggagaatctattttgctttc

SEQ ID NO: 155810 - DNA, 2524 bp, Zea Mays
gtcgcccgacagccagcgcatatcctctgcggactgcggcctgcgcacgggggcgatgggcgatggcgagcagccgagcactacccgccagcatcgccgaagcgataaaaaaactccaactcaaattcctaatgcagccagcccaatcgatctgctccgtccatcgcctcaggcgacggccctcctcacgccacctggcgggctcccccgtcgactccactccacctcctcctttcccccaatccaccctagtgatcttattttattcacgcgcaaaaacctaaaaaagatttagaaacggaagaacaaacagcaagcgaagcatcgccaggtaatcaactcgtcctcctgtccttcttccccacacccgccgcgcgaaattcggcgcgattcgggcgggattcgttggaattcccctgagaatcggagcgttcttttggacttggtagattggtatatcgatcgattgatcggtggcggaggaaggggaggacggggggcagatggcggcgtgccggggcttcttcgagtgcctgctcaggctgctcaacttcatcctcaccgtcgccggcctcgctatggttggttacgggatctacctgctcgtcgagtggatgaagatatccgaggacggcatcggcggggcttcgacggcggaggtgctcgtctctggccggccgttgttgggggctgtcattctcggtgacagcttcctcgacaatctacccaaagcatggtgagatggtttccttgcctgtggacttttttttctgatgtatcaatactggtttcgtccatgtgatgtcgccattgattatgattttggattgagaggaactgcaaggtttgcttagtaggggtggcaatcacaactgtgaatgtgtgaaatatgcaattgatagccaaaacacgcagttccaaattgcagtctgacgaagcatttgttactcgcctttagattattggtgagcatgttgggtagggggtaaattatgtgtggatttgaatgttccaagtatcattgactctttagtttggcaactgtgggttttctctgtttgtttttactgccaaggtgattgtgtttcatatttaatagcctctgttccctgcaggtttatttatttgtttatttgtgttggcaccatcgtcatcttggtgtctctgtttggctgcattggagcagggacaagaaacacctgctgtttgtgtttcgtatcctgttatgtgcctcttcggcgtcattatgttgtcctctctaaagaagattccatttgtcatgcacaagacactaaaaagtacttggaattatgctcaacattaattccagacgggatattattagttgctgaacatgtgaaccaacaaaattttgtttctgtgctactctgaacgctgatcttaattcttatagaacagcagtagcagaggcaataagattatcactatttctgcagcccaaaaaacgtttcgtccaaggcacttggcattttataatgatagggtcacagtattacacgcttgtttccttttacttgtaaacaagtatgctttcttggtcatattgttgatccttgctgaagctgcagctgctgcattcattttctttgaccatggctggaaagatgtgagtattctattgggtgcttatctcaggaactaaactactataatgtaccttgccttaccatttccttgagtagctgtagttatcaatagacttcttttgcaggtaattccagtggacaaaacacataactttgatgttatgtatgactttctgaaggaaaactgggagattgcaagatgggtcgctctgggcgttgttgtttttgaggcagtgctcttgctgttagctctggctgtcagggcaatgaacaaacctgctgagtatgacagtgatgacgaaattatagcaattggccgaagccctaccatccggcagccactgatccatacccaaaatgttcctgccactggtgttcctgtcccaacacttgatcaacgtgcaagtagaaatgatgcctggagccaaaggatgcgagagaagtatggtctggacacgagccagttcacatacaacccttcagacccaagcaggtaccagcaaaatggcacgccacgggctgaagaaaggagtcgatgcactataatgtgaagaattcttcatgaggtcctacgagataatagactttcttgaaggggctactgtagtttggtgttaccagtgttgttcagactttacacagcggtgtgtggaatagaagaatcccgaccatattttttgtcacgctcgatatgacttctcagcaaatgctctatgcacctaattttactgtgaatgaggaactgctagccgttgacatcatctattttgaatttttttggggtttgtttcttgttggcaatccgcccccctttcatccttctacgtaagttccagattgtcgctccgtttaatttagatgccaaatgtgtgtaagatttggttgtgccgtgaagtgagatgggaatgggagaatct

SEQ ID NO: 155811 - DNA, 2302 bp, Zea Mays
tgtcgcccgacagccagcgcatatcctctgcggactgcggcctgcgcacgggggcgatgggcgatggcgagcagccgagcactacccgccagcatcgccgaagcgataaaaaaactccaactcaaattcctaatgcagccagcccaatcgatctgctccgtccatcgcctcaggcgacggccctcctcacgccacctggcgggctcccccgtcgactccactccacctcctcctttcccccaatccaccctagtgatcttattttattcacgcgcaaaaacctaaaaaagatttagaaacggaagaacaaacagcaagcgaagcatcgccagattggtatatcgatcgattgatcggtggcggaggaaggggaggacggggggcagatggcggcgtgccggggcttcttcgagtgcctgctcaggctgctcaacttcatcctcaccgtcgccggcctcgctatggttggttacgggatctacctgctcgtcgagtggatgaagatatccgaggacggcatcggcggggcttcgacggcggaggtgctcgtctctggccggccgttgttgggggctgtcattctcggtgacagcttcctcgacaatctacccaaagcatggtgagatggtttccttgcctgtggacttttttttctgatgtatcaatactggtttcgtccatgtgatgtcgccattgattatgattttggattgagaggaactgcaaggtttgcttagtaggggtggcaatcacaactgtgaatgtgtgaaatatgcaattgatagccaaaacacgcagttccaaattgcagtctgacgaagcatttgttactcgcctttagattattggtgagcatgttgggtagggggtaaattatgtgtggatttgaatgttccaagtatcattgactctttagtttggcaactgtgggttttctctgtttgtttttactgccaaggtgattgtgtttcatatttaatagcctctgttccctgcaggtttatttatttgtttatttgtgttggcaccatcgtcatcttggtgtctctgtttggctgcattggagcagggacaagaaacacctgctgtttgtgtttcgtatcctgttatgtgcctcttcggcgtcattatgttgtcctctctaaagaagattccatttgtcatgcacaagacactaaaaagtacttggaattatgctcaacattaattccagacgggatattattagttgctgaacatgtgaaccaacaaaattttgtttctgtgctactctgaacgctgatcttaattcttatagaacagcagtagcagaggcaataagattatcactatttctgcagcccaaaaaacgtttcgtccaaggcacttggcattttataatgatagggtcacagtattacacgcttgtttccttttacttgtaaacaagtatgctttcttggtcatattgttgatccttgctgaagctgcagctgctgcattcattttctttgaccatggctggaaagatgtaattccagtggacaaaacacataactttgatgttatgtatgactttctgaaggaaaactgggagattgcaagatgggtcgctctgggcgttgttgtttttgaggcagtgctcttgctgttagctctggctgtcagggcaatgaacaaacctgctgagtatgacagtgatgacgaaattatagcaattggccgaagccctaccatccggcagccactgatccatacccaaaatgttcctgccactggtgttcctgtcccaacacttgatcaacgtgcaagtagaaatgatgcctggagccaaaggatgcgagagaagtatggtctggacacgagccagttcacatacaacccttcagacccaagcaggtaccagcaaaatggcacgccacgggctgaagaaaggagtcgatgcactataatgtgaagaattcttcatgaggtcctacgagataatagactttcttgaaggggctactgtagtttggtgttaccagtgttgttcagactttacacagcggtgtgtggaatagaagaatcccgaccatattttttgtcacgctcgatatgacttctcagcaaatgctctatgcacctaattttactgtgaatgaggaactgctagccgttgacatcatctattttgaatttttttggggtttgtttcttgttggcaatccgcccccctttcatccttctacgtaagttccagattgtcgctccgtttaatttagatgccaaatgtgtgtaagatttggttgtgccgtgaagtgagatgggaatgggagaatct

SEQ ID NO: 155812 - DNA, 1674 bp, Zea Mays
gtcgcccgacagccagcgcatatcctctgcggactgcggcctgcgcacgggggcgatgggcgatggcgagcagccgagcactacccgccagcatcgccgaagcgataaaaaaactccaactcaaattcctaatgcagccagcccaatcgatctgctccgtccatcgcctcaggcgacggccctcctcacgccacctggcgggctcccccgtcgactccactccacctcctcctttcccccaatccaccctagtgatcttattttattcacgcgcaaaaacctaaaaaagatttagaaacggaagaacaaacagcaagcgaagcatcgccaggtaatcaactcgtcctcctgtccttcttccccacacccgccgcgcgaaattcggcgcgattcgggcgggattcgttggaattcccctgagaatcggagcgttcttttggacttggtagattggtatatcgatcgattgatcggtggcggaggaaggggaggacggggggcagatggcggcgtgccggggcttcttcgagtgcctgctcaggctgctcaacttcatcctcaccgtcgccggcctcgctatggttggttacgggatctacctgctcgtcgagtggatgaagatatccgaggacggcatcggcggggcttcgacggcggaggtgctcgtctctggccggccgttgttgggggctgtcattctcggtgacagcttcctcgacaatctacccaaagcatggtttatttatttgtttatttgtgttggcaccatcgtcatcttggtgtctctgtttggctgcattggagcagggacaagaaacacctgctgtttgtgtttcgtatcctgttatgtgcctcttcggcgtcattatgttgtcctctctaaagaagattccatttgtcatgcacaagacactaaaaagtacttggaattatgctcaacattaattccagacgggatattattagttgctgaacatgtgaaccaacaaaattttgtttctgtgctactctgaacgctgatcttaattcttatagaacagcagtagcagaggcaataagattatcactatttctgcagcccaaaaaacgtttcgtccaaggcacttggcattttataatgatagggtcacagtattacacgcttgtttccttttacttgtaaacaagtatgctttcttggtcatattgttgatccttgctgaagctgcagctgctgcattcattttctttgaccatggctggaaagatgtaattccagtggacaaaacacataactttgatgttatgtatgactttctgaaggaaaactgggagattgcaagatgggtcgctctgggcgttgttgtttttgaggcagtgctcttgctgttagctctggctgtcagggcaatgaacaaacctgctgagtatgacagtgatgacgaaattatagcaattggccgaagccctaccatccggcagccactgatccatacccaaaatgttcctgccactggtgttcctgtcccaacacttgatcaacgtgcaagtagaaatgatgcctggagccaaaggatgcgagagaagtatggtctggacacgagccagttcacatacaacccttcagacccaagcaggtaccagcaaaatggcacgccacgggctgaagaaaggagtcgatgcactataatgtga

SEQ ID NO: 155813 - DNA, 87 bp, Zea Mays
gtccttatttgcttagtatctgtttataagttagcttgcatctgtttatgctcttcaatcttctccttactctcgaccgatgacatg

SEQ ID NO: 155814 - DNA, 903 bp, Zea Mays
atgaggtgcaagctccacccttacgccaaccccgtgggcgtgtgcgcgccctgcctccgcgaccgcctcctcgcgctcgccgccgagcgcgcccaggccgccgaggccagcagcgacgggggctgcgggagcagcagctgcggcagcccgcctccgcccctgcacctgcacctgcccacgcgcgcgcggcgccaccagcagcacggccacgccgagggaagggccgggggcttcccgcgctccgtgtcgccgtacgcgcagcaccggcgctccgacgcctgcgcttcctccggctccgggtaccagccgaacctcctcttcttccgcacgccgcaggtcgggcccgccgcggccgccttccgcgccgacgagcccggggaggagaccggcggcggcggcggcaagaggaaggccgcgccgagaaggtcctttctgtcggcgatctttggcgtcaggcggcacggacgacgggaggaggcagtagtcaggaaggaccctccccggcggtccacctcgtggctctcggcgatcatccgccgcaagcggaggccggccgacttgcccgcagccgcgtccttcccggacgaggagcccgagtcccccggaggcagcaacagcaccggcagctggtggttcccctcgccgtcgcctgcaaggcagcagcagcaccgccgccggcacggcggcggcgctggcgccagcggggacgggatctcggggttcgccgtgtgcctgagcccgctcgtccggcccagctccgccggcggccggcgccggtgccagccgccggacccctccgcgctgggaggagacagccaccggcgacacgcgtctgccggcggcgccgcgtcgttcggccgcaacgcgtcccggaagctcgccgatatgggtaggttccgatga

SEQ ID NO: 155815 - DNA, 1461 bp, Zea Mays
tcattttatttaatgatgacgacagaaatggggcttgtcagcgccgtcgtacgtgatctccacgaccatgaaacacagcagtaaacaactaaacccgcatcactatttctgttgcattgtatcattctcccggacccagaggcatcctatttctgtcgcagcatttccctctcaccataccataattctctgacgaggatcacaaatacgtacaaaccaagctaaccaggcagtcagaaatcggtatggcttcagcagcgcgcaatggtgcggccgcggcggcgctcatggtggccgtctccgtcctggcactggccgccgccggcagcgcgcagctgcagtacgggttctacaagggcaagtgcaacggcaccgacgtggaggcgctggtgcagagtatcgtcagggcccgctttgcgcgcgagaaccccatcgtcgcctacctcctccgcatgcagttccacgagtgcgccgtcaatggctgtgacggtggtttgctgatcgacggccccggcaccgagaagacggcgccgccgaacctcagcgtcaagggctacgacgtcatcgcggccgtcaaggcggagctggagcggaagtgtcccggcgtcgtgtcctgctccgacatccagatcctcgccacccgggacgccgtggcgctggccggcggggccgcgtacgcggtgcgcacggggcggagggaccgccgccggtcgctggcccccgacgtcaggctcccggcgcccgagttcaccgcggcgcagatggtggcgtacttcggcgggctgggcctgagcgcgttcgacgcggtgctgctgctgggcgcgcacaccgtgggcgccacgcgctgcagcgcgatcaagggcagccggctgtaccggtacggcggcagggccggcgccacggaccccggcatggacccgggctacgcgttcgtgtacaagaactacgtgtgccccaacgtgccctcgtcggacaacaacgccgtgttcctggacgaccagtggagcgcgctcaagctggacaaccactactacaggaacctgcagcagcgccgcggcgtgctcgcctgcgaccagaacctgtacagcgacgggtccacgcgctggatcgtggacctgctcgccaaagacagcggcctcttcacctcgctcttccccaaggcgctcgtcaagctcagcgaggtcaacgtggtcaccggcacgcagggggagatccgaaaggtctgcaacagattcaactgaggatccgccatcatattgatcttcaccctctttggtcttcttcgtcattcctgcttacttttctatggagtacatggtttgatcgtctgatactgttgcccttctccttcccatttgcttcatttccgcgtcaagtttgattcattctttttgtaacatgatgttggatttaatttgtaataacaaacatgatgggttaacgtaccccgtgtatggtaaa

SEQ ID NO: 155816 - DNA, 823 bp, Zea Mays
gtttgttgtgacatggatctgcaatatgtctgacgatgctgttggttcttcagaaataccggctacacaaccggagcaaggcaaaacagtctgttgatcttctatagttaaatcaaagctattttattttttttaaaatagctaaattgcatttttagcgtttagcgcgtggtttataatggtttatagacgaaacacattcatttaatggcaatttagcgaaaccagtgtttgataatgacaagattccaaatttctcggatgtgaagcgtattggtaagaaattgaactaccaaggtttattacaggatgtagatagttagtggatatttagttcatgaatgtatatttgacaatatgtgtttcttttcatttttctcttgcagattcacttagttatacatccataatatatgttgctatcattattacagttgtattcattattattattgtagaaattgctatcatcaagttgataggtggacaaattccaatgcccaagttatttcccaccgttaatgatgtgaatgtcataggtgtataaatgagaaaaaatgaataattggttaggaagaacgtcagggacaccactgacaacggctggtcaattccccttggaatttacgcttctctttttttattgcttgattgtgatcacatggtaggcctcatgtgcgctttgctactgagggttggtcagtttttcttggaatttaccattcttctcttgttttattgcttgattgtggcctcatgtgcgctttgttgctgcatttctcaggttcgacatgccccatgcctactatcactctcgatttga

SEQ ID NO: 155817 - DNA, 235 bp, Zea Mays
agccaacagcagataaggaaacgcacgcgccgcgacgcaactatcaagccattcgtccctgtggaagtttccacactcccttcccttcccttgtacccactccaatggcgccctccctcctggccgccgtctccgcctcgcccttcctcctacccggcagcagcggcatcagccgcaggccactgggcgctgccccaacccgccggggcgggactgcgcgtggccgcgcttaagt

SEQ ID NO: 155818 - DNA, 1158 bp, Zea Mays
atggcatctaccgccatcccgtccccgccgcctccggcagtgccggagcggagagtgccgctggtgccgcggctggcggacgatggcggcggggacggaaggggtgacgcgcgagggagtagcgcgggaggtggcgggagcgggagcggcagcgtggcgggcatctcgccgagcatcctcgtcatcgcagtcatcgtggtggtgatgctgctcgcgtcgctgtgcatccactactttatccgccacctctgccgccacgtgggcccagcggggtcctcctcctcctcctcctctttgtcccggcaggctccgccgctcccgctcgtggcgcgccccgcggcgggggcgtccgtggcgcccgccgacggccagggcggaggagggaaggcggcggccgcggcggaggcagaggcggagcggctcatcgcgcgcctgccgcagttcacgctgtcctcgtcgctggccgccgtgcccaagtcgtcgcgcgactgcgccgtgtgccagaccgcgttccgcgacgacgacgggctccgcctcctgcccgcctgccgccacgccttccactcccgctgcgtggacccgtggcttcgcgccaacccgtcctgcccgctgtgccgcgcctccatcgcgctgccccacccgccgctcacggacctcctccgtgtggagctcggcagcgtcagcagccgccgctccaacccggacgctgcggccgccgccgtccgcgcgtacccgctccccggtggcctccccgactcggcgtcgtcggagtacctcgtcgaggaagagctccaggtggtgctcaaaccgaccccgcccgccgccgccgggtccagcgacccgacaagccagcagcagcaacagctcgccgcggtggagcgcgggcagccaacgtcgtccgtgggcctgacccctacggcatcgttcaggtcgacggcggagcggtggagcagcaggtggagcaaccggtggagcagccggtggagcagcgggcgctggagcaaccggtacgacgctgggaccgtgacggccgcggccacggcggagtggtggtgggacatggacggcggcgtggcccccccgacgcggcggagggacgcggacgacggcagcgcgtcgttctacgggttcgtgcggtggctcacgggggcatactag

SEQ ID NO: 155819 - DNA, 1354 bp, Zea Mays
agaggggacaggggaggcagaggacggagagagtcgcccaccgccgccaccaccaccaccacaggcgccaccctgctcgatcgagcaagcagtgtgacattatagctaggctgctgcacatgcaccgtgctgtgctggtcaacgatacacttctcttttcaccaatacagtcacgaagaagtactccagcagcagctgcagcagcagctgtattatagccggctaccaccaccgatccgtcgaccggagatgcagccggcctgctccggcgccgcgcttctcgccgccttcatcgccgtgctggcgtattcggccgcgcgctgccgcggccagctcgccgacaactactacgccggcaagtgcggcaacttcagcgtggaggccatcatccgggacgccgtcaaggcccgcctcgcgtgggacaagcggatggtcgccggcctcctccacctgcagttccacgactgcttcgtcgccgggtgcgacgcgtccatcctgctggacgggcctgacacggagaagacggcggtgcagaacagcggcatcttcggctacgacttcatcgacgacgtgaaggcggcgctcgagagagtttgccccggcgtcgtctcctgcgctgacatcatcatcgccgcgacaagggacgccgttggcatgtgcggggggccgagctaccaagtgcagctgggcagaagggacggcatggtgtcgcaggcgtccatggcgagcattctgccgggccccaacgtcgacgtccccaccgccatcgatctgttcgcgcggaagggcctcaacagcttcgagatggtcagcctcatgggcgcgcacacggtgggggtgacgcactgctcggtgatccacgaccggctgttcaacttcaacggcaccgggtcgccggacccggccatggacccgatgtacgtgtggatcctgacgacgtacgcgtgccccaggggccaggccttcgacaacatcgtctacctcgacgacccctccagcatcctgctcgtcgaccggagctactactcccagatcatgaagcgccacggcgtgctgtccgtggaccaggccctcggcgacagcagcgccaccgcgtggatggtcaagttcctcgccaccaccgacttcttcccctccatgttcagctacgcgctcaacaagctcgccgcgctcgacgtcctcaccggcaccgacggcgagatcaggaagagctgccggaggaccaactgatctgacggatcggatcgatctgccgcagttgttagttgattgatacacagagataggttaatcaatcattaccagcagctacctaatagctggctagacgagcagctgctgtgctgtgagacgc

SEQ ID NO: 155820 - DNA, 643 bp, Zea Mays
ttatttgcttatgtattgggatatgttggtgcttcgttttaataaggcgtactaaataactgtttcagttaggctatcttcagcaacttcctctaaatttcatcctctaaaagaatattcttcgtcctttacagtacactctaaaaaatttcatcctctatatctctaccatctccagcaacgtttcttaaattttgtcctctatatcccatgttctatattttttctgacagatgtgggtccgacccatgctccaatgtcgttgcctcctatgagctcttggtcccatgagctgcatgtgggccatcctcgtcgtatcagcactatgcccctgctggccggctgcgtagcgaacacacagaggaacgctaaatgtagcacgtgtagacagcgtccggtattttaccgaaggctttaccgtctgttgctggaccagcaatagagctcggcgtcctgtaaatttggcggacaggaccacatacaggtccttgttggacacagtcttagtcctgtgagttccaggttttcgcttgtggtacctatgaacatgaaacctgtttactttgaggaatgtactttatttccatcttaagttagtctattcaaacggaatatggatatattaaccgaaattttctgcagt

SEQ ID NO: 155821 - DNA, 1909 bp, Zea Mays
gagatatgcgccggtgtcttccactccgtccctgggccaaccgggtggtggtgtcagcgccggtgtcttcctctccgtccctgggcttgggtttccatggcggtggcgagggtaacgccgacctcagccctattactcggaggtccaaccagatagccttttgtacttctacagtgctgcgagagcaaggagagtaggagcccaaagccccaaacgctctttgtttcgctctgcgtgcatgcacgcgtgttcgatgcattaggacggactttgaagaggctagagcaacagttaccgtgtaggtgagctgaatgaaattggccaggagaggaaacaatcggtctataaaaaagtttatagctaatttagataagatcatactttcttatgattgaataattctctgtctgtgttctaactgcgtcctttctcagtgttatactgtcccaatttacagaacaacagatgaaccgtaatgagtcattccgaagatagttgaagtccagtgttattaccgcaattaatatctacctctccacattatgccccttatcttactccatcagtacgaatggctgatattaatgtgtctcattttcagttaatctagctgttgtatctaacttagatatcaggctgctgaaattgcttaaagaccattaatatctctgatatgtaagtgcctgtgaattgccctatatgcttaattacttcagtatgataaatgactcatttttgtgacaatgcttttcgatgatgtatggaagcatggactgttatttcctttccattctgaagatgcaaggtcaattccctcactccatcaagcaaatgtgtttacttatgagattgagatgcgagcttaagttgctcacagtattcaaataaaatcacctacttattttgctcctgaagtaaaccatgggcgattctcttcattagttcaaacaaacacatctactcatgtacccttttctggtggagctagagaacaacaagttcactttactcctcaaccaaaccaagtaagaaaccacttcattttctcacttctgagagttctttgccaaagaaagtacgtgaatctatgaattaatcatgatatttgatatttgatagttgaatctgtttgtattgatcttgagcattatgatattctgaactgagatagttcattacttgtcctagcactttccatcgctgcattatattttatccgccagcttatatctttcactgccctttctcttgggtaagtatgtttacctcttgtaagttgtaactggttagttgagttttacaacgttatgtctgttctaatggcaatttctctatctggacaaccactgcctggacaagcagtaatggttaagccatctgaggctgaaaagaacttagctcaggcaaatgtgacatcaggtggtgccgcttcaggtggagcaagaaagttgtatgttggcaatcttcactcaaatattaccgaagaccaattgagatagatgtgggtccgacccatgctccaatgtcgttgcctcctatgagctcttggtcccatgagctgcatgtgggccatcctcgtcgtatcagcactatgcccctgctggccggctgcgtagcgaacacacagaggaacgctaaatgtagcacgtgtagacagcgtccggtattttaccgaaggctttaccgtctgttgctggaccagcaatagagctcggcgtcctgtaaatttggcggacaggaccacatacaggtccttgttggacacagtcttagtcctgtgagttccaggttttcgcttgtggtacctatgaacatgaaacctgtttactttgaggaatgtactttatttccatcttaagttagtctattcaaacggaatatggatatattaaccgaaattttctgcagt

SEQ ID NO: 155822 - DNA, 1689 bp, Zea Mays
atgggcaatcgactgcggagacggtgtgcgagagcttcggacgcggataggtctgcggcgagctgcgtgacctatgttggcgtggagctgaggcagaggagcgtctccgggtacgggagggtggtggcagcattcgcggatgatgggaccagcagctgcggagacggtgtgcctgtctccatggatgccgtagctgtgctcgacgccttctccgccgcgccatggcaccagctccgcccaacagcttggtgcagatccacgcgcttcgcgtcacaggcgtgccacgccaccgccccattcgctcgcgacgactggcaggccgcctgcgccatccacgctagcaacagcacgggcggtgacggccacgatgccagcagcaacacgcagccagcgccacgggtcaacggccagaagccctcgccagccctagaggcgacgccgacgctaatgccggacgagctagatctggtgctcgtgtccaacctccccaggccgctcagcatcaacgacctgtccccggcgcccatgcacacaccgcagctccgcgtggcataccagggcgtcccgggcgccaacagcgaggcgaccgccgccaaggcctacccgggctgcgatgccatcccctgcgaccagttcgaggtggccttccaggccgtcgagctctggatcactgaccgcgccgtgctccccatggagaacccccttggcggcagaatccaccgcaactacgacctcctcctccggcaccgcctccacatcgtcggggagcaccatggatcaatgtatggtcctggatcctacaagggatgccagcaaggtagcaaatttggtggcagtactacaagttggagttctgttggccgcagatttggtactatcgacttgagtggcaatcaacaaaggggcaacatgccattttgtagtcacaatggctctctagagttcatgaatgagcaaaaccatgggccacacgctacaaaacctaaggtacaaggcatagagaacacctcaagagatgagagaagcgagaaaattgttcctctgattgatagtgaactgtacaatcgctctgattttataactgagtacaaggatgccaaattctttgtaataaagtcctacactgaggaccatgcacataggagcattaagtataaagtttgggccagcacagccagcgggaacagaaagctggattcttcttaccatgcagccaaagagaaagaagagcattgccctattttcttgtttttctcggttaatggaagtggccaattctgtggcatggctgacatgattggatctgtcgatttcgacagaagtgttgattattggcagcagaataagtggagtggccagttccctgtgaagtggcacataattaaggatgtaccgaacaatcttctgtggcacatcattcttgagaacaatgacaataaacctgtcacaaatagcagggacacacacgaggtgtccctagaaaggccactgtgctacaacagccaacaggttcgattaggttggcatgatgctggtacctatgacaagaacattatcgagtggcccaagtgcagtggcgctaatggtagcttgagattcaaagtcgagttgaagcatggggccaatgctgatcttgtgaatgctctgaagctgatcccgccttcaacgacgcccgaaccccatccgtga

SEQ ID NO: 155823 - DNA, 154 bp, Zea Mays
gctctatcttctttccatctagaggagttgttttaagagtggtgtatttggtggtgtgtgtctgtaagtctgttgttcgtgttttggggtttcaccccttttctcttcttaatacaaaaatacgcagatctcctgcgtattcaagaaaaaaaaa

SEQ ID NO: 155824 - DNA, 497 bp, Zea Mays
cacggtctgacgagcctgctaccgtcggcacgggaactgagcgcgctatcgccccgtcgccgcgtgctagcctcgaccgccacgagtagtccacacaacctgctctagtggtcagcgagccttgacgtatcctgcgggagacttacgacgatgtgaagacagacctgcggacaaactattatggcacaaaacaagtaatcgagactttactgcctctgcttcaagcgtcctctgatggaaggattgtcaacgtctcctctcagttcggccagatacgagtgaccatccttggactcatgtctatgaccgtgttcctcaaaataaagatgtcacatgggcagattgaaggttgtcaaatctttggcatttccagatgaaggcaatgttaggacatacgtggctctttttgcaggtatatacatgtcaatatcttggactactaaaataaacagaattgctaaagacaatgatgttgataaacacaacactactatacg

SEQ ID NO: 155825 - DNA, 1794 bp, Zea Mays
acacgacgcgacgtagggcctaggcccgcggcccgcggcccgcgggcgctgtggtgcgccttttttttaccatcgagacaacacgacgaggccagccacgcgcaaaccgaatccaccaacgtcaaacgaccgcaccaaccaatccacttcgccggcgatccgtctcatctcgtcgcgtctccggcgccggcagacacgggtaacgcggctccgagatcggcgggcaggatgatgatgctgatcgattgctcggggtgccgtaccccgttgcagctgccgcacggggcgccctgcatccgatgcgccatctgtggggccgtcacgcacatcgcccccgcccctcccgccgagcccaaccgcggcgccgtacaaccggcgccggggtgggcgccgccgccgccgccggtgcacggacggaagcgcgccgtggtgtgcgggatttcgtatcggtactcgcggcatgagctgaagggctgcatcaacgacgccaagtgcatgcgccacctgctcatgacgcgcttcaacttccccgacgactccatcatcatgctcaacgaagaacaaacggacccctacaaaatcccaacaaagcataacataaggatggccatgtattggcttgtgcaaggttgtcaacctggagattcattggtgttccattattctgggcatggatcacaacaaagaaattacagtggagatgaggttgatgggttcgatgaaaccctctgcccgttggattttgagacacaagggatgattttggatgatgagataaatacagcattagttcgaccacttcctcatggagttaaacttcatgcactcattgatgcttgtcatagtgggactgcacttgatttgccttatctctgcagaatgaacaggagtgggcaatatgtatgggaagatcaccgaccgcgatctggtgtctggaaaggcactagtggtggggaagctatttcctttagtggttgtgatgatgatcagacctctgcagatacctctgctttatcaaagatcacttcgactggtgcaatgacattctgcttcatccaagctattgaacgtggacagggcaccacctacggtagtatcctgaactctatgcgttccacaatacgcaacacaggtgactcagcgggtgtaggtggcggtgctgttacatcactaattacaatgcttcttactggagggagcctttctgctggtggtctgagacaggagccacaactgacggcgtgcgagccatttgatgtctatgcgaagcccttctccctatgacgtgttcatagtattgcccaatgtactatatatctcctcccatttcacgttatcattatgtacatttcggtattaaaccttgttcgtttgtgtcggattgcacctgtaatcgttccagctaatcaaagtttatataaattagagaagcaatccggcacaaacgaacaagaccttagaagtcctccatccatccagattgttaacaacgcgtggaattgccctttatttccatgccctcacaatgttcagtgcacagttgttaaaggagagtacaatttgatgcctcagatgctgcaatttcatttttctagttttttccttttctcctcgaatcattgttattttacagcagaaaggttaaagtatagtttggttttgaagctttcctgtttgacagtgttagtttataaagtatgaatgaggtattggtaaggaagataagtatacattgtttatttcacagatataatccctatatgcatgaataatttttgtccacgctggcccgac

SEQ ID NO: 155826 - DNA, 88 bp, Zea Mays
tgtttctttctctcttcgagcatgtacagaaactaccagtttcgtggttgctggcctcgctggttggagaaacaacacctgccgccgg

SEQ ID NO: 155827 - DNA, 1263 bp, Zea Mays
ctccacctcgccatcgtcccatgtctctctcctccgccggccaccaccccctcccggcccgaccaaccccgaaccccacttccaattagatgcatcaccaccaccaccaccccgcggccgtgctggagtctgcggccccggcggcagaccctccgcccccgccggtcctcgacccgtcctccttacgcatccacatcccgtcaagcccgcaccatgcgctgccctccaccccgcacaagcgccccgttgtcatgacctcgtcctcctcgtcgtccacccccactcgcccctcgccgtcgcccttcaccccgccgcggaggcgcaaggtccccgcgccagctgctcccgcggggggcgcagcggccaggaatggtgacacctacgcgggagagtactttgctgataggatgcacggctttggaatctacagctttgccaatggtcatagatacgagggagcatggcatgagggtagaagacagggtttaggtatgtatagtttcaggaatggagagacacaagctgggcactggcaaaatggagttcttgatactttatgcacccagaactttatccctggatcacctattgctgtgaaccattccaaggtcctcaacgcagtgcaggaagcgagaagagctgcagagaaggcctatgacatcccaagagtagatgatagggtgaacagggccgttgcagcagctaataaagcagccaatgcagccagggttgctgccgtgaaggctgcacaaaagcgcaaccccaataatggtgatgatctaccactgtcagtagtgtgacaatgaaggaaatatatgttggcatgaagctgcttcgctatgccatcgcatcacccattgcccggcataaccttcagcttcccagtaggggaagccactgctcgtccatcaggccttggccagtggcgacacctgagtcattgccggcagcattcaagcttgcgggagaagaccaaattttcatacatatacatatttgtggtgtcttttgcgatgcagcagaactactgctctgaggactttccattgttcaaggtaactgggcgcgaggccagcagtaggtttctcctgcattttctgcagtgtaatactcacccaatgttagcgatacgacgaatgcacaccccaacatcaggagacaaaaacctactccctccgtttccgtttcaaactatgaatcattttaactttttttgagtcaaagcatcttaaatttaactaaaattatagagaaataaaaaaa

SEQ ID NO: 155828 - DNA, 1373 bp, Zea Mays
ctccacctcgccatcgtcccatgtctctctcctccgccggccaccaccccctcccggcccgaccaaccccgaaccccacttccaattagatgcatcaccaccaccaccaccccgcggccgtgctggagtctgcggccccggcggcagaccctccgcccccgccggtcctcgacccgtcctccttacgcatccacatcccgtcaagcccgcaccatgcgctgccctccaccccgcacaagcgccccgttgtcatgacctcgtcctcctcgtcgtccacccccactcgcccctcgccgtcgcccttcaccccgccgcggaggcgcaaggtccccgcgccagctgctcccgcggggggcgcagcggccagggcctaccgagtgccggaagctgctgcatgagtggggtctgggaaagggataaaccgaggcaagcctttcgcaagcaaatgtggagaggctacttcgaacctgtgacccggaatggtgacacctacgcgggagagtactttgctgataggatgcacggctttggaatctacagctttgccaatggtcatagatacgagggagcatggcatgagggtagaagacagggtttaggtatgtatagtttcaggaatggagagacacaagctgggcactggcaaaatggagttcttgatactttatgcacccagaactttatccctggatcacctattgctgtgaaccattccaaggtcctcaacgcagtgcaggaagcgagaagagctgcagagaaggcctatgacatcccaagagtagatgatagggtgaacagggccgttgcagcagctaataaagcagccaatgcagccagggttgctgccgtgaaggctgcacaaaagcgcaaccccaataatggtgatgatctaccactgtcagtagtgtgacaatgaaggaaatatatgttggcatgaagctgcttcgctatgccatcgcatcacccattgcccggcataaccttcagcttcccagtaggggaagccactgctcgtccatcaggccttggccagtggcgacacctgagtcattgccggcagcattcaagcttgcgggagaagaccaaattttcatacatatacatatttgtggtgtcttttgcgatgcagcagaactactgctctgaggactttccattgttcaaggtaactgggcgcgaggccagcagtaggtttctcctgcattttctgcagtgtaatactcacccaatgttagcgatacgacgaatgcacaccccaacatcaggagacaaaaacctactccctccgtttccgtttcaaactatgaatcattttaactttttttgagtcaaagcatcttaaatttaactaaaattatagagaaataaaaaaa

SEQ ID NO: 155829 - DNA, 1846 bp, Zea Mays
cctccgcccatctccacctcgccatcgtcccatgtctctctcctccgccggccaccaccccctcccggcccgaccaaccccgaaccccacttccaattagatgcatcaccaccaccaccaccccgcggccgtgctggagtctgcggccccggcggcagaccctccgcccccgccggtcctcgacccgtcctccttacgcatccacatcccgtcaagcccgcaccatgcgctgccctccaccccgcacaagcgccccgttgtcatgacctcgtcctcctcgtcgtccacccccactcgcccctcgccgtcgcccttcaccccgccgcggaggcgcaaggtccccgcgccagctgctcccgcggggggcgcagcggccaggtatctccttcgctgcctgcacctccgcctgcgcatcctcctcctcatctctctcccctccctctactttctctccccgacccccgccatcctcccgcactccctcctcgccgacttcctttccgctgcggccttctcctgcgcgctcctccttctcctctgcctctccctgccgcggcttcccttcgcgctgccgctgccgctccccctccgccgcgcgcgccgatcccctatcctttggtccatcggttcctcgccttccgcatccgcaaccacccccaccaccggccatttcgttcaggtttatagcaacggcgacgtctacgagggccagttccaccgcggccgctgcactggcagcggcgtctactactactacatgagcgggagatatgagggggattgggtcgacggcaagtacgacggcttcggcgtcgagacctgggccagaggtagccggtaccggggccagtaccggcatggactcaggcatggctacggcgtgtacaggttctacactggggatgtgtatgctggggagtggtcaaacggccagagccatggatatggcgttcacacctgtgaggacggtagccggtatgttggtgagttcaagaggggcgtcaagcatggtctcggccactaccatttcaggaatggtgacacctacgcgggagagtactttgctgataggatgcacggctttggaatctacagctttgccaatggtcatagatacgagggagcatggcatgagggtagaagacagggtttaggtatgtatagtttcaggaatggagagacacaagctgggcactggcaaaatggagttcttgatactttatgcacccagaactttatccctggatcacctattgctgtgaaccattccaaggtcctcaacgcagtgcaggaagcgagaagagctgcagagaaggcctatgacatcccaagagtagatgatagggtgaacagggccgttgcagcagctaataaagcagccaatgcagccagggttgctgccgtgaaggctgcacaaaagcgcaaccccaataatggtgatgatctaccactgtcagtagtgtgacaatgaaggaaatatatgttggcatgaagctgcttcgctatgccatcgcatcacccattgcccggcataaccttcagcttcccagtaggggaagccactgctcgtccatcaggccttggccagtggcgacacctgagtcattgccggcagcattcaagcttgcgggagaagaccaaattttcatacatatacatatttgtggtgtcttttgcgatgcagcagaactactgctctgaggactttccattgttcaaggtaactgggcgcgaggccagcagtaggtttctcctgcattttctgcagtgtaatactcacccaatgttagcgatacgacgaatgcacaccccaacatcaggagacaaaaacctactccctccgttt

SEQ ID NO: 155830 - DNA, 1320 bp, Zea Mays
ccgccatttctatacccctctcgccctgcgccccgtcacctctctggtccctctcctcttgctttgatgctttctctctccatctcgtttcccccgcctgcccagccagcgcaaaccctagcccgtactgcgaggctcttggcagcggataactggacctgtccgcatgaatcgggggagagaaactggcggtaacttacgtgaatcgggtttgtttagtggctgcgacggcgacggcggcgcagggatggaccgtaagcgcattaaggacgtgctcgagaagcacctggagaggtcgtcgccgtccacctccaggggcgtcgtgtccaaggagagggagcgcctcgctgccgggaaactgccggcgtcgcttggcaaggcggagaaggtgtctgatggtgaggaatttgaaactgacagtgaagatgaagattctgatatcagtggttctgagagcgagggcacatcctggatttcatggttctgtacattgcgaggcaatgaattcttttgtgagatcgatgatgactatatacaggatgattttaacctttgtggtctgagtatgcaggtgccatattatgattatgcacttgatctcatcttagacattgagtcttctgatgatacatacactgaggagcgaaaagaatttatcgagttgtctgcagagatactatatggattaattcatgcacgatacatcttaaccagcaagggtctagctgcaatgttggagaagttcaagaatcgtgactttggtggatgccccagagtgtactgctgtggccagccctgtcttccagcaggtcaatcggatgttcctagatcgagcacagtgaagatatactgtccaaaatgcgaagaacttaactatccaatatccatgtaccaaggcagcattgatggatcatacttcgggacgacgttccctcatcttttcctgatgacctatccgcacttgaagccgcagaagccgccacagcaatacactccaagagttttcggcttcaaacatcacaagccgtcatgacagagctgcactttcagcagaaacaccctttgcacctaggatttagggagagcaccgtggccttcaaatattgttgcctgatcgatgtacgaattcgcgaccttgggtcctgctgcaaactgctgtcaaattgtacgtatctgttttctcgtattactattgcgtaacttaggttttctcagtctcacactcacttgatcagagtatgtcaacctgcatgacatggtttcacgtcagtttacacgaaacctttgccgtcctcgtgttcatgtcaatatatggccaat

SEQ ID NO: 155831 - DNA, 1377 bp, Zea Mays
ccgccatttctatacccctctcgccctgcgccccgtcacctctctggtccctctcctcttgctttgatgctttctctctccatctcgtttcccccgcctgcccagccagcgcaaaccctagcccgtactgcgaggctcttggcagcggataactggacctgtccgcatgaatcgggggagagaaactggcggtaacttacgtgaatcgggtttgtttagtggctgcgacggcgacggcggcgcagggatggaccgtaagcgcattaaggacgtgctcgagaagcacctggagaggtcgtcgccgtccacctccaggggcgtcgtgtccaaggagagggagcgcctcgctgccgggaaactgccggcgtcgcttggcaaggcggagaaggtgtctgatggtgaggaatttgaaactgacagtgaagatgaagattctgatatcagtggttctgagagcgagggcacatcctggatttcatggttctgtacattgcgaggcaatgaattcttttgtgagatcgatgatgactatatacaggatgattttaacctttgtggtctgagtatgcaggtgccatattatgattatgcacttgatctcatcttagacattgagtcttctgatggtgagattgttgttccttaaggaagttgatgcatattggtttgcctttgaatttatgatacatacactgaggagcgaaaagaatttatcgagttgtctgcagagatactatatggattaattcatgcacgatacatcttaaccagcaagggtctagctgcaatgttggagaagttcaagaatcgtgactttggtggatgccccagagtgtactgctgtggccagccctgtcttccagcaggtcaatcggatgttcctagatcgagcacagtgaagatatactgtccaaaatgcgaagaacttaactatccaatatccatgtaccaaggcagcattgatggatcatacttcgggacgacgttccctcatcttttcctgatgacctatccgcacttgaagccgcagaagccgccacagcaatacactccaagagttttcggcttcaaacatcacaagccgtcatgacagagctgcactttcagcagaaacaccctttgcacctaggatttagggagagcaccgtggccttcaaatattgttgcctgatcgatgtacgaattcgcgaccttgggtcctgctgcaaactgctgtcaaattgtacgtatctgttttctcgtattactattgcgtaacttaggttttctcagtctcacactcacttgatcagagtatgtcaacctgcatgacatggtttcacgtcagtttacacgaaacctttgccgtcctcgtgttcatgtcaatatatggccaat

SEQ ID NO: 155832 - DNA, 1616 bp, Zea Mays
ccgccatttctatacccctctcgccctgcgccccgtcacctctctggtccctctcctcttgctttgatgctttctctctccatctcgtttcccccgcctgcccagccagcgcaaaccctagcccgtactgcgaggctcttggcagcggataactggacctgtccgcatgaatcgggggagagaaactggcggtaacttacgtgaatcgggtttgtttagtggctgcgacggcgacggcggcgcagggatggaccgtaagcgcattaaggacgtgctcgagaagcacctggagaggtcgtcgccgtccacctccaggggcgtcgtgtccaaggagagggagcgcctcgctgccgggaaactgccggcgtcgcttggcaaggcggagaaggtgtctgatggtgaggaatttgaaactgacagtgaagatgaagattctgatatcagtggttctgagagcgagggcacatcctggatttcatggttctgtacattgcgaggcaatgaattcttttgtgagatcgatgatgactatatacaggatgattttaacctttgtggtctgagtatgcaggtgccatattatgattatgcacttgatctcatcttagacattgagtcttctgatgatacatacactgaggagcgaaaagaatttatcgagttgtctgcagagatactatatggattaattcatgcacgatacatcttaaccagcaagggtctagctgcaatgttggagaagttcaagaatcgtgactttggtggatgccccagagtgtactgctgtggccagccctgtcttccagcaggtcaatcggatgttcctagatcgagcacagtgaagatatactgtccaaaatgcgaagaacttaactatccaatatccatgtaccaaggcagtatccttttgatttgttcttttaattgttttgtacagtatgatatttccatacttccatttgcatctactggccattttatgctgttcttttcaagcgatttatattttgaccaccattcgaaactattgaagtaatatattttttgtttgcaacatcatttatgttttccctgatctccatgccaacagcctggtgaaccacactgaacatttcccccctgattacttgcctcaagtcctcaatttttttgtcagtaaactctttctcggtaaataataatcgtagatggatatttgtaagttgccattacttgcccttgcatgtcctttactttacccaggcattgatggatcatacttcgggacgacgttccctcatcttttcctgatgacctatccgcacttgaagccgcagaagccgccacagcaatacactccaagagttttcggcttcaaacatcacaagccgtcatgacagagctgcactttcagcagaaacaccctttgcacctaggatttagggagagcaccgtggccttcaaatattgttgcctgatcgatgtacgaattcgcgaccttgggtcctgctgcaaactgctgtcaaattgtacgtatctgttttctcgtattactattgcgtaacttaggttttctcagtctcacactcacttgatcagagtatgtcaacctgcatgacatggtttcacgtcagttt

SEQ ID NO: 155833 - DNA, 789 bp, Zea Mays
cgatgatgcacccgctctgaacccaacccaccgccatttctatacccctctcgccctgcgccccgtcacctctctggtccctctcctcttgctttgatgctttctctctccatctcgtttcccccgcctgcccagccagcgcaaaccctagcccgtactgcgaggctcttggcagcggataactggacctgtccgcatgaatcgggggagagaaactggcggtaacttacgtgaatcgggtttgtttagtggctgcgacggcgacggcggcgcagggatggaccgtaagcgcattaaggacgtgctcgagaagcacctggagaggtcgtcgccgtccacctccaggggcgtcgtgtccaaggagagggagcgcctcgctgccgggaaactgccggcgtcgcttggcaaggcggagaaggtgtctgatggtgaggaatttgaaactgacagtgaagatgaagattctgatatcagtggttctgagagcgagggcacatcctggatttcatggttctgtacattgcgaggcaatgaattcttttgtgagatcgatgatgactatatacaggatgattttaacctttgtggtctgagtatgcaggtgccatattatgattatgcacttgatctcatcttagacattgagtcttctgatggtgagattgttgttccttaaggaagttgatgcatattggtttgcctttgaatttatggtctgtaacttattttcaatctacttatctttttctgcattcattacttatggtgataaatctcttaatcaatccc

SEQ ID NO: 155834 - DNA, 1674 bp, Zea Mays
atagccgcacggtgcgctgtcgcgtgccgaatcgcttgtgccgtcgtgcggtttcgtctcatctccctttttcgccgcacgccttggcccttttccagtagaagaagcgtcgaaggggacgcgcacatgcgccggcgtggcagagactgacccggccccaaggccgatcaggggaagggcggccgcccctgcctcccggggccagggggctgagctccccgcctcgtctcggcctggcctggttcgccctcgctccgacgcgtggtggacgcaaccagtgcgcgacgcccccggctcctggtccgttccgcagttccgcaccccgcttcgaccaaccaatcgccgccgcgtcgcgtcgcgtcgcctccttttttttccccgccctcccggacggcggcctcgttcgccagaagaaacccaggctgcagccgaaatcctcaagtctccgtcgtctgaccccacctcgacggcccagatccactcgccctcgccgccctcgtgcccctcagtccctcactccctcgcctcctcagcggcgaagacagctgcgaacggggccatttttaggcgggagcgcgggcggcggtgctagcagattggttggtttgagtggttgggccggctcttcgaaacgccccgcggcggcgatgggatgcttccattccacggccaagcggcagcatcctggctacgaggaccccgtggacctcgcctcccagacctccttcagtgttagtgaggttgaggctctattcgagctgttcaagagcataagtggttcagtgattgacgatggcctgatcaacaaggaagaattccagttagcattatttaagaatcagaggaaagaaaatcttttcgctaatcggatatttgaccttttcgatgtcaagaaaaggggtgccattgattttggtgactttgtccgagctctaaatgtgtttcatccaaatatcccaatggatgaaaaaattgatttctcgttcaagctatatgatatggatagcacagggtttattgaacggaaggaggttaagcagatgttaattgctcttctaggagaatcagaaatgaggctatctgatgatatcattgagacaatcctggataagacattctctgatgctgatgcaaatcaggatgggaaaatagatagaacagagtgggagaattttgtcacaagaaatccttccttgatgaagataatgactctgccatacctcaaggacatcacaacaacattccccagctttgtgtttaactctgaagtcgatgatctcgtcacgtgaccacgattttctctccgatgtatagttaacaaggagaacctgtcgagggttacgactggagatttctagcctctggcattatgaatggagggtatattcatgcggctaccaggaagggtgcgtcaaaattgtctgccacagatgtacttgacgagctgtagtttttactcggtgataatgttgatgcttttgtgttggtgatgattgggacttgagttagtatgctgagatgaacatttttcatttttaccagtgggaagtctctattttgtttgtgaaactgcgacgtgcgtgtctgtactgatcaaatatgattcttgtcaaagtagtactgcattctactattttagcgtaaaataaacctcgaagtcccaaaacttgcatc

SEQ ID NO: 155835 - DNA, 1674 bp, Zea Mays
atagccgcacggtgcgctgtcgcgtgccgaatcgcttgtgccgtcgtgcggtttcgtctcatctccctttttcgccgcacgccttggcccttttccagtagaagaagcgtcgaaggggacgcgcacatgcgccggcgtggcagagactgacccggccccaaggccgatcaggggaagggcggccgcccctgcctcccggggccagggggctgagctccccgcctcgtctcggcctggcctggttcgccctcgctccgacgcgtggtggacgcaaccagtgcgcgacgcccccggctcctggtccgttccgcagttccgcaccccgcttcgaccaaccaatcgccgccgcgtcgcgtcgcgtcgcctccttttttttccccgccctcccggacggcggcctcgttcgccagaagaaacccaggctgcagccgaaatcctcaagtctccgtcgtctgaccccacctcgacggcccagatccactcgccctcgccgccctcgtgcccctcagtccctcactccctcgcctcctcagcggcgaagacagctgcgaacggggccatttttaggcgggagcgcgggcggcggtgctagcagattggttggtttgagtggttgggccggctcttcgaaacgccccgcggcggcgatgggatgcttccattccacggccaagcggcagcatcctggctacgaggaccccgtggacctcgcctcccagacctccttcagtgttagtgaggttgaggctctattcgagctgttcaagagcataagtggttcagtgattgacgatggcctgatcaacaaggaagaattccagttagcattatttaagaatcagaggaaagaaaatcttttcgctaatcggatatttgaccttttcgatgtcaagaaaaggggtgccattgattttggtgactttgtccgagctctaaatgtgtttcatccaaatatcccaatggatgaaaaaattgatttctcgttcaagctatatgatatggatagcacagggtttattgaacggaaggaggttaagcagatgttaattgctcttctaggagaatcagaaatgaggctatctgatgatatcattgagacaatcctggataaggttcttttaaacatttcttcagaaatcagatgacattctctgatgctgatgcaaatcaggatgggaaaatagatagaacagagtgggagaattttgtcacaagaaatccttccttgatgaagataatgactctgccatacctcaaggacatcacaacaacattccccagctttgtgtttaactctgaagtcgatgatctcgtcacgtgaccacgattttctctccgatgtatagttaacaaggagaacctgtcgagggttacgactggagatttctagcctctggcattatgaatggagggtatattcatgcggctaccaggaagggtgcgtcaaaattgtctgccacagatgtacttgacgagctgtagtttttactcggtgataatgttgatgcttttgtgttggtgatgattgggacttgagttagtatgctgagatgaacatttttcatttttaccagtgggaagtctctattttgtttgtgaaactgcgacgtgcgtgtctgtactgatcaaatatgattcttgtcaaagtagtactgcattctactattttagcgt

SEQ ID NO: 155836 - DNA, 781 bp, Zea Mays
ggaaagcttttgtgttctttcttggcttgctaaaacttctgtaatccagtaatcgtcctagtgcaggttaagcagatgttaattgctcttctaggagaatcagaaatgaggctatctgatgatatcattgagacaatcctggataaggttcttttaaacatttcttcagaaatcagatggttattgacttattgagtcataaattgttcctgtgacgtatactggaattaagacttacagcaagttatgtggtgatgacagacattctctgatgctgatgcaaatcaggatgggaaaatagatagaacagagtgggagaattttgtcacaagaaatccttccttgatgaagataatgactctgccatacctcaaggacatcacaacaacattccccagctttgtgtttaactctgaagtcgatgatctcgtcacgtgaccacgattttctctccgatgtatagttaacaaggagaacctgtcgagggttacgactggagatttctagcctctggcattatgaatggagggtatattcatgcggctaccaggaagggtgcgtcaaaattgtctgccacagatgtacttgacgagctgtagtttttactcggtgataatgttgatgcttttgtgttggtgatgattgggacttgagttagtatgctgagatgaacatttttcatttttaccagtgggaagtctctattttgtttgtgaaactgcgacgtgcgtgtctgtactgatcaaatatgattcttgtcaaagtagtactgcattctact

SEQ ID NO: 155837 - DNA, 1814 bp, Zea Mays
atagccgcacggtgcgctgtcgcgtgccgaatcgcttgtgccgtcgtgcggtttcgtctcatctccctttttcgccgcacgccttggcccttttccagtagaagaagcgtcgaaggggacgcgcacatgcgccggcgtggcagagactgacccggccccaaggccgatcaggggaagggcggccgcccctgcctcccggggccagggggctgagctccccgcctcgtctcggcctggcctggttcgccctcgctccgacgcgtggtggacgcaaccagtgcgcgacgcccccggctcctggtccgttccgcagttccgcaccccgcttcgaccaaccaatcgccgccgcgtcgcgtcgcgtcgcctccttttttttccccgccctcccggacggcggcctcgttcgccagaagaaacccaggctgcagccgaaatcctcaagtctccgtcgtctgaccccacctcgacggcccagatccactcgccctcgccgccctcgtgcccctcagtccctcactccctcgcctcctcagcggcgaagacagctgcgaacggggccatttttaggcgggagcgcgggcggcggtgctagcagattggttggtttgagtggttgggccggctcttcgaaacgccccgcggcggcgatgggatgcttccattccacggccaagcggcagcatcctggctacgaggaccccgtggacctcgcctcccagacctccttcagtgttagtgaggttgaggctctattcgagctgttcaagagcataagtggttcagtgattgacgatggcctgatcaacaaggaagaattccagttagcattatttaagaatcagaggaaagaaaatcttttcgctaatcgggtatgcatctgcttgacaaccatactcatttgaacttcatcactactatattgtgctttgagaactattgtcatcagttaaatttacatgaaactggcctcagatatttgaccttttcgatgtcaagaaaaggggtgccattgattttggtgactttgtccgagctctaaatgtgtttcatccaaatatcccaatggatgaaaaaattgattgtaggttcttatccttttatttcatttcattgtgatttgttttatctcatctttctaaaaagttcgaactacctgacagtctcgttcaagctatatgatatggatagcacagggtttattgaacggaaggaggttaagcagatgttaattgctcttctaggagaatcagaaatgaggctatctgatgatatcattgagacaatcctggataagacattctctgatgctgatgcaaatcaggatgggaaaatagatagaacagagtgggagaattttgtcacaagaaatccttccttgatgaagataatgactctgccatacctcaaggacatcacaacaacattccccagctttgtgtttaactctgaagtcgatgatctcgtcacgtgaccacgattttctctccgatgtatagttaacaaggagaacctgtcgagggttacgactggagatttctagcctctggcattatgaatggagggtatattcatgcggctaccaggaagggtgcgtcaaaattgtctgccacagatgtacttgacgagctgtagtttttactcggtgataatgttgatgcttttgtgttggtgatgattgggacttgagttagtatgctgagatgaacatttttcatttttaccagtgggaagtctctattttgtttgtgaaactgcgacgtgcgtgtctgtactgatcaaatatgattcttgtcaaagtagtactgcattctact

SEQ ID NO: 155838 - DNA, 1448 bp, Zea Mays
atagccgcacggtgcgctgtcgcgtgccgaatcgcttgtgccgtcgtgcggtttcgtctcatctccctttttcgccgcacgccttggcccttttccagtagaagaagcgtcgaaggggacgcgcacatgcgccggcgtggcagagactgacccggccccaaggccgatcaggggaagggcggccgcccctgcctcccggggccagggggctgagctccccgcctcgtctcggcctggcctggttcgccctcgctccgacgcgtggtggacgcaaccagtgcgcgacgcccccggctcctggtccgttccgcagttccgcaccccgcttcgaccaaccaatcgccgccgcgtcgcgtcgcgtcgcctccttttttttccccgccctcccggacggcggcctcgttcgccagaagaaacccaggctgcagccgaaatcctcaagtctccgtcgtctgaccccacctcgacggcccagatccactcgccctcgccgccctcgtgcccctcagtccctcactccctcgcctcctcagcggcgaagacagctgcgaacggggccatttttaggcgggagcgcgggcggcggtgctagcagattggttggtttgagtggttgggccggctcttcgaaacgccccgcggcggcgatgggatgcttccattccacggccaagcggcagcatcctggctacgaggaccccgtggacctcgcctcccagacctccttcagtgttagtgaggttgaggctctattcgagctgttcaagagcataagtggttcagtgattgacgatggcctgatcaacaaggaagaattccagttagcattatttaagaatcagaggaaagaaaatcttttcgctaatcggatatttgaccttttcgatgtcaagaaaaggggtgccattgattttggtgactttgtccgagctctaaatgtgtttcatccaaatatcccaatggatgaaaaaattgatttctcgttcaagctatatgatatggatagcacagggtttattgaacggaaggaggttaagcagatgttaattgctcttctaggagaatcagaaatgaggctatctgatgatatcattgagacaatcctggataagacattctctgatgctgatgcaaatcaggatgggaaaatagatagaacagagtgggagaattttgtcacaagaaatccttccttgatgaagataatgactctgccatacctcaattaacaaggagaacctgtcgagggttacgactggagatttctagcctctggcattatgaatggagggtatattcatgcggctaccaggaagggtgcgtcaaaattgtctgccacagatgtacttgacgagctgtagtttttactcggtgataatgttgatgcttttgtgttggtgatgattgggacttgagttagtatgctgagatgaacatttttcattttt

SEQ ID NO: 155839 - DNA, 416 bp, Zea Mays
aattaatgatacaatagtcgaaacatactcataaattatccatctagattggagcgaggtgccatatcaggttatgggctgtcatgtgggaccaccggtatacccacctgacccatgccagggacacgcagtgcacgcaggaagtgccttcgaactacctgacagtctcgttcaagctatatgatatggatagcacagggtttattgaacggaaggaggttaagcagatgttaattgctcttctaggagaatcagaaatgaggctatctgatgatatcattgagacaatcctggataagacattctctgatgctgatgcaaatcaggatgggaaaatagatagaacagagtgggagaattttgtcacaagaaatccttccttgatgaagataatgactctgccatacctcaagtaa

SEQ ID NO: 155840 - DNA, 1991 bp, Zea Mays
aagacctggatcaactaaaacctggctgttactgttcctggcctggaactgaaaccgggctgccgaaaatagtagagatttcctagttttgacaaatttctcgcttttggaaaggaaaaaatcaagacgaggccgcacggagcccacggaaaaaggcaaggcgaccgccactcgccatcgtcagttcgtcacccacccactcacccatcccgatccaacacggccacgccgcgcggctgcggagcagcggagacgggcgcccgcaccaaccacggcacgggctccgcaacgatgcggcgccgtactcccgttggctcgtgccgtttcatcgcgctaccttccttccttcacggagcgactgcgaccaatcccgcaaaaccacccacgcggccgccgcggtgggcgatgccctccgcagccggtcatttcaccgcggaggcgcggcccacgcccgcggcccaccaccgcaccgcctcctccttttatgaccggttccccacctccgcctccgttccgcatctccaccaccatcaccaaaccctaatcgcctcccttcgccaccgccgccgccgcagctgaccggccatgtcttcctcgtgttccgacgcgtccagggacgatgccgtctcatctcccgacctcccccctctggctgcacccgtcgccgcggcggctgctgcggccgcggcagcggcctcctcggggggcggcataggactcgggggcgtgggctccggccggaggctgccgccgccgtgctggacacacgaggagactctcgcgctcatcgaggcgtaccgcgacaggtgggaggcgctgcagaagggcaacctgagggccgcggactgggacgacgtggccaacgccgtcaccgcgcgctgcgggcggttccccaccgccacgcccaagtccggcgtgcagtgccgccacaaggtcgagaagcttcggaagcgataccgcgctgagcggtcacgctctgcggggcggtctaaggggcccaaatggccgttcttcccgctgctccacgacctcgctggtggcggcgtgccggacccgagtccgaacgccatcgtcaagatcaagaccaagggccccgccccgccggcgtcctcgccttccccggtgtcctcgccttcctccgaggtggaggctgtgcggagcaggagcctgcacgggctcatctccaacggcggtgccgggagcgggctgcgcttcaccatccccaaggcctcgcgcacgaagcccgtcgcggcggcagctgtgaagtcagagaggagcggcagcgaggacgacgccgagtcagaggcaatggcggaggtggctgccgcactccgggctgtcggggaggggttcctgcgtatggaggagcgcaggctggagctatcgctgcagatggagaaggaacgtatggaatcggagatgaaacgcacccagacgatgctggacgcccagcagctcttcctcgaggccttcctcggtaagcaactgcagcacaagaaggcccatgtctccccttcctctgccgcaatggaagaggactgatcgatcgatgtatcccggctgctctctgtcaaacttgtgttcatatgcttgcttgatctttgttaactgttgttcatgctggtagttgtggacttcgatgctagtagaattaatcttattgtgtatggatggtgaatttaaccgaacaaaggggtttgggggcaaaggatgttgctgtagggatatagataaggttggaaggatgatgtttgaagtagaaattaggaagtctcggttgtaattagtgaactacatgtgtttggtttcgaggaggagagcaggagtttctggcagctgtggcgtgagggatgtgccggaatttggttggtgggttttttaaagtttaaactggtggattatatagtggtatagatgaacttgtgatggtgacctgctgctgttatgttgaaacactgcaacttgttccaatggcatatcctcgttgccaa

SEQ ID NO: 155841 - DNA, 325 bp, Zea Mays
ttgcgacgtagcacggtgggagagatggcgaagcccgctccagcgcgtgaccaacttggcttggggaagttccagcacacgggtgttcaatgacgcgcgacggacgggagctgcgaagcagcgggggggggggggggggggtctcctgcgttcgacgacgcccggtcgcggcgcggctccctgcgcacggcagtgggcatggcgtggctggcaaggtgcttcggcgaggcactacggcgaagccccgacgaggagggtcgctacggtatgcgcaacgtggattgtgtgtagtggggcagttgctactaggcttgaaggagcgtca

SEQ ID NO: 155842 - DNA, 1459 bp, Zea Mays
cgcgaaacgcgccaacaaccagatcaatggagtgaggcagtgactcagctcagggcctcgggcccagcacaccaaccctccagtagtatctctgacgtgcgggctccgccagacaacgagctcacgagtcacgatccaaatcccttttccactccgccggacgtcgagagaggcggtgggtgcgggacgcgaaggcgaagccctagccccctccctgccgcggacgccgatggacccacctcgcgccgtcgcctttcttctcatactcctgcccgtgctcgccccggtggcctccggtgtacctttcgtcgtcctacacgggattggcgacgagtgcgggaacgatgggctgtcatccttcaccaagatgcttggggagtggtcaggctccaagggttactgcattgaaattggaagaggagcatgggactcttggttaatgccacttcaagagcaggcaaatacggtttgtaagaaggtcaagaaaatgaaagagctcagtgaaggttacaatatagttggcctgtctcaggggaacttaattggcagggctgtaatcgagtactgtgattgtggacctccggtcaagaatttcatatcaattgggggtcctcatgctggtacagcttcagtgccactttgtggttctgggtttctttgtattcttattgatgatctgattaaatcagagatatattcagactatgtgcaggcgcatcttgcccctagtggttacctaaagatacccactgatatggaagattatttgaagggttgcaaatttcttccaaaacttaacaatgagatcccaagtgcaagaaatactacctataaagaaagattcagcagcttggaaaacttggtactgatcatgtttgaggacgatgcagtattaatacctcgggaaacagcgtggtttggttattaccctgatggagcctttagcccagtgctgccccctcaagagacgaagctgtatacagaagattggattggcttgaagaccctggacgaggctgggcgtgttaaattcgtgtctgtgccaggaggtcacctgcgtatcaccagaagcgacatgaagaagtacattgtgccttacttgacgccggaggcgtcatccaagaagaacatacacatacaccggatgctgtcgctttgagcgagtatctaacaaggtttgtatcggtggccattgtgccctgacacgtgggccatgtgttgacgccttgtaaatacgctgaacacgaagggaggaaatgatagctccttggaagagtggatccgaacttgtgaagtgaagcgtgtttggtcctttccgtttcctatctgacaaacaaatatgtccatgccgtggccacaacacgcataaatcattatgcacatttcctattgagtaaaatacaattccggtctgtaaacttgtcgaaccatgtcatgccggttcataaacctttaaaat

SEQ ID NO: 155843 - DNA, 1396 bp, Zea Mays
cgcgaaacgcgccaacaaccagatcaatggagtgaggcagtgactcagctcagggcctcgggcccagcacaccaaccctccagtagtatctctgacgtgcgggctccgccagacaacgagctcacgagtcacgatccaaatcccttttccactccgccggacgtcgagagaggcggtgggtgcgggacgcgaaggcgaagccctagccccctccctgccgcggacgccgatggacccacctcgcgccgtcgcctttcttctcatactcctgcccgtgctcgccccggtggcctccggtgtacctttcgtcgtcctacacgggattggcgacgagtgcgggaacgatgggctgtcatccttcaccaagatgcttggggagtggtcaggctccaagggttactgcattgaaattggaagaggagcatgggactcttggttaatgccacttcaagagcaggcaaatacggtttgtaagaaggtcaagaaaatgaaagagctcagtgaaggttacaatatagttggcctgtctcaggggaacttaattggcagggctgtaatcgagtactgtgattgtggacctccgtctgggtttctttgtattcttattgatgatctgattaaatcagagatatattcagactatgtgcaggcgcatcttgcccctagtggttacctaaagatacccactgatatggaagattatttgaagggttgcaaatttcttccaaaacttaacaatgagatcccaagtgcaagaaatactacctataaagaaagattcagcagcttggaaaacttggtactgatcatgtttgaggacgatgcagtattaatacctcgggaaacagcgtggtttggttattaccctgatggagcctttagcccagtgctgccccctcaagagacgaagctgtatacagaagattggattggcttgaagaccctggacgaggctgggcgtgttaaattcgtgtctgtgccaggaggtcacctgcgtatcaccagaagcgacatgaagaagtacattgtgccttacttgacgccggaggcgtcatccaagaagaacatacacatacaccggatgctgtcgctttgagcgagtatctaacaaggtttgtatcggtggccattgtgccctgacacgtgggccatgtgttgacgccttgtaaatacgctgaacacgaagggaggaaatgatagctccttggaagagtggatccgaacttgtgaagtgaagcgtgtttggtcctttccgtttcctatctgacaaacaaatatgtccatgccgtggccacaacacgcataaatcattatgcacatttcctattgagtaaaatacaattccggtctgtaaacttgtcgaaccatgtcatgccggttcataaacctttaaaat

SEQ ID NO: 155844 - DNA, 1492 bp, Zea Mays
cgcgaaacgcgccaacaaccagatcaatggagtgaggcagtgactcagctcagggcctcgggcccagcacaccaaccctccagtagtatctctgacgtgcgggctccgccagacaacgagctcacgagtcacgatccaaatcccttttccactccgccggacgtcgagagaggcggtgggtgcgggacgcgaaggcgaagccctagccccctccctgccgcggacgccgatggacccacctcgcgccgtcgcctttcttctcatactcctgcccgtgctcgccccggtggcctccggtgtacctttcgtcgtcctacacgggattggcgacgagtgcgggaacgatgggctgtcatccttcaccaagatgcttggggagtggtcaggctccaagggttactgcattgaaattggaagaggagcatgggactcttggttaatgccacttcaagagcaggcaaatacggtttgtaagaaggtcaagaaaatgaaagagctcagtgaaggttacaatatagttggcctgtctcaggggaacttaattggcagggctgtaatcgagtactgtgattgtggacctccggtcaagaatttcatatcaattgggggtcctcatgctggtacagcttcagtgccactttgtggttctgggtttctttgtattcttattgatgatctgattaaatcagagatatattcagactatgtgcagtaagtaaatgaattgagggttgtgaaattacaggcgcatcttgcccctagtggttacctaaagatacccactgatatggaagattatttgaagggttgcaaatttcttccaaaacttaacaatgagatcccaagtgcaagaaatactacctataaagaaagattcagcagcttggaaaacttggtactgatcatgtttgaggacgatgcagtattaatacctcgggaaacagcgtggtttggttattaccctgatggagcctttagcccagtgctgccccctcaagagacgaagctgtatacagaagattggattggcttgaagaccctggacgaggctgggcgtgttaaattcgtgtctgtgccaggaggtcacctgcgtatcaccagaagcgacatgaagaagtacattgtgccttacttgacgccggaggcgtcatccaagaagaacatacacatacaccggatgctgtcgctttgagcgagtatctaacaaggtttgtatcggtggccattgtgccctgacacgtgggccatgtgttgacgccttgtaaatacgctgaacacgaagggaggaaatgatagctccttggaagagtggatccgaacttgtgaagtgaagcgtgtttggtcctttccgtttcctatctgacaaacaaatatgtccatgccgtggccacaacacgcataaatcattatgcacatttcctattgagtaaaatacaattccggtctgtaaacttgtcgaaccatgtcatgccggttcataaacctttaaaat

SEQ ID NO: 155845 - DNA, 465 bp, Zea Mays
tttctttctttttttagttttctaattctattttcttttacacatatatatatatatactccattaaaatctatattcaagtagagttttaaactccaaattaaatgcacaatcaaaattctagcatagtacaaaattatattttatttatttatcattattttatttctctaagtaaatgcctcaaaacatataaacttaataaagaataagtcacacatttaagggcccctattcattttatttatcaaataataactttattcaaagttaaatgtttatcactattcataattaaccatgaaaccgttatttaggcaaccttttatattattctttagagagtatttcaaaatataggattttaggttgttacacctctgctattttttagaagaaccaattttatctgagcagctagttttttcaaattcatcaattaaagtgagggagatagttactaaa

SEQ ID NO: 155846 - DNA, 2356 bp, Zea Mays
accactgcacctcctgtcacttccccaacctcttttgtcggttacatccacacactctcaatgcagccgtcgcgctcacagcacgccaaacatcaaacgagaacgcacacgcacttccgcacccaggtgctggaggcgcccctggatccgggatccgatactgagtaccaggacttccagtttcggttcatcccggaggcgttcgagctccagatgggcggcgttcccgtcggcggcggcggggcaaggaacggagacggtaaggtgacggagaaggttcttgagttcgagttcgacaaggtcaggattagcattgcgtccagggacgacgaggcggacggatacgcgccgccgaggagctccttctccggggcgagccacccgccggagccagtggacgagacggacaccgtctttgtcgctgtcgacggccgggagaagccggtcccgaagccagtcatctcgtgggacgcgtccaggccgccgagcggcgcggcgagcccagacagcagcatcgacagctccggcgccacggccacggtcaccagcatcgcgccgagctgcaccgtcaccagccgcagcgccaagaccagcgtcagcagcagcgcggccagcgacggcagcggctggagcaacggcaccagcagcggctgcggcggcagcgcggggaagccgcacaagggcggcgaccccaggtggaaggccatcctcgcggcgcgcgcgcgcgagggacccctcgcgatgggcagcttccggctgctgcggaggctcgggtgcggcgacatcgggacggtgtacctgtcggagctcagcgggggaggccccggaaatggcgacgtggcaaggccctgctggttcgcgatgaaggtgatggacaaggcgtcgctggagagccggcggaagctgagtcgcgcgcagacggagcgggagatcctccagctgctggaccacccgttcttgcccactctgtacgcgcactttgagaccgaccggttcgcctgccttgtcatggagttctgccccggcggcgacctccacgtgctccggcagcgacagcccggcaagcacttcccagagcacgcggcaaggttttacgccgcagaagtgctccttgcgctggagtacctgcacatgcttggggtggtctacagagacctgaagccggagaacgtcctcgtgagagaagatggccacatcatgctctccgacttcgacctctcccttcgctgcgcggtctcgccgacgctggtgagaccttccctgggctccgaccccaggaacgggcaggcctgcgcccagcccaccgcctgcatccagcccacatgcttcatgcccaagctcttcggccagaggagccagaagagcagcagcagcagcgccgccaagaaacccaagggcggcgccgagcccagccccaggctgcagcaggcgggcaccggcctgcccgaggtcgtggtggagccgaccggggcgcggtccatgtcgttcgtggggacgcacgagtacctcgccccggagatcatcaagggcgagggccacggcagcgcagtggactggtggacgttcggcatcttcctgcacgagctcatgtacggcaggacgccgttcaaggggcagacgaaccgcggcacgctgttcaacgtcgtcggccagcaactcaagttcccggactgccccggcacgagcagcgccagcagggacctgatcagaggcctgctggccaaggagccccagagccggctgggcgtgaagaggggcgcggccgagatgaagcagcaccccttcttcgagggcgtcaactgggcgctcatccggtgcagcactccccccggcgtgcccagggccgtcgagcccgccacggtggcagtggcactgcctgcgcaggcaaagccgaagccggcgccggcgccggcgccagcggagagagtggagatcaacagcggcggcggtggcagcaagaggatttctggggcttcttccggtgctgagtgcggagggaagttcctagacttcgagttcttttagctagtcttcgactcttcgttgacgatactcgttgcagttccagttgtaggtgtagttccatactctggagtgcgagcgtttggtcagtgacatgtctggttggttccaattctagtgtgtggtattacctaacctcactgtgttgcttgttgggagttgagacttgagagtcatcccatgtcactaggcagtatagacaatagtagttagttacttaggcaaatagtaactatgaagttcgattagtcgaagaaacgattttcatcatgtctgttgccaggggcgacgccatagtcagtcactttccccggtgccaatgcaccgtggttcc

SEQ ID NO: 155847 - DNA, 83 bp, Zea Mays
ttgaatcaatttgttggagatgatcataggttgggaaaagcgagatccaccaaacccaagccaagctcgctactagtataacg

SEQ ID NO: 155848 - DNA, 542 bp, Zea Mays
cgcctgggcatgggttgccctcgagagcgaactgtcgtcgcaactctgtccatgaccttgctctttctcctagccgaccaagcggcgaagcatcagacggcggtgcaggtccgcaacctcctcatcgacaccaggaacgctgctggcatggcggcgtatggtgcggagaagacggaagaagcggcaccgccggacctatgctcgggggtcgtggcggtgtcccagggcagcgcgggaagcctctccaacggcaccccgtcctacagcgtgaccatcaccaacacttgtctaggctgcaccgtgcgcgacgtccacgtctcctgcggcgagttcgccgcccccacggagctcgtcgaccccagcgacttccgacgcttgtcgtacgacgactgcctcgtcaagaacggcggacccatgggccccggcgagaccatttccttcgagtactccaactctttcatctacaagatggacgtcgccacggtctcatgcggcgacgtataggtatagctagcaggtgttgtgtaccggcgtcgtgtctt

SEQ ID NO: 155849 - DNA, 1804 bp, Zea Mays
gagaagccgaatcgcgagcccacccggccagggggcagatttcgtgctcctctcctccagtctccaccctccagcgccctccacttgcagaggttcgcgactcgcgacgcctccgcagccccagccccagccccacgccccgcgatccaaaccctagccccctccaccgtaccgccaccgtcatggccgaaccatccgccgccgccgtcaccgcagctgaggtcggggaggagtccgatgccgccgcgatggaggaggtcgcggcggccgcgaagaggtggccggggtggcccggggacagcgtgttccggctggtggtgccagtgctcaaggtcggaagcataatcgggcggaagggcgagctcatcaagcgccttgtcgaggggaccaaggccagagtccgcatcctcgagggccccgtcggcgccaccgagcgtatcgttttggtttctggaaaagaagatccaggcttggagctatctccagccatggatgctctcatgagagtttttaagcgtgtcattgggataacagatggagctgcggagggcactcaggctgctgctactcctggtgtatgtgctgcccgattgttggttcctggagctcaggcaattaacctaattgggaagcaaggtgccactatcaaagcaatccaggagagcacgggtgctacaatacgggtaatatcagtagatgaacatgagagaccattttatgtaactgacgatgaaaggatagttgagatacagggcgatacagagaaagttctaaaagcactgcaagctgtttctaaccatcttcggaagtttttggttgaccatagtgtacttccattatttgaaaaaactaatactgcagtgagccaagatcacaatgttggttggagtgatatgtcacatccttcaattggttctgcacaagtgaatcaaccaccttcagtggtagatgaatatattcttccagtgaagagggatactttgtatcttgaacgagaaactttgttagatcataacattcatcgctcaggcgtatcactttatgggcgggatccagccttgtcaacactacgaccacctggaatacatggtgctggcccgctacttacacagataacccaaaccatgcaaatcccacttacctatgctgaagacattataggagttaaaggagcaaatattgcgtacatacgagctaatagtggagctgttgttacaattcaggagagtttgggtagtccagatgatattactgttgaaataaaggggacatcttcacaggtacaagctgcacagcagctcatccaggactcgttggctgcacaccgagaacctgtcagaagcagttatgtgggagcaggattagattcactgtataggtccagctactcacaatatggcagctccacctatccttcgtcatcactgccatcttattctagcatcgatgatgttagtaggtacccatcttcaggtcttggtggctatgggtcgagttacaggtactagtactagttcgtccttaggcttgaatgcttgatggcaccttgtatccattcctgggtgattattgtacaagtcagcaagttttctgctctgcgtgcttacgggcaggggatcattttacaagtcagcaagttctctgctttgtatgcttccgggcagggatctggtagattatactgcatcccaattcccagtacccagacttcggagtccaatttgctttgacaatggaatcggaaatcgtgcttgttaattcgatgattgcatctgtttataggatattcgtgctgttaaatcac

SEQ ID NO: 155850 - DNA, 1791 bp, Zea Mays
gagaagccgaatcgcgagcccacccggccagggggcagatttcgtgctcctctcctccagtctccaccctccagcgccctccacttgcagaggttcgcgactcgcgacgcctccgcagccccagccccagccccacgccccgcgatccaaaccctagccccctccaccgtaccgccaccgtcatggccgaaccatccgccgccgccgtcaccgcagctgaggtcggggaggagtccgatgccgccgcgatggaggaggtcgcggcggccgcgaagaggtggccggggtggcccggggacagcgtgttccggctggtggtgccagtgctcaaggtcggaagcataatcgggcggaagggcgagctcatcaagcgccttgtcgaggggaccaaggccagagtccgcatcctcgagggccccgtcggcgccaccgagcgtatcgttttggtttctggaaaagaagatccaggcttggagctatctccagccatggatgctctcatgagagtttttaagcgtgtcattgggataacagatggagctgcggagggcactcaggctgctgctactcctggtgtatgtgctgcccgattgttggttcctggagctcaggcaattaacctaattgggaagcaaggtgccactatcaaagcaatccaggagagcacgggtgctacaatacggatgaacatgagagaccattttatgtaactgacgatgaaaggatagttgagatacagggcgatacagagaaagttctaaaagcactgcaagctgtttctaaccatcttcggaagtttttggttgaccatagtgtacttccattatttgaaaaaactaatactgcagtgagccaagatcacaatgttggttggagtgatatgtcacatccttcaattggttctgcacaagtgaatcaaccaccttcagtggtagatgaatatattcttccagtgaagagggatactttgtatcttgaacgagaaactttgttagatcataacattcatcgctcaggcgtatcactttatgggcgggatccagccttgtcaacactacgaccacctggaatacatggtgctggcccgctacttacacagataacccaaaccatgcaaatcccacttacctatgctgaagacattataggagttaaaggagcaaatattgcgtacatacgagctaatagtggagctgttgttacaattcaggagagtttgggtagtccagatgatattactgttgaaataaaggggacatcttcacaggtacaagctgcacagcagctcatccaggactcgttggctgcacaccgagaacctgtcagaagcagttatgtgggagcaggattagattcactgtataggtccagctactcacaatatggcagctccacctatccttcgtcatcactgccatcttattctagcatcgatgatgttagtaggtacccatcttcaggtcttggtggctatgggtcgagttacaggtactagtactagttcgtccttaggcttgaatgcttgatggcaccttgtatccattcctgggtgattattgtacaagtcagcaagttttctgctctgcgtgcttacgggcaggggatcattttacaagtcagcaagttctctgctttgtatgcttccgggcagggatctggtagattatactgcatcccaattcccagtacccagacttcggagtccaatttgctttgacaatggaatcggaaatcgtgcttgttaattcgatgattgcatctgtttataggatattcgtgctgttaaatcac

SEQ ID NO: 155851 - DNA, 360 bp, Zea Mays
ttcgagtgcccatttgcatatcgtggtcggagtttcgtcgtcggacgcatgttcgacatgtatgcattagtctcagctatgcttctacttctgcacctattcgtgggagttgggaccctagtaattatattcccttctagaatgtgtagcttatcatgtcgatgacccaagaggcattatttcgaagggagaagccacgaggaccaaatccgaggctgaagctttgagaggcgcacaccatcctttcttctaatttggtttagatatttatgaattcacatgcaaaaatatacaatatcaagcagtataaaagatctcaagtcgaacctaagatttttttcatttctacggatgatctct

SEQ ID NO: 155852 - DNA, 2028 bp, Zea Mays
gagaaattgatacaccggagataaagccgaggcagagcccaagtttgattcggtgctgagggtcggaagcggagcacgcaccccgcccaaccacgacgacgagcggaaagccgcgatcgcggcggcaaaacgaacagcttaaaagaggcggcgcgtcacgtggggcgcctccctctcgttccattccctttttttttttctcttcttgattcatcgatggcagcgcagcagcaggccgccgcctccgtgcttcagagcttcccgatcagggcggccgtgctcgcgctctgcgtcgcgctgctgccgctgctgctccccgcgcaggcgcctgacgtcgcggccgggggagccggccaggctttcctcgccaaggcgtgggagctgctgcacctgctgttcgttggcatcgccgtctcgtacggcctcttcagccgcaggaacagcgccgacgatgggcgcgccggggctgcagcagcagagaaggacgatgccgcggggcccgaacctgccaaggcggacgcgaggtacgcgtggcggatgttcagggactcgatcgcgccgttcgatgacgacgacgccgacgtgctggtgccggacagccctcccggtggcggcggaggcggcatggcgcgctcgtggagcgcgctgcaccggcccgtggagcccgtcgtcgtcgtgtccactggaggcggcggggtccggatcgggcaggcccaggccccggacgcacaggcgccgctgtcgctacccgtccggatgctgaagccgcagcaggcacaggacgccagcgcggcgggggctggggctggggctgtcgacttcgagccgcagtgtgcgcggccgcgccggagttctcagagctcggcggtcgactgcgcccacgacgacgagaccgtgctcccttcgccgataccgtggcggtcgcggtccgggaggctcgacgcgcgccgacccgcgtcgtcgccgagcccctcgccgtcccccaagagggtgtccccggcgtcgtccttgtccagggagacgctggccaaggcaagcgaggaggagtactacgccaaggccaagaggaggagcccgtacaggtgctcttccatctcctcctcgccgccggcgccgcccccgcctccgcctccgttcctcgtccacggttaccacccgacgaccgagcgccggtcggcagcgccgaaaagctttaaggaggagctgcagcaccacagcatgagaggccgaggagaagaccactacttgccgaagacgagcagcaactctttctccttgccagcgaatccaagaagctctttctcttctaacggtggctcgtcctcgtcggtttcggttggcaagtcggtgagaacgttcaggacaagggagccagcagttttccaagaccaaagccaagaactgcccgacgactccggtgatgatcgtgacgcgctggacgtgcacggatcagaggagccgtacggctacagagcttatcagtccatttccaggttccagtacgagaggtcagggagcgactctatcctgggcggtgtggcagtctcgtcggatgagagcgagagcagcgacgacgacggcggggatgacgtcggcggtggcgggtactcgacgagggagtcgacgccggaggtggacgagaacgaggtggacaagaaggcggaggagttcatcgcccggttcagggagcagatcaggcggcagaggatcgagtccataaagaagtccgcggggacgcgcggcgtcaagcgccacggcaagtagctcgccggccgtttgttatgttctagtactagttttttagcaagtagttggtgcccaaaagacagttgctgcatttgatactagttgccaagaaccacttgtaaacactcatatagggtttgtgatgaatgagagtgtattttcatgcatactgtaattgcatttttttttgctacgagagatcgatcgatttctaccgtcaacgtattggtccttggttaggcatttgttctgcctcaagcagctatactaatgattctagtc

SEQ ID NO: 155853 - DNA, 1933 bp, Zea Mays
gcagcgtttattagccgtcacactcccacactcggcctgccgaggagaaactgaagatggttaggggctagaacgagcgagaggcggccgggaggagggaccgatttgtcgatggcgatcggggcgttcgtggagggcgctccggcggacggcggagaaggttacagcggccgcgtgacgcccttcgtggtgctgtcctgcgtcgtcgccggcagcggcggcgtcctcttcggatacgacctcggcatctccggtggtcttacctcaatggactgcttcctgaagagattcttcccaaaggtgtaccgtcagaagcaggacagcaaagtgagccactactgcgagttcaacagcgagctcctcaccgtcttcacgtcctccctctatatcgccggtcttgttgcaactctggctgcagcaaccatcacaaggaggtatggccgtcgcacatcaatgctgatcggcggcagtgtcttcatcgcgggctcagtgttcggtggtgcagccaccaatattcccatgctcctaatgaacaggattctactggggattggtctggggttcactaatcagtcaatcccattgtacctgtccgaaatggcgccaccccgataccgcggggcaatcaacaacggcttcgagctctgcatcagccttggcatcctgttcgcgaacgttctcaactatttcgtcataaaaatcacagcaggatggggatggaggatatccctgtccatggccgcactgcccgccgcattcctaaccatcggcgcgatcttcctccccgagacgccaagcttcataatccaacgtgacggcaacaacacggacaaggcaagggtgctgctccagaagctgcgcggaacggcctcggtccagaaagagctcgacgacctggtccgtgctagcgacctctcacgagcaacccggtacccattcaggagcatactcgagaggaagtacaggccgcagcttgtggtggcgctgctggtccctttcttcaaccaggttagcgggatcaacgtggtgaacttctacgcgccggtcatgttcaggacgatcggtctcaaggagagcgcgtccctcctgtcctcggtggtgacacgcctgtgcgcgacgtctgccaacgtcgtggcgatggtggtggtcgacagggttgggcgcaggaagctcttccttgccggcggcgtgcagatgatactttcgcagttcaccgtcggcgcgatcctggctgcgaagttcagggactacgaggagatgggtgatgggtacgcgtacctggtgctgaccacactgtgtgtgttcgttgcaggctttgcgtggtcgtggggccctctcaccttcttggtccctgccgaggtttgcccgctggagatcaggtccgcggggcagagcatcgtggtcgctgtggttttcttgatgacgtttgtgattagccagacgtttcttgaggtcctctgccgcgtcaagtcggcgacgttcttcgtcttcggtggatggatctgcctgatgacgttgttcgtttatctgttcctgcctgagaccaagaagctgcccatggagcagatggagcaggtctggaagacacactggttctggaagaaggttgtgggagaggaagcggataggaaagaagcaggagcagggaatatagctttgtcgggcttgtcttagtcattttctgagtcgggtgtgtgtatgtgtatttgatcaaaactgcaaagaaaaacatagtatacgatcgcgacaagctgatgtaaatgtacatttgtatgtaaatcgagtaaacttatcagtctggcgttgttgccagttcctacaactaaccgttccaaatggtacaagagtacagaagcactaatataacaagaatgttgaaacgcactgctgtttcttctttcatgatcggccgtagaaggaaaatttacctaac

SEQ ID NO: 155854 - DNA, 1485 bp, Zea Mays
tttcgttgtcagcagtaatagagattagatgctgcttgtgttcccgttacattcgtttgcttcctgccctttttccctggggaattttggtacagcacacaacacaagcaactataaaaatctagcaaggtcaacaactaccgctggaattcacacacggccgggacaacatgatcactactggtaccactagtagatacgtaataatgaactgataggtactcgtcttacacttttaagtacacagcttatatctctctctcgtttatatatgtttatacttattaaaactcaatttaataaaagaagaagaagaagaagaaaaaaagaactagctgttttccccccaaagtaagcaagaaagagagaaaaaaaggagagggcgagaagcaaaacgaagaagaaatgggataccactgctactattgtttagacctcgtttgcaatgcaggcaacgagcatctctgaccgctactcccaaagcagcggctcctcgaggcgcagctccgcattgaccacctcctccacgtcagtgagcggggcccacatcggcgggaagcgcccgaacccgtcccggatgtcgaggagcaggtccggcaggtcgaacagctgccgctcgtcctccacgccgctcgacggcgtccctggccgagaggccgccggcggtggtagtgctactggtactggtgcctgtgcgtcggcggctgcctcctcgggcgcggcgccgtccttggcagcgggctcctcgtgcgcgccggcgccgggctccgatgacggcgacgtgaacgcagcggccaatgcggcggctgcctggacgtccttgggcgccgcggacgcggcgcgcgggagcgcgccggcgaggtccgggaagttgaggtgcgcggcgcggcccttgatggcgagcgccgcgacgtcgtgggcgcgcgcggccatctcggcggtggggaacgtgccgagccatatgcgcgacttcttgcgcggctcgcggatctccgacacccacttgccccacgcccgcatccgcacgccgcggaacgtcgggtgcttcccctcgctgccccgcggtcgcttcttggccggcgccgccttattaccagcacagccttcctcctcctcctcctcctcctcaccgcccgcctcggcctcggcctcggcctccaacgcctgccgcttccgtgtcgcgggcgcggcattggccgccgccggtgacgggggcgaagaggacgagtctgtgacagtggacgagcagcaggatgtggtgcacgacgaggtggtggtggcagagcaagaggacgtttcgtggagctcttgagccatggcagatagggtagctacctctttgcactgatgcgcagtggtgtctggtactctggtgtgcaggaggatcaagtgatcaagaggctggttgcctgtatgtggtgcgaccgcgagggcctttttatcatcagcgtcaaatgagggtgggatgcaacaaaaagttacttg

SEQ ID NO: 155855 - DNA, 1367 bp, Zea Mays
cttcggctcatcctcctcacggcgaaaccctagcccgccccatggatgatccctcctccgcctccaacaagcacaagcgcgagcgggggcgcaagcccaaggcatcgccgccctcccccgaccgctcctccccctctccctcggtcgcccccgctctggctgggcgccgtggccgcaagccgcgacgtcatgaggccctcgccgacgcggacgccacgcgtgctccgtccccgccctgccacggggagccgaagccggtggcaaacggaggcgatgtggtggcagtggcggagtcaggccccgcgagctgggatgaggtggtgagggtagtgccgtgcatggacgctgtggtcaaggtgttctgcgtgcacacggagcccaacatctcgctaccgtggcagcggaagcggcagtacagctccaacagcagcggatttatcatcagcggccgccgtgtcctcaccaatgctcactccgtggagtaccttgccaccgtcctggccatcgacacagagtgcgacattgaagtttcacctattgagtttggaacattacagtccttcaggatgtagttactgttgttggctatccaattggaggagataccatatccgtgacaagtggagtggtctctaggatagaaatactttcatatgttcatggttctacagaacttctaggattgcagatagatgcagctattaattcaggaaattcaggtggcccagcttttaatgataggggaaaatgtgtcggtatagcttttcagtctcttaaacatgaagatgcggagaacataggttatgtgataccgactccagttattacacatttcattgaggactacaaaaaatctggagaatacacatgctgcaattgagtacattcattctttatcaagggcacagcctgcacgttctctcaatggtgttggcctttgtcctgctagtagatcacttagcacccatgccgccactacgtcaagcacaccacagttgaaagcacaccacgtcaagcacccaggccgccactacgtcaagcaaaacagaagacgagaagaactgatgtagccatgttcatgcttccactgttgaaatgcatattcagcatagcttgctcagctcttatctgttgtttcaatgttgatttaaaagaagagctggtagttgtgggcttttgaacaatagctggagtgatatgaaacattagtgatgtagttgtgggcttttgaactgcttcaagctagagtgatatcgctgtggtgcttttgtgactgatcatctctggagcttttgtgaatgatctagctagctatctgtaaatgatctagttgtgaatgatattataattgtgatgcttttgtgaat

SEQ ID NO: 155856 - DNA, 105 bp, Zea Mays
cactggtcaagtcaagaagtgatagtcacctagaggaggtgaatagttgtcgcttgaaaatcacaacttcaaaaaactttatctaaataaagtgtacttcattat

SEQ ID NO: 155857 - DNA, 1320 bp, Zea Mays
atggagaaaggctggaaggcgagagacgctgctggtgctttcatgatggacttggagctggtggccgaggaaaccgacgacgcggtgccgtcgataccgccaccgcagacgccgctggagcccatggagtacctctcccggtcgtggagcgtgtcggcgtcggagatttccaagattctcctcggtggaggcaagaagagcagcgttgcggcggcgagccggcttccggaggtgaccataccggagcagtctgcgctcgccaccacgtcctccgtcgttcctctaccgtgtcatcagcagaactactgcaaaacatacaaacagagagccgcaagaaggtcttccacgagcagcggccaccaccaccagtcgatcggcaagtggttccaggtccaccacagggaaacacgccgggcgaagcagagcagcaaggagaagcagcgcgccgagaaggcccacgtgcacgccatggtgtccgtggcccgggtcgctgccgccgtcgccgccgtcgcgtcggccacgagctccaacgcccaggctaccactaccaagatggcgacagccatggcgtcggccaccgagctgctggcctcccactgcgtcgaggcagctcagcacgcgggggcgcgccacgaccaggtggccgccgccgtgcaggccgcggttggcgtcagaagccccggcgatctgatgacgctcacggcggccgcagcgaccggtacgcactacgcagtccgacggagctgtgtcatcgcgtcgcaggttttccactgccgattcttgaaacaagacgctaagcttccgtgcacttttggctcgcgtcgaccagctctgcgaggagcggcgacactgaggcagagggcgcagcgagagacgaggagcaacgcgagcatcctgctcccgtacgagaaagccgcgaattcgtggagcccggacatctggtgcaaggagggggcgctgctgaaacgcgcaaggaaagggggtttgcacaagataagagtatgtatctacatcaacaagaggtcagaggtgatactgaagctgaaaagcaaacacatcggaggcgcgctgacaaagaagaacaagagcgtggtttacggcgtatacagcgagcttccgacgtgggctgagccagggaaggactgcatagaggagacatgctgctgctttggcctcagcacggcgcagggcctagtggagttcgagtgcgagggcaacgcgagcaagcaggagtggatcgacgacgtgcagaacctgcttcgtcaggcggctctgcatgaccgagtaggggataaactgggattagtaaaactcagctag

SEQ ID NO: 155858 - DNA, 99 bp, Zea Mays
ctgtgtaatgtgtcttctcttaatttatccggacaaggaagcagaggccagcggccagcccctgcgcctgcgttgcgtccatgcttcggtatgcggttg

SEQ ID NO: 155859 - DNA, 1230 bp, Zea Mays
atgatcccgttcaaccctgcggtcgccgcggaggtgcgcgccctgatacagggcgtggaggactccaccttcgaccccatataccgcgagctctcccagccctggtgggtgcgttttttgcttcaagtttgtgtggatgaaattctcttaaacatcggtggcgcaaataaccaccgattgaaacatgatcttgtagccatcatcttcagatattgtgtggataaaccctacttcagcaccaatttctgtgaagcactgagggcaatgcctgacagcgatgggctccttgaaacattgtccaatgaacttgagttatctacaactgagagggttgtagttggacttgctctctcagactctgagaatccagacttgaacctggaagagatgtgccttggtagattagatgacgattttgattctcatatatccaaaattggagaacaaataagtctgtctgatatcatcagtgaactaggatgtggatgtacttgtaatactactcattgtaaagaaatgttatcactccttgagcctcttgatgatatgggaatctctaagttactaggagcggttgtttgcactcgtattggtgttggagaagctcaaaatacatattcaatatttcttttgacttttgggaacaaccaaacaattgactcatctcagttgacttcatggaatattgatgttcttgtggattcaatcaatgaaattgatccattcccacttcatgccatctgtgggttactatggaataatataaaaggacagttgtcattcttgaaacatgcagtggctttgccaaatgatacattcacattcgcacattgtacaaggaagatggtttttccagacttgggaaattgtaaccagggcaatcaggcttggtactgccttgtccttcttgaggtgttatgtcagcttgctgaacttggctattcaaagccagtgcgagcaattcagccaattcttggttatcctctgatcaattatcctgaagtgttacttcttggtgttagccatatcaatactgcatataatctcatccagcatgaagtactgtcctgtgtttttcctgctgtggtgaagaacaccatgcacagcagtcttatgaactatctatgacatatcaatccttaccttactcttcaaggattcattgatgctcgttctgacataagttgtcttctgagaactgtggagatatgtgaagacctaaaggtagta

SEQ ID NO: 155860 - DNA, 1203 bp, Zea Mays
cgctttctctagcataccttgccaccaccagctgcccgggtccatgctaaagcagggagggagggattccttcacacttgcaaagctctttcttgccttgggttctgttctgctgctactgctagtgctatagtgacaagatggcgccgccgacggatgtgtgtttgcagggtgccgtgcgagttcccgggcctgaagatcgggttccacgtggaggagtactcgaaccccgtctacttcgcggtgctggtggagtacgaggacggcgacggcgacgtggtgcaggtggacctgatggagtccaagacggcgcgcggcccgccgacggggcggtggacgccgatgcgcgagtcctggggctccgtctggcgcatggacaccaaccaccgcatgcagccgcccttctccatccgcatccgcaacgagtccggcaagacgctcgtcgccaacaacgtcatcccggccaactggcgccccaacaccttctaccgctccttcgtccagtacagctaaccgatcgggatccgtgccctgcccgcaattggagctggctggctggggcgctactcggctcggtcaccatcgtctacagtactatactatgctctactaccactagactgctgctgttactactagtctactaccaccaagtacggcggaacggaacagctagtcgtcgtcggcggccttgggaggggaggtgtctccggtcaccgtgccgttgcagttgtatcgtgatcatggtcctgggagttgttgcatccggggcgcgctttttaggtcaggcgtcgtgtgcgatgtttgtggggtcaggctggcatgtcatgccgtgcgtgaccctgattgcgagccggcaagcaagaagacaaaaaaactaaagccgtgtgggaaaatggaggaggcaggcgtacaagctacgctctcccgcccactgttgcttttataatttatcatcatcatcatcttcattccgatcggtgattaatcgaaaagtatattgtaatgtataaacgccattttcctttcgtcagtgccttttttttcctggttgtggatgttttgtttgcgcattcagccttgctgtgctgaagccaaacgcaagtaatgtgctgaagccaaacgcaagtacacaagtaatgtacataatgaagatgtgaaagaaagaaaaaacgacagaaatataaactcccgtttgacgat

SEQ ID NO: 155861 - DNA, 2350 bp, Zea Mays
gaactgagcaagaccccggcccggtcgactgagctgatcagcctgcccaggccatgtgcagccccaacatggcacgttctccctcgctcctctgcgtacacacagaaacctctcctccctcccctctcgcagctagcgtgccggcctgccggtgcccttctgcccatctggcttataaataggcccacacggcaccacggccaccaccaccacccaccagtccaccaccactgctcgcactcactccaccgctgcccacttcttgtttgtattgtatccagactccagaggaagccgagagggccaatgaggcaaggcatgagctccccttccgccgccgcggcgctcgtgctcctcctggccctgctcgccggaggccagtgccgagaggcccagctcgacgccgcggacgccggcaccggcacggagaactacaccgccagcgacgccgccgtgtactggggcccctggcagagggcccgggccacctggtacggccagcccaacggcgccggccccgacgacaacggtggcgcgtgcggattcaagcacaccaaccagtaccccttcatgtccatgggctcctgcggcaaccagccattgttcaaggacggcaagggctgcggctcctgctacaagattcggtgcaggaaggacccgtcctgctccgggcggacggagacggtgatcatcaccgacatgaactactacccggtgtccaagtaccacttcgacctcagcggcactgcgttcggcaggctggccaagcccggcctcaacgacaagctccgccactccggcatcatcgacatcgagttcaccaggtcggtggtgtgcgtgctgttgaatttcgtagcgcggcaagtgaaagtttggtggtagggcggaggcagcagcatcatcatcattagccgctcacgttactcaccgtcgccgcgccggacactgcatgtgcggcaaagtggcgcagcagctgccgaaggccgcttttattgcgctgcggcacagcgcccaccaacatgctcaattttggctactagtgggcgcaccaccccgcttgtgcatcccatcccaacgtacctgcgtccaactgttgccaccggcgcccggcggtgaccgaccgaccgccagccccattatttcctttcgctttctctagcataccttgccaccaccagctgcccgggtccatgctaaagcagggagggagggattccttcacacttgcaaagctctttcttgccttgggttctgttctgctgctactgctagtgctatagtgacaagatggcgccgccgacggatgtgtgtttgcagggtgccgtgcgagttcccgggcctgaagatcgggttccacgtggaggagtactcgaaccccgtctacttcgcggtgctggtggagtacgaggacggcgacggcgacgtggtgcaggtggacctgatggagtccaagacggcgcgcggcccgccgacggggcggtggacgccgatgcgcgagtcctggggctccgtctggcgcatggacaccaaccaccgcatgcagccgcccttctccatccgcatccgcaacgagtccggcaagacgctcgtcgccaacaacgtcatcccggccaactggcgccccaacaccttctaccgctccttcgtccagtacagctaaccgatcgggatccgtgccctgcccgcaattggagctggctggctggggcgctactcggctcggtcaccatcgtctacagtactatactatgctctactaccactagactgctgctgttactactagtctactaccaccaagtacggcggaacggaacagctagtcgtcgtcggcggccttgggaggggaggtgtctccggtcaccgtgccgttgcagttgtatcgtgatcatggtcctgggagttgttgcatccggggcgcgctttttaggtcaggcgtcgtgtgcgatgtttgtggggtcaggctggcatgtcatgccgtgcgtgaccctgattgcgagccggcaagcaagaagacaaaaaaactaaagccgtgtgggaaaatggaggaggcaggcgtacaagctacgctctcccgcccactgttgcttttataatttatcatcatcatcatcttcattccgatcggtgattaatcgaaaagtatattgtaatgtataaacgccattttcctttcgtcagtgccttttttttcctggttgtggatgttttgtttgcgcattcagccttgctgtgctgaagccaaacgcaagtaatgtgctgaagccaaacgcaagtacacaagtaatgtacataatgaagatgtgaaagaaagaaaaaacgacagaaatataaactcccgtttgacgat

SEQ ID NO: 155862 - DNA, 1857 bp, Zea Mays
gaactgagcaagaccccggcccggtcgactgagctgatcagcctgcccaggccatgtgcagccccaacatggcacgttctccctcgctcctctgcgtacacacagaaacctctcctccctcccctctcgcagctagcgtgccggcctgccggtgcccttctgcccatctggcttataaataggcccacacggcaccacggccaccaccaccacccaccagtccaccaccactgctcgcactcactccaccgctgcccacttcttgtttgtattgtatccagactccagaggaagccgagagggccaatgaggcaaggcatgagctccccttccgccgccgcggcgctcgtgctcctcctggccctgctcgccggaggccagtgccgagaggcccagctcgacgccgcggacgccggcaccggcacggagaactacaccgccagcgacgccgccgtgtactggggcccctggcagagggcccgggccacctggtacggccagcccaacggcgccggccccgacgacaacggtggcgcgtgcggattcaagcacaccaaccagtaccccttcatgtccatgggctcctgcggcaaccagccattgttcaaggacggcaagggctgcggctcctgctacaagattcggtgcaggaaggacccgtcctgctccgggcggacggagacggtgatcatcaccgacatgaactactacccggtgtccaagtaccacttcgacctcagcggcactgcgttcggcaggctggccaagcccggcctcaacgacaagctccgccactccggcatcatcgacatcgagttcaccagggtgccgtgcgagttcccgggcctgaagatcgggttccacgtggaggagtactcgaaccccgtctacttcgcggtgctggtggagtacgaggacggcgacggcgacgtggtgcaggtggacctgatggagtccaagacggcgcgcggcccgccgacggggcggtggacgccgatgcgcgagtcctggggctccgtctggcgcatggacaccaaccaccgcatgcagccgcccttctccatccgcatccgcaacgagtccggcaagacgctcgtcgccaacaacgtcatcccggccaactggcgccccaacaccttctaccgctccttcgtccagtacagctaaccgatcgggatccgtgccctgcccgcaattggagctggctggctggggcgctactcggctcggtcaccatcgtctacagtactatactatgctctactaccactagactgctgctgttactactagtctactaccaccaagtacggcggaacggaacagctagtcgtcgtcggcggccttgggaggggaggtgtctccggtcaccgtgccgttgcagttgtatcgtgatcatggtcctgggagttgttgcatccggggcgcgctttttaggtcaggcgtcgtgtgcgatgtttgtggggtcaggctggcatgtcatgccgtgcgtgaccctgattgcgagccggcaagcaagaagacaaaaaaactaaagccgtgtgggaaaatggaggaggcaggcgtacaagctacgctctcccgcccactgttgcttttataatttatcatcatcatcatcttcattccgatcggtgattaatcgaaaagtatattgtaatgtataaacgccattttcctttcgtcagtgccttttttttcctggttgtggatgttttgtttgcgcattcagccttgctgtgctgaagccaaacgcaagtaatgtgctgaagccaaacgcaagtacacaagtaatgtacataatgaagatgtgaaagaaagaaaaaacgacagaaatataaactcccgtttgacgat

SEQ ID NO: 155863 - DNA, 1025 bp, Zea Mays
gaactgagcaagaccccggcccggtcgactgagctgatcagcctgcccaggccatgtgcagccccaacatggcacgttctccctcgctcctctgcgtacacacagaaacctctcctccctcccctctcgcagctagcgtgccggcctgccggtgcccttctgcccatctggcttataaataggcccacacggcaccacggccaccaccaccacccaccagtccaccaccactgctcgcactcactccaccgctgcccacttcttgtttgtattgtatccagactccagaggaagccgagagggccaatgaggcaaggcatgagctccccttccgccgccgcggcgctcgtgctcctcctggccctgctcgccggaggccagtgccgagaggcccagctcgacgccgcggacgccggcaccggcacggagaactacaccgccagcgacgccgccgtgtactggggcccctggcagagggcccgggccacctggtacggccagcccaacggcgccggccccgacgacaacggtggcgcgtgcggattcaagcacaccaaccagtaccccttcatgtccatgggctcctgcggcaaccagccattgttcaaggacggcaagggctgcggctcctgctacaagattcggtgcaggaaggacccgtcctgctccgggcggacggagacggtgatcatcaccgacatgaactactacccggtgtccaagtaccacttcgacctcagcggcactgcgttcggcaggctggccaagcccggcctcaacgacaagctccgccactccggcatcatcgacatcgagttcaccaggtcggtggtgtgcgtgctgttgaatttcgtagcgcggcaagtgaaagtttggtggtagggcggaggcagcagcatcatcatcattagccgctcacgttactcaccgtcgccgcgccggacactgcatgtgcggcaaagtggcgcagcagctgccgaaggccgcttttattgcgctgcggcacagcgcccaccaacatgctc

SEQ ID NO: 155864 - DNA, 1216 bp, Zea Mays
tggaccatcgacacacagatcgaacttctcctgtcgtctgcctaccagtagctagctctaatacatagcagccctcgctcgcaaggtactgcactacgatggccgccacctcctcctcctcctcctccacggtagttgcacttgcggcgcttctcttcttgctccttgtaacgtgtggctcgtgcgcgagaccggcgagctttaacgcctccgactttaccgccgaccccaactgggaggctgcccgggccacctggtacggtgcgcccaccggcgccggccctgatgacgacggtggtgcctgtggattcaagaacgtgaacctgccgccgttctcggcgatgacatcgtgcggcaacgagcccctcttcaaggacggcaagggctgcggctcctgctaccagatacgatgccaaaaccacccagcctgctccggcaatccggagacggtgatcatcaccgacatgaactactaccccgtggccaagtaccacttcgacctcagcggcacggcgttcggcgccatggccaagcccggccgcaccgacgagctccgccacgccggcatcatcgacatccagttcaagagggtgccctgcaactaccccgggcagaaggtgacgttccacatcgaggaggggtccaacccggtgtacctggcggtgctcgtcgagttcgaggacggcgacggcgacgtggtgcaggtggacctcatggaggccaactccgggtcgtggacgccgatgcgcgagtcgtgggggtccatctggcggctggactccggccaccgcctcgccgcgcccttctccctgcgcatcaccaacgagtccggcaagacgctggtggccaaccaggtcatcccggccaactgggttcccaacacctactaccgttccatcatccagtactagctctcggcggccgccgcgcaccacgatagctctgcgtccttgtgcttgattagtttggtagtgctattgtattgctgcatatgcagcatgggactgatgagcactgtgcgaggtgcctcagtcgattattactggtagatggtggtggcgtgcgcgcggccttcacggcggagttggagactgggaacgaaatggaggaaggccaagttaatttgcagatgctttcccgcccattgtccatgcatgtaatgtaccagggcgattgaaattataaattattaatggtgtgtttgttttgtggagtc

SEQ ID NO: 155865 - DNA, 1326 bp, Zea Mays
tggaccatcgacacacagatcgaacttctcctgtcgtctgcctaccagtagctagctctaatacatagcagccctcgctcgcaaggtactgcactacgatggccgccacctcctcctcctcctcctccacggtagttgcacttgcggcgcttctcttcttgctccttgtaacgtgtggctcgtgcgcgagaccggcgagctttaacgcctccgactttaccgccgaccccaactgggaggctgcccgggccacctggtacggtgcgcccaccggcgccggccctgatgacgacggtggtgcctgtggattcaagaacgtgaacctgccgccgttctcggcgatgacatcgtgcggcaacgagcccctcttcaaggacggcaagggctgcggctcctgctaccagatacgatgccaaaaccacccagcctgctccggcaatccggagacggtgatcatcaccgacatgaactactaccccgtggccaagtaccacttcgacctcagcggcacggcgttcggcgccatggccaagcccggccgcaccgacgagctccgccacgccggcatcatcgacatccagttcaagaggtgggtaacacgccccgctctcgctgcacagaaccaccacgccgacgaccggccgccggctgctcagctggaggccctacaccaattaacagaatcgtatacacatctcgaccgtctagctaattaacactgtacttgccttggagcccttgtacttttgctcaacaaccaactctaacgagaacgaccggccggtttaactgggccccatgtagattcaatccaatccgcacaaatattagcagagtacttccgccattatttgagtttgacgtgtgcatgcatgcgtgcgtacgtgcctgcctgcttcctgcgcgctgtacatgtgtggacgaagggttctgaagttatataggcgcctaatccaagctagcgtgtacgggtaccacatggcctgttcctcctgtagggtgccctgcaactaccccgggcagaaggtgacgttccacatcgaggaggggtccaacccggtgtacctggcggtgctcgtcgagttcgaggacggcgacggcgacgtggtgcaggtggacctcatggaggccaactccgggtcgtggacgccgatgcgcgagtcgtgggggtccatctggcggctggactccggccaccgcctcgccgcgcccttctccctgcgcatcaccaacgagtccggcaagacgctggtggccaaccaggtcatcccggccaactgggttcccaacacctactaccgttccatcatccagtactagctctcg

SEQ ID NO: 155866 - DNA, 166 bp, Zea Mays
tattttagttctattttactcctcccatattttacatgtcaacaattactcaaacatttctttatcgtaaatacatacacatctttataattgattaaaatattttattatcacacaggcctactaatattctactcggtacactaattcagctaattaatcagaa

SEQ ID NO: 155867 - DNA, 166 bp, Zea Mays
tattttagttctattttactcctcccatattttacatgtcaacaattactcaaacatttctttatcgtaaatacatacacatctttataattgattaaaatattttattatcacacaggcctactaatattctactcggtacactaattcaactaattaatcagaa

SEQ ID NO: 155868 - DNA, 327 bp, Zea Mays
atgaaggttgtgaaactaaatgtgttcccccctgcaccagcaagggcatcttcttcctcttcgaggtattcttcatcttcctcttcttcagtcatctttgatgtatggcgtcctctctcctacaaattgactaaactgtgtttgataatcccagatgcaggcactcctcgagtacaggctcgacatccttgcctatgtggggtgcaagtccaccaacttgaccctgtccgaccattgagaaaatttccacttgatctccaatctgagcggctgcgaggaacacgagcagaagacgacattggtcagatccccgagcaaatgtcgtga

SEQ ID NO: 155869 - DNA, 1554 bp, Zea Mays
atgaagaagaaactgatgatcccagcgtctcataggatcataaaagccaagattttaatactgcttctgatacctttagcggcaaagggaagaagtcatctggttgtcgacaacaggatcactatgcattacttgtgttggggcacgagaggagatcatactactcctatagaggatgttgataagttctacaatttctggtacaacttgaagagttggagggaattttcagatgatgatgagtatgacttggagcaagctgaatctcctgaacataagagatggatggagagacagaatgcaatgccacaggagaaggccaaaaaggtagaatatgcgcgggtacgcactcttgtggacaatgtttataagaaagacccaaaaatccagatgaggaaagaggagcagaaagctgagaaacagaggagaaaggaggcaaagtatctgacaaagaaattgcaagaagaggaagcaaccagagctgctgaagaagaaagggtaaggaaagaagaagagtccaagaaagttgcagaagccgctctacatcagaagaaggtaaaggagaaagagaagaagctgctccgcaaagagaaaactcgtttgtgcactcttgcagcacctgtggttgcagatagccactttggtatgtcaaaagaagatgttgaatcaacatgtgcttcacttgatatggaacagctgaagaagctatgtgatggaatggatggcaaggatgcagctgaaaatgccaggatgatgagcaatgcacttcgcaatgaaagttcatcaaaggaagagaagaaaattgaagcaaatagtgtggaatgtcctggtggcgccgtggtggtccttcgggctgtgccgggcttcttccggtggagtcgatgcggaggcaaagaggagcgggctactggcttgggcaagaacatgtggcaggcatgtggcgatggtggtgatgcccttgtggcgtcgctctacctgctggggcaccattgggaggcatcatgttccctactgcatggggctctggagggtgtgaaccctgtccatccgtggacgtgcgacggcggcgccattggcgtcgtgccctccttggaggctccacatctgaggctcgtcttagtcagagatcatgccattacgttaaaaaaaaagccagactcatcgaaagctttcgactccttccttgagaagtgcaaacaggcccaatctattgcttcacctctttggacccgagatgaaattagttcctcaactgagggagctaggactgcatcgtcaaaggccccacaacctgcgagtagccagacagccaatgggaaagctgtcgttgatcctgtcccagatgaagcaccatctgtggctgatccagatgcctggacagaggcgcaggttctggctctactccaagctttgaaggcttttcccaaggatgcaagccaaagatgggaacgcgtggctgctgctgtcccaggtaaaactgtagtccagtgcaagaaaaaggttgcagcaatgagagataatttgccggagcaagaaaactggggaatagactga

SEQ ID NO: 155870 - DNA, 242 bp, Zea Mays
catacctttctcggccttttggctaagatcaagtgtagtatctgttcttatcagtttaatatctgatatgtggatcatgtgtccatttcgatattaaatttattttttatggggagaactcgtaacagtagcttgctgctggagtcttcaagtgtcgtttgggtgttgcactattgcccagacctggcacaccccaaccaaatctaaactaaattttgttttattatcttgagaattttgtt

SEQ ID NO: 155871 - DNA, 261 bp, Zea Mays
atggacttctcatccggcgacgtgaaggccgccgccggcggcggcggcatgccttcgctgctgcgagggtggcgggagttccggcggagcggcgcgccggcgaggttcctctgctttgaggacggaaagtgggtcgatgttgccggagagacggcggtgcagctgcggcgggtgttccaggagaggagggtgatggccgacgcttcgtgcgggggcaaggcgtacctgtttgacttcctctgcatggtcaggattgactga

SEQ ID NO: 155872 - DNA, 337 bp, Zea Mays
gtggtgttcgctaacttgacagaacctatgcaaccaagtgtagcagtaagatccaattgaaacactaatattcacagcagcatgttgaataaaatcaccatatgcaaatacaattattggtcctttatttcagaagacaacaaggatatatgcattcaaaatattgttttaccttttttaaaaaaaaactgcacatgatcgttgttttctgtcaaagacaatgagaaggatattgtggagtcctacgggttcacattcataagctctctgatattgtccttcacatctcatgcattatagaggccatacctacaagaaaaagaagattaggtgcttg

SEQ ID NO: 155873 - DNA, 4923 bp, Zea Mays
tgacattattagtacaataacagcagaatccatggaactgtgttagcaaatgttcatttgaaggtactatccaacagtcggtctttcaacagcaacctgaacaaacttgcatgcaacacctcattggcccaaccctggaatgaggttcctgttagccaacagtgcctcacaggaataggtaagggaaaaaaacagttacctcacaggaatagcttgaaaggaatgagatgacaatggatcaactcattccattccccaaacaaaacaaaacaaaaacatggagtgagaatatgatggatcaccctattccttaaaacaaacaccatataatgtataagcaaactgatttatacaatacaatcatttatccataaagtgcatacaaagaaacttactttcatgtaatacaggaaagagtccatcaaaactccagctttaataaagaacataatattttcaaatacatatcttgcttcataaacaaaacagactgtatttgaccatcacggcaaaagcccacatttgcattatgaaatggttcaccagaaaacagaactgtcttacgaccttcaaaaagactgtatatgcagcaaatataccgagttcatgagagctctaattctgggaaactatacaaatcaggtatgtcgaataaacgtttggatataggtaagagcgtaaatagacgtcctttaatgaatcaagcagtatttaccatcatcgatctccagagcggggaatagacttcctttagggcccgttcgtttcggcaggtttatcccattccgggtctgattccaggcggaaggaaatgtcccggtttagaattcgaccctttatgcgacagctgttcgtttgggcccagatcgaaagcgagagtgatccggtttgaagttttctcttccacaacggcccgacatgaatcctggtctaccgacctccggatccgatatcgacgagacagcgcagcactggcgcggaggaggcgaagaggcgacgacgccagtgacggcgtggcggcgcagcgcagcgttgacggccaccctccccgtcgctttctcaccggtaagcgtcaccctctcttccccaacgcacctgcccttgcgatgctttccttctccctccacatccgccctcgacgaagtcgtgtccagttgtgcctgcccttggcggcgcttccctctccctccccgcgacaaaccgccaagggcttgaccgccttgcagatgccgcacgttgtgcgaccgaggcatttttttatattcactttacaagaatctgagagagaaacacaatcagcggagtcgttttggatgctcagatctactgcagccacactgcttagatgtgctgctctccctacctattcttgtcctagccggtgatgagagataagatagatcatccgcattcctcttcttcattcataatcgttatcgtctcagtaatccctcctatctttcctcttgctagtgatgcatccatggggttcagacatagctagcggttattcttcttagatgcaagtatatgtatatggatcacctaattagcttcgtctacactctacaccttggagaagtcggaccatcttggagaagcagtagaagctagctgcaagtaggcacaagcaagcaggactatctctgcttctactgctataactgagcccaatggatgcagccatattctccaatgtctgacttctccaaggtcagatatagcaggcacaagcaaatcggaccatttttgcttctactgcaagcaggcacaagcaagtcggtccatctctgcaagtgggcacattatattgtatatattgtactagcaaattaaagttgatcatatgacgaacaggcctgcaacttatttgtttgactaattatttatgttttgttacatgtagatccctacaacactgattagatattttcctttcgtgtttgtgctatactgatttgatgttaaatgtgtatatagggaaaaggaatgtcaatgtcgtcagttttgttttgattttcaaaaaatgtccagattagctttccaaatctgcgttgtttaaatcattctctaactacaaacctagattcatttgtcctgagtagatttatttatcctgattcatttgtgtgtctagattcatgtgttttcttcaagaatttagtgtatactttatgatcatgtatgacagctacttatttgagttgttacatgtagatccctacaacaccaattatagttggggaaggtgaacctcctccctcttgggatccggtaccaactccaaaagttctacaatgagtatgtcattgcaagatcatattagaaagaggagggaagaagaagatgatgacatgatgttgtttattttccctgccttacatctgatgggttcaactagaggtgggggacaaaagaagaaacgccatacatcagatgagacaggcgaggttaaggtccgacgactcctcgagggacatgtcaagaactgtcaagttacatttcggatggaaccacacatcttcagagagctggcaacttatcttagaaggagaaagatcgttgttgatacaaggatcacggtcgaggagaagttggcgttcttcttatacatgctaagttgcaacgcctcatatcaggatctccaagtgtactttggtcatactatggttggaaaaggctccccaaggttcaacatgagcagttccccaaagctgcgtaggtatattcctacaacaagtgctactaaaaagaagccttctcctaaatgttgtggggcaaaaaagagtggaggttctccaagagtagtgaaacaaagagcagattggaatccaggacttgagagatctcttgttgatattctccatgaatttaaagatagtgggtatagaggtgacaatggttggaactctgaagggtggaataggatggttaaggagtttcatgtgaggaacaagtatgtctcctttacaaaggctcagattcaggataaagaaggtcagttgaagagagactacaagatgctcaaagcaacagagcggacatttcctaaaatcaagaagtttaacaacaaggcaaccttcccgctctttgatgctttgggagagctttatgatggacacttggctgaagggacttggagttgcacttctctcgaggcactgcaagaggaagaaccgaatgagcaactccaggatgcagaaaatgggccacaaggctttgatctgaatgttgttcatgatgtagatgatgaagttgatgatgcactcactgaaaggaatgaagatgtgcttcaaggaagggctaatattttgtcacgagatgaagaaagtggacaacgaagacctgttgcatcaagaaacaaacaagaaaaggaaccaaagaagcctagaaagagtgacaacatagaaaatatgatgaacaaatacctataaatgaggagcaagcaagtagaatatgaatctgcaagagaaaaggaggcaagagaaatggaggtaactcaaagtgatgatttctccatcaaaaggtgcatatcagttatgaatacaatagaagaagtgaccaaattggagaaggcaaaagcatattcaatcttcgccaagagcaaagagaatagagaaactttcatatgtgcttgtgaagcagatcaagaatcagctttgatttggctaagaaatgagatgtcttagcagcttcgatatggacattattgggaagcaaagtattggaaaaaactgcatttagttgatgatccactagaagtttaggctatgtcccactcgagtctttatactgtggtgctgtctcttgttatgctatattccctgcatgatttttgtttttggcatgtctacagctggttcagctgttcggctgctcattatgctcattatggccagcaatatattaaatctgcattgtgcaatatattgtcaaacaagacttgggttgctagctttaactgcatggaatggaattagtccaggctgaaacgaacaggctttagtggccaccaggtttcattccagagccggatttataacagaccaagtttcagtgaaccacctggatccactctatttggaccaggaataaatacatgcctgttttcgaacctaagcaaacgaacgcggccttaatgagcaaggagtaactaagaccgtctgcggcagtctacccaaagtttatccaaaaaaacactgttttgcacttgtagtacaagtttgattgaatatggggatgggtaagctgctggagatagactaagaggacacatcgtcacaataccattacacttacaccaatgccatctcatcagagtaagttcagtcatagattactattattattataattttcggcaaacagcggtggaattttaccctcctgatgaaatttgacacacatcacagtaaatagaaagacgtaagctgggtccgtgaataccgccgtgggatgctgcgccgtctggtactgcgggtcgtagtacggcaggtgtcccacgtcgcccccggaccacccaatcgaggtggcgaagccggtgggctgcgacagcgcggggacggctaaaggctccgcccctggcccgcccactatgacgctgttcgatgatcccactgcggacgaccacgacgagaaggcggccgcgggagcagcatgctccgttcccggtgggggcggctggtagtaggaggaggcggcagcggcgctgtggcgggcgtaggcgtatgggtcgtagtcggatctctgcggccaggtggcgtcatggggaggcaggccctggtcgtagcccatcgccgacggctcgccggcggcgacggcggggggcggccgtgcgggagtcgggggcattcgtgggtcgatggtatgggatggggatgccgattcgtggacggaggcagcagagcccttcgccaacgccag

SEQ ID NO: 155874 - DNA, 2460 bp, Zea Mays
gctctgaccttccctccctccctccctccctcttggaccgagcgttcttctcttgcttttgccaaccagaagcctcgagccgacgcatccaagcatctcctccccctctaacctcccctcctcccaacaccatcagcgagcggtgccgactgcctcgcaaggccagcagcgcctcgcaagcgagcccaccgccgctgatcaccaggcctggttgttgaggcgaccctcgcgtgggactgcgacagcgccacagcggcgatggcggggctgccgccggtcgccaggcggctccggctccggctcgcgaccgcggcgctcctcctcgtcctgctgctcgcggtgaccgcggcggtggcggcgcgcgaggggcggggcctggcgcgggtgcagggcccgccgccgcggcaccgccacgcgtacgccgcgatgatgtacatgggcacgccgcgggactacgagttctacgtcgccgtgcgcgtcatgatgcgctcgctcacccgggtccgcgccgacgccgaccgcgtcctcatcgcctccgccgacgtgccgcgcgactgggtccgcgcaatgacagaagaggatggcatgagggtggtgatagtggagaacctcaggaatccttatgagggcaacctaggagggaccaacaagaggttcaagttgacactgaacaagctttatgcgtggaccctggtggactatgagcgtgtcgtcatgattgattctgataacatcttcctccagaacacagacgagctattccagtgtggacagttctgtgctgtgttcatcaacccgtgctacttccacactggtcttttcgtgctccagccttctattgatgtattcaagggcatgcttcatgacctggagaccggccgtgaaaactctgatggtgctgaccagggctttttggttgggtgctacccagacttgctcgataaaccaatgtttcaccctcctgagaatggcacaaagctcaatgggacctatcgccttcctctcggctatcaaatggatgcatcctactactatctcaagctacattggcatgtcccgtgtgggccaaacagtgttatcacattccccagcgcaccttggtttaaaccttggtactggtggtcatggccggtcttgccactaggactttcctggcacaagcagcgctgggacgatcttgggtatgcttctgaaatgccagtgatcctgatggaggttttaatgtacatagttatcataacggtcaccagactggcaaggccagggatgaccaaactgtgctacaaccggcggcctgagaagcaaagtgccctggtgcagtggctgatcaagctaactgcaattgtggctatggtggctgcgtactccattccattctttgtgatcccacgcacagttcacccgatcatgggctggtccgtctacctgtttggcgcgctcgcgttgtcggtgctcgttatcaacgtttttctgctcccgccacttgacgtgcttacaacgtggctcgcaattgtggggatgctcttcgttatggcgttcccatggtaccatgatggtgttgtgagggctctcgcagtctttggatacgcattttgctctgcgccattcttgtgggcatccgtggtgaggatgatggactcactgcagaccatgctcgagagggatccgttcttctcccggattggtgaaccaacacaggagactgaattcagcaagctgtactgattcttttgtgcacagattagagatgcttcgtcaccatatgaacagctggttcggaccagttagttttcgattgattctggtggttttcgctcaggcattccattgtgtgctcgggtagtaatgtataaacattgcctgcggcagccatgattgatgcagatacaggaaagataggccagttgtactgaactgaaaaaaaggaagcatatttgctgcatggaacgggacaggggattgttgcgaagtaccttatttcttgccaacttggatcgccaaaactatttctgagcaaattcctttttgcagtctgcattatggaaacatgctacataaggtaaacctactagcagtatgtcactgatttgctcaacagagctataaattatacgagacttcagaaataagtaatctaggtagggtacccaggaaaaaaataacgaaaatgcaacaacgaatatgctactaaatcttgttttgggacgatacttaatttgcgaccaggaccatgttcaaaaagtgcttttgattttgacagtacaattagaatacctcaaacaattatctacatcacaggggctgagatggtatagaaaatgaggtgctctcaactggacatgttctctactgatggagaaactagaagacatgcccctctaaatttcagcatcttgcctagaccgaaccattaacttgtgctgcaactctggttgcctgggaagaacaatcttggtgccg

SEQ ID NO: 155875 - DNA, 1175 bp, Zea Mays
caacgctcaacagcagtgatacggtgctgcacgggtcctcatctgtatgactgtatcacatatgcatacgattctgtccgcatcaacgctcaaaggcacatgcgggctgcggcatggtgtgaggggtggggatgaagtggaggcaggaaggtggcgcgtccagcggattggccttgggcatcatggtcaggttacaacaacaattaacaaccttatccttggtcgagtatattgccatcaccatggcacaatgaacataagtgggaatagacgatattcatgcaaactgacgtttaaagagcagtctttccttgatcggaatcctcgccaggttcaaggagttgtcaacgatgctgatggaagcaaggtcgcaacattgatggggaagtgggatgaaagtatgcattatatcatcaacaatgatgcctccaagaccaactcccatggttcacatgagggttctggtgccactttgctatgggagaaaaacgagcctccagtcaatcccactcgctacaacttgtccacatttgcaataacattaaatgagttaacaccagagctcaaggagaagctgccaccaacggattcaaggctgagaccagatcaacgtcacctggagaatggggagtacgagaaggccaatgctgaaaaactgcgtctcgagacacggcagcggatggcaaggaagatgcaggagagtggctggaaaccaagatggttccaaagggacagcgaggatgggacataccgctacgtcggaggctactgggaggcaagggagcagagaacatgggttggctgcaatgacatatttggtaacttgtctagcagcccaaagctgccgccatccggtctcaacactagctcaagtatatagaggagctgacatcgcattaatcacttgggtttagctgtgagctaacatcacttgtggtacactgaatcatttgtcacattgaagccaaggacattcaagcttaacccaagcttttgtcgatactagaaagaacacgagaaatattgccaaaactattgttaaaagaattctttatgatatcattttcttctgcattgcacaaggacgttttgcatgtttggtgcttgtgttgtttgtctcgttggtgatgctgctcaaggttgttcaagaactagagcatcaggctgggcttcat

SEQ ID NO: 155876 - DNA, 2683 bp, Zea Mays
cgagtccacgtctcgtctcctcctcgccccactcgccaaccacgccggccgcaccgaatccgctgctcgaatactagactagtccgaagagccaaatggtggtcgcgtgaggggcgggcggcaggagatcggcccgcccggggaggggggagactacgatgcgggcgtgggagatgcacccgctctgctgcctcgccgccggggagtggccggcctcgggcgcggcccgcgacgaccgctccccgccgcccgagggctcgggggaggcgccggcggtggcgggggtgctgtacaagtggaccaacatcggcaagggctggcgcccgcgctggttcgcgatccgcggcggcgtgctggcctactcgaagatccgccggcgcgtcgcggcggctcctccgcgtcccgcctccgaggccgcgggcggcgtcaggctcatcggggtggcgcgcggcgccggggagcgccccatcggattcgtgcctctcaagatgtcatcatttagtgaaagtaaatcagatgataaacgtttttatataattactccgaccaaaacacttcaactgaggactggttgcgcaaaggaccgggcgacttggattgaagcgcttgtcactgcaagaagcgagtattcttttaatggggatttatcaggtgaccaaaacgtcgcatcattttctacagaaaagctcagaaatcgcttgcacgtcgaaggtgttggtgaggcagttattaaagactgtgaacagattattcagtcagaattttcgcagtaccaaacacagatgaagcagcgttgcgaagagtatttgagttttattggcagtcttccacgggaagttgaggtagttaattcagtagattcaactgtccctgagaagtcacagctggaactgttcaagcatgactgctccagctccggaaaatgtagtgaatatagcaacacagaatcttctgatgatgttggcaaacaagagattagtgaactatcagatggagatgattttcatttctatgacacaaggcaaagtttcagtgaatttactacgactcctgctgacctgagaaagggatgtgtaaacaccggaaatgaagatcataaatctgttgaatcactgactgttgatgaggccgagaaatatatgctgtcacatccaaaaaggcgctcacagttgcctgagccaatagaaaaggagaaaggggttagcctttggtcaatgattaaagacaatgttggaaaggatctaacaagagtctgccttcctgtttacttcaatgagcctttatcttctctccagaagtgctttgaagagttggagtactcttatttgctggatcgtgcatatgaatgtggtttaagagggaatggtctgatgagaattatttatgtcgctgcatttgcggtctctggatatgcgtccacagattcccgcccctgcaaaccatttaatccattgcttggggaaacctatgaagctgattaccctgaaaaggggatccgtttcttctctgagaaggtcagtcatcatcctatggtcatggcatgtcactgtgaggggaaaggttggaaattttggggagacagcaatctaaagagcaaattctggggacaatccattcgactggatcctaatggtgtgctaactttagagtttgatgatggagaaactttccaatggagtaaggttacaacaacaattaacaaccttatccttggtcgagtatattgccatcaccatggcacaatgaacataagtgggaatagacgatattcatgcaaactgacgtttaaagagcagtctttccttgatcggaatcctcgccaggttcaaggagttgtcaacgatgctgatggaagcaaggtcgcaacattgatggggaagtgggatgaaagtatgcattatatcatcaacaatgatgcctccaagaccaactcccatggttcacatgagggttctggtgccactttgctatgggagaaaaacgagcctccagtcaatcccactcgctacaacttgtccacatttgcaataacattaaatgagttaacaccagagctcaaggagaagctgccaccaacggattcaaggctgagaccagatcaacgtcacctggagaatggggagtacgagaaggccaatgctgaaaaactgcgtctcgagacacggcagcggatggcaaggaagatgcaggagagtggctggaaaccaagatggttccaaagggacagcgaggatgggacataccgctacgtcggaggctactgggaggcaagggagcagagaacatgggttggctgcaatgacatatttggtaacttgtctagcagcccaaagctgccgccatccggtctcaacactagctcaagtatatagaggtaagggcatactgtagtcagtatgtgttgacgtcacattagtcacttatggtacataattgagaggggcttctctcgtttctgttgtgttacgtgttaagctgtgagctaacatgcttctgtcgatactaggagctgacatcgcattaatcacttgggtttagctgtgagctaacatcacttgtggtacactgaatcatttgtcacattgaagccaaggacattcaagcttaacccaagcttttgtcgatactagaaagaacacgagaaatattgccaaaactattgttaaaagaattctttatgata

SEQ ID NO: 155877 - DNA, 2199 bp, Zea Mays
ggaattgtgattcttgaccacaaagtggcagatttgacacatctcggtccccaacctcacctcgctccttccttgcatatgcaagcggcaacgacaggttcgcagagccctagaaaagattagatccccatctcccactgcccatgcagcagtaaatcaaggcaggtgaaaaaaggcatgtgagccgagagagaaacaggaaagaagacggaaaaaaaaagaaagaaagaagccgctggggctgtgctgacggctggcgctacgggcagccgtctgcaccagtatccagccgcgaaaaaaatcagaagatccgagacggagttcgacgaggggaggcgcgacaaagaaatatccaacggaaagatggaggatctgaataagttttatgcttctttctggaagcagtctagcagttcacttagtagcctgcactctgttcatgagcataagctgatgaacttgggttcgaagcgcaatcaaacccaagaagtttccaccaactacaataaacgtaaatcgttgtccggaattgtggaactgagttcagatgttaggagttcaatccggaggaaatctgatgcttatcgcgaagtgattgacttggagaagccatcggtttatggtgatgccgtggaagctatcggttgctctggccttggcaaccttgccaaccaaaatggcaagtctcaggatgtttctccacagaacaactcacttgcagagtctcttcagttgtgtagagactggaagacatcgcgcgtaagtgttggttcagttggatctagtcacactccggattgccagtcccctaccaaaacaagtaacaatgaagcaagacaatcactatttgacctgaatgttcctccagaagaaagccttcttatgccttctactctatttccttcttcctcaacgtattgtggaaatttttcagacagacctagagaaacttctgaaaaagaacgtgtctctggtattggatcaacgaaaggatcttccatcacggtgatcacgcccgactcagctgcagacagttcaagggatgtggtaactgaatcgtcagtccaacagaagttcccttttgaccttaacgtgtcacctgaaaacaccaacatgccatcagaaatcaacgattatagagataaggttgtaaataatggtgtaagtaaaggaacagcacccgatcattctttctccacgaaaaatggcctgcttgcagaaacgtccaccaaacatgtggttcttggacatgatagtgtattggcacacaagcaggatgacagtcacgtgcttctcacagtcccgacagctaatggtatcgataaagctcactcgccacagcctggaaccattaacaaggagtttttagaccctggatctcctcttcttgataacaatttccatccaagacttgggacatcccacaatggagcatcagatattcaggagttaagcatgcttcaatgtaaggtcgacgatggtggcaccacagctgatactgcagctagaacccttctttccatgtttcagcatagttctgaatgtgttgctcatcgccctggaagcagcaaccagacagcagctcagaaggtggacgacgagcctcagccttcgttggactcgttcgagaaaaccgtgttggattcagaggaggccaaagatgacgggcaatccgtcaccgtgaccccacctttcaaggaagggccagcatgtcggatcaagctaaagagagggaggggcatgagaaatttccagagggagatagttcctgggctccttctagggaggcaggagatatgcgaggacctgaaagctataggttacgaggcaaagaaggctcggtctaggaaacctcgcaagggtccaggtgcgtcttcggctcgacccaggccgcgcaagcgtggagctgccaagcactgaccaggagcatctgtgcgttccgtggcagggcgccatggggcaggcgagatccagaagaatcgttctaaccatgtgaatattcattcgtgtgtatcaagcctagtttcaaacactcggtttgctagctagtggatatttagaccctatttgttttgctctcctagattatataagtagattatataagttcgattatggtggaaagttatgagagtaaattattattttgatatcacaaataaactgaaataaggtaccccagtactagtttagatttaa

SEQ ID NO: 155878 - DNA, 2036 bp, Zea Mays
ggaattgtgattcttgaccacaaagtggcagatttgacacatctcggtccccaacctcacctcgctccttccttgcatatgcaagcggcaacgacaggttcgcagagccctagaaaagattagatccccatctcccactgcccatgcagcagtaaatcaaggcaggtgaaaaaaggcatgtgagccgagagagaaacaggaaagaagacggaaaaaaaaagaaagaaagaagccgctggggctgtgctgacggctggcgctacgggcagccgtctgcaccagtatccagccgcgaaaaaaatcagaagatccgagacggagttcgacgaggggaggcgcgacaaagaaatatccaacggaaagatggaggatctgaataagttttatgcttctttctggaagcagtctagcagttcacttagtagcctgcactctgttcatgagcataagctgatgaacttgggttcgaagcgcaatcaaacccaagaagtttccaccaactacaataaacgtaaatcgttgtccggaattgtggaactgagttcagatgttaggagttcaatccggaggaaatctgatgcttatcgcgaagtgattgacttggagaagccatcggtttatggtgatgccgtggaagctatcggttgctctggccttggcaaccttgccaaccaaaatggcaagtctcaggatgtttctccacagaacaactcacttgcagagtctcttcagttgtgtagagactggaagacatcgcgcgttcagttggatctagtcacactccggattgccagtcccctaccaaaacaagtaacaatgaagcaagacaatcactatttgacctgaatgttcctccagaagaaagccttcttatgccttctactctatttccttcttcctcaacgtattgtggaaatttttcagacagacctagagaaacttctgaaaaagaacgtgtctctggtattggatcaacgaaaggatcttccatcacggtgatcacgcccgactcagctgcagacagttcaagggatgtggtaactgaatcgtcagtccaacagaagttcccttttgaccttaacgtgtcacctgaaaacaccaacatgccatcagaaatcaacgattatagagataaggttgtaaataatggtgtaagtaaaggaacagcacccgatcattctttctccacgaaaaatggcctgcttgcagaaacgtccaccaaacatgtggttcttggacatgatagtgtattggcacacaagcaggatgacagtcacgtgcttctcacagtcccgacagctaatggtatcgataaagctcactcgccacagcctggaaccattaacaaggagtttttagaccctggatctcctcttcttgataacaatttccatccaagacttgggacatcccacaatggagcatcagatattcaggagttaagcatgcttcaatgtaaggtcgacgatggtggcaccacagctgatactgcagctagaacccttctttccatgtttcagcatagttctgaatgtgttgctcatcgccctggaagcagcaaccagacagcagctcagaaggtggacgacgagcctcagccttcgttggactcgttcgagaaaaccgtgttggattcagaggaggccaaagatgacgggcaatccgtcaccgtgaccccacctttcaaggaagggccagcatgtcggatcaagctaaagagagggaggggcatgagaaatttccagagggagatagttcctgggctccttctagggaggcaggagatatgcgaggacctgaaagctataggttacgaggcaaagaaggctcggtctaggaaacctcgcaagggtccaggtgcgtcttcggctcgacccaggccgcgcaagcgtggagctgccaagcactgaccaggagcatctgtgcgttccgtggcagggcgccatggggcaggcgagatccagaagaatcgttctaaccatgtgaatattcattcgtgtgtatcaagcctagtttcaaacactcggtttgctagc

SEQ ID NO: 155879 - DNA, 1463 bp, Zea Mays
atggcaaaagctattaaaggatcaactagatttaagactagagggctgcagaatgaggaccacttagctactatgttcgaagatctacgcaacactggtgatgaccattggagtgcatccagtggtcttccaccaactcaacaaaatgtagagcaatcacctataaatgttgatgtggaatttgaacctaccaatgaggatgatagtgagcctgaggagatcacccctagtagtggtaaaggaaagaggccaagaatccctgccaataacaaaggggtgattataataataatgtcgttaatgattgttcgaacgttgtattctttcaattgcagtgatgatgtcgatgatggtgtcgacctgaatgaatttttttggatacagatgatgatcaaattacttccagttctgaaccatgctttagatttggattttgtgaagtgtgatcggaatcctgattatgtgcccacaattccagaaagctttggcttgcgcgcatggtacgaagagacgcagccggtcttggtaccgcaccgacgcgcggctcctgaaacgaggctgcttgaccgacgacgcggccaaagccgatgccgtgttcgtgccctactaggctactacgcggctctcgacgcactgccgtcgtgctcgatccgggccgcaggagcatgcgatcccgcactcgacgtccttccacccgtcgtctctcgcgcacctccgcgccacgctgatgctctaagcgggcgcggcgcctcccgcccgtcccggcccaacatccggggctccatcctctccgagtgcgcgaaccgcaccgacgcatgcgtcgtcgtcgactgctccggcggcagatgcgcgcacgacccagtccggtacatgcgccccatgctgcgcgcggtccaggttctgcctgcagccgccgggggggacgccgacgcggcgctccacgttcgacgccatcctcgccggctgcgtgcccgtgttcttcgaggacctgcggcgcggaggcagtacgggtggcacctgcccccggtgcggtacggcgagttctcggtgcacatgcccaaggaggccgcggtgttcggcggcgtccggatcgtcgagacgctcgaggccgtgccggaggaggaggtgcggcggatgcggcagcgcgcgctggagatggcgccgagggtggtgtaccggcggcacgggagcacgcccgagctgaggcaggccgtgaacgacgccgtcgacctcgctgtggacggcgtgctgcagagaattcgaaggcggacgcacgcactggaggaaggactgccggagaggctttacgcgcaagaggaggatagcgttagcgttgacatataggatcaggagcacgcccttcggctgcatcagggcattattcagtgaaatagagtgtgtacatgttgctgttgtagtggagaaatgagatttgtgttccatgtctgtaactgcagtagttt

SEQ ID NO: 155880 - DNA, 354 bp, Zea Mays
atggctgggaggctaaccgcggcagggtcccgcatcctgggcggcggcggcgcacgcgccgcggcttccgccctccgacaccgcgccggcatgggcctccccgtcggccgccacatcgtccccgacaagcccctccccgtgaacgacgagttggtatgggataacggcacgcccttcccggaaccctgcatcgaccgccttgccccgcacatcggcaagtacgaggcgttggcgtggctgtgcggagggctagggttcttcgctgccctcggtatggctgctgttgtgaacgacaaggcctccaatataccatatatatcactccacccacggcaactatctatgatatgttaa

SEQ ID NO: 155881 - DNA, 2386 bp, Zea Mays
ttccagctcatttccgattccttcacgtccacccatcccaagctgcccgcacgtcgtcaccttgctataaaacaagagctgagcccgcttcctccaatcttggactcagctaaacccgacacctttcctcgaggaccttgacgaaaacagccgccttttccttgccgtttcccgtttatataagtcgctgcgccgggttgaattccattgcattgcatcctcctccacttcctgcctgcctgcctgcgtagctcgcacaccacaaccgccgcgttcttcttctctcgtccctaagcaagcgccgctgctcctcggttctttcgctcgatcccgcaaggcccgtccttccatggccatcgcctcccgtgccacgaagcgcgcgctgtccaccttcgccgcggccaagctcccggaggaggcgatcgccgccaccgccgcggtgccggtgccgctggcgcccgcgcccgcgtcgtccgagagggcgctgctgcagttcgaggacacggggcggctgttcgcgggggagccgacgccggcgctgctgcgcacgctcgccgcgctgcaggcgctgtccgtgggcccgctggtggacgcggccactgcggcgctgcggtcgccggcggtggccggcagcgcgctgggccgggccgccgccagggccacggcgtaccggcacttctgcgcgggcgagaccgccggcgaggccgcggcggccgtgcgccggctgtggcgcggcggcatgggcgggatcctcgactacgggatcgaggacgccgaggacggcggcgcgtgcgaccgtaacgccgccgggttcgcctccgccgtcgacgtcgccgccaagctgcctccgggctcggtgagttcgtcgccgtcgccgcttagcgcttactcttccgtttccgccgcttcggttttcctccgtgcgttgcatggcggtggccggtgggacgggaggctgccacgtcggacggaatcttcggtgccgtctgctgtctgcgcgagtggacctccggattccgtgggaatcttctcgtcgtagtctgtctccctagtgaatcgcccgtctgtctagctagttggtgctgattcggtcactgctcgtgggccctgattttatttttagcacgtcacgcttgccctgtccgcgccgctcgtttccgcctcgaaatctcacaccagattccaaaaccctactacacggcgcggctggaacggaatcttctttatttttagacaatttctaataaccactgcgttaaccactgtgtgggtcgctgtttgtgcgtacgtgcaggcgagcgtgtgcatcaagatcacggcgctgtgcccgatcgcgctgctggagaaggcgagcgacctgctgcggtggcagaagaggcacccgtcgctgaacctgccgtggaagacgcacgacttcccgatcctgtcggactcgagcccgctgcacctcacggcgtcggagccgccggcgctgtcggcggaggaggagagggagctggagctggcgcacgagcgggtgctggcggtgtgcgcgcggtgcgcggagcgcggcgtgccgctgctggtggacgcggagtacgcggcggtgcagccggcgatcgactacctcacgctcgccggcgcgctggcgtgcaacgccgagcgctccatcgtgcacggcacggtccaggcgtacctacgcgacgcgcgggagcggctggagaccatggcgcgcggcgtggagcgcgcgcgcgtgcgcctgggggtcaagctggtgcgcggcgcgtacctggcccgcgaggcccgggtcgcggccgccctcggcgtgccgtcgcccgtccacggcagcatccgggagacccacgactgctacaacggatgcgccgccttcctcctcgaccgcgtccgccgcgggtccgcctccgtcgtgctcgccacccacaatgtggagtcaggccaactcgcggcggcgcgtgctgaggagctggggatccccaggggagaccgcaacctgcagttcgcgcagctgatgggcatggcggacgggctgtcgctgggcctccgcaacgccgggttccaggtcagcaagtacctgccgtacgggccggtggagcagatcgtcccctacctcatcaggcgcgccgaggagaacaggggcctcctctccgcctcctccttcgacaggcagctgctccgggaggagttggtgaggaggttcaaggctgcggtgctgggacgtgagtgaagtgaacctgctgaggctactctgctgtgaagctgggacaagggccagttgaaggctagaagctgtaaatacacccttcaacagtcttcagacattgatgtatccggggctttcttgaataaatcgattgaatggaataatgaggcttatcgagcttaaaca

SEQ ID NO: 155882 - DNA, 2021 bp, Zea Mays
gtctcgcgctcgcccgtcccattgcgctcgcagtctctcacgctgactcacactcacctctcgccatctgattttccagctcatttccgattccttcacgtccacccatcccaagctgcccgcacgtcgtcaccttgctataaaacaagagctgagcccgcttcctccaatcttggactcagctaaacccgacacctttcctcgaggaccttgacgaaaacagccgccttttccttgccgtttcccgtttatataagtcgctgcgccgggttgaattccattgcattgcatcctcctccacttcctgcctgcctgcctgcgtagctcgcacaccacaaccgccgcgttcttcttctctcgtccctaagcaagcgccgctgctcctcggttctttcgctcgatcccgcaaggcccgtccttccatggccatcgcctcccgtgccacgaagcgcgcgctgtccaccttcgccgcggccaagctcccggaggaggcgatcgccgccaccgccgcggtgccggtgccgctggcgcccgcgcccgcgtcgtccgagagggcgctgctgcagttcgaggacacggggcggctgttcgcgggggagccgacgccggcgctgctgcgcacgctcgccgcgctgcaggcgctgtccgtgggcccgctggtggacgcggccactgcggcgctgcggtcgccggcggtggccggcagcgcgctgggccgggccgccgccagggccacggcgtaccggcacttctgcgcgggcgagaccgccggcgaggccgcggcggccgtgcgccggctgtggcgcggcggcatgggcgggatcctcgactacgggatcgaggacgccgaggacggcggcgcgtgcgaccgtaacgccgccgggttcgcctccgccgtcgacgtcgccgccaagctgcctccgggctcggcgagcgtgtgcatcaagatcacggcgctgtgcccgatcgcgctgctggagaaggcgagcgacctgctgcggtggcagaagaggcacccgtcgctgaacctgccgtggaagacgcacgacttcccgatcctgtcggactcgagcccgctgcacctcacggcgtcggagccgccggcgctgtcggcggaggaggagagggagctggagctggcgcacgagcgggtgctggcggtgtgcgcgcggtgcgcggagcgcggcgtgccgctgctggtggacgcggagtacgcggcggtgcagccggcgatcgactacctcacgctcgccggcgcgctggcgtgcaacgccgagcgctccatcgtgcacggcacggtccaggcgtacctacgcgacgcgcgggagcggctggagaccatggcgcgcggcgtggagcgcgcgcgcgtgcgcctgggggtcaagctggtgcgcggcgcgtacctggcccgcgaggcccgggtcgcggccgccctcggcgtgccgtcgcccgtccacggcagcatccgggagacccacgactgctacaacggatgcgccgccttcctcctcgaccgcgtccgccgcgggtccgcctccgtcgtgctcgccacccacaatgtggagtcaggccaactcgcggcggcgcgtgctgaggagctggggatccccaggggagaccgcaacctgcagttcgcgcagctgatgggcatggcggacgggctgtcgctgggcctccgcaacgccgggttccaggtcagcaagtacctgccgtacgggccggtggagcagatcgtcccctacctcatcaggcgcgccgaggagaacaggggcctcctctccgcctcctccttcgacaggcagctgctccgggaggagttggtgaggaggttcaaggctgcggtgctgggacgtgagtgaagtgaacctgctgaggctactctgctgtgaagctgggacaagggccagttgaaggctagaagctgtaaatacacccttcaacagtcttcagacattgatgtatccggggctttcttgaataaatcgattgaatggaataatgaggcttatcgagcttaaaca

SEQ ID NO: 155883 - DNA, 3524 bp, Zea Mays
atggagaacggcggcggcgtcagggaagggcgcccggagcatcgggcgggcgagaacggcggagtcgccgcggaggaggaatccgtcttgaaggcagccactttggcgggtgagggcaattgtgttgtggcggtggaggtctgggatgagggggacgtgccgctggggcaggatggtggcggagatgaggctggggaagaaaaccggggccccggagaaggtgcagtggagtctgcggtggtgacgggcgatcaccagccattggtgacgccgaacaccagagtggccggacagcgtggggcagagaagtgggacgaggacgacactcccagtttcgtagatgtggaggaaagttttgctgatgatgtgaatcaagaccatgtgaatgagaatgtcatggggcaatctttcagggagtacatggtcacatctgttttggctgatcgtgaaaaggagaggttagacaacgaccacaattttttttcaaatcctggtgacaaggctgaggtcgctgcacattctgggagcgagtatgaagatgtaaaaggtggtactttggcgcatcaaagcaaaaatcatccagggaagagcacagaagagattgcttcctctcatagcaggccagagttggtcacaaattctgcagctgagcctgctgttgtaattgaggagttggatgactcaagctcctcagatgatgagaatactgcgacctctgctccccctgcacaatcctcaagtgggagttctacatctgcacaacccagcagtgctgcttctgctcgttctactaatggtccctctctgatatctcgtcctgctggccttggatcatcctcttccctatcgcagcctcctgcccgttctgttcaacaggtccgtgccagcaggccagccgctgtggataagggaacccaggaggctactgagtctgccgaggatgatagagatgagaatgatgatatccatgaaaaacttcaaatgatccgggttaagtttcttcgcctcgctggcaggttggggcaaacatctcataacatggtcgtttcacaggttctgtaccggcttgggctggcagaacaacttagaagaactgctaatgggacatttagcattgaccgtgcgagagagatggcagaacgtcttgaagctgctggaaatgagccccttgatttttcatgcaccattttggttcttggtaaaactggggtcggtaagagtgctaccattaattcaatttttgatgatatcaggttggatacaaatgcctttgattctagtactatgaaggttcaagtagttggtacggttgagggaatcaaagtaaaagtcatcgatactcctggactttcctgttcatcttttgaacaacaccacaaccagaaggttctcaactctgtcaagagacttattagcagaaaccctccggatattgttctttattttgataggttggatatgcagagcagggacaacggtgatgtccctctgctgcaaactatcacgaaagtgttcggagcatcggtttggtttaatgccattgtcgtgttaactcatgctgcgtctgcaccaccagatgggcagaatggaattcctctgagctatgagatgtttgtcacccagagatctcacgtagtgcaacaagctataaggcaagctgctggtgatggacgtcttatgaatccggtatccctagtggaaaaccactcagcatgcaggacaaatagagctggccagagggtattgccaaatggacaagtctggaagccacagctattgctgctttgttttgcttcaaaggtgttagcagaagccaatgtgcttctcaagttgcaggatagtcccattggtaaactttctcatacaaggattcctccattgcctttcctcctctcttcccttcttcagtctcgtgccccactgaagttaccagaggagcaatttggtggtgatgatgatgatcttgaagacgatttggcagacgattctgattcagatgatggttcggattgtgatgatttacctccatttaagcgtctcacaaaagctcagcttgccaagctgaacaatgagcagaggaaggcctaccttgaggagctagattacagagagaagttgttctaccgaaaacagctgaaagaggaaagcaagcaccgtaaattgatgaagaaaatggcagcagaagccagtgctcgaggaactgatttcagcaacagcaacctagaagatgattctaatactccaactaatgtttctgtgcccatgcctgacatggtactaccctcatcttttgattctgactatcctacccatcgctatcgttttctggatacaccaagtgaatggcttatcagacctgtattggaaacccagggctgggaccatgatgttggttatgagggacttaatgttgaaaggttgtttgctgtaaaaggtaaagttcctctatccgtgtctggccagcttacaaaagacaagaaggattgctccctgcaaatggaggttgcaagttcaattaagcatgctgagggtaagactacttcatttgggcttgatttgcagtctgtcggcaaggatatggcatacacaattcgtggcgaatcgagatttaagaacttcaggcgcaacaatacagctgctgggatatctgccacgcttcttggggactcagtatcagctggtctgaagattgaggacaaactgatagtgaacaagcagctcagggtcctggttagcagtggggccatgagtgggaggggagatgtggcctatggaggccgcctcgaagcaataagggacaaaaattacccgattgggcggttgctttcaactatcgcgttgtctgttgtggattggcacggggatctggcaattggctgcaacatccagtctcagatccccgctggaagagctagcaacttggttggccacgccaatctaagcaacaaggggactggccaagtcgggattcgtctgaacagctcggaacatcttgagatcgcactcgttgcgctcgtgccgatatttcagaacatcatgaagctgttacagaattacttagaatccggctaggccctcgtgccgatattcatttttctctcaaaagagctgcgcatcatgtgctattctaaatcgaactaaagtcaaactttctagtgcttaagtatattccagaacatcatgaagctgttacagaattactcagaatctttttctgttagcctgggaaaaaagtgagcagggcatcataggttaaaaaagctagcataagttataatttttttacttccaatttgttttgttcttttgttgccaactttttgtaactatgctctcccctaagctcttctttttaggtgaactctggagtactactcatctatctaatgcaagggttttccctgagctcttgctgacgaagctgcattggagaattgaccgtgtcattttgtccgatttcgggcatactatattgctatattatactcggtattaacatctgaatcctactgcattctgataaa

SEQ ID NO: 155884 - DNA, 107 bp, Zea Mays
gcacgtgaattttaacaacttcaaatttatgatattatatctctactcttttaaagcacgagtttcgtacgtagtgcgtcacgcgcgaatcgtgtagatttgttttt

SEQ ID NO: 155885 - DNA, 1089 bp, Zea Mays
aagcccgggcaaccccagagcatgcagcggcctacgtgaagcccgcacatcgcatcgtcgtccgtcagacgctaacggccgaccgctgcatgcgtcgccggcgaactctctgctgagccacccgtcctccctataagtagctatcccagcaccgtcgtctatcaacgacacacagagcagcatttcgagtaacacagttgagcacgacgatgggatccctcgctaataacatcatggtcgtgggcgccgtccttgcggcgcttgtcgtcggcgggtcgtgcgggcccccgaaggtgccgcccggccccaacatcaccaccaactacaacggcaagtggctcaccgccagggccacctggtacggtcagcccaacggtgccggcgctcctgacaacggcggtgcgtgcgggatcaagaacgtgaacctgccaccctacagcggcatgacggcgtgcggcaacgtccccatcttcaaggacggcaagggctgtggctcatgctacgaggtgagatgcaaggaaaaacctgagtgctcgggcaatccagtcacggtgttcatcacagacatgaactacgagcctatcgctccctaccacttcgacttgagcggcaaggccttcggctccctggcaaagcccgggctcaacgacaagcttcgccactgcggcatcatggacgtcgagttcagaagggtgcggtgcaagtaccccgctgggcagaagatcgtgtttccacatcgagaagggctgcaaccccaactacctggccgtgctggtgaagtttgtggcggacgatggcgacatcgtgctgatggaaatccaggacaagttgtcggctgagtggaagcccatgaagctctcttggggcgccatctggaggatggacactgccaaggcgctcaagggccccttctctatccgcctcaccagcgagtccggcaagaaggtcatcgctaaagacatcatcccggcgaactggagacccgatgccgtctacacttccaacgtccaattctactagactttgaattgccttcgattcatccggcgcgggcgggctaatggaccttgcagcagcaagctaaattaa

SEQ ID NO: 155886 - DNA, 1020 bp, Zea Mays
aagcccgggcaaccccagagcatgcagcggcctacgtgaagcccgcacatcgcatcgtcgtccgtcagacgctaacggccgaccgctgcatgcgtcgccggcgaactctctgctgagccacccgtcctccctataagtagctatcccagcaccgtcgtctatcaacgacacacagagcagcatttcgagtaacacagttgagcacgacgatgggatccctcgctaataacatcatggtcgtgggcgccgtccttgcggcgcttgtcgtcggcgggtcgtgcgggcccccgaaggtgccgcccggccccaacatcaccaccaactacaacggcaagtggctcaccgccagggccacctggtacggtcagcccaacggtgccggcgctcctgacaacggcggtgcgtgcgggatcaagaacgtgaacctgccaccctacagcggcatgacggcgtgcggcaacgtccccatcttcaaggacggcaagggctgtggctcatgctacgaggtgagatgcaaggaaaaacctgagtgctcgggcaatccagtcacggtgttcatcacagacatgaactacgagcctatcgctccctaccacttcgacttgagcggcaaggccttcggctccctggcaaagcccgggctcaacgacaagcttcgccactgcggcatcatggacgtcgagttcagaagggtgcggtgcaagtaccccgctgggcagaagatcgtgtttccacatcgagaagggctgcaaccccaactacctggccgtgctggtgaagtttgtggcggacgatggcgacatcgtgctgatggaaatccaggacaagttgtcggctgagtggaagcccatgaagctctcttggggcgccatctggaggatggacactgccaaggcgctcaagggccccttctctatccgcctcaccagcgagtccggcaagaaggtcatcgctaaagacatcatcccggcgaactggagacccgatgccgtctacacttccaacgtccaattctactag

SEQ ID NO: 155887 - DNA, 715 bp, Zea Mays
atgcgcgcaacgagaaagcagaaagccacgacaagggagcgcggcgtgcagacagggcaagctggacgcgcggccgactggagcagcgcgagcagaggacagggaggaacttgctatggccaagcaagatccggggcggctgggcagaaggagcagttgcgcgtgcggcaagctgggactgggagatgggcagggcgcgcggcacaggaagaacgccgggaggaggaagaagcagctgggctgcgtggctggaggagcttggggaaaggaaagccgcagcgcagagatcagcacgtaggggagctcggcaaggagaaccggcgagcagggaagagggagcgaggacgcgccatggctggagcttggagcttcggtcggctgggcgagctccggcgtgtagggagaagaaggttgggcaagctgctcggtagaggaggactggagtctgtcgcgacgagcgcagggccccatggcgcggacgccaaagcgagcaggaacagcgcgcgcagggaacaggacaggggcgcgcagcttgggagagcagggagaacgcagaccgttgagccggggccgggagacacgcttccggtggccaccacggccggagttggaggccgaggcgagcagagagaaacgcagagggagctggaaaatttgtgcggaagaagaaggcgcgcggccagaagataaggctgtggccaacgcgtgaaaaaat

SEQ ID NO: 155888 - DNA, 690 bp, Zea Mays
atgcgcgcaacgagaaagcagaaagccacgacaagggagcgcggcgtgcagacagggcaagctggacgcgcggccgactggagcagcgcgagcagaggacagggaggaacttgctatggccaagcaagatccggggcggctgggcagaaggagcagttgcgcgtgcggcaagctgggactgggagatgggcagggcgcgcggcacaggaagaacgccgggaggaggaagaagcagctgggctgcgtggctggaggagcttggggaaaggaaagccgcagcgcagagatcagcacgtaggggagctcggcaaggagaaccggcgagcagggaagagggagcgaggacgcgccatggctggagcttggagcttcggtcggctgggcgagctccggcgtgtagggagaagaaggttgggcaagctgctcggtagaggaggactggagtctgtcgcgacgagcgcagggccccatggcgcggacgccaaagcgagcaggaacagcgcgcgcagggaacaggacaggggcgcgcagcttgggagagcagggagaacgcagaccgttgagccggggccgggagacacgcttccggtggccaccacggccggagttggaggccgaggcgagcagagagaaacgcagagggagctggaaaatttgtgcggaagaagaaggcgcgcggccagaagataa

SEQ ID NO: 155889 - DNA, 1271 bp, Zea Mays
actcgtcatccatataagtagacatcccatcactgtcgtctatcaacaacacacagagcgacatttcgaataacacagttgagcgcgacgatgggatccctcgctaataacatcatggtcgtgggtgtcgtccttgcagcgctcgtcgccggcgggtcatgcgggcccccgaaggtgccgcccggtcccaacatcaccaccaactacaacggcaagtggctcaccgccagggccacctggtacggtcagcccaacggtgccggcgctcctgacaacggcggtgcgtgcgggatcaagaacgtgaacctgccaccctacagcggcatgacggcgtgcggcaacgtccccatcttcaaggacggcaagggctgcggctcatgctacgaggtgagatgcaaggaaaaacctgagtgctcgggcaatccagtcacggtgtacatcactgacatgaactacgagcctatcgctccctaccacttcgacttgagcggcaaggccttcggctccctggcaaagcccgggctcaacgacaagattcgccactgcggcatcatggacgtcgagttcagaagggtgcgatgcaagtaccccgccgggcagaagatcgtgttccacatcgagaagggctgcaaccccaactacctggccgtgctggtgaagtatgtggcggacgacggcgacatcgtgctgatggaaatccaggacaagttgtcggctgagtggaagcccatgaagctctcttggggcgccatctggaggatggacactgccaaggcgctcaagggccccttctccatccgcctcaccagcgagtccggcaagaaggtcatcgccaaagacgtcatcccgccgaactggagacccgatgccgtctacacttccaacgtccaattctactagactttgaattcccttcgattcatccggcgcggtgggctatggacctgcagcagcaagctaattaagtttatatatattgcatgagagagcatgcaccgctaaccatatatactactgagacttctgaattctagtatatgtaatccttttgtttgggtttaggaggcaattctaatcatgtatgccgaattccaaagagtggaaaacaagcaaaatgttaaatatacatgccattttcggaggcaatttttttcatgagggcatgttgctataattccggggaccttggacttcttggagcaccttcctgtgacttaggcatacatgattagattataatccaattagttaagtcatagaaaattacctca

SEQ ID NO: 155890 - DNA, 116 bp, Zea Mays
agatttaaactacaagttactcgaaaaatggaaaacagtgaatacaaaaatgacattcgtgttatttagcacaagttacgatctatttcaggaacatgccggaattttcgaacacc

SEQ ID NO: 155891 - DNA, 157 bp, Zea Mays
aattttattttactcctcacatgtttttcatgtcaacaattacttaaatatttctttatcgtaaatatatacacatctgtataagtgattaaactatttcctcatcacacaggcctattaatattctattcggtacactaattccgctaattggccg

SEQ ID NO: 155892 - DNA, 318 bp, Zea Mays
atgggagagctcagccaccagggtgaggagcggcgtccagcagggggggcgagcaccagcgagggcgccgtgagggagatagggctgggcgagtggagggggctcagctgggcgctgcttgctgcagaaaaggggaggagatgggggcgcctgcacaagggaagaatggagagaggatggacgcctaggaaccctgcgccatgggaaggtgctggtgcagagagttggggaaggaatggcgtcggcttgctgcaggaacaaggcagagggaggcggcgtcagataaggctcccaggtagtcaatgccttccagaataa

SEQ ID NO: 155893 - DNA, 940 bp, Zea Mays
acccgtcctccctataagtagctatcccagcaccgtcgtctatcaaccacacacagagcggcatttcgaataacacaggtgagcgcgacgatgggatccctcgctaataacatcatggtcgtgggcgccgtccttgcggcgctcgtcgccggcgggtcgtgcgggcccccgaaggtgccacccggccccaacatcaccaccaactacaacggcaagtggctcaccgctagggccacctggtacggtcagcccaacggtgccggcgctcctgacaacggcggtgcgtgcgggatcaagaacgtgaacctgccaccctacagcggcatgacggcgtgcggcaacgtccccatcttcaaggacggcaagggctgcggctcatgctacgaggtgcgatgcaagtaccccgccgggcagaagatcgtgttccacatcgagaagggctgcaaccccaactacctggccgtgctggtgaagtatgtggcggacgacggcgacatcgtgctgatggaaatccaggacaagttgtcggctgagtggaagcccatgaagctctcttggggcgccatctggaggatggacactgccaaggcgctcaagggccccttctccatccgcctcaccagcgagtccggcaagaaggtcatcgccaaagacgtcatcccgccgaactggagacccgatgccgtctacacttccaacgtccaattctactagactttgaattcccttcgattcatccggcgcggtgggctatggacctgcagcagcaagctaattaagtttatatatattgcatgagagagcatgcaccgctaaccatatatactactgagacttctgaattctagtatatgtaatccttttgtttgggtttaggaggcaattctaatcatgtatgccgaattccaaagagtggaaaacaagcaaaatgttaaatata

SEQ ID NO: 155894 - DNA, 660 bp, Zea Mays
gcacccatggtgatggaggcagtaactgccgcgagccgagccgaggtggacacctcccggccgttccagtcggtccgggaggccgtgaaggtgtttggcgagcggcggcacgccggacgcagcggcagctccaacgggagcagcgcgtcgtccagcgtcaagctcggcgcgtctgatccggcgccagcttcgccagcgtccgtgatgctggagtacctgaagaagttggaggacgacctggcggaggccaagggtgaggtggtggagctgaggcagaggcaggcccaaatggaggtggccgtgtccagcctcagcgagcagttcagcaagggcctggccgtctactccagcctcagcaagggcaaggaggtggccgccgccgtcggagaaggggacagtatatgtggcggccatggccgcgtccgcagccaccggtgggacgagagccgggccgaggagtgggtggcgagcctcgagtacctgccgaggctatcggaggcgctggcgatcaagatggtcgaggatgacctgggccacaggaaggagaggaaggtgaagaacaaggctggcagcagggccaagaagcataagagcgggatcgcattgcgattgatcggaggcatgttctgctccaagaaagccaggtccagccgatggtga

SEQ ID NO: 155895 - DNA, 198 bp, Zea Mays
atggagctcatgacacattacgagctcctgtcgggtagtggaagaagaggcgctcatggggtcagtgaggagttaggaaccaaggacacactgaagaaggtgagcaggagcatggcacttgctaagaatcagattcctatggcgagacaaggatgtggtcaagctagcgctgccctctgttggtgcccaatatgctaa

SEQ ID NO: 155896 - DNA, 751 bp, Zea Mays
atggatgtggtgcctactgcgcctcccagttcaatgttcatctcctatggattaaaggagagatgtgcagctgctgaaacattatcattggttgctcgagttttgaaccgttctaaagcccatctacactcagtattgcctaaaaataacagttctgttgttgaagatttctttaggacactggtggactctgttccagatttgacagagcacattcacagaatgagtgcacgtatgcttttgcatattgatgggtatccagacaagattgcaaatgctaaatgggaggtgaaggagcttggaatagagcacaatggatatgttgatttgttattgggtgagttcaaacactacaaaacacgattggaccatggaggaatttctaaggggctccaacacgttttgctagagtatatggcatggagagcatatcggaagttgtagttgaaggtctctctcgagtgaaaaggtgcacggacgaagggcgcgttttgatgtcacttgacctccagctactaattaatgggctgcagcacatcgtatcatctaacgtaaggccgaagctgcacagagcgtggacactttcataaaggcttactatttaccggagaccgagtacgtccattgggcgcggtctcatccagaatacagcaaaagtcaggtagtcgggctagtcaacctggtggccaccatgaaagggtggaagcggaagacgagactagaaacggtcgagaagatcgaggcagggcca

SEQ ID NO: 155897 - DNA, 397 bp, Zea Mays
acataagttaccatggataggtttccagtcatggcgggctgctggaagaaaggtatccttgtctgaaagagctgaagaaaccttagaggaaattacatctggagaaagtaacgaggatgttatatactactggtcaccaatggatatggaccaaacttctgacttttggttgacatgtgattctctaaatgctggcaattgcagatctcttttcgaagatgcatttagggctatgtatggattaccagagaatgtcttggcccttccaccaatgcccaatgatggtgatcattggtctactcttcatagctgggtcatgcccaccccatcatttctgaaattcatcatgttctcaagaatatttgttgattcacttcatagcttgaatgtgaatagt

SEQ ID NO: 155898 - DNA, 1255 bp, Zea Mays
agcgcggagacggcggcgcccagggctgccctgccgcccgagccacctcttcttcgcgctcctcgtggcactcttcaccgcctccctgctagtggtctggcagctgctccccatcggcgacggcgacgcagcggagggggacggggaggcgccgccgcgccttcaaggaggcgaagccggaccgatgcggttctcgtcctccagcctggcgctgcgcgcgttcgacggcgagagccggctcgaggccgcgagatccgggcggcggctgtgggccagcctcgcgcccgtcagagtagcgctcgctgttggaaatatgaacatagatgcacaatctctgatgcttgcaactgttgcgaaaagtcttgtgagtctgggctacgaggttgaggtgagtttacacgcaacactattttccacaggttgcaaaatgcctactagtttggtgggtttgccattcggttgtgatattgtacccttgagcttgtgaaacttgttttcattggtgaccattcttgattttttcgatgttgacaatactttataccccatgccactcatggtgttgccatggatcaggttttagcatttacagatgggaaagctcgtgatatttgggaaaatatttgtcttgtaaatgttgtgaacactggggctttgaaatctgttgactggtcacagtacaatgctgtgctagtaagctctctcgaagggaaaggggttgtttcaattcttatgcaggaaccttttcggcttctaccagtgatttggcttatacatgaagacactcttggacaatatcttagaagttatgcaaagttacatgattctattcaaaatgtcattgaagattggaggactcattttaatgcatgcgcttatgttgtttttccagatagctaccatcctttgttgtactcgcctcttgattctggtaactttttagtgatttctggttctccagttgatatctggtctgctaaaagatttggctcatcacattctgacgaaactacaagaaagcagcatgggattgaaaaagatgatgttgttattttggttgttggaagctacttattttttgatgatttaccatgggattatgtcacagtcatgcgtgcatcagctacacaaattttggatatagcaaaaactaaaaatctgagggtgcagtttgtttttttctgtggaaatggctctgatgcctacaactctgctttccaggaacttacctcacacatggggttacctgatgtct

SEQ ID NO: 155899 - DNA, 976 bp, Zea Mays
gttttcttgacaaagaaaaaggaaagatcaaaatacgtactggtgcggtctttacttctgcagttcgcctcaacgatccaacgcaacaccgcaacgctccctcgatctagccgccatggccgcgcgcgtccccggttccctcttggctctcctcctgctcatcctcgcgaccgcgtcccccaccggcgccctccgcttcgacctgcgttcgggccacaccaagtgcatctccgacgacatcaaggtgggcgccatggccgtcgggaagtaccaagtcatggcccccgacggcgtcgcctcttcgtcgtcgtcgccacagcagctcccggactctcaccgcatctcgctgcgggtcacctcgccctacggcaacagtctgcactacgcggagaacgtgcactcgggcaacttcgccttcacggcctccgaggccggcgactacctcgcctgcttctgggcgcccgatcaccgcccgcccgccatcgtcgcgttcgagttcgactggcgcagcggcgtctccgccagggactggagcgccgtcgccaagaagggtcaggtccaaatgatggaattggaactcaggaagctggagggtaacatcaaatctatccatgatgaaatgttttaccttcgtgaaagggaagtagagatgcaggaactgaacaggagaacaaactcaaggatggcttggcttggtttcctctcgctcgccatctgcctatcagtggcgggctttcagttatggcacctgaagaacttctttgaaagaaagaagctactatagttcttttcgattaccacagaacatattttggcgcaacttttttggttaccttttcttctttgatgtttagtggatgtagattttctgctgatgaacaaagatatagcagcgttgataaatattgatttttagtttcctaggacaaaattaaatatatgcggagtgtaaagctgacatcaaattttagttctt

SEQ ID NO: 155900 - DNA, 779 bp, Zea Mays
ctaaaactaaaaaagaagtgctgttccttttggttagggtctgtggcttggcatcgtttgtggcagcctcaccaagcttgtgctgctcatgtggatcacactgcggataaactgggagaaagaggtaaagtcatgacctgtcacattttgtctggacagtcaaatgtgatgccgcatattcttgtttctcaacaaatcctctttttcttttcaggcaaccaacgcaaaagaaacggtgttcagttcatctcttcccgtagcatgataggcgaagcgcgccagggctgtatggagcgggaggccaagcgcgtcaggtggctggagcatgagatcagggccaaggccctgacggtcgcccgtctcagattgagaagcggcagaagcggcagatcgagaagcggcagaagcggtagatcagggccaagagctaccattcttggcgagggggcctgctaggatgcggcatgtggttggaaaggggagcacggacgagtcacccttgccactggatctagaactcccacgaactggatctagaactccgatgaactggatctagaactccgacgagcagtctatcgcgcagtccactagttcgagatttaagagatctgttacctggacgacgacgaagacttggcgcccgctgctggcgtccgaggagggaggcctggtggcggcgcggcactggcgttcgaggaggaggaggagagctttcagctgaatccagcactgacgcggcactggcctggcctggtggtggcgcggcactgatgccg

SEQ ID NO: 155901 - DNA, 1984 bp, Zea Mays
gcacgaagcgatgaacgcactctgacggtcttgccactacaaataagccgcaccgcatttcggaaggccacgcgaccgccacctccccgaagctgccgcgaccgatcgagcgaagcgtcgctccccgcgccgccgccaaaaccctagcttctcctactccatggccactgtctcgctcaccccgcaggctgtcttctccacggagtccggtggcgccctggcctctgctaccatcctccgctttccgccaaactttgtccgccagcttagcaccaaggcacgccgcaactgcagcaacatcggcgtcgcgcagatcgtcgccgccgcgtggtccgactgccccgccgctcgcccccacttaggcggcggcggcggaggtcagcgcaattcccaacgctaaggttgcgcaaccgtccgccgtcgtcttggccgagcgtaacctgctcggctccgacgccagcctcgccgtccacgcgggggagaggctgggaagaaggatcgccacggatgcgatcaccacaccggtagtgaacacgtcggcctactggttcaacaactcgcaagagctaatcgactttaaggaggggaggcatgctagcttcgagtatgggaggtatgggaacccgaccacggaggcattagagaagaagatgagcgcactggagaaagcagagtccacagtgttcgtggcatcggggatgtatgcagctgtggctatgctcagtgcacttgttccggctggtgggcacattgtgaccaccacggattgctaccggaaaacaaggatttacatggaaactgagctccccaagaggggaatttcgatgactgtcattaggcctgctgacatggatgctctacaaaatgcgttggacaacaataatgtatctcttttcttcacggagactcccacaaatccatttctcagatgcattgatattgaacatgtatcaaatatgtgccatagcaagggagcgttgctttgtatcgacagtacttttgcctcccctatcaatcagaaggcactgactttaggcgctgacctagttattcattctgcaacaaagtacattgctggacacaacgatgttattggaggatgcgtcagtggcagagatgagttggtttccaaagtccgtatttatcaccatgtggttggtggtgttctaaacccgaatgctgcgtaccttatccttcgaggcatgaaaacacttcatctccgtgtgcaatgtcagaataacactgctcttcggatggcccagtttttagaggaacatctaaagattgcccgtgtctactatcctggcttgcctagccaccctgaacatcacattgccaagagtcaaatgactggctttggtggtgtggttagttttgaggttgctggagactttgatgccacaaggaaattcatcgattctgttaagataccctatcatgccccttctttcggaggctgtgagagcataattgatcagcctgctatcatgtcctactgggattcaaaggagcagagggacatctatgggatcaaggacaacctgatcaggttcagcattggagtggaggattttgaggaccttaagaatgatcttgttcaggccctcgagaagatataagctccaatccatttgcattaataaagttatgaggtgatggttgtctggatcttgtagagatttgtgatgatacatgagctgttgactgcgattaagttctcttgtgcttattttattctttgaattcaataagctgtggttgctgcatcttgcatgtagtgttggacttaattttacttgtcaaattacaatagtttggtcccatgtacttgtgtccgcgcctccgcggttgtgcccctagtgtttttgtgtcatttgctgtgtagtgtgagattaaggcacgatgtccttaatcaccataataaatccatgccttaaatgtaaggatctggttggaatgataaagtgcggttgaagaaagaact

SEQ ID NO: 155902 - DNA, 1459 bp, Zea Mays
atggccactgtctcgctcaccccgcaggctgtcttctccacggagtccggtggcgccctggcctctgctaccatcctccgctttccgccaaactttgtccgccagcttagcaccaaggcacgccgcaactgcagcaacatcggcgtcgcgcagatcgtcgccgccgcgtggtccgactgccccgccgctcgcccccacttaggcggcggcggcggaggtcagcgcaattcccaacgctaaggttgcgcaaccgtccgccgtcgtcttggccgagcgtaacctgctcggctccgacgccagcctcgccgtccacgcgggggagaggctgggaagaaggatcgccacggatgcgatcaccacaccggtagtgaacacgtcggcctactggttcaacaactcgcaagagctaatcgactttaaggaggggaggcatgctagcttcgagtatgggaggtatgggaacccgaccacggaggcattagagaagaagatgagcgcactggagaaagcagagtccacagtgttcgtggcatcggggatgtatgcagctgtggctatgctcagtgcacttgttccggctggtgggcacattgtgaccaccacggattgctaccggaaaacaaggatttacatggaaactgagctccccaagaggggaatttcgatgactgtcattaggcctgctgacatggatgctctacaaaatgcgttggacaacaataatgtatctcttttcttcacggagactcccacaaatccatttctcagatgcattgatattgaacatgtatcaaatatgtgccatagcaagggagcgttgctttgtatcgacagtacttttgcctcccctatcaatcagaaggcactgactttaggcgctgacctagttattcattctgcaacaaagtacattgctggacacaacgatgttattggaggatgcgtcagtggcagagatgagttggtttccaaagtccgtatttatcaccatgtggttggtggtgttctaaacccgaatgctgcgtaccttatccttcgaggcatgaaaacacttcatctccgtgtgcaatgtcagaataacactgctcttcggatggcccagtttttagaggaacatctaaagattgcccgtgtctactatcctggcttgcctagccaccctgaacatcacattgccaagagtcaaatgactggctttggtggtgtggttagttttgaggttgctggagactttgatgccacaaggaaattcatcgattctgttaagataccctatcatgccccttctttcggaggctgtgagagcataattgatcagcctgctatcatgtcctactgggattcaaaggagcagagggacatctatgggatcaaggacaacctgatcaggttcagcattggagtggaggattttgaggaccttaagaatgatcttgttcaggccctcgagaagatataa

SEQ ID NO: 155903 - DNA, 1974 bp, Zea Mays
atggcggaccttgtgcttggattggccatgtcagcggtggaggggacgctaaccgctgcgaagtcagcgatcgaggagaagaaactggagaagaatatacagcgcgacctgatgcttatctctgatgagttcgagatgatgcattctttcctcaacgtctccaaggagcgtggcagcgacgaaatggtgaggaccttggtgaggcaggtccgaaacatggccttagatgtggaggactgcatcgtcctcgtggacatgaagttccaccgctggtggagcccattgctcggctggttcccatcctgctgcagcaagctagcagcgccgccgcctatggaccttattgacgacgaagcggtcactgctatagagctgctcaagtccagggtcgaagccatgggccagaggaacgagcgctacatgcaaattggtgactgcggcgcccccaagcttagtgagaagacgcatcagcaaacgggagccgatgcaacagcggggaagacgtgtccagcgcggttgactgggcggctgtcagagtatacgtacccaacgacaagaccgcagagtacacaaggcgcactcatcgaatttgtgaaggaagtgatgagcaatcagagatacctggtgttcctggaaaacctgaccagcatggatgactgggaggccgtcagagaactcttacctgacgggcacaatagtagctgcattgtcgtgcacaccacgacgctcaacctcgcgaaatcgtgcgtcgtcgcacatcatcaagaattggagccgcaacagttttcaactgatcgttctgttcgtatcttctatgagtactgtgagagtatggatgggaataatgcggagatggccctgaagacgaaagctgcaaagcaatggatacacaggtttaaatttgttggacggcaggaggatatatggtcccttgctggcatcagcagaatggtgcaatccgtgtatggggttgatggtgttggcaaatcatatatcgtcaaacacgtctactacaagcaaggattggggcgattggaagattttgatgacaatttcatggggcttttggagacccacccagcatttggcagcttgaggggtctgtttgactgggtgcattcctacttcaattcctgcccggattggctcaagccctgtatcttctacctctcaatcttccctctggaccacaaaatccggcggaggcgtctagtggggcggtggatggcggaaggctactccagggacaccaaggaaaggaccgctgaggacaacggggaggagttcattgttcatctccgcaagctaaacacgaatgaactcgcagcacacgggacgacaccacaccttaccattggggagacctgggacagagacaggattgtgtacgagagcaccggcctcgggcgtctgcggtcgctgactgtgttcggtaggtggaagccgttcttcgtctctgacaagatgagcgtcctccgggtgctggacctggaggacgcgtcgtcagattcagtaagaaatgctgacctcgaacagatggtgaagctgctgcctcgtctcaagttcctctcactacgaggatgcaaagagatcactcgcctgccggactcccttggcactagtgtacagttggacttggatgaggacagcagcccacggccaccaccaccaacagcaccagcagatgcagcatggtcatggatcagtaggatcaagggcttccggttgcggcggaagctgttaatacctggccctcatcacaagaacaatggtggcattgaggtgccgcgagggattgggaagatggtagccttaaaccatatcagtgtcatcgtactggaggagctgaagaaccttacccagttgcgcaagcatggagtggcatcaaacaggagaactgccaggagctgtgttctgtcatctcgagtcacgcccatttggaatccttgtcactgtgtttcgacgagaagctag

SEQ ID NO: 155904 - DNA, 281 bp, Zea Mays
cacgacatcgaccacaccggaaagtacgccagcgactccgacctccagctcgagcgtgcgcttgtctactacaacgaggccagcggcggccgcttcatcccgcgcgccgtcctcatggacctcgagcccgacaccatggactctgtgcgctcgggccccttcggccagatcttccgccccttcggcccgaccgccccatccgcagcgccccacccccgtctgccccagatctggatcccgcccccatcatcgacgcctcctccccgcccgcccgagacccg

SEQ ID NO: 155905 - DNA, 3598 bp, Zea Mays
cctcttgtcggtaggtgtccctccctttactccctccgccctcccacagtcccactgcccttctcctcggtccatcgcaagctcctgcggtcctgcctacggccgtacggcggcatccacccttctgccgcatcgtctttctcaagacgctgccccaggtccatcgcgcctagggttcgccgagtccggcggcgctaagataatgagtgggcaccgaaacagtcatggaaagcgctactctgattatactgaaactggaggcggtaagagaagaaatcctggtgatgatacctatgcccctggtcctgatgacactgtgtatcgctacctctgcgcctctagaaaaattgggagtatcattggcaggggtggagaaattgcaaagcagttgaggactgagacccaagctaagatcaggattggtgagagtgtccctggatgtgaagagcgagttattaccatatttagctcaagtcgaagaactaataccatcgatgatgctgaagataaggtttgccctgctcaggatgccctctttagagttcatgagaggcttgccactgatgagagttttggtaacgaagacagcgaagaaatttcacctcaagttactgttcgcctgcttgtgccatcagaccagattggatgcattcttggaaaaggtgggcacatcatccaaggaatccgcagtgagactggtgcgcaaatacgcgtgcttagtaaggatcatatccctgcatgtgccattagtggcgatgaacttctccagatatctggggacatggtagttgtcaaaaaggctctttgtcaagtgtcatctcgcctccataacaacccatccaagtcacagcatcttcttgcatccagcttgacccaaccgtatccagggggtacccaccttggtggttcctctgctgcacctgttgtagggatcactccagtaattcctccttatggaggctacaaaggtgacgtggcaggagattggccctctttataccaaccccgacgggatgagagctctgcaaaggagtttagcttgcgtttactttgtgctgctgcaaatgtggggggtgtaattgggaagggtggtggaattatcaaacagattaggcaggaatctggggctttaattaaagtggctagctccaattcggatcctgacgatgactgcataattacagtttctgcgaaagagttctttgaagatcctgtatctccaacgattgatgctgcagttcgtttgcagcttagatgcagcgagaaaagtgattcagaattggctgagcagtcatatactacacgcttgctggtgtcaacatcacgtattgggtgcctaattggcaaaggtggctcaatcattactgagatacgaagaacatccagagccaatatacgcattctttcaaaagaaaatgtcccaaaggtagcagcagaagatgaagagatggttcagataagtggaggccttgatgttgcaaggcatgctcttgtgcaaatagctacaaggctgaaagccaatttttttgaaagagagggctcgttatctgcatttccatctgtgatcccttaccatcctttgcctgctggtgtttcggtttcggatgaaccaaaatatctaagcagagacactaagcctgttggacattacctatattcaagtgcttttcgtacatcggatgacatgattccttctgacagctatgcaagttatggtggctcccaggcacctggaggaggatatgcggcttacagcggatacagtgcccgctcctctagtagtgggttatctggtcatagttctcttcactatggaaagcatcatggttattaggatttagattgcttgataaagcagccaagacattgaagtttggagcctgcttattggagccccttcccaaaccagatggccaagagagcccaacctggaagcttaggaggactgtgtggatgccatagaccacctgatattcctcacactacattacttatgtcttcttctgggcctatgtttttagccctgccgcaaatgttctgaacctatgtatcgaaaggtcgcatttgagactgcatgtatttgcttgtttggaacctgcttcagcttcagtttagtcgtttttttgaaatacttgtttcctatgtgccacccaaaaaaccaggaatatgttacgcgaaacccccctaaggagctgttacttccctttaccacgaagatgtgggctacttccttctcagtgatatatgtgattgccatcctagataaaaaaaagtagcactagaatcacatggccttaatgaaattagcatcaggaactagatgtaccaaactttgctcctgcctgccaaatttcaccgagttgcacatttttgctttattcatctacccctgccaccaaacactatcggttttatccccctgcttcaatcttggcctgtttggttttaatccaggcagctttgcctggctcttcatgcaattccaggctttggaattttttgtgtacctggggtgtagactgcttagtggcatgctttgaaccaaacaagcagaccccaaaaccattgttgaactgaggttaggtagctgaacatacatatgtacttgttcgattacaatgttgttgcaacacacatgcaagtttatgtttaaactttaaaccattttttgaatgggaacattaagctaatttgaagtagttgttttaagcataagatttctaatttaactggttattatagatatatgtactttggtatgagtagctaatatctaaaactttagaagctgtaacttttttatgactagttggaagttttttggtcatattgatttagatcataatgatccaaaaaacgcgatagagcatgctcacgatcttcctcaacaccttgatctgatgcacatgttccaatgctttattgattaaatgagtattggtgattgaagttgcggttatgtacttgcctgccatgatggggaaaccaaatgacaaagattgaattgttgggaagagtccgcagtcgcaagttttttgaagattcactgttcatctcatgtagatttagaaggttctgaggttattgtgattgatacgagcttagtggtggtaaaggatcattatctaaatgtttattcacaataagttagagctcaattaattttactttaaaaatgaataggaatagagctcgatactaattcgattcaatcattaaatttaatagtgtaaaatctagagctaattatcacctttatacgagcttgaccacctccatgcgtgggagtcttgttaaccagaaatgtgcaggagcatgtgaaaataaccatgcaggtgttgtttatgaaagagtgaattagcctctggactctggagttgcacaacattgttaacgcagaagtgttattagtggaatgactctactatttgtttgtttatttgatgttttgttaaggtgtttcatgtaaatgctaactgtatcaggttttaattagaagattaattttagattatgtaagtttcataagatttgattctgagatattgtggacatgtactctaccgcaatacatggagcagttctttgtggcgttgac

SEQ ID NO: 155906 - DNA, 297 bp, Zea Mays
gtgctcgccgagtgttgtcggttgtacctcagcattcgtgcttgcctctggctcgcgttaacactcgcgcgcctgctcgttgttactgcgtcacgctcgctcttcgtccatcgggcttcacgtgtgctcgcgtttgtcgtcgagccgttgaacccattttaccttgtcaacactcgaccacgtgttcactcgttaccacaccatcttcagcatcatggttctataagactccgtgcactcgtcgacacccggctgtcgatctccaccacgcagggctgcatcggacttaccctgtat

SEQ ID NO: 155907 - DNA, 576 bp, Zea Mays
ctgctattgtaaccagacatccagaaagatacatgctcgtgggagatgtggcttacttgattgaggaactcatcatgccaggtatcgagcgtattaaagcttctcctagtagatccatatctatattagaaccgcaaatcaatctgggagtcgccaggatttggcaacctgcacagacacaggatgaccttaaccctcctagcatctttttttgctccctttttgttataaaaaaggttcgtctttgctcttttttcccaataaaaaaaccagtaaatgtgttttggtagaacttcagcaagaccataatccaggaaaaatgacatggactgaactttgtatccgaacaagaaacataagacgcttttacttacatgtcttggtcatgctcatgctccaaggcgagcctagcgatgcataggaaagcagtgtcgacgttgtggacctccttcgcagaggtctcgaagtatggaatatcacccttggaggcgcaccattccctcgctttcttctccggaacctgcgggaaaggcaaagagactgcagggtatttcgaatctatatatatgagaaagc

SEQ ID NO: 155908 - DNA, 623 bp, Zea Mays
tttttcttttctttatccttttctcttctttattgatatttttgttctaagcacgttctcaaatatcaatactttcgtatttttaaatatatttatgatatggctacgacgtttaggggaatggagagtggagattagcagagcctcggactaagggagagatcggattggatagggagatcgacgaggacagctactgtcacctacggccgaggaagccacggtgaccgaagcagttcctcccaataggaagcaacttctataaatttcctggtacaaactcctgtctccttaatagatgaggagtcctaagtccttgtttcaatcaaccgactgcctagcaaataaaagtgataaaaactgtctgcctaacagatagaggggataagccccttaatctctctaacaaccttatctagcaatagcaactgacacttgtctaaatacggcgcctgcactggtactgctggcccaaaaaaaacatcgataaccatttaaggcgtcacctcgccttacgctttaccgcttaaaaggtaaaaaggggatcggtcgccttaccgccttaaaaactatgatcaatagccaagcactcaagctgatgcaatggctaagtgatctggttc

SEQ ID NO: 155909 - DNA, 250 bp, Zea Mays
atggtttatgaaatggatgaacttgaggctcttgcaagaaatctttcatttgaggatgaagacctagatgatgatcatgatgatggacctgaggcatcgttgtaagcttgttgatgaagatctagatgatgataatgtaccatgaatgctatgaatgtttcttattgtacttgctccgtaatgttttgtgaccttgcgaacttgggacttgtggctttgtgaactttgtgatgaacttgttatattgtgt

SEQ ID NO: 155910 - DNA, 546 bp, Zea Mays
ttgtacactttaggatcatgtatgtcagctccttagttcagttttgttacatgtagatccctacaacaccgattagagttggggaaggcgaacctcctccttcttgggatccggtaccaactccaaaagcttatatctgacgacaagtctatattatttagttctacaatgagtatctcattgtgggatcatattagaaagaggagggaagaagaagatgatgacatgatgatatttattttccccgccttatatctgatgggttctactagaggtgggggacaaaagaaacgtcatacctcagatgagataggcgaggttaaggttcgtcgactcctcgagggacatgtcaagaactgtcaagttacatttcggatggaaccacacatcttcagagagcttgcaaattatcttagaaggagaaggatcattgttgatacaaggatcacggtcgaggagaagttggggttcttcttatacatgctaagtcgcaacgcctcgtatcaggatctccaagtgtattttgggcacagtaatgacaccttc

SEQ ID NO: 155911 - DNA, 1415 bp, Zea Mays
cttattcgatcggaagatatggctaggcaacttggttagttgtgctatagcttatagtcacaaagttcccagatcgatagggtcgaggaacgtggtacgctacttgtgagtggtttttacatggtgggaacgaaaatgaccctgtatctgggtcggggacggcgtttccgggttgagggtcgctaccactgtacccatttcttgtgactatgctatagctatgtccttgaggcatctcgatctcgattgggcaaattgccccctgtaccttggacatcttacttcccttctgctgtaatgatttgccatctgccaactgtgaagtacttagatgtccaaaaaaacaacgtttttccttataagatgatgttttgtgaaaacccaatttggaagtggttttcctgtgttgtaccaaaaacaagaggctttcacatctttaggaatggcatctcctgagaccctggagtccttaattaatctgcttatactaacacgactttctgactaaatatgcaactgataatttcttttttctatgggcttcagaatctgattaagtttttccttaaacttgtagatgtatctacagctgctgtagcgaaggaatcattggaagggcattgcatctacgatggtggctactgcacatggtgacaagagcagagactatacaattccagctggcgtaatccaaggggtgccacctggtgtacaagctacatcctctgggtggcaaggtaacgttcaagcagctggggcatatgctgccccacccggtgccccttcgcaaagccacggtgccaatggacatgtgcagaactggaatcccggcaactcagtctatcccccagccccaggaccaggaatatatccaggccagatgtactcatctccctcacagtatgcagcgtcagggggcttccctaataccccatccactgctccgccacactatgcagcatcagggggcttccctaacaccccactcccagctcttcctggtgctcctacacaacagttgcacgcttcgcagcagatgctgcctcagcatggaaatcagtcgggaggcgcatccggaactagccaaccggcgccaccagcatcatactaccgttgagttgaaatcttcttttgctattgtacttaacctgttttgtcactgagtttgttattcatcatctaaaactgcaacactgttgtccgtagctgtgtttagatgatgttgggggagaacaacaacatagcaacatgattatattggtggttcttcctctcctaagattgggaaaggagaagatattgcgagtgtttcatattggtggagtttgaaacattgttgctggagatagttttacataagcaaacataatcttcagttataaaggaatataagagccattgctattcatgaacat

SEQ ID NO: 155912 - DNA, 244 bp, Zea Mays
gattataataatccgtatcttccaatcaattattctgccatggatggtacattacagcctgctgttggagctgacggaaggcaagtggaggctcaaggcaatgttcttcttgcatcaattgagaatatgcaatatgctgttactgtagatgttcttcatactgtgttctcatcatttggttcagtccaaaaaattgctatttttgagaagaatggggggacacaagctttgattcagtaccctg

SEQ ID NO: 155913 - DNA, 1259 bp, Zea Mays
ggtggagaagcacacaaaacaacaattatatgcaaaaactaaactatgttttatttctttctatggtatatgaatttagtatcttgataatcataatgattagagttcgtttgtatttttattaaaaaaataactgacagagattgagatagattctgatcagccgactatacgctcggtattttggcggtgacctgcaaatcatctcgatggaaggtagtattatgccatcataatactaccttgaagtgaggagctgtaacgacgagctcgctttcacacagatgatcaatatggtcaaggtgcggcacaacaatgtggttccaaccatggccttgggagtgcagcagctgaagaaggagttgggccgatcaaggaaggttccattcgagttcgatgagatccacgagttccttgaccggttctacatgtcaaggattggcatccacatgctgatagggcagcatgtggctttgcatgaccctaaaccggagcctggtgtcataggcctcatcaatacaagattatccccaatccaggtggctcaagctgcttgtgaagatgcccgttctgtctgtttaagggaatatgtatcagctcctgatattaacatttatggcgatccaaattttacatttccatacgtcacattacacctacacctgatgttatttgaattggtgaagaactctctccgtgtggtgcaagaacggtatatgaactctgataaagatgttcccccagttagaattatagttgctgatggagaagtggatgtcactatcaaggttagcgatgaaggtggcgggataccaagaagcggcctcccaagaattttcacgtatctgtacagcactgcaaagaatcctcctgagctagatagacctaatactgaaggggtaactatggagtatcacatctgttggagagaatggccttcaagagcacagtgaatcggacccacttacggttagttcgtgaggtagaagccattggaggaaatgtctctgcatcagcttcccgtgaacaaatgagctatacctatgatgcattaaagagctatacaccagaaatggttgaagttctcattgacaatgtgaggaatccagcattccttgattgggaggtcaaagagcagacccatgatagattatcttgtattgttgagatggagagaatgcaagtttgaatggctctgtgccacttgatgtacatgagagattgggtaggcgctctactaattatttaccatatttaaa

SEQ ID NO: 155914 - DNA, 1128 bp, Zea Mays
tttgttggttgtttttttttactgaagacagtagtaataggtaaaggcagatggcgcagatggcaacaaacagaggtctaaagcaagggcttggttggttctttgctggtgctctggttgtgccctacatggccatccagtcctccaatggcttttgcaaaatgtacctgtcagggtctcagaaccttctatgagcagccttagacatgtcgtgccgtcccttgcccctttgttgtgctttgggacccggcgtggccttggggttgttgtgctatatctacagacaggacagtgctgtgactgatgattgtactgcatcaaccaagccgctagagccaaagcacagcagcaggcagcacaagctgcatgtctccagctgagcggcggcagcagcagcagcagcatggcgagcgcaagaaggtggtcaaggctgttcgccatatcggcctttgtctgcctcctggcggcacaccctgctgccgtggtgagcggcctgaggagagaggacgtggtcctcggccgtgatcgggcgccgacgccagcagaggcacccgcggcaggcggcggcggcggcggcagctcttggacagggaagcggctcgtcacggcgacggccgttggcgcggcgcagacgagcaagtggaaggtccggcggggctcggacccgattcacaacaggagctgacgtgacgccctcggagtgttgaggctgggaaggacggcagcaggcacttcacctgaagctgtctgtgtctgctgctcaagcatgccggcgatggacagggcatagaggtattctcatgcgttgctggagatgaagggatacaattgaggagtctgcaggagattcgtgggcgatgatggacagggcagggtgttagcttcttcgcttagctgtaggaggatagcaggcaggtggatgtaatgtaacgatgcactaggggcatgtttggttcgttacctcaattgccacaatttgcctaacttttctgtctaaggttagttattcaattcgaacaactaaccttaggtaaagtggggcatagttagctacaaaccaaacaagccctaggtgattgagttggacttgtgatataggagatgttatcctttctgtctttgcttgca

SEQ ID NO: 155915 - DNA, 708 bp, Zea Mays
caggccgcaccgccgcagcctcgccgatgcaaattgccgcccctgcgtcgtgcgcctctgttgatacagggcgctgcccatctgctcgacggaatgcctagccgagtagccatgacttttagggcagggcgaaagcgtggtgtggcttcttcggccgtcgcttcttctctggcataaatggagcaagaaattggcatcacacagggacgtgcagtggagatgctccagggcaaaccactgctttgcttcacaatccccgtgcgctcgctgcttccatttcaaacgccaagaaggaatctcttgatctgggcttgtttcctgcctgaaatattctgttttttcttgcgatcacttagtggtaacattttgttacaagagtcactgaagtttgcagattctctttgtcaaggcatagaaacatcacaaaaacggttttaaccccaattgaaaatcatatgattttatcaggtgatctggtggcatttttgcaggtgtggacaagtctagtccgaacagaccgctcgcttttcaccgaagcaagggtatgaaggttcatttgaacatgttgtactttctctttcacctttaccttttgttgaacatctttctgtttgcccaccagctacaatttttcagtggcgtacttaaggcggtacggttctcagtctaaactactcttttagactgaaaatagcatcaggacaaatg

SEQ ID NO: 155916 - DNA, 1240 bp, Zea Mays
aaagcacagaaaaaaaaaccatcttggacttctcactcttccgtagttccaacgctctgcgcggcatttcgccgagcatacaccatgcactccctgcggtgcgcccttcgctaccccatccccagtaccgccgcctctttatccacctccggcctccgccgtctctcctcccaccatcgcactccaccgccgctccgctcagcgaccaccggtgaagacgagtggaacgacgcgtgggagaccgcatggcttccaggcgactcccccgcctcctccccagcgcccgccgcgccatgggagtctcccgcctcggcttcggagtccgccatcccggtcatctccgccgaggtggatccagacactaaggccttcgtggcagacatggacgagcgctgggccgagcgccgcatcgcgtcgaggcgggggcccagcagcagcgcgcgtctcgcgcgggcggaaggcggggaggggggcgtcgtggcgaggaagaaggcgcaagcggatgattacaggaccaggaagcagcgggtgcacgccgcgctttgggtgaaggagatcgagaagatggaggaggcgcgactcggcggtgggggaggtggcgctgacgatatcgaccggctgctcgactcgtgctcagatatctttgattctggcaacactgattttggtgattccaagatcccaaacactactgagatcaaaaccaagcctgatggttgggaaactacttcaagaggacaggatgggaacatatgggatatctcacagcgagaagatgacattctaatacaggaatttgaaaggcgaattgcttttagtaaacagcagattgctagcttcatcaaaacccacatttttagtcggaggcgtcctatcgatggatggaagtacatgattgaagaaattggccccaacgcaagaaaaggaaaggggagtgtgcaaagattaccaagtgtcagtgatcctgcaacccagccttacagggaagaaactcctgcaattgcttctagttcctccttcagaggcaatcggccatgatggtgttcgataaaccaaatcttttgctggtttcactggcatagtttatacaggcattttccccttccttttggcttcaaatgtatggtggatgactccttgcgaagaacatgacgaactttccttctgcgttgtataattttgtaatgaatgtgacgctttctgatgaaccagcaatggaagcgtttaagttttctagtta

SEQ ID NO: 155917 - DNA, 490 bp, Zea Mays
gaatattgtaaacgtgaaataaatctttcaggtatggtcattacactccagatggaactggttattttctttcttcacaacatcaacgaacatagcaactacattctgtcgtgtcggcacctggatccatcacgggcgaggaggctgaataggagggtggaggaggcgagtcgcgtgctgtctgattccttcgttatcttctgtgttttttcctagaacaaggtttcctctccggtattatttttggccaaaagatgattagatgggctgctggagacgggaggaggcgacggtctgtgtgttttcccctgatctatttgtgtactctaactgcagaagaacaaatgggagttcttcatgttcctcactctagaagtttttgtaatgatcattactagctttgctactgctgttattataagtaatgacttgagtccttttagcttaattatcacactagaatctattattgatccactgtttttttgtc

SEQ ID NO: 155918 - DNA, 2964 bp, Zea Mays
gtcaaatggaatgaatctttgacttgaccaagaaacaatgtgatttcgagatatgataatgtaaggcctgatttggttgtttatttctgttggcagtcaccatgtcatcttatcctgtgctaaacaaccgaccaattgatcagtggagggttactgatttgaaggatgagctccgtaaaaggaagcttcctgttaaaggtttgaaggaggaactcgtaaggcgactctttgactccattcagagtgaaatagaagctgatgaagctgacgaagctgatgaggatgtgggagtgaatgtggatgatcagttgcctgatgccaatgctagcgaggaaaatacagttaccgttacggaagttcatcaggaaactgtggttcatgtcactcagcaagttgaagttcctaccaccaaagctggtcaggaatccacaatttctcccactagaagggcccccagtgtcgatgttgaagaggcctcagcagacgaagaagtacccgaatcagttgctgaaggaaatatgtcatttgaagaagtgcaagtgcatactgaaattactaatgagcctgttcatgagaagaccacagacgttgacaccaatgatacagttgttgttaatgatgcaatcgatgtgaattcagacttggcgcctgctgaagtcaagtttggtgctacggaagcaagcaaaattgaagaacatgatttcccccctgcacctgtagatgccttaaattcagatgctgctggtcctatggatactgatgtcgtcacagctgcaacttcagacgttggttctatggatactgatgttgtcacacgtgcaccagttagcgatgatgaggagaaactggaactgaaggttgatttgggtaacaaggtgtcaatgtatgatgaagataacaatagttctgataccatgaatgaggactgcaagcccatcgtatcaaaaccaaacaatcaggtacctgaggttagtccagatttagggtctcaaattaagtgtgagtcgatttctactgataatctatcatctaacaaaaagaatactataaaagataatttaaatgctaataattttgatttagaattagaggttcagccgaagatggtccaaccatcatccggcattacttcattaggtggagatttgcagccattggatgatgacaaagagctggttaagaaccagacatctttggaagacatagattccacagctaatgtggactcatacaagaaggatagtcctgaaggtgggtctccagagaaattaaatctagacaggagttcaggtgatgagtcaatggaggaggatgttgtggaaattaaacaagatgaggccaatatgaaatctgatgatctcggacaaaagaatgagcttaactcagaagatgtgaaagaggtgatcctccctgattctgttgttgaggcttccaaggaggttacggctgaagaaaagtcagcagcttcaacagaaaagagaaaacttgaagatgaagatattgcaaacactgaaccaatcaagcgacaacgtcggtggactgcagacgttgccaaagttccagagagacaagcattgagtcaaactggtcctgaaactcctaaggatatttttcagcctgctttcaaacgatcttttgggaggtctgattcaacagcaagtgtagattctcctaaggaacggattgtaccacctgcagagaaacctgccacaacttctttgagaattgaccgatttgtacgcccatttaccctgaaagctgtgcaggagcttcttggtaaaactggatctgtacaagacttctggatggaccatatcaagactcattgctatgtgacattttcttcggtggatgaagcaatggctactagggatgctgtttacaacctacagtggcccccaaataacggcaataagttggtcgccgaatttgttgatcctcaggaagtgaagctcaaggttgacccccctcccccgccagctgctcctgttagcccagctgctatcacaagggcacctcctcttcaacagactcaaagtgtgccacgccaggctgctacaccaaaagagcaactgccacctccaccaccgcctccccttgctaagccacctatggctgacccggcggctatagcgagagagaggcttccacccactccgaagaagccagagcctcctgttgtgacacttgatgatctcttcaggaagacacagtcctctccaaggatctactatctgcctttatcagaagaggaggtggcagccaagctcgccgcacagggcaaaggaaaaaaggagtaggaggtgttggcttccattttcggctatctcggagtttgttgtggaacatggcgtgcggtggtcacagcatcagacaggtgctactgctgcagaccatttgaaataaccggcggccgtgactgccgcggcggaagagtagtcgtagggctagtgtaggagcagcagcagcggcttgtatttcttaaagagattattagttttggttgggtctccgactgcagtgtgtgctaaagttatttgagctgcatgaggttttgtttgggtactctagtattgatcccaatctatatgtgttgaggtgtaaattagtttaagttacatcctaatccaccttaatagatgtgggttgagttaaatattagagtacccaaactaggcctgaagcgtctgaagaacttggtttaatctatgctgtcaggtactgttaaaaggcaccagttttagtgttgagtctatgaagaatattgttgggattccttgtcttagggggtgtttgtttgggattataatccacctagattatataatccagcaatttttgaactaactattagttcaaaagttgttagattatataatccagatagattataatctcaaacaaacacccccttattctagtctttgccttgctcaccgtgagtctcggcaagagcaggttggt

SEQ ID NO: 155919 - DNA, 2825 bp, Zea Mays
gctgcaaccctaccctgctgtcttgttctatcgcccccagcctgcgcgcaatccgacccacccacacgactgggccggccgtcgctaacgccctacttcggccccctttaccggcgacgagcaccaccaccaccagtcaccatgtcatcttatcctgtgctaaacaaccgaccaattgatcagtggagggttactgatttgaaggatgagctccgtaaaaggaagcttcctgttaaaggtttgaaggaggaactcgtaaggcgactctttgactccattcagagtgaaatagaagctgatgaagctgacgaagctgatgaggatgtgggagtgaatgtggatgatcagttgcctgatgccaatgctagcgaggaaaatacagttaccgttacggaagttcatcaggaaactgtggttcatgtcactcagcaagttgaagttcctaccaccaaagctggtcaggaatccacaatttctcccactagaagggcccccagtgtcgatgttgaagaggcctcagcagacgaagaagtacccgaatcagttgctgaaggaaatatgtcatttgaagaagtgcaagtgcatactgaaattactaatgagcctgttcatgagaagaccacagacgttgacaccaatgatacagttgttgttaatgatgcaatcgatgtgaattcagacttggcgcctgctgaagtcaagtttggtgctacggaagcaagcaaaattgaagaacatgatttcccccctgcacctgtagatgccttaaattcagatgctgctggtcctatggatactgatgtcgtcacagctgcaacttcagacgttggttctatggatactgatgttgtcacacgtgcaccagttagcgatgatgaggagaaactggaactgaaggttgatttgggtaacaaggtgtcaatgtatgatgaagataacaatagttctgataccatgaatgaggactgcaagcccatcgtatcaaaaccaaacaatcaggtacctgaggttagtccagatttagggtctcaaattaagtgtgagtcgatttctactgataatctatcatctaacaaaaagaatactataaaagataatttaaatgctaataattttgatttagaattagaggttcagccgaagatggtccaaccatcatccggcattacttcattaggtggagatttgcagccattggatgatgacaaagagctggttaagaaccagacatctttggaagacatagattccacagctaatgtggactcatacaagaaggatagtcctgaaggtgggtctccagagaaattaaatctagacaggagttcaggtgatgagtcaatggaggaggatgttgtggaaattaaacaagatgaggccaatatgaaatctgatgatctcggacaaaagaatgagcttaactcagaagatgtgaaagaggtgatcctccctgattctgttgttgaggcttccaaggaggttacggctgaagaaaagtcagcagcttcaacagaaaagagaaaacttgaagatgaagatattgcaaacactgaaccaatcaagcgacaacgtcggtggactgcagacgttgccaaagttccagagagacaagcattgagtcaaactggtcctgaaactcctaaggatatttttcagcctgctttcaaacgatcttttgggaggtctgattcaacagcaagtgtagattctcctaaggaacggattgtaccacctgcagagaaacctgccacaacttctttgagaattgaccgatttgtacgcccatttaccctgaaagctgtgcaggagcttcttggtaaaactggatctgtacaagacttctggatggaccatatcaagactcattgctatgtgacattttcttcggtggatgaagcaatggctactagggatgctgtttacaacctacagtggcccccaaataacggcaataagttggtcgccgaatttgttgatcctcaggaagtgaagctcaaggttgacccccctcccccgccagctgctcctgttagcccagctgctatcacaagggcacctcctcttcaacagactcaaagtgtgccacgccaggctgctacaccaaaagagcaactgccacctccaccaccgcctccccttgctaagccacctatggctgacccggcggctatagcgagagagaggcttccacccactccgaagaagccagagcctcctgttgtgacacttgatgatctcttcaggaagacacagtcctctccaaggatctactatctgcctttatcagaagaggaggtggcagccaagctcgccgcacagggcaaaggaaaaaaggagtaggaggtgttggcttccattttcggctatctcggagtttgttgtggaacatggcgtgcggtggtcacagcatcagacaggtgctactgctgcagaccatttgaaataaccggcggccgtgactgccgcggcggaagagtagtcgtagggctagtgtaggagcagcagcagcggcttgtatttcttaaagagattattagttttggttgggtctccgactgcagtgtgtgctaaagttatttgagctgcatgaggttttgtttgggtactctagtattgatcccaatctatatgtgttgaggtgtaaattagtttaagttacatcctaatccaccttaatagatgtgggttgagttaaatattagagtacccaaactaggcctgaagcgtctgaagaacttggtttaatctatgctgtcaggtactgttaaaaggcaccagttttagtgttgagtctatgaagaatattgttgggattccttgtctta

SEQ ID NO: 155920 - DNA, 161 bp, Zea Mays
caacaacaacaacaacaaagccttttgtcccaagcacgttggggtaggctagagatgaaaccccgtatgaaaacctcagagctcaacccccaaagaacagaaaagggaaacaaaggcaaaggagacccgaaaacaatgaaacggggaaacacataaaagag

SEQ ID NO: 155921 - DNA, 120 bp, Zea Mays
gttatgcactaacagttatcgaataatttatacgccgtcgcaacgcacgggcacatacctagtcaaaaaatatattatacagagagcggagacaatcaataaaaaatcttgaattttttt

SEQ ID NO: 155922 - DNA, 468 bp, Zea Mays
acattttactcagcagagccccagacaccgatcaacagtcgagacggggtcggcgtcggcgacgcgccgttccacggtcgccatccctcgtcgtccgtcgcgggctcgtgccgtgccgctatccattctccgagggaacacatatacaacttgatccaaaggattctggtggcatgaatgctgatattccatctttcatctgatgaacagtgggctatgtacctcattgtcgacgcgccatggacgccaagctgcttctataggaagcccaagattgtccagcacatattgtgttgaaatgaatgagcacactgcatccatatcaccactggtacacaaaggcatagtttaagtcatgttatgatgtagcgcaccgagcaaggtattttgacacacataaatctgaacatatgtacctgtacagccatattctcgtgccacttgaaatgagtttcttgattgatggca

SEQ ID NO: 155923 - DNA, 159 bp, Zea Mays
agcccaccaccatccagggatcaagcctcaccacgaggaccaggggtgatgccaacagggttgagaacaggtcaagagggtttggtttttgtcacgtatggttccacagaagagcctgagaatgcattatcgaatctcaatggagctatgagttctaaa

SEQ ID NO: 155924 - DNA, 103 bp, Zea Mays
gtcactctacatttttaaagattcaaaaaaacattccttattttatacgtggtaaaacaacaaccttcataattcatcggatcttcttagtattatctctaac

SEQ ID NO: 155925 - DNA, 82 bp, Zea Mays
taatcagattcaaattcaatttcaccaacttcaaatttatttaaatgtacaaacacaaaatccagtgtgtatgcaaagtatt

SEQ ID NO: 155926 - DNA, 1240 bp, Zea Mays
ggagctacctagcaacgcgcagtaagcagcgtgggcaaagctacgagcgcccggctagcttcgccatgaacatgggtggggtgtccccgtcgacagtccggtgcaagcactgcagcacgcagctcaccgtgtgccccggcgagcgcgccatccagtgcacgcaatgctgcggcgtgacgcgtatccggcggcggcgggtccagcggccggcggcggcgccgcccaccacgggcttcccgcgcgcccgcggcaagaagcgggccctcctgatcggcatcacgtacgcggcggggctgcggccagctgaggggggccctcaacgacgtcaagtgcatgaggcaactcctctgccagcgcttcgccttccccagcgactgcatcatcatgctcactggtatgcgtggtggtgtgatttcatggagtctgttgtgttctgttatggcaatatgggttggtcactagctggacgagctctcgcggtgcagatgaccagaaggacccgttcaggctgcccaccaaggacaacatccggttggggatgcagtggctggtggaggggagcagcgagggcgactccctcgtgttccacttctccggcctgggcgcgcaggtcgccgacgacgacggcgacgagctggacgggtacgacgaggccatctgcccgatggactcgttccagaagggacccatcctggacgacgagatcaacgagactatggtccgcccgctggtccacggcgtcaagctgcacgccgtcgtcgacgcctgccacagcgccaccgtcctcgacctcccgttctgctgcaacatgtccagaagcgggagctggcagtggaaggacgagagccccccgtccggcgcctacaggggcacgagcggcggcaaggcgatgctcatcagcggctacagtgacggcaaagccaagtccagcgtggccagtgcgcagaaaccggaggcctgcgcgaccatgggggccatgacgcacagcttcatcacggcggtggaacgcgagccgcagggtgtcacctacggccgcctgctcacctccatgaaggccatcatgaccaactccggcggctgcgccgtgcagggtcctattggcgccggcgcggccgcccgcaaggtcgccaacttcagcggcgtggaggaacccaacctgtcctcctcggagaagttcgacatctaccgcaaggcctttgtgctgtaaacctcctctgcatcggccattgcaaactaccgt

SEQ ID NO: 155927 - DNA, 1149 bp, Zea Mays
ggagctacctagcaacgcgcagtaagcagcgtgggcaaagctacgagcgcccggctagcttcgccatgaacatgggtggggtgtccccgtcgacagtccggtgcaagcactgcagcacgcagctcaccgtgtgccccggcgagcgcgccatccagtgcacgcaatgctgcggcgtgacgcgtatccggcggcggcgggtccagcggccggcggcggcgccgcccaccacgggcttcccgcgcgcccgcggcaagaagcgggccctcctgatcggcatcacgtacgcggcggggctgcggccagctgaggggggccctcaacgacgtcaagtgcatgaggcaactcctctgccagcgcttcgccttccccagcgactgcatcatcatgctcactgatgaccagaaggacccgttcaggctgcccaccaaggacaacatccggttggggatgcagtggctggtggaggggagcagcgagggcgactccctcgtgttccacttctccggcctgggcgcgcaggtcgccgacgacgacggcgacgagctggacgggtacgacgaggccatctgcccgatggactcgttccagaagggacccatcctggacgacgagatcaacgagactatggtccgcccgctggtccacggcgtcaagctgcacgccgtcgtcgacgcctgccacagcgccaccgtcctcgacctcccgttctgctgcaacatgtccagaagcgggagctggcagtggaaggacgagagccccccgtccggcgcctacaggggcacgagcggcggcaaggcgatgctcatcagcggctacagtgacggcaaagccaagtccagcgtggccagtgcgcagaaaccggaggcctgcgcgaccatgggggccatgacgcacagcttcatcacggcggtggaacgcgagccgcagggtgtcacctacggccgcctgctcacctccatgaaggccatcatgaccaactccggcggctgcgccgtgcagggtcctattggcgccggcgcggccgcccgcaaggtcgccaacttcagcggcgtggaggaacccaacctgtcctcctcggagaagttcgacatctaccgcaaggcctttgtgctgtaaacctcctctgcatcggccattgcaaactaccgt

SEQ ID NO: 155928 - DNA, 306 bp, Zea Mays
gttagaccctcacaatcaacaaggactggtaagaaaaggactaactggggtatgatatatggtgatgatgatgatgatttgttttcaaccccaattggtggaacaggttcttcttccaaccccactccatctgcttctctctctagacacacttcagctagtgctttgctgcaagcagcaagcaattgtgcatcccttggggctggttctgagttatcagcatatttggatagtgatactgtccagaagtatgatgatgactttaatctgttgacatggtggcaggatcacaagctgacctactga

SEQ ID NO: 155929 - DNA, 1911 bp, Zea Mays
tctaatttgttcggtcctcggaataaaggaaccgttgcttcacttgcaagctagcactgctcatgggcatatgacttcggcatctagaacaacaacactttacacttcaggcatctagaacaacacagcgtgttaaagacgacgacgacgacaacgggggaagctttcatgctcatgggcaacacgtggccggtgggcatggcgggagggaacacggcggcgacgctgtggtgcagccactgcggcatgggcatcgcggcgccggcgcccgggtccggctctatcgtccggtgcgcgttctgccgcggggtgacgcgcgtcgagcaccagcgcggcggcgtgggcgagagagccatgacgacgaggacgctcgcggctgcagcctcgctgccgcggcagcttccggtctccgcggggcccgtcgagatcccggccagctaccccagggtgagcggcggcaacaagaagcgggcgctcctggtcggggtcagctacacgggcaccgcgcacgagctcaaggggacggtcaacgacgtcaaggagatgaggaggctcctctgcgacaggttcgggttcccgggcgcctgcatcctggagctcaccgagaaggagagtgaccccaccagggtgccgacgagggagaacctgctgcgggcgatgcggtggctcgtggaggggtccagcagcggcgactcgctggtgttccacttctccgggcacggcgtgcagaagctggacatgaacgacgacgaggtggacgggtacaacgaggcgctctgccccatggacttcgagcggagcggcaagatcctggacgacgagatcaacgacaccatcgtgcggccgctcggcaagggcgtgaagctgcacgccatcgtggacacctgccacagcggcaccatactggacctcccctacctctgccgcatgtccagaactgggtactggcagtgggagaaccacgcccgcccttcgggcatgctgacgaagcgccccaacggaggcctggccatctccatcagcggctgcagcgacgaccagaagtccgccgacgccagcggattttccgatgagtcgtcttcgatcggcgccatgacggacagcttcatcaaggcggtggaggccgagccggggacgacgtacgggcggctgctgagcgcgatgaggacgaggatccgtgacggccaggggagccgccgcctccccggcaggcttggctccttcgtccgctggatgatcccgtccagcagcgtgcaggagcctcagctttgctcttcagagatgttcgacatctacaggaagccgttcctcctctgatttggtcgtcgtctcgtcggctgcgaattccaaacttgatctgagtgatattgttgtgctgtgtaactccatcagttcaacccttgtgcatatgtgccatgtaattatattttacgcgtgaatcaagtcatgcctctcgccaaacgcaccagcacctgccagatgcatgcactactagcagggtcagaaatttcgaactcacggcctttttgcagagctccaccgtccggctctaaattcatcatattcatctaaatccatcatgaaacagctacacgtggatctaagttttatgcaagtatttgcattggtacacctccaacttagggatgacaatgggtacgggtatgagtaaataaccgcggataattattcattggatatggttatagtggaatttggtatccgcgggtacagttatggatataataacgtatcgtgggtaattttttcacgggtatggatatccggtatccatacccgttacccaatgaatatctgatatgtgggacatccagatttaatatattatcctaaattctaatttttttcaatttttatctatgacatgttgattgatgctgaaattatcat

SEQ ID NO: 155930 - DNA, 1348 bp, Zea Mays
ccaccgagatctgcgccaaaaactccacgtggccagggagaccctcgtcgtcaacctccgctccgacggttagctcccacaccgcccaggcgcccaactagcatggcgagcgcgcggccgccgcaggcgcagggcacgacgacgtgctgcaccggctgcggcgcgtgcctgcgcgtggcccccggggcccgttccgtgcggtgcgggctctgccacgccgtcacgcgcggggagcgccgccccccgcacggcctgcaccacgccgccgtgggcatcatcaagggcctcaccggagtcttcgcgtcgccgcgggggaccggcggcggcggcggcgccggcgcggtgctccaggagctgccggcgagcttcccgcgcgtccgcggctgcaagaagcgcgcgctcctggtggggatcagctacgccgccaccaagcacgagctcaggggtgccgtcaacgacgtccactgcatgagctacctgctccgcgagcgcttcggcttcccggaggaatgcatcctcgtgctcacacaggaggacaaggaccctgcacgggtgccggcgcgggcgaacctgatgcgggcgctgcggtggctcgtggacggcaccagcgccggggactccctggtgttccacttctccggccacggcgtgcagaggctggacagggacggcgacgaggcggacggctacgacgaggcgctgtgcccggtggacttcgacgacccccacggcggcggcgtcatcctggacgacgagatcaacgccaccatcgtgcgcccgctcggcaagggcgtcaagctgcacgccttcgtggacacctgccacagcggcaccatgctggacctcccgtacctctgccgcctgtccaggaccggatactggcagtgggagaaccaacagagcggcctctccggcgataccaagtgcaccagcggcggcctcgccatctccatcagcggctgcgccgacagccagatgtcgcaagacagcacgtcggtgtccgcgcccacctccaccggcgccatgacgtacagcttcatcaaggcggtggagtcagaaccaggcaccacctacggccgcctgctggcggcgatgagggccaccatccgccagaacggcggggagttgggcataccgggccccatcggcaccttcttccgccgggtcatcacattcagctgcgcgcaggagccccagctgtgcgcttcagaaacgttcgacgtctacacgaaacccttcctcttgtgactcctttaatttcctttatatttacgacattgccttaagcccataagaccgtgtatccaacagtttactcatactgttatctaaaatattattttatatt

SEQ ID NO: 155931 - DNA, 423 bp, Zea Mays
atggggcgcgcgtgtacggagctcggcgagcggagggcttcagcagagaggaggttggggacttcagcgccagactgctggacggagagggcagcgccggacctgagcaccatagcagcgcgacaggcaggcccggacggaggtcgaggctggggcaagcaccgcggcggacgacgcggacgagctgcacggctgggaggcgccgagcaggtgaagcggcgcgcggcaccggggaagagctcgcgccagagatggaggtcgagctgggacggcggggaagctccacggctctggagcgagctggagaaatcagggagcgtgccatgggcgactaggaaaaggaggcccagcgagcaccagagaagccgagcggtgagggagacgaaggctatgcagcggctgataaaaatgccagggagatga

SEQ ID NO: 155932 - DNA, 406 bp, Zea Mays
atggtccggcctcgccgaactggcggtgtcgacgacggacctgtccgtgcaagagctgagcctcctcttcttggccggcggcgcagaacctgcggcactggccaccgactcgacgctcgaggtctcgttctctgcagcaggctgcctcctggccctgtcgagttcgtgcggcccttcgtccgagtcggaggagtccaggagggcatcgatctcgtctgtgttctcgtgaacaccctcggtttcttctgctccaacgtcggttacgttggtctcgttgctaccttggagctccggcacaggatccagtggccccttgctcctccgcaaaggagctgcggtgggaccatgagtttccttctggtagaggactgaaggtctcttacgcgagggacacggtgcaggcgat

SEQ ID NO: 155933 - DNA, 372 bp, Zea Mays
atggtccggcctcgccgaactggcggtgtcgacgacggacctgtccgtgcaagagctgagcctcctcttcttggccggcggcgcagaacctgcggcactggccaccgactcgacgctcgaggtctcgttctctgcagcaggctgcctcctggccctgtcgagttcgtgcggcccttcgtccgagtcggaggagtccaggagggcatcgatctcgtctgtgttctcgtgaacaccctcggtttcttctgctccaacgtcggttacgttggtctcgttgctaccttggagctccggcacaggatccagtggccccttgctcctccgcaaaggagctgcggtgggaccatgagtttccttctggtagaggactga

SEQ ID NO: 155934 - DNA, 2484 bp, Zea Mays
gaacttgtctgcaatcaggctttggtgatgaagaagatgttctcatggatcaggaaggtggccttctgcagatgccagcggcagctggagaatgccgtcggcctcggcacggacggcaagttatacgcgacggtggacatcgacaaggctcgcgtggggcggacgcgcatggtgccccccgtcaactcccccaagtgggacgagtccttccgcatctactgcgcgcacgacgccagcgacatcatcttcaccgtcaaggccgacaacgccatcggcgccacgctcatcggccgcgcctacctgcccacggatagcgtcgtcgccggcaacaaggtgaacctgtggctccccatccgcgacgagaagcgccagccgctggaaggtggtgaccagatacacgtccagctccagttcaccgacgtcgccgcggacccgaccgccggctggggcgccggggtcggcagcgcggcgtacgacggcgtgccccacaccttcttcaagcagcggcgcggctgccgggtgcggctgtacgaggacgcgcatgtcgccgccgacttctcgccgcgcatccggctcgcggggggcaggttctacgagccgcgccggtgctgggtggacgtgttcgacgcgatcaacagggcccgcaggatggtgtacatcgccgggtggtccgtgaacaccgacgtcgtgctggtgcgcgacccacggaagcaggcggcggcggcgtccgagaaccttggcgagctgctcatccggaaggcaaacgagggcgtcacggtgctgatgctggtgtgggacgaccgcacgtcggtggggctcggccccatcaggcgcgacgggctgatggccacaggcgaccaggacacggcggccttcttccgtggcacgcgcgtgcagtgcgtgctgtgcccgcggaaccccgacaaggaccggagctacgtgcaggatatcgagacggacaccatgttcacgcaccaccagaagacggtgatcgtcgacggcggcggcaggccggcgccgtggtcgccgccgggcctcgtgggcttcctcggcggcatcgacatgtgcgacgggaggtacgacacgcaggaccacccgctgttccgcacgctgggcaccacgcacaacagggacttccaccagcccaacttccccggcgcgtccatcagcaagggcgggccgagggagccgtggcacgacatccactgccgcgtcgagggcccggcggcgtgggacgtgctggagaacttcgagcagaggtggaggaagcagggcaagggcgacaacctcctggtggcgctgaacaaggagtgggcggagcgcgaggcggccccgcggggcgacgccgagtcgtggaacgtgcaggtgttccggtccatcgacggcggcgcggcggcggggttccccgagccctccgcggacgcgccccgggaggccgcggcgctcgggctggtgaccggcaaggaccacgtgatggagcgcagcatccaggacgcgtacatccacgccatccggcgggcgcgggacttcgtgtacatcgagaaccagtacttcctggggagctcctacgcgtggcggcagaacgacggcgtgtcggtggaggacatcaacgcgctgcacctcatccctagggagctgtcgctcaagatcgtcagcaagatcgaggccggtgagcggttcgccgtgtacgtggtggtgcccctgtggccggagggcgtgccggagagcggctccgtgcaggccatcctggactggcagcgccgcaccatggagatgatgtacaaggacgtcctcatggccattcgcgccaagggactccaggccgaccccagggactacctcactttcttctgcctcggcaaccgcgaggcgccatgccccggcgagtacgtgccgccggagcacccggaccccaacaccgactacgagagggcgcagcgggcgaggcgcttcatgatctacgtccacgccaagaccatgatagtggatgacgagtacatcatcgtgggatcggcgaacatcaaccagcgctccatggacggcggccgcgacacggagatcgcgatcggcgcgtaccagccgggctacctggcgatcaggaacacctggggcaggcggcggcggcggcactgggcggcgagggggcaggtccatggcttccgggtctccctgtggaaggagcacctggggcaggcggcggcggcggcactgggcggcgatctcctccgtccgtcgagcctgacctgcgtgcgccggatgaaccaggtggcgaagcagcactgggacatgttcgcgagcgacgcgttccagggcaacctcccgggccacctcatggcgtacccggtcagcgtgctcgacgacggcggcggcaagatcgtggccacgacggaaaccttcccggacaccaacgccaaggtgctcggcatcaagtccgacatcctcccgcccatcctcaccacatgatttaatcagcatcgattatta

SEQ ID NO: 155935 - DNA, 561 bp, Zea Mays
atggcttgtgatttagtcttaatattaaacctgatggaagagccatccacatttgatgattttatggattaccaaatccttgcgtgccttgtaactaataagacgttggcaaaagatcgctcttcatgggatcctactgatgatgaggtgcagcgtgttgttctgtctttgttggaaggttccatcgatattgatgccaataaactaaaacaacggattgccgaatttgagatgattgtcaaaaaccattgggaatgttctgaacgaattgtggcaaataaggacatgatgcttgatgtgttcgactatgtcgttgttgactttgtccccaattcttatcaggagccaacccttcgtttgccttctatttctcctggaagtaatgagagtgttgatcaccatttgtctaggttgttggaccaaagagtagttgttcaagaaattttgacgggccctataagtataaatcattgtactgaaaaacttaagaaatgtggtttttcaaaacagcaactttgggatgctaacgatatattgaaggctgatttagaattgcgtcag

SEQ ID NO: 155936 - DNA, 4953 bp, Zea Mays
cagcaccccccctccctccctatctctctgatctctccctcgctctcgcagccgccactgtagaagcttcgaggctgctgctgcgcccatggccgcggaagccaagacgccgtccctcgctgaggaatattcacttccaccacaggaagttccagtggaaaaggcagctgaggagaagccctctagtggtactgagactgaatctgctccttcaaccaatgatgagactccttcatctgtagaagataagaatgaaacgtctgaagtacaagatgctgctgaaaagtcagacgcagaagaaactaacactgctgcagaggaagcaagtgagactgccgaggaggaagaggctgagaaacctgagatcaagattgaaacagctccagcagattttcgtttcccaacaacaaatcaaacgaggcattgtttcacacgctatgttgaataccacaggtgtgtggctgcaaaaggtgaggatgcacctgagtgtgataagtttgccaagtactatcgatccctgtgcccaggtgaatgggtatgtatttattgctttcaccactatggtttacatactgcccttgttgcttgttgtggtgttgagattagaaaaaaatattttgaggcatgtggattatgcattttgagttgataagcattcactttacagtagcactgttcttcaaaaagaataacaatattttagctgtctagtgctactgtaccttacctagataaaatacttgaactttaggatatgcttggattttatagagttctaaatggttggatatgttgttccacctcgtccctgtctagcagttatggaaactcctgaatgtttgtgtcatgtactggtattaagttatatgcaccaaccagttcaacccaaaagcttaagctgataggagtggtggagtagtggacaattcacttatattatattccaacactccccctcacgtcgagcctcattttgggtctctgacgtggaatataggagcgagcaacaattattttatttaattgtgctaaccaggattcgaactcgagacctctggctctgataccatattaagttgcatgcaccaaccaattcaatccaaaagcttaagcttataggaggggtggataattcacttatattatattccaacaacgggcgctcgtacgccaggcagcgtcgcgcccgtgacaggcgccacgcctaggagtgcgatctgggagggcgcgcagatccacaggagcatatggaaagtagtggctagaaaggaaaatagggaaatggaaagtagaaggaaggaaatgagagattgattagtgattgattagtgttaccatgtttaagcttgcctaaaatacagcaggccgatgcctttatatacggcacatggagacaggaataaaggcagccaagaagttatctcttctccacctctctctctaccaagcctatggctgtgggggataaccacaccggagaagacgacgaaccgcggctacgaccttcgtagccgagggccccctgctctagacgtccatcgttgccgagggccccctgctctagacgcccaggcccttgacaacctggtatcacgagtcaggcgatcttcgtcttctcaatcccacacctccgatcagttcctcgacgttatccaaccaccacccagccctccaccctcaccgccgtcgacctcctccattatgagcaccaaaaccatcgacgatctggctgcggtgatcgagaagctcacgggcacgatctctgtcctccaaaatgacgttgagtcgttgaagaaggacaaggcgccgttctcctcgccatccggcagcggcggccacgacggccagcaccacatcgatcgaccgccgaggttccaaaagattgacttcccgcgttttgacgacaagtcggaccccatgctcttcgtcaaccgctgcgagtcctactttcatcagcagcggatcatggaggaggagaaggtttggatggcttcttaccacctcgagggcgtggcccagtcgtggtacctccagctatagacggacgaggggactccgcgctggcaccgcttcaaggacatcctccagttgcgcttcgggcctcctctacactcggcgccgctgttcgaactcgctgagtgcaggtggacgggcaccgtggaggagtaccagaaccgcttccaggagctactaccgcgcgccggaccactggaggaacgccaacgcgtgcaactcttcacgggcgggctgctgccaccgctcagccatgtggtgcgcatccacaacccccagtcgctcgcggcggctatgagcctcgcgcggcaagtggagctgatggaactcgacagggcctcagtgccagctcagaccaggccagccgcgcgcggcgtcctgcctcctccgccgcgaccggcgcctatggcggttccggcgccccacgttcctttgacgctccctgcgccaccggcgggcgcggctccaggccgtggcgagggcagaaggctcagcactgagatggccgaacgccatcgcctcggattatgtttcaattgcaatgacaagtattccaggggtcacaataggttctgcaagcgcatcttcttcgtcgaaggcgtcgagatcatggacgaagacgacaccgaccaccccgacggccccgatgctgaggcgccgtgcttctcgttgcaggctgtctcgggctgccccgtggccgacaccatgcaggtggccgtcatgctaggggccaccccgttcgtcgccctccacgactcgggcagcacacacaatttcatattcgaggcagcggcgcggtgttccggccttccccagcaacagcgcccgcgcctatcggccatggtggccaacggcgaacgcatcacttgcgtgggcgtcatccgcaacgcacccctcaccgtcggcagcgacgcattcccggccgatctcttcgtcatgccgttggtcgggtacgacgtcgtcctcgacactcgctggctgggcgggctagggcccatcgtgtgggatctcgcgtgccggcgcatgtcgttccaacaccaggaccgtacggtctgctggaccggcgtgcccacatcctcggcttcggtgctgggcgccaccaccgcggctgagcctcttctcgcgactcttctggacaccttcgtgaccgtcttcgagagccggtcggtctgctctcgttgcgcgcccatgaccaccgcatcatcctcaagcagggcgcgcaaccggtggcggtccggccctaccggtacccggcggcggtccggccctaccggtacccggcggcgtacaaagacgagctggaacgccagtgcgccgccatgatcgagcaggggatcgtccgtcgcagcgattcaccgttctcgtcgccggtcctcgtgaagaagcccgatgggtcgtggcggttctgcgtcgactactgcgcgctaaacgcggtcaccatcaaggacgccttcccgatcccggtggtcgacgagctgctgaacgagcttcatggtgcccggttcttctccaagctggacctgcgttccgggtaccatcaggtgcgcatgaggctggaggacgtgcacaaaacggcatttcgtacacacgacggcctgtacgagttcctggtgatggcgttcaggctttgcaacgcaccggcgacattccaggcgctcatgaacgatgtactccgtctcttcctccgccggtttgtccttgttttctttgatgatatcttgatatatagcaagaattgggaggagcacctgcaccacctcaggatggtcctcgaggaactgcaacgccaccagctcttcgtcaagtgctccaaatgcgccttcggagccccgtccgtcgcctacctcggtcatgtgatctcggcggcgggcgtggccatggacccggcaaaggtgcaagccatcttcgactggccggtgccgcgctcggctcgggcggtgcgcgggtttcttggcctgacaggctactaccgcaaatttgtgcctaactacggcacggtcgccgcaccgctcacgaccctccttaagaaagacgccttcgcttgggatgacaaagcagcggcggctttcggcgccctcaaggtcgccgtcacctcggcaccggtcctcaccatgcctgacttcacaaagaccttcgtggttgagtgtgatgcgtcgtcacacgggtttggcgccgtcctcacccaagagggacacctggtggcattcttcagccgccccattgctcctcgtcaccgggcgttggcagcctacgagcgcgagctcatcggcttagtacaggcggtccggcactggcggccgtatctctgggggcggtgcttcgtcgtcaagacggaccactatagcctcaaatacctcctcgaccagcgcctctccacgatcccgcaacaccactgggtcgggaagttgttgggctttgctttcactgtggagtacaggtcgggcgccacaaacgtcgttgcggatgctctttcccgccgcgacacggaggagttcgacgatttccgcgcctgattcccagccttccagctcgaggacgagctggtcttcgacgaggggagagatgttatgtacgggcgctcgtacgccaggcagcgccacgcccaggagcgcgatctgggaggacgtgcagatccgcaggagcatatggaaagtagtggctagaaaggaaaatagggaaatggaaagtagaaggaaggaaaggagggattgattagtgattgaggaaagtagaaggaaggaaaggagggattgattagtgattgattagtgttaccatgtttaagcttgcctaaaatacagcaggccgatgcctttatatacggcacagggagacaggaataaagacagggagacacgaactctttaccaatgaggtaaaatatagatgccgggtccgcatagatccaagccgccgggtacctgtcgaggagggaagggg

SEQ ID NO: 155937 - DNA, 506 bp, Zea Mays
gtgtcaataggttcatatctcaaagtcgcatatgcatactggcttgcttactttcattttagatcttagatgcaagaaatgatctcctttgatgaatattcacttccaccacaggaagttccagtggaaaaggcagctgaggagaagccctctagtggtactgagactgaatctgctccttcaaccaatgatgagactccttcatctgtagaagataagaatgaaacgtctgaagtacaagatgctgctgaaaagtcagacgcagaagaaactaacactgctgcagaggaagcaagtgagactgccgaggaggaagaggctgagaaacctgagatcaagattgaaacagctccagcagattttcgtttcccaacaacaaatcaaacgaggcattgtttcacacgctatgttgaataccacaggtgtgtggctgcaaaaggtgaggatgcacctgagtgtgataagtttgccaagtactatcgatccctgtgcccaggtgaatgggt

SEQ ID NO: 155938 - DNA, 537 bp, Zea Mays
cagcaccccccctccctccctatctctctgatctctccctcgctctcgcagccgccactgtagaagcttcgaggctgctgctgcgcccatggccgcggaagccaagacgccgtccctcgctgaggaatattcacttccaccacaggaagttccagtggaaaaggcagctgaggagaagccctctagtggtactgagactgaatctgctccttcaaccaatgatgagactccttcatctgtagaagataagaatgaaacgtctgaagtacaagatgctgctgaaaagtcagacgcagaagaaactaacactgctgcagaggaagcaagtgagactgccgaggaggaagaggctgagaaacctgagatcaagattgaaacagctccagcagattttcgtttcccaacaacaaatcaaacgaggcattgtttcacacgctatgttgaataccacaggtgtgtggctgcaaaaggtgaggatgcacctgagtgtgataagtttgccaagtactatcgatccctgtgcccaggtgaatgggt

SEQ ID NO: 155939 - DNA, 438 bp, Zea Mays
atggccgcggcggccggcggcaacgcgggcgaaggcggcagtaccccacctctcatgtcgagggccgggttggtggaaagctgggagtacgtgttcgacaagttgggcaacgacaaggcaatggaggtgttgatggccctgctgctgcgggacgcccgggccgagaacgcccgaaaagcccggaaggaggaggaggaggaggaggaacggcgcgcgcgcgtcttcgagcagtggcagccgccgccgcccgactcagcgccgccgccggtggcggtggcggcgccgccccgggtggaccagaccgtcgtgctggccctggccgcgccgccgcacctgctgcctctcaatcacattcacgggaagacgaagccgccgtcggcggcggacctcgggcgttccgtcaaacccgccaagaacacccgccgtggcggcgtgtag

SEQ ID NO: 155940 - DNA, 1173 bp, Zea Mays
atggcttccgatggcatcacacccagaggtatcattgttttatctcttcttcttctgttcaaacagaaagacgtcaagccaccgagagatgtttgtgttgttggggttgcacgcacccctattggcagtttccttggtgcattgtcttccttgcctgcgacgaaacttggctctatagcaattcaagctactatgtttgcagcacagtcaattcaactgggtatcaatgatattgttgtggcaggtggcatggaaagcatgtccaatgccccaaagtacattgctgaagctaggaagggttctcgttttggacatgacacacttgttgatgccatgcttaaggatggtctttgggatgtatacaatgattgtgccatgggaatgtgtgctgagctttgtgctgacaatcatgcactcacaagagaagaccaggatgcattttctatccgaagcaacgaacgtggaattgcagctcgtgacagtggtgcttttgcatgggagattgttccagttgaagttcctgttggtagaggaaaaccaccaacgctcgttgagaaagatgaaagcctagacaagtttgacccagtaaagctaaagaaacttcgcccaagtttcaaggagaattgtggtaccgttacagctggaaatgcttctagtataagtgatggagctgctgcattagctttggtgagtgggcagaaggctcaagagcttggcctgcaagtccttgcaaggatcaaaggatatgctgatgcagctcaagctcctgagctttttacaaccactccagcacttgccataccaaaggctatcacaaatgctggattagagtcatcccatgttgatttctatgagattaatgaagccttttcggctgttgcacttgcaaatcaaaagctccttggaattccttcagaaaagactaatgttcatggtggagctgtatctttaggacatcctcttgggtgcagtggtgctcgcattttggtggcagcgtgccgccgcttgtacctgcgacatcgatgcccggatgccatccacgcccccgtagaagacgtcatcgcagtgctgctgttgcggcataggcatggggcggtgaacaacagggttggtgaaggagacgttgccatcgtgaatttcggctccatcgttgatgagagggcatacaattga

SEQ ID NO: 155941 - DNA, 444 bp, Zea Mays
atggagggcttcacgggcgcgcacgcttcttctcgcgtcatccttgcttgcgccgcccctagccccaccgtcgtcctccccatgaagctgccgaatttttccttctctcggttggatctgccagagtggtcagtccatcggtttgcgtcgattcaatggggtttggcccatattgctggtacagggtgcaggagaggctacacttcctctatgagtcaaggtcccatggaccccgttttgttttgggtttccctacacattgtccctggacttacagatgacaaatatgatgtgttctatgagtcactcatgggtaaagagaagttacacatcaacattgtggttaatggccatgtcgactctggcaagtctaccaccactggccacctgatctacaagcttggaggcattgacaagcgtgtgatcgagaggttcgaaaagtag

SEQ ID NO: 155942 - DNA, 235 bp, Zea Mays
gtcacgtcgtttgccgtcgagttgtcaaacacgtcatcctctgttcaaacccccacctcaccagctcgctcccgacttcagctgaaagtcgtcgtcgttccgcgcgtcagcaagaaatcccaagaatcgggtgaagacgaatctagcaacacgatattccctaggcgctcgacaaattgcctggatcgaaaaatcgctacccgatctcgcggattcgtgtcagcggttgaaacgg

SEQ ID NO: 155943 - DNA, 311 bp, Zea Mays
tttttatacacataatcacatagatatacaaatttaattagtattgcacaatgatagatccacatcacataaaccatcaacaagcaccacaacaaaatcattcacaaaacctacacatgttattatgttatgcacatatttgcaaacactttacaaaatcattcacaaaagtactaacgcttcaagtgattcgcaaaagccttcacaaaagcactccaacttcttgtatcctcttgttttaaggcacaagcttgtaggggttgtgatgtcgccacttacttgatgctaacaagacatttccttcaccaaag

SEQ ID NO: 155944 - DNA, 1644 bp, Zea Mays
actgacacgcacgcctcacgcaacaaaggcgagacagagcaccagctcaccgccccaccgattcaaaggcgctcggatcctctgacgtcgacgttccctgccagctcccggctgccgccctcgctccttccgccatctgcgctgctctgcggcgccagagccggcgcccgcccgctgccgccctcgacggaccgggacacggggccccaccgttctctttcctgcgctgcgctgcgcggcggctgtgctgctgatcagttaatgtgcctgtgaggctgtgacaggcggcgtcgagcgagtccgaggcgggctaactaaacccgccgtctctcgaggcggcgcccgcggagggccaggtggagggccgaggaaggtggaggcggtgaggcgatggggggcgccaaggcggaggacaagcccgccgccgccaccgctgaagacgattggtgttaccagtttggaaacaagaatgcgtttgactcgaaggccccgaaaaaatcaccacttgcattgagagtggttgtctttgccatgactgtgttatgtgggatatctatttggtcaatgtgtatgaagcagctagggagtgatggctggtcaagaatagtgaagatcgaagttgtggaacaaccatgtaataagtctacagttcctccttctgaggttcaatttgcgcattaccctcaaccgacaacttacagcagggtctcgtggcgaatcacgtggccgtagtggactacttcaatcgaagaggagtctctgcaatatttctcttcagaaggaatctgctccgccagttggtatcacagctagcgaataaccacgacagattcctgaagcagttaaacggaacacacaaggcgcatgtccacacagagcatgaggcccatatactcgcgagatacaagcccaggctgaacacgtcgtcgctaatacggaaactgaaacaggctgatgagtacacacgcgacgcccttgagaacctaaataacacccgccacatcactgtctactacgaggacatcgtccgcaacagaacaaggcttctcgacgccctggatttcctcggagtgccgaggagggagctggcgagtcggcacgtgaagatacacacgaagcccctgtcggagcagatcgagaactgggacgaagtctacagcgccctcaacggtacccagtacgagggcttcctgaatgccgctgactatacgtaatatgacgtcacggtctccacgtctcttgatgtagatgtaggtgtgtaggtatagcgccccagctgtgattcctttgttcttgttttcgagtagccggccggccttctgcgtgcctgcctggcaggagttttgatgcgggggatggaggcgctttgccatggttgcgttcgagctcctggctagcccacccactagctttcctcatgtccatgtaacgaccctcgagcttctctcatctttggccgtccgcttgtaatgcttgtcgtcagtgatctcacccatgccatgccatgccatgccatgccttcgagggacaaagctgtgcacttgaacttgaggcttgtcttttcattgggtgtttgcggtgggcaagcaagacgctgcagttaaggattattggaaggtggaaggacttgttggagttgctctt

SEQ ID NO: 155945 - DNA, 1838 bp, Zea Mays
actgacacgcacgcctcacgcaacaaaggcgagacagagcaccagctcaccgccccaccgattcaaaggcgctcggatcctctgacgtcgacgttccctgccagctcccggctgccgccctcgctccttccgccatctgcgctgctctgcggcgccagagccggcgcccgcccgctgccgccctcgacggaccgggacacggggccccaccgttctctttcctgcgctgcgctgcgcggcggctgtgctgctgatcagttaatgtgcctgtgaggctgtgacaggcggcgtcgagcgagtccgaggcgggctaactaaacccgccgtctctcgaggcggcgcccgcggagggccaggtggagggccgaggaaggtggaggcggtgaggcgatggggggcgccaaggcggaggacaagcccgccgccgccaccgctgaagacgattggtgttaccagtttggaaacaagaatgcgtttgactcgaaggccccgaaaaaatcaccacttgcattgagagtggttgtctttgccatgactgtgttatgtgggatatctatttggtcaatgtgtatgaagcagctagggagtgatggctggtcaagaatagtgaagatcgaagttgtggaacaaccatgtaataagtctacagttcctccttctgaggttcaatttgcgcattaccctcaaccgacaacttacagcagggaggaatgcaagtgcaatgctgtccggttctttgcgattatatcatcacagcgatctggaagtggctggtttgaaacccttcttaacagccacatgaatgttagctccaacggtgaaattttctctagaaaagaaaggagaagtaacatttcctctatagtaaatgccatggatagagtgtacagcttggattggaacagtagtgcttccaagaatgagtgcactgctgctattggcttcaagtggatgcttaatcagggtctcgtggcgaatcacgtggccgtagtggactacttcaatcgaagaggagtctctgcaatatttctcttcagaaggaatctgctccgccagttggtatcacagctagcgaataaccacgacagattcctgaagcagttaaacggaacacacaaggcgcatgtccacacagagcatgaggcccatatactcgcgagatacaagcccaggctgaacacgtcgtcgctaatacggaaactgaaacaggctgatgagtacacacgcgacgcccttgagaacctaaataacacccgccacatcactgtctactacgaggacatcgtccgcaacagaacaaggcttctcgacgccctggatttcctcggagtgccgaggagggagctggcgagtcggcacgtgaagatacacacgaagcccctgtcggagcagatcgagaactgggacgaagtctacagcgccctcaacggtacccagtacgagggcttcctgaatgccgctgactatacgtaatatgacgtcacggtctccacgtctcttgatgtagatgtaggtgtgtaggtatagcgccccagctgtgattcctttgttcttgttttcgagtagccggccggccttctgcgtgcctgcctggcaggagttttgatgcgggggatggaggcgctttgccatggttgcgttcgagctcctggctagcccacccactagctttcctcatgtccatgtaacgaccctcgagcttctctcatctttggccgtccgcttgtaatgcttgtcgtcagtgatctcacccatgccatgccatgccatgccatgccttcgagggacaaagctgtgcacttgaacttgaggcttgtcttttcattgggtgtttgcgg

SEQ ID NO: 155946 - DNA, 761 bp, Zea Mays
actgacacgcacgcctcacgcaacaaaggcgagacagagcaccagctcaccgccccaccgattcaaaggcgctcggatcctctgacgtcgacgttccctgccagctcccggctgccgccctcgctccttccgccatctgcgctgctctgcggcgccagagccggcgcccgcccgctgccgccctcgacggaccgggacacggggccccaccgttctctttcctgcgctgcgctgcgcggcggctgtgctgctgatcagttaatgtgcctgtgaggctgtgacaggcggcgtcgagcgagtccgaggcgggctaactaaacccgccgtctctcgaggcggcgcccgcggagggccaggtggagggccgaggaaggtggaggcggtgaggcgatggggggcgccaaggcggaggacaagcccgccgccgccaccgctgaagacgattggtgttaccagtttggaaacaagaatgcgtttgactcgaaggccccgaaaaaatcaccacttgcattgagagtggttgtctttgccatgactgtgttatgtgggatatctatttggtcaatgtgtatgaagcagctagggagtgatggctggtcaagaatagtgaagatcgaagttgtggaacaaccatgtaataagtctacagttcctccttctgaggttcaatttgcgcattaccctcaaccgacaacttacagcaggtgagatttgccccgaagcaagattgagcaatctggtttgtttaatgcttaatatat

SEQ ID NO: 155947 - DNA, 1296 bp, Zea Mays
cttgcaggagtaacggataaccaacccctcaaacggttaaacccatgccgctaatcgacgccgccgcctcggcggtcgcgccgcccccaccccggcgagtggctcaactccgcttcttcagcactcgcagacccggaatcctatccctaactgccaccagctgctccccctcccctccgcccccggtcgctgcggaggtgcctgcgccgccacaggaagcgaagtcgaagccgaggccacggcggtacccgaagcagtaccccggcgagtcggtgggcgttgctgaggagatgcgctttgtcgccatgcgcctgcgtaaccccaagcgcaccaccataaaagacaagtcggggacggaggacgcggacgccggggcgggggtgtcggagggcgaggctgaggaggacgacggcggcggcgtgaaggaggaacacgaggaggaggatgagggcgagctcgaggaaggggaatggatgcccagcatggaggggttcgtgcgatacctggtggacagcaggctcgtcttcggaaccatcgagcgggtcgtggccgagtccaccgatgtcgcctatgtttacttcaggaaaagtggtttggagcgttcagctagcatttcaaaagatttggagtggttcagaaaacaagggattgcaatcccagagccgagtacttcgggatcaacttatgcagcttatctgactgaactggctgagagcaacgctcctgcattcctctctcattattacaatatctattttgctcatataactggaggtgtcacaataggcaataagatctgcgaaaagattctggaaggaagggatctggagttctacaagtgggatactgatgctgaacttctactaaaagatgccagggagaagctgaatgagctcagcaagcactggactcggaaggacaggaacttgtgcttgaaagaagctgcaaaatgcttccagtacttgggaaagatggtccggttaattatcttgtgagccgttgtgtttgttggataaatcccagtttaagctcgcggcatgcattagagggacactagtatggctggaggcggcgcagtgcagttactcttgaggagttaatatccttatcaactaaataacatgtcagaagtctggagggtcctttttggtgtaatagatgaagagggtcagcgagcactatatgattgacgctgaaatggcagaacgcaattgcttctttttttattccgcgtgcgtaactgcatatttaggaggtatttggttagagggactaaagattagtctctagttttta

SEQ ID NO: 155948 - DNA, 1206 bp, Zea Mays
cttgcaggagtaacggataaccaacccctcaaacggttaaacccatgccgctaatcgacgccgccgcctcggcggtcgcgccgcccccaccccggcgagtggctcaactccgcttcttcagcactcgcagacccggaatcctatccctaactgccaccagctgctccccctcccctccgcccccggtcgctgcggaggtgcctgcgccgccacaggaagcgaagtcgaagccgaggccacggcggtacccgaagcagtaccccggcgagtcggtgggcgttgctgaggagatgcgctttgtcgccatgcgcctgcgtaaccccaagcgcaccaccataaaagacaagtcggggacggaggacgcggacgccggggcgggggtgtcggagggcgaggctgaggaggacgacggcggcggcgtgaaggaggaacacgaggaggaggatgagggcgagctcgaggaaggggaatggatgcccagcatggaggggttcgtgcgatacctggtggacagcaggctcgtcttcggaaccatcgagcgggtcgtggccgagtccaccgatgtcgcctgaaaagtggtttggagcgttcagctagcatttcaaaagatttggagtggttcagaaaacaagggattgcaatcccagagccgagtacttcgggatcaacttatgcagcttatctgactgaactggctgagagcaacgctcctgcattcctctctcattattacaatatctattttgctcatataactggaggtgtcacaataggcaataagatctgcgaaaagattctggaaggaagggatctggagttctacaagtgggatactgatgctgaacttctactaaaagatgccagggagaagctgaatgagctcagcaagcactggactcggaaggacaggaacttgtgcttgaaagaagctgcaaaatgcttccagtacttgggaaagatggtccggttaattatcttgtgagccgttgtgtttgttggataaatcccagtttaagctcgcggcatgcattagagggacactagtatggctggaggcggcgcagtgcagttactcttgaggagttaatatccttatcaactaaataacatgtcagaagtctggagggtcctttttggtgtaatagatgaagagggtcagcgagcactatatgattgacgctgaaatggcagaacgcaattgcttct

SEQ ID NO: 155949 - DNA, 848 bp, Zea Mays
agacccgcggtatcgccaagtattcccttgcaggagtaacggataaccaacccctcaaacggttaaacccatgccgctaatcgacgccgccgcctcggcggtcgcgccgcccccaccccggcgagtggctcaactccgcttcttcagcactcgcagacccggaatcctatccctaactgccaccagctgctccccctcccctccgcccccggtcgctgcggaggtgcctgcgccgccacaggaagcgaagtcgaagccgaggccacggcggtacccgaagcagtaccccggcgagtcggtgggcgttgctgaggagatgcgctttgtcgccatgcgcctgcgtaaccccaagcgcaccaccataaaagacaagtcggggacggaggacgcggacgccggggcgggggtgtcggagggcgaggctgaggaggacgacggcggcggcgtgaaggaggaacacgaggaggaggatgagggcgagctcgaggaaggggaatggatgcccagcatggaggggttcgtgcgatacctggtggacagcaggctcgtcttcggaaccatcgagcgggtcgtggccgagtccaccgatgtcgcctgtgagtcacagttctcatccccattctttgctgcgagtgccattttgattaattgtcgtggcctgtgattttccgcaattagaatttcggtctcggtctttgatttgcgtatgtgcttcactgcttttgcgtgtatgttggctacatttggatactcgcacgcatattgctcttatcatactgtgtcattgtcacctctgtgaaaggattgctagttgaagatatgttatattgaggttgagggaaccaatt

SEQ ID NO: 155950 - DNA, 698 bp, Zea Mays
gcgcccctggttttccctgcgcgcatccgcgtgctccaccgtgccgtgctcccatgagctcacccagttccctctactcgctcgcgtccagtcgtcggacctcgctttcatccctatggtgctcggcgccctccctgctccgcgccgtgacgaggattgcgggccggctgtccggtctcgtgaattgcctcgttgtggatggacggctggatgggggcaggcaaatccggatccgttgcgctactcgcaaagcgtgtgggggcctcgccggccatcctgcttccttgtgtgcgctccgtttgccgtcatcctccacgcgccggcagttcgcttggtgtcagctcgctgccgtggttgtttgctgctcgtggtcgtcgtctcctcaacatccacgtggacgctccctcgccgatcgcgctctccggagttcactgaacgctgctcccagtgggaaagctttgcaagttcgcgcgtcgtcgctctctatcgccggatgccatcctcgtctcgccacctcgttgttgcgccgtcgtttttctcgtccagtactcgcgcggtctcgcccaaaccgtgctgtcgtctcccaaccgcttgtccttacccctgcacgcgcttgtcgcgctagtcaaccctgcctcggtcatcgtcatcgatactgcgcttgccggtggccgaagctcatgtcgccctctccttca

SEQ ID NO: 155951 - DNA, 2472 bp, Zea Mays
atggaacttcttgatagtaatggccacggggaaacaagagcacagggtgctgaaaacattgcaccagtttctgctaatagtccagatacatcatcggaaatgcaagggaagttacctcacagtttgacagagcaccaggaagaaatggggtcccctgcaggccatgcagggagtttgtcgccgaaaattgtctcccacatagaaccagctcgagcatctgatgacccctcaaaagatgagggacgtcatgctgctttattaacagataagagtggagttgaaatcatatacgaaaatggttttactggcgccagtagtattattccagcagctgaaatgaaatctgaagaagacaatatgtactgtcgtaacaacgttgccgtcacccccacaaagaaagtagaatcagtaaaggggtgcgaaggctcacacacaggtcttgttgacactagcgccccattcgagtctgttaaacaggctgtcaccaagtttggaggaattgttgattggaaagcctacagggctcggtcattagaggtaatgtctctgggtttcacaacgtatatggatcatggtcagacacatgatcaccttgttttatgtccatcaatcgctgccacacaacagttctttatctttgtttgtatgcagagacgcagggtcatgcaacttgaacttgagaaggttcagcaagagattccacagttcaaagaagactgggagactgctgaggtggccaaggcacacgtcattgaggagctagagagaactaccagacttgtcgacgagctgaagcatgagctggagagggcacagctcgaagtggaccaagcgaagcaagattccgagcttgccctgctgagggcacaagagatggagcaagggattgacgatgaagctagtgtaatagcccagacacagttggcagtcgccaaagaaagacatgaaaaggctgttgaggagctggaattgctgaaagaggagctaagatcaacgcatgaacagtatgctgtattagccactgaaagggatgtagccgttaaaagggccaaggaagttgttcgtgctgcgaaggatactgagaagcaagtagaggaactcactttagaactgatcgcatccaaagagtctctcgagtcagcccacgcttcacaccatgaggttgaagagcacaggctcggggcagctttggcgaaagagcaggatttcctggcttgggacaaagagctgcaggaggcacaagaggagctaaaccagctccacgaacaaatcgcatcgaaaacgaatgtggaggctgaagctgttgaaaacgagcgcaaactacttagcctgaaaagtgagctagctgcctatgtggaagacaaattgaatgaagaggctggaatgcttcagcaacaaggttctgacgaagaaaaagaaatcagtaggtcaatcaagcaagctcttgcttcaaaaaggaaggagcttgctgaacttaaagggaaactagaaaatgcgagaaatgaagccaacctagtaagagttactgcagaatcactcagttcagagctcgatagggagaaagcttcactcgccgcattgcagcagagcgagggtatggcatccatcacagtttcctctctagaagccgagctcgataggacagagcaagagatagagatggtacataagaaagaagcggaagctcgggaaaaaatggcggagcttccaaggatgttgcagcgagcagcccaggaggcagaagatgccaagatggcggctcactcggcacaagaggaactgagaaaggccaaggaagaggttgagcgggccaaggcttctgcgacaacggcaggtaccaggttgcgtgcagtttcgaaggagatagaggcgtctaaagcatctgagcggctagccatagcggcagctcaagcgatgcaagagagcgaggacacaggaagcactggcgcttctcctcgagtagtaacgcttcctgtaagtgagtaccatgctcttagcgagaaggttcatgaagccgaagaacttgcaaacgagagggtggcggtcgcgttggcgcaggtagagttggcaaaggtgtctgaatcgaggagtctagagaggctacaggaagcgtccaaggagacggagaaaaagaagagcgatcttcgcatcgcgctggagagggccgagagggcaaatgaagggaagcttggcgctgagcgggagctgagaagatggagagctgaacatgtgcagcgtcggaaagcccatgaggctgcacagcatgcagttagtccggtaagaactccacccaggatgtttgtccagcagaagggctcttatctggaaggaaacgaactcagagatccaaaggtgcacaagtcaactggcagcatggatcagtttgtttcggacaagaaatcgaggaaaaagaagtcgttcttaacccagttgtccacacttttgtctagaaagacacatgcacaaacataa

SEQ ID NO: 155952 - DNA, 1365 bp, Zea Mays
tcgcctgagttagtgtgagccattgcttgctttactgccacatggggggtcttgttgcagttatgcagctgtctgatttgtatgtcttttcttgtccggagattcagtcgatctgtccgacgcattcccatccccaccatctggtgagtccttttatttgttcttttgtaaaaatttaaaaatgtctctttgttttataggtgaggccaggaatgaggattcacgaacactgcaattcaattatggttcattcaaacataaggcattggataaatccttaactaaaaaggttcctaaaaatcgtttgacttcaaatactaaactaacacaatgttgctctattgtagggatttttgaagcactaactgcattccccttctcccttcctgctgtgcgaagccgtgccccaaaccctctaccatcttatttcagtccccactctctaccatcctccagggaaaaaacactagcaatcttacatgagttccaagttttggaggtcgttgctgttggtgaatgtggtttggattatgacagacttcagttctgtccggcagatatgcaaaagaagtactttgagaaacaatttgagttggctgaagcagtaaaacagcccatgtttcttcacatgcgtgctgctggtgaaaacttatgtgaaatcatgacacggaatttgcacagattccctggtggggttacacattccttcactgactcaacagaagatcgggataggctaccttgttttgagaagatgtttatcggtgttaatggttgctctctaaaaactaacgaaaatcttgaggttctacgaggcattcctgtcgagaggttgatgatagaaacaaattctccatattgtgacataataaatactcatgctggaagctagtatgtaaaatctgtctggccatccaagaagaaagaaaagtatgagccagattcaacagtaaaagtcgcaatgagccttgtttagtcaggcaagttcttgaggtagtggctggaagcaaaggaatttctgacatagaaggcctgagcagaactctgtaccacaacacatgcatgctcttctttcctcaggatcttgacgtgtctgctaatgcgcagcttgagagtggtactgccgtccaggattgctgatgtcagagtgatttttttaaaatgtttccttttggttggcgtttggtttcgtacaacttccaatatgcctatgaaatatttttggtcttataatcttccctcgctgtcaattttgccatgtttcatgagcctgatgacatgtcaggcaagttctgactatgtagaagtaccctaccgagactatgccgtaaaatcatttagggctgagatgtacaagtacagttt

SEQ ID NO: 155953 - DNA, 3149 bp, Zea Mays
cggggcccggggctgccgctcaactcacccatccattccacctccgttcaccccgtccatttgatttgcgttcactgcgttgcgtttccttggaggggattgttctctcctctcctttggattggaggtccctccttcttctcctctctctctcagaggaaggcctgaggatccaggaagaggacagcaatgggggaaggtgcaggtgaccgtgtcctgagccgcctccacagcgtcagggagcgcattggcgactcactctctgcccaccccaatgagcttgtcgccgtcttcaccaggctgaaaaaccttggaaagggtatgctgcagccccaccagatcattgccgagtacaacaatgcgatccctgaggctgagcgcgagaagctcaaggatggtgcttttgaggatgtcctgagggcagctcaggaggcgattgtcatccccccatgggttgcacttgccatccgccctaggcctggtgtctgggagtatgtgagggtcaacgtcagtgagctcgctgttgaggagctgagagttcctgagtacctgcagttcaaggaacagcttgtggaagaaggccccaacaacaactttgttcttgagctggactttgagccattcaatgcctccttcccccgtccttctctgtcaaagtccattggcaatggcgtgcagttcctcaacaggcacctgtcatcaaagctcttccatgacaaggagagcatgtaccccttgctcaacttccttcgcgcccacaactacaaggggatgaccatgatgttgaacgacagaatccgcagtctcagtgctctgcaaggtgcgctgaggaaggctgaggagcacctgtccaccctacaagctgataccccatactctgaatttcaccacaggttccaggaacttggtctggagaagggttggggtgattgcgctaagcgtgcacaggagactatccacctcctcttggacctcctggaggccccagatccgtccaccctggagaagttccttggaacgatccccatggtgttcaatgtcgttatcctctcccctcatggttacttcgctcaagctaatgtcttgggttaccctgacaccggaggccaggttgtctacatcttggatcaagtgcgcgctatggagaacgaaatgctgctgaggatcaagcagtgtggtcttgacatcacgccgaagatccttattgtcaccaggttgctccctgatgcaactggcaccacctgtggccagcgccttgagaaggtccttggcaccgagcactgccatatccttcgcgtgccattcagaacagaaaacggaatcgttcgcaagtggatctcgcgatttgaagtctggccgtacctggagacttacactgatgacgtggcgcatgagattgctggagagcttcaggccaatcctgacctgatcatcggaaactacagtgacggaaaccttgttgcgtgtttgctcgcccacaagatgggtgttactcactgtaccattgcccatgcgcttgagaaaactaagtaccctaactccgacctctactggaagaagtttgaggatcactaccacttctcgtgccagttcaccactgacttgattgcaatgaaccatgccgacttcatcatcaccagtaccttccaagagatcgccggaaacaaggacaccgtcggccagtacgagtcacacatggcgttcacaatgcctggcctgtaccgcgttgtccacggcattgatgtgttcgaccccaagttcaacatcgtgtctcctggcgcggacctgtccatctacttcccgtacaccgagtcgcacaagaggctgacctcccttcacccggagattgaggagctcctgtacagccaaaccgagaacacggagcacaagttcgttctgaacgacaggaacaagccaatcatcttctccatggctcgtctcgaccgtgtgaagaacttgactgggctggtggagctgtacggccggaacaagcggctgcaggagctggtgaacctcgtggtcgtctgcggcgaccatggcaacccttccaaggacaaggaggagcaggccgagttcaagaagatgtttgacctcatcgagcagtacaacctgaacgggcacatccgctggatctccgcccagatgaaccgcgtccgcaacggcgagctgtaccgctacatctgcgacaccaagggcgccttcgtgcagcctgctttctacgaggctttcgggctgacggtggttgaggccatgacctgcggcctgcccacgtttgccacagcctacggcggtccggccgagatcatcgtgcacggcgtgtctggctaccacatcgacccttaccagggcgacaaggcgtcggccctgctcgtggacttcttcgacaagtgccaggcggacccgagccactggagcaagatctcccagggcgggctccagcgtatcgaggagaagtacacctggaagctctactcggagaggctgatgaccctcaccggcgtgtacgggttctggaagtacgtgtccaacctggagaggcgcgagacccggcggtacctggagatgctgtacgcgctcaagtaccgcaccatggcgagcaccgtgccgctggccgtggagggagagccctccagcaagtgatgcgcgacggcggccacagacctgatcgatcgatgagcgagagggagcactcggagtgtcgtgtcttttcccttgccatttctttctttttttcccttcccggaggcgaaaaaaagagtctgcttttgctaggcggcgggcgttcgttgctgctctttgcttcaagagttaaatttacctaccttgtcaaggtcttgttccatcattgatccgggtgtcgcttttttagtagtctgatggactgttagtagtttgcgttgcgtcggttgagagggaacgttggtggtggtggtgtgtgtgcagtcaggcgtggtgctccctttgtttcctggatgggatgttgctccttgaataataatcgtagtggccttggagcccttttcctgaaataagagcagcatcctagtgcttacctttgcagctgtaactggtgtttgcctcaggatttttgctcctcccttctatggattgtgcttaaaattctctataataaccttacagataaagct

SEQ ID NO: 155954 - DNA, 2019 bp, Zea Mays
ggcccggggctgccgctcaactcacccatccattccacctccgttcaccccgtccatttgatttgcgttcactgcgttgcgtttccttggaggggattgttctctcctctcctttggattggaggtccctccttcttctcctctctctctcagaggaaggcctgaggatccaggaagaggacagcaatgggggaaggtgcaggtgaccgtgtcctgagccgcctccacagcgtcagggagcgcattggcgactcactctctgcccaccccaatgagcttgtcgccgtcttcaccaggctgaaaaaccttggaaagggtatgctgcagccccaccagatcattgccgagtacaacaatgcgatccctgaggctgagcgcgagaagctcaaggatggtgcttttgaggatgtcctgagggcagctcaggaggcgattgtcatccccccatgggttgcacttgccatccgccctaggcctggtgtctgggagtatgtgagggtcaacgtcagtgagctcgctgttgaggagctgagagttcctgagtacctgcagttcaaggaacagcttgtggaagaaggccccaacaacaactttgttcttgagctggactttgagccattcaatgcctccttcccccgtccttctctgtcaaagtccattggcaatggcgtgcagttcctcaacaggcacctgtcatcaaagctcttccatgacaaggagagcatgtaccccttgctcaacttccttcgcgcccacaactacaaggggatgaccatgatgttgaacgacagaatccgcagtctcagtgctctgcaaggtgcgctgaggaaggctgaggagcacctgtccaccctacaagctgataccccatactctgaatttcaccacaggttccaggaacttggtctggagaagggttggggtgattgcgctaagcgtgcacaggagactatccacctcctcttggacctcctggaggccccagatccgtccaccctggagaagttccttggaacgatccccatggtgttcaatgtcgttatcctctcccctcatggttacttcgctcaagctaatgtcttgggttaccctgacaccggaggccaggttgtctacatcttggatcaagtgcgcgctatggagaacgaaatgctgctgaggatcaagcagtgtggtcttgacatcacgccgaagatccttattgtcaccaggttgctccctgatgcaactggcaccacctgtggccagcgccttgagaaggtccttggcaccgagcactgccatatccttcgcgtgccattcagaacagaaaacggaatcgttcgcaagtggatctcgcgatttgaagtctggccgtacctggagacttacactgatgacgtggcgcatgagattgctggagagcttcaggccaatcctgacctgatcatcggaaactacagtgacggaaaccttgttgcgtgtttgctcgcccacaagatgggtgttactcactgtaccattgcccatgcgcttgagaaaactaagtaccctaactccgacctctactggaagaagtttgaggatcactaccacttctcgtgccagttcaccactgacttgattgcaatgaaccatgccgacttcatcatcaccagtaccttccaagagatcgccggaaacaaggacaccgtcggccagtacgagtcacacatggcgttcacaatgcctggcctgtaccgcgttgtccacggcattgatgtgttcgaccccaagttcaacatcgtgtctcctggcgcggacctgtccatctacttcccgtacaccgtgtcgcttttttagtagtctgatggactgttagtagtttgcgttgcgtcggttgagagggaacgttggtggtggtggtgtgtgtgcagtcaggcgtggtgctccctttgtttcctggatgggatgttgctccttgaataataatcgtagtggccttggagcccttttcctgaaataagagcagcatcctagtgcttacctttgcagctgtaa

SEQ ID NO: 155955 - DNA, 2313 bp, Zea Mays
atcctgcgccttattatcatcatctaggtgtaattacttccgtttgtgctaatcacctcgtgattgcctgcaataaggaaccccagcccccccaccttgctgatgccgtgcttttctagagaagtaccctgccgcgtcacgcttcgtcctcgcctgctttggattcaacggctttttggaggccgaggccattggtgccatgcggccagcccttttcttctccatggttcccatcgatgtgtttttgttcggttctctcgtcagatctgtataaataggcgcctcccttctccgccattcctcggtcctctgaagcgtttcagttcatcgattcagttcttgcctgaggatccaggaagaggacagcaatgggggaaggtgcaggtgaccgtgtcctgagccgcctccacagcgtcagggagcgcattggcgactcactctctgcccaccccaatgagcttgtcgccgtcttcaccaggctgaaaaaccttggaaagggtatgctgcagccccaccagatcattgccgagtacaacaatgcgatccctgaggctgagcgcgagaagctcaaggatggtgcttttgaggatgtcctgagggcagctcaggaggcgattgtcatccccccatgggttgcacttgccatccgccctaggcctggtgtctgggagtatgtgagggtcaacgtcagtgagctcgctgttgaggagctgagagttcctgagtacctgcagttcaaggaacagcttgtggaagaaggccccaacaacaactttgttcttgagctggactttgagccattcaatgcctccttcccccgtccttctctgtcaaagtccattggcaatggcgtgcagttcctcaacaggcacctgtcatcaaagctcttccatgacaaggagagcatgtaccccttgctcaacttccttcgcgcccacaactacaaggggatgaccatgatgttgaacgacagaatccgcagtctcagtgctctgcaaggtgcgctgaggaaggctgaggagcacctgtccaccctacaagctgataccccatactctgaatttcaccacaggttccaggaacttggtctggagaagggttggggtgattgcgctaagcgtgcacaggagactatccacctcctcttggacctcctggaggccccagatccgtccaccctggagaagttccttggaacgatccccatggtgttcaatgtcgttatcctctcccctcatggttacttcgctcaagctaatgtcttgggttaccctgacaccggaggccaggttgtctacatcttggatcaagtgcgcgctatggagaacgaaatgctgctgaggatcaagcagtgtggtcttgacatcacgccgaagatccttattgtcaccaggttgctccctgatgcaactggcaccacctgtggccagcgccttgagaaggtccttggcaccgagcactgccatatccttcgcgtgccattcagaacagaaaacggaatcgttcgcaagtggatctcgcgatttgaagtctggccgtacctggagacttacactgatgacgtggcgcatgagattgctggagagcttcaggccaatcctgacctgatcatcggaaactacagtgacggaaaccttgttgcgtgtttgctcgcccacaagatgggtgttactcactgtaccattgcccatgcgcttgagaaaactaagtaccctaactccgacctctactggaagaagtttgaggatcactaccacttctcgtgccagttcaccactgacttgattgcaatgaaccatgccgacttcatcatcaccagtaccttccaagagatcgccggaaacaaggacaccgtcggccagtacgagtcacacatggcgttcacaatgcctggcctgtaccgcgttgtccacggcattgatgtgttcgaccccaagttcaacatcgtgtctcctggcgcggacctgtccatctacttcccgtacaccgagtcgcacaagaggctgacctcccttcacccggaggcgaaaaaaagagtctgcttttgctaggcggcgggcgttcgttgctgctctttgcttcaagagttaaatttacctaccttgtcaaggtcttgttccatcattgatccgggtgtcgcttttttagtagtctgatggactgttagtagtttgcgttgcgtcggttgagagggaacgttggtggtggtggtgtgtgtgcagtcaggcgtggtgctccctttgtttcctggatgggatgttgctccttgaataataatcgtagtggccttggagcccttttcctgaaataaga

SEQ ID NO: 155956 - DNA, 558 bp, Zea Mays
tgggcctttcgtgaggtcttttactcttttagtggacccgggggatatctgtcccccacagttacaccatgcatacaattattgcaattataagctggcgatacagtgacctttagtcatatagatcctggagggaaacttgttatgggctgtcggaaggccacaaatactgtcagtctgctagactcacagatttcagctattgcggatggttcccttctcagtgagacactcttttctactgcaaatgaaagcataggagtagtaagtggttatcctggatttcttcactcaataaagggagctgcagatttccatccaagctctctatatgatcatcatatgaactcagttgacggggatgtcagttggaataaggcagataaatttggcagcaggccagatgaggggtctttgcggtttctacaaaaacgaagtcgcaatattggttctaaaagcaggaggttcttaatcgacgctgaagatgccatggaactaaagcttacatgggaagaagctcaagagttgtattaggttcttaatcaactcaaatccaac

SEQ ID NO: 155957 - DNA, 601 bp, Zea Mays
accgcgatgccgttacagcaggttattaataagtttattatcactcgccgcgtcccagcttctgtgcgcatgcacttgctccgcctccggtccggtcacaaccgcgacaccgaccagcccatcccggatccatacatggaccaaacacagcggcggctcgatgaccacggccacgcgccggtggtcagtgcccacgcccagcaggccggtccagacaagagccggcagcaggagcagccgccgccgccgccttcttcgttgaaccagacggcggcgaggctcctgcgcgaggccaccgtctcccgcccggacggcgagaagccggcgtcctcggacatcctggccttcgcgcgctccgtcgaccgcgtggactcgcctctcgagtagcttttttttggcttgcccactctcagtcagctactggctcactggctttgtttcttttcttatccatcttgtgttcgcaccgtaataaaaaagggtcaacactttcctccctatttcgatcgtcagtttgtttgtcattcctgttaaggtcgagggattactgcaggcttgtcattccattttcgcgatttcgaaaaagaaaactcaacaataa

SEQ ID NO: 155958 - DNA, 111 bp, Zea Mays
ctgaaagcattattagtacatgtatggattttcctgataaaaccaaagataatataaaggccagaaaagatttacagaaaatttgtaaccgaccaagcctagtcttgcttc

SEQ ID NO: 155959 - DNA, 1259 bp, Zea Mays
ccttcctagagcgctcggcccatgtttaggagtgccgggcgtgcgcgcagcgtgcctcttcctaatccatcgcagagcgccgccggcgggtagcgctactgctagaggagaggaagcggaaagggcggcggcggcgcttgtggtcagtcaaagatccaacctccggactcgcgatggggcggcggatcctcaacgatgctctgcgcacgatggtcaacgcagaccggcgggggaacgcgtcggcgcttctccgacccatctccggcgtcatggtctccttcctcaacatcatgaagtaccgagggtatatcaaaaaatttgaggtcattgatgagaatagagttgggaaaattagagtggagcttgatggacgtcttaaagattgcaaagctctcacctacaggcaagacctcaaagctaaggagatagaacgatacagagttaggatgctcccaacacgccagtggggctatgttgtgattactactccgaatggtgttttggatcatgaggaagcaatcaggcagaacgtgggtgggcaggtccttggttatttccattgactgacaagtaacgtcgctcttagtcctgaatgaggcaacgggttgtgcccatttggtattactgtactgttgttattaccgaacccattctgtttgcatcttgggagctgttttgttgtcgttcatggccatgcaagaaatgaaataacatgccaaatgtacggctgagggctgacaacactaggaatattgttaaacaggaacactgagtttcttgtgaggatgtcatgatagcttttctgagacctttccctacagggagggttgagcacacattggtattttggtcagtgtctgaggctctgagatgtgtttcggatcttgtttgcagcactgcttgtaggactcctttgtttaggacaataatgttgatgggtctgtttgatgaatgacagatgtctgagcgaaaccaatgtcgctggttttgtagagtgttcaatttattggctgggaatgccatgtgaatgtgttgtctggatatgaacctgtcattctttgttatgctgtgcactgcgtgctggagatgtttgtttgctcctaggaatatgccccacagtcgtggtgctatccattacgacagatgttttcatgaattcgtgtagttaccatatagatgctgtggtccggattgatgcttggtaataaaataaatcaggtcttcgtacctgttttttcatagcagcttaagaaaaaaaa

SEQ ID NO: 155960 - DNA, 849 bp, Zea Mays
atggggatcatcaactggatgcagagcagattccatgggaagacggagaccagcagaatctttgacggcgcaaccgccaccagttcatatagaggtggtgctggagcccaagggacgacgcaagggacgatcgttcacgaatcagagaagcgtctcgacgccgagccatggcctcaggcgggcatcctctccatcggcacgctcggcagcgaggagcctcccgcgcaggagcaggacctgccggagttcaccgtggaggaggtgaagaagctccaggacgcgctggccatgctcctgcggcgggccaagtccaagtccagcgcccgcggctccggggccggggccggcgaggacaggccgccgctggacaggttcctcaactgcccgtcctgcctggaggtggagaggagggtcgtccagacgacggcgacgaatcacggcggccaggaagaaggagacctctcgccggacaccaagatcatcctgaacagggccagggacctgctcgatagcggcggcggcggcggcggcatcaagcagaggtcgttcaagttcctgctcaagaagatgttcgcctgcaatggcggcttctcggccgcgccgccccggagcttgaaggacccagtggagtcaagaatggagaagttcttccgaacgatgatcgggaagaagatgaacgccaggtcggggaacgggtcggcgtcgtccaggaaatacttcttggaggacggaaccaaaggcaggaggcgaggcggtcgtcgttgcggttgccaagaagaagaggagagggaagcagagagttgcaggtgggacagaacagattctgaattcattgttttggagatatga

SEQ ID NO: 155961 - DNA, 2521 bp, Zea Mays
ttttacagttgaacaatgactgctcagccaatgaagagggctattgtggagagtggagatggaggtcttggtttgggaattgctacattcattgcaaacggtgaggatttgggtcccatcattcgtcattcgtttgagtctgggaaacctgaagcgctgatgcagaaccttagaagcattgtgaagaagaaggaagttgagatcgaagagctatgcaggcttcactacgaggatttcatccttgctgtggatgaactacgtggtgtgttagtcgacgccgatgagttgaagggcatgctatatggcgagaattcacacctgcaggaggcttctgctgaccaactcctgaagctcgacgaacttcttgagctatactctgtgaagaaaaacgttggggaggccataacaacgctgaagatatgtgtggaggtgttcagcttgtgcatgacatgcaacaatttcattgccgaagctaagttccatcctgcacttaagacactggacctgatccagaaaggctacctgcgaaacattcctttgaagcttgttaagaaggtggtggcgaggcagatcccactgataaagctgcacatagagaagaaagtctgtagcgagttcaacgattggctcgtccatataagaagaatggccaagcagattgggcaggcctccataagccaggcgtcgtcggctcgccaaaagggcgaggagatgcgtgcccggcagagggaagccgaagggcatagccatgctggaccagatgagcatctgtatgccttggacctggagaacacggaagaggaatcggcgctacattttgatctcacaccggtttatcgggcgcaccacatgcacacatgtcttgggatggaggacaagttcagagactattactacaagaacaggctcatgcaactcaacttggacatgcagatctccacttcgcagcccttcttggagtcccatcaacccttccttgcccaggtagctgggttctttatagtcgaagaacgtgttcttcgaaccgcagatggattgctgttggagagtcaggtggaaacaacatgggagacagctattggcaagataacgtctatactggaggaacagttctctcgcatgcgtacagccagccacttgcttctcataaaagactatgtcactcttctaggcgcagctgtgaacaagtacggctatcgaatcacacagctgattgaagttctggagaagagtagggacaaataccaccagctgctgcttcttgattgccggaagcagatagacgacgtccttactaatgactcgtacgagcagatggttataaagaaggaatacgagtacagcatgaatgtgacagcgtttcatctggaacacgatgatgcgatccctgatttcccatacgtgacatccttctcctcttccgttccagatgtctgccgcatcgtccggtccttcatcgaggattccgtcagctacttgtcatacggcggtctcatgaacatctacgatgtggtgaaagcatacctagaccggctgctgatcgaggtgctgaacgacagccttctgaacatgatatacgctcgttccctgggcatgtcgcagatgatgcagctcgctggaaacatatcggtccttgagcaagcatgcggcatgtacctgctgcactccgcccagctgtgcggcatcccgaagcgtgtcgccgagaggtcccattccggcctgactgctcgagcggtcctcaaggcctcgcagaacgcggtgtacaacgcgctgataaacctgaccaatttcaaggtcgacgagttcatggtgctcctggaagaggtgaactggatagcggaggaagcccccgacaacgcgaacgactacatgaacgaggtcctgatctacctcgaaacgctggtgtcgacggcgcaggagatcctgcctctggaagctctgtacaaggtggtttctggtgccatgagccacatctcggactccataatgaccacgctcctgaacgacggcgtgaagaggttcaccgtcaacgcggtcttagggatcgatattgacctgaagacgctggaagcattcgcggacgacaagttcgacagcacggggctgtcagatctgggcaaggagacgactttcagggactgtttggttgagatcaggcagctcacgaatctcctgctcagcagccagcctgagaacttcatgaacccggtgatcaggcagaggaactacgggtctctggactacaagaagctggccatcatttgtgagaagtacaaggactctgcagacagtctgttcggaagcctttcaaaccggaacaccccccagcagagtgcccgtaagaaatctatggacgtcttgaagagaaggcttaaggattttagctaaggaataaattgctggcactagcatatagtatctatcttttagatttcaacttcctcgactacttttctaggtaggtcgatttgtctttgtaggtgaagtgtcgatttgtctgtgagagtgagaccacatgaag

SEQ ID NO: 155962 - DNA, 639 bp, Zea Mays
aagaaagcagtccagcctgcctctgcctgtttcgtgtgtctgaggatctcctgatctccttcctccctgtccttctcctcccctccccggctacggaggtgctggtgggtgctacggaggagtactacgacgacgacggcgaggaggagacaagtgaacccacatcctcctcacctcagcagcctcaccgcccatcgcagactctgcgcggctgctgacaaagagtgcagaattgccaagactagtacgccgacgaccaccagcagcagctgtccgggttccatggagggcggcgacggcgagacgacgctgtccgggttcggcgtcggcggcgtggacaccaaggtgctgcacgcgttccagaccagcttcgtgcaggtgcagacgctgctggaccagaaccgcctcctgatcagcgagatcaaccacaaccacgagtccaaggtgcccggcgacctctcccgcaacgtcggcctcatcagggagctcaacaacaacatccgccgcgtcgtcgacctctacgccgacctctcctcgctcttcgccgcatccgacggcgcgtccgagggcgggtccgtcggcaccgtccgccaggcgggcgccgccggacacaagaggatcaggtccggcctcgactga

SEQ ID NO: 155963 - DNA, 1330 bp, Zea Mays
acaccaaccaccttccccatcatcagcaatctctctctctcactctctcacggtcgattgattagtccaaagctggacggagaccttgaggaatccatcccgaactgaacggcattattctttctcgccactgttactgttctctctctctctctccaccttccaacagaattcacaggaaggtggttggggttgggcggaccagcaaaggcacatgggccgctccttcagtagtacagcggcgcctgttcggcctgctgcgctcgcggcgccgcccctcctcctcttcctcttgctcgggctcctgggagctgcggctgccaatgtcggggactcctgctccacgagcgcggactgcggcgccggccagtggtgcttcgactgcgagccccagctctccggctcccactgcgtccgctccgccgccaccaaccccttccagctcattaacaactcgttgccgttcaacaagtacgcctacctcacgacgcacaacgcgtacgccatcgtcggggagccctcgcacaccgggatcccgcgcgtcaccttcgacaaccaggaggacacggtcaccgaccagctgaataacggagtccgggcgctgatgctcgacacgtacgacttcaagggagacgtgtggctgtgccattcgagcggagggaaatgcaacgacttcaccgcgttcgaacctgcactggacactttcaaggagatcgaggcgttccttgcagcaaacccgtccgaaatcgtcacgctgatcctagaggactacgtccacgcgccgaacgggctgacgaacgtgttcaacgcgtctggcctgctcaagtactggttcccggtgtcgaggatgccgccgagcggccaggactggcctctcgtcagcgacatggtcgcgaccaaccagcgcctcctggtgttcacctccgtcagctccaaacagagcgcggaaggcatcgcttaccagtggaacttcatggtcgagaacaactacggtgatgacgggatggatgccgggaaatgctcgaaccgtgccgagtctgctcctctcaacgacaacaccaagtcgctggtcctcatgaactacttcccgtcgctccctgtcaagtttacagcgtgcctgcagcactcccagagccttgttgacatggtgagtacgtgctacggcgccgcggggaaccgatgggctaattttgtcgcggttgattactacaagagaagcgacggaggcggggccttccaggccacggacttgctcaatggtagactgttatgcgggtgccaggacatcagggcatgctcgcaaggttccggtgtagtatgttctgcataa

SEQ ID NO: 155964 - DNA, 168 bp, Zea Mays
atggctggtgaaggctctgtgcggctgacagcgttgggggaaactcgcgagcaaccaccagggagcgactcggcgagcatcagagggcagcgccggcatggagagggacgagggagggactggcgcaggaagggagaaccaaaggcaagggagggtgagctcagctag

SEQ ID NO: 155965 - DNA, 92 bp, Zea Mays
tgcttatgtgccgattcaacgaggctaaagccacgcatttcatgccactctgtacaaaattgtaagtttgttttgatcatgattttcatgga

SEQ ID NO: 155966 - DNA, 333 bp, Zea Mays
atgaagctcatgatcacagtactgacacaagggcagcaccctgaatttaaatacctgacacatatgcacctaggatcctttcaaaaaagaagatcatgcccaatgctcgagggtgccactgaagacatggacctcttgggtcggctcctcgatgagctcgacctgctacagtgccactccccggatgtagaccttgacatggtggacatggaccttcttaaacatattgtagttcacaagaactatgatgatttccatgtcaccgaggaggatgagaagatcttggactgggagagaagtgcaccgaagcaatggctgtctctctacgcgtga

SEQ ID NO: 155967 - DNA, 1670 bp, Zea Mays
atggacgccacccaggactccctcctcttcctcttcccggccgccaccaccttaatctccccgctcctcgccgtgctcgtcgcagccttctcgctgctctggctctacccgggcgggcccgcgtgggcgctcatctctaggtcccgcgcgacgccgcccggcacgccggaggtggtcaccgcgctcgcgggtcccgccgcgcaccgcgccctgtcgtcgctgtcgcagtcgctgcccggcggcgccgcgctgtcggccttctccgtaggtctcacgcgccttgtcgtggccagccagccggacacggcgcgggagctcctggccagtcgccgactgccccatcaaggacgcggcgcgggggctcctcttccaccgcgccatgggcttcgccccctccggcgactactggcgcgcgctgcggcgcatcagctccgcgtacctcttcagcccgcgcagcgtgtccgcgacggccccgcgtcgtgtcgccatcggcgagcgcatgctgcgggacctctcggccgcgcccagcggcgaggtcgtcatgcggcgcgtgctccacgcggcctccctcgaccacgtcatggccaccgtgttcggcgcgcgctacgacgccgccagcccggagggcgcggagctggaggagatggtgaaggaagggtggctggacctgcaaggcgtcaggaggaggtgcaggagcctggtgagcagagtgaagtgttcgtggcgaggatcatcgaagagcacaggcggaagaagaaggaggccgccagtggcgagtcggagatgatctttcgaggcaccgacacggtcgcgatcctgctggagtgggtgatggcgcggatggtgctgcacccgggcatccagtccaaggcgcaggcggagctggacgccgtcgtgggtcgcggccgcgtgtccgacgccgatgtggtccgcctgccctacctccagcgcgtcgtaaaggagacgctccgcgtgcacccgcccggcccgctgctgtcgtgggcgcgcctggccgtgcacgacgcggtggtcggcggccacctggtccccgccggcaccacggccatggtgaacatgtgggcgatcgcgcacgaccccgcggtgtggccggagccctccgcgttccgccccgagcggttcgaggaggaggacgtgagcgtgctgggcgccggccggcgcgtgtgccccggcaagacgctggcactcgccactgtccacctctggctcgcgcagctgctgcaccgcttccggtgggcgccggcggacggcggcgtcgacttggcggagcgactcggcatgtcgctggagaagcccctcgtgtgcaagcccacgcactcgccactgtccacctctggctcgcgcagctgctgcaccgcttccagtgggcgccggcggacggcggcgtcgacttggcgccctccgcgttccgccccgagcggttcgaggaggaggacgtgagcgtgctgggcgccggccggcgcgtgtgccccggcaagacgctggcactcgccactgtccacctctggctcgcgcagctgctgcaccgcttccggtgggcgccggcggacggcggcgtcgacttggcggagcgactcggcatgtcgctggagaagcccctcgtggcgcgcggctgcaagagtagttggtcatttccgtgttctgccaccatt

SEQ ID NO: 155968 - DNA, 986 bp, Zea Mays
gagcgcagaagcgagagagatccggagcagccgcagtcccactcttttcaataatcaagatgagccgtggtggtagtgccggtggtggtcaaagttctctgggttatctctttggaagcggtgagccccccaaaccagcagtggcaccagctgcaagtgctccacctgttgagaaaccatctgctgcaaagactgatgcggccaagcaggttgctgctggggttaccagccaaaccaataactaccacagggctgatggtcagaacactggcaacttccttacggaccgtccttcaaccaaggtccacgctgctcctggcggtggctcttccctgggctacctgttcggtggcaactgatgcccgtgctggtgcgctcaccaaagttatcctcccctgcctgctgcgtgctatgtctgaatcgtgaacaaccgttgtcatttcatgtgtgtaccccgtgcaatgctttgtgcgcatggttgatttctctgtggcaaacttcccgtcctgcatggggttgtaagctgtctctaaatttcacggcaagtcgtgtgcctgaaccttcatcttaagttgttgtcgtatcccttcgtcttgtttcggttgcaccccgtgatggtatggattggttgctgaccacttgatctatctattctgcattttcctttgaaatgtacccttgtgcatttggatgcttctagtgtactgttcttgcatggttactcatatgaccgagcagttgagtacagcgtgactgggcttctgaagcggccaaatgatcaagaaaccgttctggcgatgcctggagagtggccctgaaaaagtatcagggcaagccttggggatggtggttaaatagacctgtttaaaaattatcttaatgcagcagttggtaataggcgtggaactgttgtgttgtgagatttgtgggtgagaccgtaaaaagggctgcgtaatagagtacttaagtacacaattttaaatagc

SEQ ID NO: 155969 - DNA, 986 bp, Zea Mays
gagcgcagaagcgagagagatccggagcagccgcagtcccaccgttttcaataatcaagatgagccgtggtggtagtgccggtggtggtcaaagttctctgggttatctctttggaagcggtgagccccccaaaccagcagtggcaccagctgcaagtgctccacctgttgagaaaccatctgctgcaaagactgatgcggccaagcaggttgctgctggggttaccagccaaaccaataactaccacagggctgatggtcagaacactggcaacttccttacggaccgtccttcaaccaaggtccacgctgctcctggcggtggctcttccctgggctacctgttcggtggcaactgatgcccgtgctggtgcgctcaccaaagttatcctcccctgcctgctgcgtgctatgtctgaatcgtgaacaaccgttgtcatttcatgtgtgtaccccgtgcaatgctttgtgcgcatggttgatttctctgtggcaaacttcccgtcctgcatggggttgtaagctgtctctaaatttcacggcaagtcgtgtgcctgaaccttcatcttaagttgttgtcgtatcccttcgtcttgtttcggttgcaccccgtgatggtatggattggttgctgaccacttgatctatctattctgcattttcctttgaaatgtacccttgtgcatttggatgcttctagtgtactgttcttgcatggttactcatatgaccgagcagttgagtacagcgtgactgggcttctgaagcggccaaatgatcaagaaaccgttctggcgatgcctggagagtggccctgaaaaagtatcagggcaagccttggggatggtggttaaatagacctgtttaaaaattatcttaatgcagcagttggtaataggcgtggaactgttgtgttgtgagatttgtgggtgagaccgtaaaaagggctgcgtaatagagtacttaagtacacaattttaaatagc

SEQ ID NO: 155970 - DNA, 1218 bp, Zea Mays
ttatgcgtttccgagtatcgagcgtctccttgacgcgggcgcccggggccatctccaccgtcagtggcgagatcggacggcctgctggaggtgttgggcccatccgtccccgggtactgggaccacccgatccctcttcaatacaaaaccagccgcagttctccattttcgagcgcagaagcgagagagatccggagcagccgcagtcccaccgaccccgccgccggtcgccctccatctcctcgccgctgcctctcgatctttgtacagtttctcttttcaataatcaagatgagccgtggtggtagtgccggtggtggtcaaagttctctgggttatctctttggaagcggtgagccccccaaaccagcagtggcaccagctgcaagtgctccacctgttgagaaaccatctgctgcaaagactgatgcggccaagcaggttgctgctggggttaccagccaaaccaataactaccacagggctgatggtcagaacactggcaacttccttacggaccgtccttcaaccaaggtccacgctgctcctggcggtggctcttccctgggctacctgttcggtggcaactgatgcccgtgctggtgcgctcaccaaagttatcctcccctgcctgctgcgtgctatgtctgaatcgtgaacaaccgttgtcatttcatgtgtgtaccccgtgcaatgctttgtgcgcatggttgatttctctgtggcaaacttcccgtcctgcatggggttgtaagctgtctctaaatttcacggcaagtcgtgtgcctgaaccttcatcttaagttgttgtcgtatcccttcgtcttgtttcggttgcaccccgtgatggtatggattggttgctgaccacttgatctatctattctgcattttcctttgaaatgtacccttgtgcatttggatgcttctagtgtactgttcttgcatggttactcatatgaccgagcagttgagtacagcgtgactgggcttctgaagcggccaaatgatcaagaaaccgttctggcgatgcctggagagtggccctgaaaaagtatcagggcaagccttggggatggtggttaaatagacctgtttaaaaattatcttaatgcagcagttggtaataggcgtggaactgttgtgttgtgagatttgtgggtgagaccgtaaaaagggctgcgtaatagagtacttaagtacacaattttaaatagc

SEQ ID NO: 155971 - DNA, 1206 bp, Zea Mays
ttatgcgtttccgagtatcgagcgtctccttgacgcgggcgcccggggccatctccaccgtcagtggcgagatcggacggcctgctggaggtgttgggcccatccgtccccgggtactgggaccacccgatccctcttcaatacaaaaccagccgcagttctccattttcgagcgcagaagcgagagagatccggagcagccgcagtcccaccgaccccgccgccggtcgccctccatctcctcgccgctgcctctcgtttctcttttcaataatcaagatgagccgtggtggtagtgccggtggtggtcaaagttctctgggttatctctttggaagcggtgagccccccaaaccagcagtggcaccagctgcaagtgctccacctgttgagaaaccatctgctgcaaagactgatgcggccaagcaggttgctgctggggttaccagccaaaccaataactaccacagggctgatggtcagaacactggcaacttccttacggaccgtccttcaaccaaggtccacgctgctcctggcggtggctcttccctgggctacctgttcggtggcaactgatgcccgtgctggtgcgctcaccaaagttatcctcccctgcctgctgcgtgctatgtctgaatcgtgaacaaccgttgtcatttcatgtgtgtaccccgtgcaatgctttgtgcgcatggttgatttctctgtggcaaacttcccgtcctgcatggggttgtaagctgtctctaaatttcacggcaagtcgtgtgcctgaaccttcatcttaagttgttgtcgtatcccttcgtcttgtttcggttgcaccccgtgatggtatggattggttgctgaccacttgatctatctattctgcattttcctttgaaatgtacccttgtgcatttggatgcttctagtgtactgttcttgcatggttactcatatgaccgagcagttgagtacagcgtgactgggcttctgaagcggccaaatgatcaagaaaccgttctggcgatgcctggagagtggccctgaaaaagtatcagggcaagccttggggatggtggttaaatagacctgtttaaaaattatcttaatgcagcagttggtaataggcgtggaactgttgtgttgtgagatttgtgggtgagaccgtaaaaagggctgcgtaatagagtacttaagtacacaattttaaatagc

SEQ ID NO: 155972 - DNA, 1117 bp, Zea Mays
ttatgcgtttccgagtatcgagcgtctccttgacgcgggcgcccggggccatctccaccgtcagtggcgagatcggacggcctgctggaggtgttgggcccatccgtccccgggtactgggaccacccgatccctcttcaatacaaaaccagccgcagttctccattttcgagcgcagaagcgagagagatccggagcagccgcagtcccaccgaccccgccgccggtcgccctccatctcctcgccgctgcctctcgtttctcttttcaataatcaagatgagccgtggtggtagtgccggtggtggtcaaagttctctgggttatctctttggaagcggttgctgctggggttaccagccaaaccaataactaccacagggctgatggtcagaacactggcaacttccttacggaccgtccttcaaccaaggtccacgctgctcctggcggtggctcttccctgggctacctgttcggtggcaactgatgcccgtgctggtgcgctcaccaaagttatcctcccctgcctgctgcgtgctatgtctgaatcgtgaacaaccgttgtcatttcatgtgtgtaccccgtgcaatgctttgtgcgcatggttgatttctctgtggcaaacttcccgtcctgcatggggttgtaagctgtctctaaatttcacggcaagtcgtgtgcctgaaccttcatcttaagttgttgtcgtatcccttcgtcttgtttcggttgcaccccgtgatggtatggattggttgctgaccacttgatctatctattctgcattttcctttgaaatgtacccttgtgcatttggatgcttctagtgtactgttcttgcatggttactcatatgaccgagcagttgagtacagcgtgactgggcttctgaagcggccaaatgatcaagaaaccgttctggcgatgcctggagagtggccctgaaaaagtatcagggcaagccttggggatggtggttaaatagacctgtttaaaaattatcttaatgcagcagttggtaataggcgtggaactgttgtgttgtgagatttgtgggtgagaccgtaaaaagggctgcgtaatagagtacttaagtacacaattttaaatagc

SEQ ID NO: 155973 - DNA, 608 bp, Zea Mays
ttatgcgtttccgagtatcgagcgtctccttgacgcgggcgcccggggccatctccaccgtcagtggcgagatcggacggcctgctggaggtgttgggcccatccgtccccgggtactgggaccacccgatccctcttcaatacaaaaccagccgcagttctccattttcgagcgcagaagcgagagagatccggagcagccgcagtcccaccgaccccgccgccggtcgccctccatctcctcgccgctgcctctcgtttctcttttcaataatcaagatgagccgtggtggtagtgccggtggtggtcaaagttctctgggttatctctttggaagcggtgagccccccaaaccagcagtggcaccagctgcaagtgctccacctgttgagaaaccatctgctgcaatgctttgtgcgcatggttgatttctctgtggcaaacttcccgtcctgcatggggttgtaagctgtctctaaatttcacggcaagtcgtgtgcctgaaccttcatcttaagttgttgtcgtatcccttcgtcttgtttcggttgcaccccgtgatggtatggattggttgctgaccacttgatctatctattctgcattt

SEQ ID NO: 155974 - DNA, 2761 bp, Zea Mays
ccattttcgagcgcagaagcgagagagatccggagcagccgcagtcccaccgacctcgccgccggtcgccctccatctcctcgccgctgcctctcgatacgagcatagactacaggctcaaagttccaattccaacccacccgacgtccgacgacagctggtccgggtctcctccatttcccggggacccgtccgatccgatcccagtcctcaacgccaacggtgggagatctagatcggagctagccagccagccggccgacgctgtccgccggccgccccggcgattctgacccgagatggcggtcgtccctgctgcagagaccctcgacgggctcaaggacaggttcgatctcggggtcttcgtaggcgacctcgccctcgatgaggaagtcaccagtgacgacgagtccctggaggggctgcagcaggagcttgacaactgcaagaatgaccaggaagtcgcaaacattctagccagtggcatcaaactgcgcgagtacacaaaaggcgtcgagaataacatacgccaaatcgagctggattctatccaggattacattaaggaaagtgaaaatctagtttctctgcatgatcaaatttgtgattgtgacaatattttgttacaaatggaaacagttctgactggattccagacagaaattggttccataagttcagagataaaggtccttcaggagaaatctatggacatgggattaaagctgaaaaatcgtaaggctgcagaatctaaattgtcaaaatttgtcgaggatataatagtacctccaagaatgattgacataattgttgatggagaggtcaatgatgaatacatgaaaacacttgagactctaagcaaaaaaatcaaattcatcgatgctgaccccatggttaaatcatccaaggctctaaaagatgttcaacctgaggttgagagactacgacagaaagccgtctcaaagattttcgagtttgtcatccaaaagttctatgccttgagaaaaccaaagactaatattcagattctacagcagagtgttcttcttaaatacaagtacacgataaatttccttaaggaacatgctaaggagatatatgcagaagttcgtacggcgtatattgacaccatgaataaggtgctaagtgcacatttccgggcttacatacaagcattggagaaactacagatggacatagcaacttccactgatttgcttggtgttgaaaccagaagcacaggcttcattttctccattggaaaagaacctctgaaaacccgtccttcagtgtttgctctgggtgaacgaataaacattttgaaggaaatcgaccagccagcattgatacctcatatagctgaagcgaagtcacagaaatactcgtatgaagttcttttcagaagcttgcagaaacttcttattgatactgccacttcagaatacctgtttactgatgatttctttggcgaagaatccatattccatgatatatttgcaggaccgattcaagttgttgatgaacatttcaatactgtactcctgaactgttatgatgcaattggcataatgcttatgatcagaataattcatcagcaccagctcatcatgtttaagcggcgaatcccatgtttggactcttacctagacaaagttaatatgtcactctggcctcgcttcaagatggtgttcgacttgcatttgaacagcttgcgaaatgcaaatattaaaacactttgggaggatgatgtccatccacactatgttacaaggagatatgctgaatttacagcttctctagttcatctcaatgttgagcatggggacggtcagcttgatctaaatttggagcgattgcggatggccattgaggatttgcttgttaagttggccaagatgttttccaaaccgaagctacaaactgtctttctgataaacaactatgatttaacaatttccattttgaaggaagctggaactgagggtgggaaagcacaacaacacttcgaggaggttcttaagagcaacatcgcaatatatgtggaagagttgctcctggagcagttcagtagtttgatcagattcgtcaaatctcgtccagcggatgagacggctgcaaattccgagaaagccagcattgccgaagttgagccactggtaaaggatttcgcgagccggtataaggccgcgatcgagctgatgcactatgatgtgatcacatctttcagcaactttctttgcgggatggagatcttgagagcgacgctcgcacagctcctgctatactacaccaggctctccgagtgtgtcaagagaatcaacggcggctctgctctcaacaaggaccttgtctccatatcctccatcctgttcgaaatcaagaagtattctaggacgttttagttgtttcacccccttccatgtacactaggacggctagctgaggggtagctgtgtatccttactttgtaactggtatgtgcgactgcaggggaaacaagggcattttgtcgtggtttgtatcttcgtctgtgttacccgacttgacccctgcccctttccagcacagaactatgatctctaggctgtctccacagttatcctattctatcttctgtcctatcatctattttaaacttcattttgtaaacagtatcgattatagtgcaaatctacaattttatacgatccgctgtggataaccatatgctgcatactaatgaatgcgtaccaaacgcttgccttaatgttatttttatgac

SEQ ID NO: 155975 - DNA, 2806 bp, Zea Mays
gggatagagagttattaaatttgaaagggccatttacaaagtatagtgaaaatattttttccttctaataatagccaaatttacttttacaaaatgatttagctagtctcttggagttgctgttaggctgtggctagaataccgtatatagtcatacaaatacaaacaatgacaaaccgtattgtttataaagttggatttgaaatagaagatgagataagtaatactactaaaaataccttagaagagtagcttagaatacgagtgagtttgtttataggtacgtgagaactgtgtctaaactatatttggaaaatatacttaaaattcaatatataaattaaagtaaggcataataatcaagaagaaagacaaaaacaattaaattcagtcaagacaaaaagcaaagaacctggtctgaaatggcaaaatatgttaaccaggcgaaaagcatacaatcatatgggtcgaaagaactaactgggccgtgtggtctgctgttagatacgagcatagactacaggctcaaagttccaattccaacccacccgacgtccgacgacagctggtccgggtctcctccatttcccggggacccgtccgatccgatcccagtcctcaacgccaacggtgggagatctagatcggagctagccagccagccggccgacgctgtccgccggccgccccggcgattctgacccgagatggcggtcgtccctgctgcagagaccctcgacgggctcaaggacaggttcgatctcggggtcttcgtaggcgacctcgccctcgatgaggaagtcaccagtgacgacgagtccctggaggggctgcagcaggagcttgacaactgcaagaatgaccaggaagtcgcaaacattctagccagtggcatcaaactgcgcgagtacacaaaaggcgtcgagaataacatacgccaaatcgagctggattctatccaggattacattaaggaaagtgaaaatctagtttctctgcatgatcaaatttgtgattgtgacaatattttgttacaaatggaaacagttctgactggattccagaaattggttccataagttcagagataaaggtccttcaggagaaatctatggacatgggattaaagctgaaaaatcgtaaggctgcagaatctaaattgtcaaaatttgtcgaggatataatagtacctccaagaatgattgacataattgttgatggagaggtcaatgatgaatacatgaaaacacttgagactctaagcaaaaaaatcaaattcatcgatgctgaccccatggttaaatcatccaaggctctaaaagatgttcaacctgaggttgagagactacgacagaaagccgtctcaaagattttcgagtttgtcatccaaaagttctatgccttgagaaaaccaaagactaatattcagattctacagcagagtgttcttcttaaatacaagtacacgataaatttccttaaggaacatgctaaggagatatatgcagaagttcgtacggcgtatattgacaccatgaataaggtgctaagtgcacatttccgggcttacatacaagcattggagaaactacagatggacatagcaacttccactgatttgcttggtgttgaaaccagaagcacaggcttcattttctccattggaaaagaacctctgaaaacccgtccttcagtgtttgctctgggtgaacgaataaacattttgaaggaaatcgaccagccagcattgatacctcatatagctgaagcgaagtcacagaaatactcgtatgaagttcttttcagaagcttgcagaaacttcttattgatactgccacttcagaatacctgtttactgatgatttctttggcgaagaatccatattccatgatatatttgcaggaccgattcaagttgttgatgaacatttcaatactgtactcctgaactgttatgatgcaattggcataatgcttatgatcagaataattcatcagcaccagctcatcatgtttaagcggcgaatcccatgtttggactcttacctagacaaagttaatatgtcactctggcctcgcttcaagatggtgttcgacttgcatttgaacagcttgcgaaatgcaaatattaaaacactttgggaggatgatgtccatccacactatgttacaaggagatatgctgaatttacagcttctctagttcatctcaatgttgagcatggggacggtcagcttgatctaaatttggagcgattgcggatggccattgaggatttgcttgttaagttggccaagatgttttccaaaccgaagctacaaactgtctttctgataaacaactatgatttaacaatttccattttgaaggaagctggaactgagggtgggaaagcacaacaacacttcgaggaggttcttaagagcaacatcgcaatatatgtggaagagttgctcctggagcagttcagtagtttgatcagattcgtcaaatctcgtccagcggatgagacggctgcaaattccgagaaagccagcattgccgaagttgagccactggtaaaggatttcgcgagccggtataaggccgcgatcgagctgatgcactatgatgtgatcacatctttcagcaactttctttgcgggatggagatcttgagagcgacgctcgcacagctcctgctatactacaccaggctctccgagtgtgtcaagagaatcaacggcggctctgctctcaacaaggaccttgtctccatatcctccatcctgttcgaaatcaagaagtattctaggacgttttag

SEQ ID NO: 155976 - DNA, 2094 bp, Zea Mays
ccattttcgagcgcagaagcgagagagatccggagcagccgcagtcccaccgacctcgccgccggtcgccctccatctcctcgccgctgcctctcgtgacgacgagtccctggaggggctgcagcaggagcttgacaactgcaagaatgaccaggaagtcgcaaacattctagccagtggcatcaaactgcgcgagtacacaaaaggcgtcgagaataacatacgccaaatcgagctggattctatccaggattacattaaggaaagtgaaaatctagtttctctgcatgatcaaatttgtgattgtgacaatattttgttacaaatggaaacagttctgactggattccagaaattggttccataagttcagagataaaggtccttcaggagaaatctatggacatgggattaaagctgaaaaatcgtaaggctgcagaatctaaattgtcaaaatttgtcgaggatataatagtacctccaagaatgattgacataattgttgatggagaggtcaatgatgaatacatgaaaacacttgagactctaagcaaaaaaatcaaattcatcgatgctgaccccatggttaaatcatccaaggctctaaaagatgttcaacctgaggttgagagactacgacagaaagccgtctcaaagattttcgagtttgtcatccaaaagttctatgccttgagaaaaccaaagactaatattcagattctacagcagagtgttcttcttaaatacaagtacacgataaatttccttaaggaacatgctaaggagatatatgcagaagttcgtacggcgtatattgacaccatgaataaggtgctaagtgcacatttccgggcttacatacaagcattggagaaactacagatggacatagcaacttccactgatttgcttggtgttgaaaccagaagcacaggcttcattttctccattggaaaagaacctctgaaaacccgtccttcagtgtttgctctgggtgaacgaataaacattttgaaggaaatcgaccagccagcattgatacctcatatagctgaagcgaagtcacagaaatactcgtatgaagttcttttcagaagcttgcagaaacttcttattgatactgccacttcagaatacctgtttactgatgatttctttggcgaagaatccatattccatgatatatttgcaggaccgattcaagttgttgatgaacatttcaatactgtactcctgaactgttatgatgcaattggcataatgcttatgatcagaataattcatcagcaccagctcatcatgtttaagcggcgaatcccatgtttggactcttacctagacaaagttaatatgtcactctggcctcgcttcaagatggtgttcgacttgcatttgaacagcttgcgaaatgcaaatattaaaacactttgggaggatgatgtccatccacactatgttacaaggagatatgctgaatttacagcttctctagttcatctcaatgttgagcatggggacggtcagcttgatctaaatttggagcgattgcggatggccattgaggatttgcttgttaagttggccaagatgttttccaaaccgaagctacaaactgtctttctgataaacaactatgatttaacaatttccattttgaaggaagctggaactgagggtgggaaagcacaacaacacttcgaggaggttcttaagagcaacatcgcaatatatgtggaagagttgctcctggagcagttcagtagtttgatcagattcgtcaaatctcgtccagcggatgagacggctgcaaattccgagaaagccagcattgccgaagttgagccactggtaaaggatttcgcgagccggtataaggccgcgatcgagctgatgcactatgatgtgatcacatctttcagcaactttctttgcgggatggagatcttgagagcgacgctcgcacagctcctgctatactacaccaggctctccgagtgtgtcaagagaatcaacggcggctctgctctcaacaaggaccttgtctccatatcctccatcctgttcgaaatcaagaagtattctaggacgttttag

SEQ ID NO: 155977 - DNA, 2040 bp, Zea Mays
ccattttcgagcgcagaagcgagagagatccggagcagccgcagtcccaccgacctcgccgccggtcgccctccatctcctcgccgctgcctctcggaagtcgcaaacattctagccagtggcatcaaactgcgcgagtacacaaaaggcgtcgagaataacatacgccaaatcgagctggattctatccaggattacattaaggaaagtgaaaatctagtttctctgcatgatcaaatttgtgattgtgacaatattttgttacaaatggaaacagttctgactggattccagacagaaattggttccataagttcagagataaaggtccttcaggagaaatctatggacatgggattaaagctgaaaaatcgtaaggctgcagaatctaaattgtcaaaatttgtcgaggatataatagtacctccaagaatgattgacataattgttgatggagaggtcaatgatgaatacatgaaaacacttgagactctaagcaaaaaaatcaaattcatcgatgctgaccccatggttaaatcatccaaggctctaaaagatgttcaacctgaggttgagagactacgacagaaagccgtctcaaagattttcgagtttgtcatccaaaagttctatgccttgagaaaaccaaagactaatattcagattctacagcagagtgttcttcttaaatacaagtacacgataaatttccttaaggaacatgctaaggagatatatgcagaagttcgtacggcgtatattgacaccatgaataaggtgctaagtgcacatttccgggcttacatacaagcattggagaaactacagatggacatagcaacttccactgatttgcttggtgttgaaaccagaagcacaggcttcattttctccattggaaaagaacctctgaaaacccgtccttcagtgtttgctctgggtgaacgaataaacattttgaaggaaatcgaccagccagcattgatacctcatatagctgaagcgaagtcacagaaatactcgtatgaagttcttttcagaagcttgcagaaacttcttattgatactgccacttcagaatacctgtttactgatgatttctttggcgaagaatccatattccatgatatatttgcaggaccgattcaagttgttgatgaacatttcaatactgtactcctgaactgttatgatgcaattggcataatgcttatgatcagaataattcatcagcaccagctcatcatgtttaagcggcgaatcccatgtttggactcttacctagacaaagttaatatgtcactctggcctcgcttcaagatggtgttcgacttgcatttgaacagcttgcgaaatgcaaatattaaaacactttgggaggatgatgtccatccacactatgttacaaggagatatgctgaatttacagcttctctagttcatctcaatgttgagcatggggacggtcagcttgatctaaatttggagcgattgcggatggccattgaggatttgcttgttaagttggccaagatgttttccaaaccgaagctacaaactgtctttctgataaacaactatgatttaacaatttccattttgaaggaagctggaactgagggtgggaaagcacaacaacacttcgaggaggttcttaagagcaacatcgcaatatatgtggaagagttgctcctggagcagttcagtagtttgatcagattcgtcaaatctcgtccagcggatgagacggctgcaaattccgagaaagccagcattgccgaagttgagccactggtaaaggatttcgcgagccggtataaggccgcgatcgagctgatgcactatgatgtgatcacatctttcagcaactttctttgcgggatggagatcttgagagcgacgctcgcacagctcctgctatactacaccaggctctccgagtgtgtcaagagaatcaacggcggctctgctctcaacaaggaccttgtctccatatcctccatcctgttcgaaatcaagaagtattctaggacgttttag

SEQ ID NO: 155978 - DNA, 2036 bp, Zea Mays
ccattttcgagcgcagaagcgagagagatccggagcagccgcagtcccaccgacctcgccgccggtcgccctccatctcctcgccgctgcctctcggaagtcgcaaacattctagccagtggcatcaaactgcgcgagtacacaaaaggcgtcgagaataacatacgccaaatcgagctggattctatccaggattacattaaggaaagtgaaaatctagtttctctgcatgatcaaatttgtgattgtgacaatattttgttacaaatggaaacagttctgactggattccagaaattggttccataagttcagagataaaggtccttcaggagaaatctatggacatgggattaaagctgaaaaatcgtaaggctgcagaatctaaattgtcaaaatttgtcgaggatataatagtacctccaagaatgattgacataattgttgatggagaggtcaatgatgaatacatgaaaacacttgagactctaagcaaaaaaatcaaattcatcgatgctgaccccatggttaaatcatccaaggctctaaaagatgttcaacctgaggttgagagactacgacagaaagccgtctcaaagattttcgagtttgtcatccaaaagttctatgccttgagaaaaccaaagactaatattcagattctacagcagagtgttcttcttaaatacaagtacacgataaatttccttaaggaacatgctaaggagatatatgcagaagttcgtacggcgtatattgacaccatgaataaggtgctaagtgcacatttccgggcttacatacaagcattggagaaactacagatggacatagcaacttccactgatttgcttggtgttgaaaccagaagcacaggcttcattttctccattggaaaagaacctctgaaaacccgtccttcagtgtttgctctgggtgaacgaataaacattttgaaggaaatcgaccagccagcattgatacctcatatagctgaagcgaagtcacagaaatactcgtatgaagttcttttcagaagcttgcagaaacttcttattgatactgccacttcagaatacctgtttactgatgatttctttggcgaagaatccatattccatgatatatttgcaggaccgattcaagttgttgatgaacatttcaatactgtactcctgaactgttatgatgcaattggcataatgcttatgatcagaataattcatcagcaccagctcatcatgtttaagcggcgaatcccatgtttggactcttacctagacaaagttaatatgtcactctggcctcgcttcaagatggtgttcgacttgcatttgaacagcttgcgaaatgcaaatattaaaacactttgggaggatgatgtccatccacactatgttacaaggagatatgctgaatttacagcttctctagttcatctcaatgttgagcatggggacggtcagcttgatctaaatttggagcgattgcggatggccattgaggatttgcttgttaagttggccaagatgttttccaaaccgaagctacaaactgtctttctgataaacaactatgatttaacaatttccattttgaaggaagctggaactgagggtgggaaagcacaacaacacttcgaggaggttcttaagagcaacatcgcaatatatgtggaagagttgctcctggagcagttcagtagtttgatcagattcgtcaaatctcgtccagcggatgagacggctgcaaattccgagaaagccagcattgccgaagttgagccactggtaaaggatttcgcgagccggtataaggccgcgatcgagctgatgcactatgatgtgatcacatctttcagcaactttctttgcgggatggagatcttgagagcgacgctcgcacagctcctgctatactacaccaggctctccgagtgtgtcaagagaatcaacggcggctctgctctcaacaaggaccttgtctccatatcctccatcctgttcgaaatcaagaagtattctaggacgttttag

SEQ ID NO: 155979 - DNA, 1061 bp, Zea Mays
ccattttcgagcgcagaagcgagagagatccggagcagccgcagtcccaccgacctcgccgccggtcgccctccatctcctcgccgctgcctctcgggtatcccctccctagggaccgtgaatgcgtctgttgcggctgtacgcattagattcttcggagtatgttgcggcttagattctccagagaaagatgaagatctgttgtgcattgcggtcttcggtggttgatccgtcgatttttttcgtttcatgttgtgtctaggttagacctaattgtttaggtaacctcgtatcactggatgcgcatctccccagtgttagtctcaaagatactaacttacagagtgacttttctctaaaagtgtgcatacaagttttgaatacttgtatgagacatgtacttggaacttttaatttcaggatacaacttataggataatatcacatgagtgtgagcattactcataggtgatatttaggagcaagtcatctatattttaaactttgacatgtattaaattgaatgataccaattgataatatgaaatacctcttgaataatgttaataccatttgttagaaaactagaagagctatatgccaggcttctagagaattttaagatcatgtaggtttgctctgtatgagtgaaaacaagtaattctacatacggtatatccaaagtgtatgtctgcgaaaaatataaactgatcatgctagaagcctagaacatatgggtatgcgtggttcaatatttttaccagcttttctgagaatctggttgtggaaataatctaaatatcgtggggattacatgcggaggaagataaagcggtgcaaagggttcaggatctagaaaccgacgagtctaagtttcttcactttctaaatcctaaatcctgtggatgttttcatcttcctccgcatataagcctcatgatatccagattctccgcataaccatattcttcgggaatccagattctcaggaaaacttgttcgaaaaaatgaaccaaatgtggcctctgtcttatccatattctcgaggaatctagattctc

SEQ ID NO: 155980 - DNA, 434 bp, Zea Mays
agagtagagaataaggcaaggatcttcgagcagaatgccactgatagtgagtgcaaggtcgatcctaaagtgctctccaagctatatgatccgtgggtgatgccacataccaaggatgtcgaagttgagtacctcctgcgctgccttgactaatcaccgattagctgtagctgtaaattttatgtatgcatggtttcagttgtgctcgaaccaattgtcttgaccttgaatggacattttgatgtttatttcatctgatgcgtcatgtttcatgacgtagactttcatttcttgtgattgatttatagtgaacctgtaagatgtaaaatgacttttatgacaaaaccagctgcaagaacagagtattctgagaaacctttgttgaagtaaatgtaattgagtttcctagcaatcttgttcctgctggtatcata

SEQ ID NO: 155981 - DNA, 971 bp, Zea Mays
agcgtaccgaactacctatcctatcccctcgcgtcgcatctttcctctcgtaacgcgtatcagtgccaaccaggcagccatcgccgcggccctcgtgcctctgcatcgcggcgcgccttggtgctccatccacgtaatccctgaggtgcggcacaggcgtggaggtatctcggcagtcggcagggcggctggagttcggtcccagaagagatggcggggggccctgatgtcgcgggcttgatcgaggatgatgcggtctccgtcatcacggagggcttagtggtgtgtgacatatgtggcagtggtagtgcccctcatcttattgcaaactgcgctcggtgcaatgcgcgtgagcacgggtactgtatggaggggttgacgttcctgattccgctcatatggttttgtaatagatgccaacgcaacgccaacagggcacccagatcctaaccaaggtagcggatttctgttggtatgttggcctgaaactctggattactcacttcgcctgcagcctgcaggttctggagatggtgttgggcgccaaattcccttgaggaaggtagcagctagtgtcgtgtgagaaatgttggcttgtttttgtggttgtgtgtattggcaatcgctggagcctggagctgtgtgtattggcatcgctggagcaaaatgtccatgtggcttggcactgatgctggctggcctcagaacatacgtcggatattctttcaccgcgagtgagcaattgaaattgggcaggtaataccatgttgtgggcgtaaatgcgatggacactgtcagtttcgtgggttttcttttcttctttttcgggccaagagtttcgtggattctcagcctcggttgcatgcgcaagatcttgagtgcagcatagaacacgcttgttcttaccagtacgtgtgcaagaaaaatggatctcggtatatttaattaatatattttcttgtttgatggtg

SEQ ID NO: 155982 - DNA, 894 bp, Zea Mays
agcgtaccgaactacctatcctatcccctcgcgtcgcatctttcctctcgtaacgcgtatcagtgccaaccaggcagccatcgccgcggccctcgtgcctctgcatcgcggcgcgccttggtgctccatccacgtaatccctgaggtgcggcacaggcgtggaggtatctcggcagtcggcagggcggctggagttcggtcccagaagagatggcggggggccctgatgtcgcgggcttgatcgaggatgatgcggtctccgtcatcacggagggcttagtggtgtgtgacatatgtggcagtggtagtgcccctcatcttattgcaaactgcgctcggtgcaatgcgcgtgagcacgggtactgtatggaggggttgacgttcctgattccgctcatatggttttgtaatagatgccaacgcaacgccaacagggcacccagatcctaaccaagcctgcaggttctggagatggtgttgggcgccaaattcccttgaggaaggtagcagctagtgtcgtgtgagaaatgttggcttgtttttgtggttgtgtgtattggcaatcgctggagcctggagctgtgtgtattggcatcgctggagcaaaatgtccatgtggcttggcactgatgctggctggcctcagaacatacgtcggatattctttcaccgcgagtgagcaattgaaattgggcaggtaataccatgttgtgggcgtaaatgcgatggacactgtcagtttcgtgggttttcttttcttctttttcgggccaagagtttcgtggattctcagcctcggttgcatgcgcaagatcttgagtgcagcatagaacacgcttgttcttaccagtacgtgtgcaagaaaaatggatctcggtatatttaattaatata

SEQ ID NO: 155983 - DNA, 887 bp, Zea Mays
agcgtaccgaactacctatcctatcccctcgcgtcgcatctttcctctcgtaacgcgtatcagtgccaaccaggcagccatcgccgcggccctcgtgcctctgcatcgcggcgcgccttggtgctccatccacgtaatccctgaggtgcggcacaggcgtggaggtatctcggcagtcggcagggcggctggagttcggtcccagaagagatggcggggggccctgatgtcgcgggcttgatcgaggatgatgcggtctccgtcatcacggagggcttagtggtgtgtgacatatgtggcagtggtagtgcccctcatcttattgcaaactgcgctcggtgcaatgcgcgtgagcacgggtactgtatggaggggttgacgttcctgattccgctcatatggttttgtaatagatgccaacgcaacgccaacagggcacccagatcctaaccaaggttctggagatggtgttgggcgccaaattcccttgaggaaggtagcagctagtgtcgtgtgagaaatgttggcttgtttttgtggttgtgtgtattggcaatcgctggagcctggagctgtgtgtattggcatcgctggagcaaaatgtccatgtggcttggcactgatgctggctggcctcagaacatacgtcggatattctttcaccgcgagtgagcaattgaaattgggcaggtaataccatgttgtgggcgtaaatgcgatggacactgtcagtttcgtgggttttcttttcttctttttcgggccaagagtttcgtggattctcagcctcggttgcatgcgcaagatcttgagtgcagcatagaacacgcttgttcttaccagtacgtgtgcaagaaaaatggatctcggtatatttaattaatata

SEQ ID NO: 155984 - DNA, 711 bp, Zea Mays
agcgtaccgaactacctatcctatcccctcgcgtcgcatctttcctctcgtaacgcgtatcagtgccaaccaggcagccatcgccgcggccctcgtgcctctgcatcgcggcgcgccttggtgctccatccacgtaatccctgaggtgcggcacaggcgtggaggtatctcggcagtcggcagggcggctggagttcggtcccagaagagatggcggggggccctgatgtcgcgggcttgatcgaggatgatgcggtctccgtcatcacggagggcttagtggtgtgtgacatatgtggcagtggtagtgcccctcatcttattgcaaactgcgctcggtgcaatgcgcgtgagcacggatgccaacgcaacgccaacagggcacccagatcctaaccaaggtagcggatttctgttggtatgttggcctgaaactctggattactcacttcgcctgcagcctgcaggttctggagatggtgttgggcgccaaattcccttgaggaaggtagcagctagtgtcgtgtgagaaatgttggcttgtttttgtggttgtgtgtattggcaatcgctggagcctggagctgtgtgtattggcatcgctggagcaaaatgtccatgtggcttggcactgatgctggctggcctcagaacatacgtcggatattctttcaccgcgagtgagcaattgaaattgggcaggtaatacca

SEQ ID NO: 155985 - DNA, 631 bp, Zea Mays
agcgtaccgaactacctatcctatcccctcgcgtcgcatctttcctctcgtaacgcgtatcagtgccaaccaggcagccatcgccgcggccctcgtgcctctgcatcgcggcgcgccttggtgctccatccacgtaatccctgaggtgcggcacaggcgtggaggtatctcggcagtcggcagggcggctggagttcggtcccagaagagatggcggggggccctgatgtcgcgggcttgatcgaggatgatgcggtctccgtcatcacggagggcttagtggtgtgtgacatatgtggcagtggtagtgcccctcatcttattgcaaactgcgctcggtgcaatgcgcgtgagcacgggtactccctttcttttctcctacctgcctattacctttttcctttggtcttcacatactgaactcgtggaaaatgtacatatacatacaacatatgttcgtctgtgtagaacatgtggtgatcagttggtagacatgctttgtaaggatgtttggatagtagttactagtgaatggtaagagaagagaagaatggtaaagagaagagaaggttttgccacagataactcatgtaaaaactgtaactaaataaggccttggatatttcctcca

SEQ ID NO: 155986 - DNA, 522 bp, Zea Mays
agcgtaccgaactacctatcctatcccctcgcgtcgcatctttcctctcgtaacgcgtatcagtgccaaccaggcagccatcgccgcggccctcgtgcctctgcatcgcggcgcgccttggtgctccatccacgtaatccctgaggtgcggcacaggcgtggaggtatctcggcagtcggcagggcggctggagttcggtcccagaagagatggcggggggccctgatgtcgcgggcttgatcgaggatgatgcggtctccgtcatcacggagggcttagtggtgtgtgacatatgtggcagtggtagtgcccctcatcttattgcaaactgcgctcggtgcaatgcgcgtgagcacggaacatgtggtgatcagttggtagacatgctttgtaaggatgtttggatagtagttactagtgaatggtaagagaagagaagaatggtaaagagaagagaaggttttgccacagataactcatgtaaaaactgtaactaaataaggccttggatatttcctcca

SEQ ID NO: 155987 - DNA, 1608 bp, Zea Mays
cggtcgcccgcaccacccgccaaggccccaagacctgaccgatctcgcctaggggttccggtgatccgcgcgcgccctcctcgagatgtctgacgtcacctctgactcggcgcagagccgccgctcgccgcccccgccgtcgccgtcgccgtcgatgccgcgcttccagcagcagccgagcggacgccagccgccccagcccggcgccgactccttcgtcttcggcgtcttcgccttcatcgccatctgcttcgtcttgatttcactctcagtcccatcaagtgttctacatcaagttcctgaaggacatgttggggtatactggagaggaggtgctcttctgaagacaatcacccctccagggtttcatctgaagctccctttaatcacacagtatgagccaatacaggttacacttcaaacagaccaggtcagagatattccttgcggaacaaaaggtggtgttatgatcagctttgacaagatagaggtcgtaaaccgcctccgcaaagagtttgtgcatgaaaccctactcaactatggtgtgcactatgacaagacatggatatatgacaaaattcatcatgagattaaccagttctgcagtgctcacagtttgcagcaagtttacattgacatgtttgatcagattgatgaaacaatgaaagaagctattcaaagagactgtacacgctatgctcctggaattgaaatcatcagtgttcgtgttacaaagccaaatatacctggtagtatcagaagaaactttgaacttatggaggaggagcgtacaaaggcactgatcgccatcgagaagcaaaaggtagcagagaaggaggcagaaacacagaagaagattgcgctatctgaagcagagaagaacgcgcaggtgagcaagatcctgatggagcaaaagctgatggagaaggacagttccaagagacaggagaagattgataatgaaatgtacctggcacgagagaaagcactagcagatgcaaactactacaggattttgaaggaagcagaggcaaataggctcaaactgacacctgagtatctggagctgaggttcattgaatcaattgccaacaactcaaagattttctttggtgaaaagattcctaacatgatcatggatcaaaggttgctcaagaattaccttgatgctgttcctaggaaggaccattatgaaatgtagccgcgggttccgtgggttggaagcagaagtctttcttttttgtgtgatcccacgcagtagataggattaccgtgtagccgtccagtatactagtaagccagaaaggagtcatcaggatcctcttgaagatgaaattagcagtcatgagatctttggcttgttttgtgtagtagcagcattagggcacctggagcattcgcatgtgaccgacagtgatgcaaccagtgcaaatcctgtagtcttcaaaactgatggtcaaggccgctggcctccaaacccaggtaatctcttgaaaaggatctgggttataatttttgactgatgggcagaacaatttgtagcactgctgatgccaaagttttctcgatcataaatgtgcaagtttgctccctgacttaattatgtct

SEQ ID NO: 155988 - DNA, 116 bp, Zea Mays
gttttctctttgtttttctttttatttgtttcgaaaaagatatcgcccgattctctttctatggattcttttccgatcgagatgtatggatccatgtgtcttaatttgatggtcag

SEQ ID NO: 155989 - DNA, 1208 bp, Zea Mays
agagaggtgaacgggcaatctcactcactctccttcgtagttgaaattgaactcgctggccgcctgtgtatagtccagtacttccagctagaatctgaaagaaactcgtcaccagctcgatctcgtccttcctcccttcgctcgactcctctgcttctcccccatccggtacgtgcggtgcggggaggctagccgggcggccggagctccaaccgcaatcggtctcttgctctgctgctgcgatggaggcgtcgtcgttggcgctcgtggccgccgtgctcctcctgtcctccacgcttgccgcgtcagatttctgcgtgtgcagttcggaccagccgacggcggtgctgcagaaggcgatcgacttcgcgtgcggtccgcaggggggcgccgactgcacggccatcctgcagggcggcgggtgctacagccccaacaccgtcgccgcgcactgctcctgggccgccaacagctactaccagaacaacaaggccaggggcgccacctgcgatttcggcggcgccgccgccgtctccaccacagaccccagtttctccgggtgcactttcgcttccagtgccaccagcgctggcgctgggaccgggacggcgggtaccaccaccggcaccacgaccgcgggcggtgcgacgacgggcaccctgagccctggcgtgggcatcggcggcctcaacggcacggggatgggcggcagcaccggcctgggaccggcggacaacaccctggacgccgccgcgcccggcctgctccccggcgccgcatccctcgccgccgccgccgccgccctctccttgctcgccctgctgcagcattgattacgtgggctagctgcttgctctgtggtccgtgaaaaagaaagggggcacgggggattgtactggagaatgtgaattggttcggttggttggaggacggatccgatttcacttcacccatctttgttagtagtggcaggcggtggttgggggcggtgtattctttctttcttttccttatgcctttttgatgtatggtttatttagcggtaggatgccagtctctttcctacaaggaccattgtctctcctctctctctctttctttttaaattttgtttatttataaaagttgtacttgctatcctcttttcttaacctctctgtttttattagaccagtttcaataaaaattcttaagaagtattgttttta

SEQ ID NO: 155990 - DNA, 89 bp, Zea Mays
gcacagtccattctcatgttcggtcaccattttctgtttcctttctcattcttccctcatcccacgtctagctaaaattaaattaaaaa

SEQ ID NO: 155991 - DNA, 3407 bp, Zea Mays
cccgaagctcccagaacctcctcctccgcttctctccactcttcacgccgccaccgagtttatacacgcttcgtcccgtcctgccgcgcccgtctgttccatagcataccattattgtgataaaccatccaatccagagttccattccattctgaattgctcctcccagcttcagataaaccatcgagattgtgccgccagcgccccaccatggccgccgcgccgccgctgtccgccgacgtactctccttcctaacctccgcccccgccgcgccgacgccggtcgtagccgcggcgtggggcgcggcgagggcgggtcctgtgaggggtaaggcggcactaaggacgacgagaggaggaaggggcggggtgctggctccgctggtcgggaggaggccccgccggacgccgctctcggtgcgctgcaacgccaccagccgggacggcaggattacacaacaagagttcactgagatggcgtggcaagcaattgtctcatcccccgaggtggcaaaggagagcaaacaccagattgtggagaccgaacatctgatgaaatccctgctggagcaacggaatggccttgcccgccgtatcttttctaaggcaggagttgacaatacaaggcttctcgatgccacaaagaaattcatccagaggcagcctaaggtattaggtgaagaacctggatctatgttggggcgtgacttagaagctctgatacaaagagcaagggactttaagaaagagtatggtgattcatatgtctcagttgaacatctagtccttggctttgccgaagataagcggtttgggacacagctgttcaaggattttcagattactgtgaagaccttgaaatcagccattgaatcgatcagagggaagcaaaatgtaattgatcaagatcctgagggtaagtacgaagctttggataagtatggaaaggatctgacagctatggcacgtcaagggaagcttgatccagttattggaagagatgatgagattcgaagatgtatacaaattttatcacgaagaacaaagaacaatccagttctaattggtgaacctggtgtagggaaaacggctatagctgaaggactagctcagaggattgttcaaggagatgtcccacaagctctgacaaaccggcgactaattgcacttgatatgggtgcattgattgctggtgcaaaatatcgtggagagtttgaggatagacttaaggctgttctcaaagaagttacagattctgatgggcagaccattcttttcattgatgagattcacacagttgttggagcaggtgccacaaatggtgcaatggatgctggtaatcttctcaaaccaatgcttgggagaggagagctacggtgcattggtgcaacaacccttgatgaataccgcaaatatattgagaaagatccagcactagagcggcgcttccaacaagtttatgttgatcagccttcagttgaagatacaatttcaatactccgaggactaagagagagatatgagttgcaccatggtgtacgaatatctgacagtgcccttgtagctgcagctgttctttcagaccgttatatcagtggacgattcttgcctgacaaagctattgatctggttgatgaatcagccgccaaattaaaaatggagataacatcaaaacctactgctctggatgagatcgatcgtgctgtcctaaagattgaaatggagcgtctctcacttacaaatgatacagacaaagcatcaaaggacagactatcccgtcttgaagcagaactatcactcttgaaggataaacaacgtcagttgactgagaagtgggagcacgagaaatcagtgatgactaaaattcaatctatcaaagaagagattgacagggtaaatgtggagatacagcaggcagaacgtgagtacgatcttaatcgagctgctgaactgaaatatggcagcctgaatgccttgcagcgccagcttcaaacgacagagaaggagcttgatgaatatcagagttctgggaaatccatgctaagggaagaggtgacccaagacgatattgcagaaatagtgagcaggtggacaggcattccagtttctaaactaaagcaatctgacagggagaaattgctgtatctggaggaagagctgcacaagcgagttgttggtcaggatcctgctgtaaaagcagttgcagaggccattcagagatccagagctggattatctgacccaaaccgtcctattgccagtttcatgttcatgggacctacaggagttggcaagacagagttagcgaaagcccttgcttcctttatgttcaacactgaggaagctgttgtcaggattgacatgagcgagtacatggagaagcattcagtctcgaggttgattggtgctccaccaggttatgttgggtatgaagagggtggtcaactgacagaggctgttcgccgtaggccatattcggttgtcttgtttgatgagattgagaaagctcatttggatgtcttcaatgtcttccttcaaatattggacgatggtagggttactgattctcaaggccggaaagtgagcttcaccaactccatcattatcatgacgtccaacgttgggtcacagtatatactaaacatggatgaagaagatggatcatctgattcagcctatgagaacataaagaggagggtgatggatgctgcaagatcggtgttccgtccagagttcatgaatcgtgtagatgagtacattgttttcaagcctctcgagagagaacagatcaacagcattgtcaaattacagcttgcaagagtacagaagaggattgcagatcgcaaaataaagctcgatgtctcgcctggagccattgaattcttgggaagcctcgggtatgacccgaattatggcgcgaggcctgtgaagagagtgattcaacagtatgtggagaacgaactcgcaaagggcatcctcagaggtgatttcaaggacgaggacagcatcttcgtggacacccaggttacggtgccctccaatggccagcttccgctgcgaaagctagtttttcagaaagtgggtgagcaatcgaagcctgctgctgaaggcgagaagttcttgccggctgtttgattggagtacggttgcagttttgcagatcgtgagcaataaaatgtacatataagggtgacagactggtattccctttggcttagaagagcattacagccacaatttgttctacgatacacgtagcttaaggttacgtcgagcaacgaattttgattttttttttctgccgtttttttttccttttcagtggaagtgtattcgattttgatgtcctccgacgtaactgatgcaaactaacaagaaacaggtatccagttggaactccctttgcc

SEQ ID NO: 155992 - DNA, 3440 bp, Zea Mays
atggagctctgctgctcaggcgtcctaagcggcgccggcgcctcgcgaccggcgccatcgaggacctcaaggcccgtgaaaatgggggctccgtccactgggctcttggtagccccgccgaagcggcggcgaggcggccgcgccggctgccgccagtcggccccgccagtgccgccccgggacgaacggcgggtcgtgggcacggacagcgtcgtccacatgctccggtcggcgcccgaccccgccgaggccctggaactcttcacggccgcggcgcggcagcccacgaaggtccacacaacggagtcgtgcaactacatgctggagctgatgcgcgcccacggtcgtgtcggggacatggcgcaggtgttcgacctaatgcagaaacaggtcgtcaagaccaacgtcggcaccttcgccaccatcttcggcggcgtcggcgtcgagggggggctccgcagcgcgccggtcgccctgcctgtgatgagggaggcggggatgtccctcaacgcctacacgtacaatggcttgatttacttcctcgttaagtccggcttcgatgcggaggccatggaggtttacaaggcgatggttgaggacggcatctcgccgagtgtgaggacctactccgtgctgatggtggcgtttgggaagaagagggatgtcgacactgttctctggttgctgaacgagatggaggcccgcggcgtcaagccaaacgtgtatagctacaccatctgcattcgggttcttgggcaggccgcaaggtttgatgaagcatatcacattcttggaaagatggaggattcagggtgcaaaccagatgtcgtcacacatactgtgattatacaggttctctgtgatgctggccgtctgagcgacgccaaggctgtcttttggaagatgaaagcgagtgatcagaaacctgatcgtgtcacttacatcactctcttagacaagtgtggtgacagtggtgactcacaatcagttgtcgaagtttggaatgccatggtagctgatggttataatgacaatattgtttcttacactgcagttgtggatgcattatgccaagttggccgggttgatgaagctttagctgtgtttgatgagatgaaggaaaagggtatgtcgcctgagcagtattcctataactccttaatatctgggtttctgaaagctgatatgtttgaccgtgctctggagctcttcaaccatatgaatgcttgtggtcctagtccaaatggctacactcatgtcctcttcatcaactactacggaaaatctggtcaatctttgaaagcaatacaaagatatgagcacatgaagagcaaagggattgttcctgatgttgctgctgctaatgctgttctgtatagtcttgctggatctggcagacttggaatggcaaaaagggtcttttatgaactaaaagcgatgggagtctctccagacactatcacgtacacaatgatgatcaaatgttgcagtaaggcatcaaaagctgatgaagctatgaattttttttctgacatggtggaaagtggatgtgttcctgatgttcttgcattgaattcattgattgatacactctacaagggaggcaagggaaacgaagcatggcaacttttccataaattgaaagaaatgaaaattgagcccactaatggtacgtacaacacacttttgtcaggattaggaagagaaggcaaagttaaggaggtaatgcagctgctcgaagaaatgacacgtaccatttatccacctaatttaattacatacaacacagttctagattgcctcagcaaaaatggggaggtgaactgtgcaatagatatgctttacagtatgactgagaaaggttgcgcacctgacctttcatcttataacactgtcatgtatggccttattaaagaggaaagacttgaagaggcattcaggatgttttgtcaaatgaaaaagattcttgctccagattatgccacactgtgtactatcctcccaagttttgttaaaaatgggttgatgaaggaagctctgcatactgtaaaggaatatattttgaaggctggttgtaacgtggacaagtcttcattccattcactgatggaagggatactgaagaaggctggtgtggaaaaatcaatcgagtttgctgaaaacatagcatctaggggaattctgctgaatgatttctttttatgcccattgattagacacctctgcaagcacaagaaagctcttgaagcgcatcaactattcaataagtttaaaggtcttggagtttcactaaaaactggttcttataattctcttatccgtggccttgtggatgaaaacctgattgatatcgctgaagacttgttcactgaaatgaaaagactaggatgtggcccagatgaattcacttacaatttgattcttgatgccatgggaaaatcgatgcgggttgaggaaatgttaaaagtccaaaaggagatgcatcgtaagggatatgaatcaacatatgttacttataacactatcatttcgggtctcgtaaaatctaaaagattggaacaggctatagacctgtactacaatctgatgagtgaaggcttctccccaacaccatgtacatatggtcctcttcttgatggcttattaaaatctggaaagatggtggatgctgaaaatctttttaatgagatgctagagtatggatgcgaacctaattgcaccatctacaatattctactgaatggacaccgaatagctggcaacacagaaaacgtttgtcagctttttgaaaagatggttgagcagggaataaacccagatataaaatcctatacaattcttattgataccctgtgcacagctggaagattaaatgatggtttgtgttattttagacagctacatgaattaggacttgagcctgatcttatcgtttataatttgctcattgatggtcttggaaaatctgaaagaatagaggaagcagtcagtctcttcaacgagatgaagaagaaaggaattatcccaaacttatacacatacaattcactaattctccacttagggaaagcagggaaagctgctgaagctgcgcaaatgtatgaagaactactgagaaaaggatggaaacctagtgttttcacatataatgcactcatcaggggttacagtgtttctggcagtaccgataatgcatacgctgcctatggtcagatgattgttggagggtgccagcctaattctagcacttatatgcaacttccaaatcaattgtgactgagaaattagctatagtatgtagttatttctgtacagttttgtccatagtgcgaaaatggtcaactgtagatagtagccaatacttttaacatatccgaggatcgatagatcttgttctacattccattgttactagcagaaaattatgtaatatacagata

SEQ ID NO: 155993 - DNA, 1294 bp, Zea Mays
agtcacggacacatggtgtgtttggttggatctcgtcccggtctttcacctccaacaaaacacatcctaatcgactcgcgaccccgtttcccggagagccgcgacggtgcgacgccgaactccctaaccctaagtccctaagcgtaggcggcggggggcggcggtgcgaggcaagctgcacagcaacacgggccacgggcgcggcctccgcctccgcctccacgcttctgctgctaggctgcaagggcggcggcgcggcgcggtgggcggcggacagctggccaggtccagcccagtagtccaggtgacgaggtccgcactccgcaacggttctggcgttctgcagctgaggatagacgagagaggaagtgaggatttatattagtgatttacaaggcaacttgaaagacagcagggttgcatcccacaatgtcagctcccaacagtgatagcaacatgcagcagctagtccctatagcaccaccaggaaaggcttctggtggtgacagtgggaaggagctggttgtggcagatcctgcaggtaagagatcaggaggtgtaaaactgcgagaggatgaggaagacctggaggtgaagctcaggcgcatcatggagaatgtccctgtgcgtgtcagtaacacatcagggtcatctgctggctctggctctggtgatttccaccagtatcggcaaatgaggaggagagagcaggaccgtctagcacgaatggatgcggactaccagaagagaaaagagatagctgagttcgaactgcggagggaggagaggatgaaagcagctgaggagcggacagccaagaagcgcctgaaacggcaaaagaagaaacagcgtaagaaagagaagcgagctaaaactggtgataatggtggtgaagaacctaacagagtggagtcgtctgacgatgacgaaggctcagatgacgatgacaagtccaagcaatgacacgtcaatttcgcacctgaagatgatttcggactctctggttgtctgggcaatgaaacaaacgtctgtacggttgttgtaacaggttacagggcgaatctggtgctgtttctgtaagaggatatgatattctgagcagagatggatagcactagataatttgctgttagtgttcatcattcagagaagtgacctgcgtcagtaccttttgttcaggtctatattatatcagctgccttttttggctccattttaccatgggctcaagagaaaatcaagcctcatttcttatgctaaataaatagaaaagtaatctggcatttaaagctca

SEQ ID NO: 155994 - DNA, 821 bp, Zea Mays
acatcctaatcgactcgcgaccccgtttcccggagagccgcgacggtgcgacgccgaactccctaaccctaagtccctaagcgtaggcggcggggggcggcggtgcgaggcaagctgcacagcaacacgggccacgggcgcggcctccgcctccgcctccacgcttctgctgctaggctgcaagggcggcggcgcggcgcggtgggcggcggacagctggccaggtccagcccagtagtccaggtgacgaggtccgcactccgcaacggttctggcgttctgcagctgaggatagacgagagaggaagtgaggatttatattagtgatttacaaggcaacttgaaagacagcagggttgcatcccacaatgtcagctcccaacagtgatagcaacatgcagcagctagtccctatagcaccaccaggaaaggcttctggtggtgacagtgggaaggagctggttgtggcagatcctgcaggtaagagatcaggaggtgtaaaactgcgagaggatgaggaagacctggaggtgaagctcaggcgcatcatggagaatgtccctgtgcgtgtcagtaacacatcagggtcatctgctggctctggctctggtgatttccaccaggtactccccttccctcccttcctatgtgtgtggaactgtggatacaccagtgtgggctttctgttaggatctgggtttgatgaaaatttttgcttgtttcgtttgatttttatttttttgcagtaatcacctcttgctttatacgaatgttaattttcacggtgctatgtgcttacaactattttcctgtaaattttg

SEQ ID NO: 155995 - DNA, 894 bp, Zea Mays
agtcacggacacatggtgtgtttggttggatctcgtcccggtctttcacctccaacaaaacacatcctaatcgactcgcgaccccgtttcccggagagccgcgacggtgcgacgccgaactccctaaccctaagtccctaagcgtaggcggcggggggcggcggtgcgaggcaagctgcacagcaacacgggccacgggcgcggcctccgcctccgcctccacgcttctgctgctaggctgcaagggcggcggcgcggcgcggtgggcggcggacagctggccaggtccagcccagtagtccaggtgacgaggtccgcactccgcaacggttctggcgttctgcagctgaggatagacgagagaggaagtgaggatttatattagtgatttacaaggtgagttgttcacttgttccattgtttatgcagatgcaatttgcaactagactagaagtttagaacctataggttggattcttttttcatgcgggagtgggaatacccaaggatttgctccgtgcccttatctgcatgataaatgaatttggagacgaaggcaagtgttcagtgcacgagctgtgtgacgaatgtgttcaactcttagacatttgctgtctattcagggaatgaattttgaataaaattttcatttaggaaattatagttgaccaatatttttggacactagtagaagtggaatggatttggttctgactggttcgttatatataatatagtacgtgcattctgttcttccctttatataattcgccaattcggttcctgtgttcggtggttttggaaactataaatctataatgcctaattacgccatgttctactcataacctttgtgtggttactggctagattgttcactacagttactatgtc

SEQ ID NO: 155996 - DNA, 675 bp, Zea Mays
tttcctccccttcgctggtcatctttgccgagggcctgcgtctcgctatctcttccctccgccctcctgctctcccgccgttgtagaaatttccctctcccacgcgtcctcccgctcccgtgcacttgtcactgcgcctagcccgctcgctcgctcccactcccgtacccatgtatcctctcaaccgtgaccagcctgtgtcgccacgttattgcctctgcctcgtcgcgccatgtacagagcgaccccattcaacgacgggtgaagaaattgggttgtggaatgcatctgcagagattcccctttcgcagttagcgtcaggaaggctagatccggaggcacaccgcccggagggagagctggaacaatccaacgtcgattagatgcatcggggtgtgcttcctcccataagattcgaagtccaaatgccagaggatctgaccaattctactcaaatcgacggggaggaggcgtagatgggtgagatgctgattgcaatgattatattttttcttgttgattgttcatttcgaactctgcaatctacatttgatgtacgctttcgttcagttctttagagctagcaaaaatctgtgtgttttttgtaattgatacgtttatatggtgttccaaatgcactcatgccgcttaggatgtctaaaaagcatcaacata

SEQ ID NO: 155997 - DNA, 76 bp, Zea Mays
gttttctttctcttcattttcttgatttccttccaaatttcatcccatcggttgcttcttaatctgctgatttcag

SEQ ID NO: 155998 - DNA, 1387 bp, Zea Mays
cgcgcgcgcccggcaaactacccccaccgcggatcccctacctcccgtggatcccgcgcgcgcccgccaaactgcccccgccgtggatccctacctcccgcggatcatgttcccctacctccagcggatccctacgtgtcagcgcaaggatcacgaagtgctgctacaaatgcgtggtagaattgatgacggacaacgacggcgccgccgccaggttagtcgttctgcgattagtgaggttttgtcatttggtcacgcttggatgcctggctgtcggagttgccgccgctgaggacgaccatggagcccgcctcagcattcctcgagcgcatggacaccgcgccaggcatcagccgccctcccgcggttgtcatctcgtctctccatctacactgatacagctcgccggtccaaattgactcatcgaccacgaccgtcgctaggctcccgtctccatgggtctcctctcaaacagttcaaccctcagatccgttccttctctggattaggaaggagagcctcaaggtgggggatcacatctactcctggaaggtgacgtgagtctacgcgcatcacgggttgagatttagctagcttcttgggcatggattgattatctagataaaacaccggcaccatttggtgagcatatccacgaaccctttgtttgtgcatcaaatcagtatggttgatttgtttctctacgtccagttcttggaaaaggctacttgcattgattcggcagtgggaagtgccctgggatgacaccttagatacagtagtttcttacaaaattagtcaggtaattctggcagtttgttgttgtgagcttccctttatttctcatcttcctttttaagttgttggcctttcagaacaatatcttacttttttatatacgagtatgttgatgaaatgtgagataaaaactcataggttttgtcacatttatcttattttatctttgccctttgaatatcacacaaatgtgttttgtttaatactgctaaatgctcacagtgctataatttcttagttgttttttgagttttcaggttgtggatgctaaagttattcatctggactataataatagtcgcatatttttgtcacttaaagatgtaaaggtgatgctggagacaacacttggcaaagaagagttgaaagagacaattttgatgtgcactaatagggttagctaggatctccatgatgtgcatttgatgggggactaatttatcgggttgctagcaggattggaacagcatacagactgagggcaaggatcgtcgatggagctgccaagttaaatggtttgttcaattgacagaaacaaagtcaattaactcacattctactacgtggaacaagaaatagcctttctaga

SEQ ID NO: 155999 - DNA, 828 bp, Zea Mays
agagcccaatatcattgtctttataacatcgacagagctaaaaatgccactattgcccaggaacaacttcaccattcacccgtgacacaccacggcccgaccatgcgcacaaaatggcagcgcaggtgagtttcctgggcggtggtgttcatcccagcttcgcccgcgacgggacctgggttgggcacgacgccatgggttcggaggacaaagaggtcgcggctaggtcctttatgtagaggtgggcggaggtaatcagtcggccaaactgaccccgagttccccggcggccggtgagcgagcgagtcgcgcgaggggagaagaagacccagccacaggcgcccaccaaatcccaacggatttcgtcactggttcaagctccgcggagatctcaccaggaagagaaacagcgcccaacagaaaagtggataagggaggaaggagttcctgacgtccgggccccacgcgacagccaagtgggttcaagcgtgcatgtgtggctgaggcgctgcgacgtggagtgggccggcgggcgagggatacagcccaaatgaccgtgttgtttatgtacgggagatgggccgagcagcgactttgggcccaaaacgaggtctgccaaattttcttttccttttcttttatgaatttttctgctttgttttcgatttcaagtactcaaaccaaattcaaattccccttttgatttctttcagatttgcgagttccaaaattaataatgatgtaaatataatccctactgtttttcatattattatttattttccttgttattcacttatggaagaaataaatagttgcactagaatc

SEQ ID NO: 156000 - DNA, 2594 bp, Zea Mays
acaaaccccaaacccctcacttgtcatcgacctgcgctttgcatccgtttcttcctccgccttcccttccctttgcagtcttgcactccactacccctcgccgcaccgctctcctctcttgacgcaaacctttccacactgctaattaatcgccatttcctcggaggatccggaggcaatggagaaggagagcaagcagggtttcttttcggcgctcaagggggaagtcgtgcgtggtctctcgccaggcagatcccgggggaagtcgctgctgcttccgcgcagccgcaagacggcggccgcggaggaagtggcgccgccagagaagctcgcccagtacgcgccggatccgctcgtcacccactccggcagcctgcggcttgccggcgaggtcctggcgccgctcatggagggcccggacgtcgccgaggacgacacgttcgccgaggattccggacggcgagacgggttcgggcagtgggtccgcggccacctgacccgtgccccgttgatcgccggcggcggcgacgggtctttccggcgctccgacctccgcctcctcctcggcgtcatgggcgcgccgctcgcgcccgtctcggtctccaccgccgagccgctgccgctcgcgcccgtcaagggcgcccccattgaatcctcgtcggcgcagtacatcctgcagcagtacttggcggcgtcgggtggcgccaaggtgctccggtcggcgcggaacgcgtacgcaatggggaaggtgcggatggtggcgtcggagttcgagacggccacgcgcgtggtcaagaaccggggcgccgccgccgccgccgccgtggagcaaggcgggttcgtgctctggcggatgtccccggacatgtggtacgtggagctggccgtcggcggcagcaaggtccgcgccggctgcaacggccgcctcgtctggcgccacacgccgtggctcggcgcccacgccgccaagggtcccgtccgcccgctccgccgagccctccagggtctggatccgctgtcgactgcggggctgttcgcggaggcgcggtgcgtgggcgagaagaaggtgggcgacgaggagtgcttcatcctgaagctgtcggcggacgcggagacgctgcggcagcggagcgagggtccggcggagatcatccggcacgtggtgttcgggtacttcagccagcgcacgggcctgctggtgcaggtggaggactcgcacctgacgcgcatccagccgcacgccggcggggacgccgtgtactgggagaccaccatcagctcgttcctggaggactaccgcgcggtggacggcgtggcgatcgcgcacgcggggcggtccgccgtgacgctgttccggttcggcgagacggccatgagccacaccaagacgcgcatggaggaggcgtggaccatccaggaggccgccttcgacgtgccgggcctgtccaccgactgcttcatcccgccggcagacgtccggcgcgactccgactccgtgggcgagccctgcgagctcccgccgcgcggcgccaaggccggcgccgtgcaccccgcgtgcgacgcggtgcactcgcggcggcggcgggatgtggccccggccgatggggagctggcgacaagatctaccggacggtggagatgcgatttctgactgtgggcgacgggactgatcgagcggattcgtatcgtaagagtagcactattactagtagctaggaagaaggcgggggggaattcagcaagcaaacaatttgttcatagtactactagaaaccaaatctctctccaaatactaacgaactccatctcctcctcctaccagtcatcagtgccttgtattctgtacagatcggtgaggaagcgcctcggcgacaatgttgagctcatcaattgtactgtactccagttctagctgtatgaccgtaagaatcgcaagaatttacggtgcacaagtataccaccagattctggatatgagacgatggaactggatacttgttgcaattctacgtcacgtcttactgtgtaggcgccaggatgatcttcaagctgggtggtaaaagtggtaggtgaggtatgtcttgctgtcgacctccgtttcgtttccattccatggctttgggccttttgttttttgcttagaaactactccctccgtctccgttgcttatgaaatagacgggtcttttgttccttttggcacctatcatgtttgaccatttgtctttgtgggagggcgaatccctcggctgagtggcgagagtgtacacactccctcggaggaggagtaggcttaggcgtttgtctcgccttaggctgtctccagcagcgtcccctaaatttcgtcccctaaaggaatattccctgtactttataagacactctaaaagattctgtcctctatatcttctgtgtctccagcaacgtcccctaaattcgatcccctaaagctacagtgttaacagaattcgttttttcttttctttttctgttttctttgttttgtacccatttaatggtactgaaaggatgctaaaaattttgtaatcaataaaatttcaaataataatctaaaaactatggttcattaataa

SEQ ID NO: 156001 - DNA, 2688 bp, Zea Mays
acaaaccccaaacccctcacttgtcatcgacctgcgctttgcatccgtttcttcctccgccttcccttccctttgcagtcttgcactccactacccctcgccgcaccgctctcctctcttgacgcaaacctttccacactgctaattaatcgccatttcctcggaggatccggaggcaatggagaaggagagcaagcagggtttcttttcggcgctcaagggggaagtcgtgcgtggtctctcgccaggcagatcccgggggaagtcgctgctgcttccgcgcagccgcaagacggcggccgcggaggaagtggcgccgccagagaagctcgcccagtacgcgccggatccgctcgtcacccactccggcagcctgcggcttgccggcgaggtcctggcgccgctcatggagggcccggacgtcgccgaggacgacacgttcgccgaggattccggacggcgagacgggttcgggcagtgggtccgcggccacctgacccgtgccccgttgatcgccggcggcggcgacgggtctttccggcgctccgacctccgcctcctcctcggcgtcatgggcgcgccgctcgcgcccgtctcggtctccaccgccgagccgctgccgctcgcgcccgtcaagggcgcccccattgaatcctcgtcggcgcagtacatcctgcagcagtacttggcggcgtcgggtggcgccaaggtgctccggtcggcgcggaacgcgtacgcaatggggaaggtgcggatggtggcgtcggagttcgagacggccacgcgcgtggtcaagaaccggggcgccgccgccgccgccgccgtggagcaaggcgggttcgtgctctggcggatgtccccggacatgtggtacgtggagctggccgtcggcggcagcaaggtccgcgccggctgcaacggccgcctcgtctggcgccacacgccgtggctcggcgcccacgccgccaagggtcccgtccgcccgctccgccgagccctccaggtagcgttcccttcccgagctcgtctggatgcctgccattggttggtgccaaccattgtgtgtgtgtgtgtgcgcgcgcgcgtgtactgtgcagggtctggatccgctgtcgactgcggggctgttcgcggaggcgcggtgcgtgggcgagaagaaggtgggcgacgaggagtgcttcatcctgaagctgtcggcggacgcggagacgctgcggcagcggagcgagggtccggcggagatcatccggcacgtggtgttcgggtacttcagccagcgcacgggcctgctggtgcaggtggaggactcgcacctgacgcgcatccagccgcacgccggcggggacgccgtgtactgggagaccaccatcagctcgttcctggaggactaccgcgcggtggacggcgtggcgatcgcgcacgcggggcggtccgccgtgacgctgttccggttcggcgagacggccatgagccacaccaagacgcgcatggaggaggcgtggaccatccaggaggccgccttcgacgtgccgggcctgtccaccgactgcttcatcccgccggcagacgtccggcgcgactccgactccgtgggcgagccctgcgagctcccgccgcgcggcgccaaggccggcgccgtgcaccccgcgtgcgacgcggtgcactcgcggcggcggcgggatgtggccccggccgatggggagctggcgacaagatctaccggacggtggagatgcgatttctgactgtgggcgacgggactgatcgagcggattcgtatcgtaagagtagcactattactagtagctaggaagaaggcgggggggaattcagcaagcaaacaatttgttcatagtactactagaaaccaaatctctctccaaatactaacgaactccatctcctcctcctaccagtcatcagtgccttgtattctgtacagatcggtgaggaagcgcctcggcgacaatgttgagctcatcaattgtactgtactccagttctagctgtatgaccgtaagaatcgcaagaatttacggtgcacaagtataccaccagattctggatatgagacgatggaactggatacttgttgcaattctacgtcacgtcttactgtgtaggcgccaggatgatcttcaagctgggtggtaaaagtggtaggtgaggtatgtcttgctgtcgacctccgtttcgtttccattccatggctttgggccttttgttttttgcttagaaactactccctccgtctccgttgcttatgaaatagacgggtcttttgttccttttggcacctatcatgtttgaccatttgtctttgtgggagggcgaatccctcggctgagtggcgagagtgtacacactccctcggaggaggagtaggcttaggcgtttgtctcgccttaggctgtctccagcagcgtcccctaaatttcgtcccctaaaggaatattccctgtactttataagacactctaaaagattctgtcctctatatcttctgtgtctccagcaacgtcccctaaattcgatcccctaaagctacagtgttaacagaattcgttttttcttttctttttctgttttctttgttttgtacccatttaatggtactgaaaggatgctaaaaattttgtaatcaataaaatttcaaataataatctaaaaactatggttcattaataa

SEQ ID NO: 156002 - DNA, 2723 bp, Zea Mays
acaaaccccaaacccctcacttgtcatcgacctgcgctttgcatccgtttcttcctccgccttcccttccctttgcagtcttgcactccactacccctcgccgcaccgctctcctctcttgacgcaaacctttccacactgctaattaatcgccatttcctcggaggatccggaggcaatggagaaggagagcaagcagggtttcttttcggcgctcaagggggaagtcgtgcgtggtctctcgccaggcagatcccgggggaagtcgctgctgcttccgcgcagccgcaagacggcggccgcggaggaagtggcgccgccagagaagctcgcccagtacgcgccggatccgctcgtcacccactccggcagcctgcggcttgccggcgaggtcctggcgccgctcatggagggcccggacgtcgccgaggacgacacgttcgccgaggattccggacggcgagacgggttcgggcagtgggtccgcggccacctgacccgtgccccgttgatcgccggcggcggcgacgggtctttccggcgctccgacctccgcctcctcctcggcgtcatgggcgcgccgctcgcgcccgtctcggtctccaccgccgagccgctgccgctcgcgcccgtcaagggcgcccccattgtgcgtacacgcctcggttttttctctcctggatctccactgttttcacgcctggctttggcaaatgcggcagcgttttgggccttgactcctccggcggctctggatctggtatttatggcgttgcaggaatcctcgtcggcgcagtacatcctgcagcagtacttggcggcgtcgggtggcgccaaggtgctccggtcggcgcggaacgcgtacgcaatggggaaggtgcggatggtggcgtcggagttcgagacggccacgcgcgtggtcaagaaccggggcgccgccgccgccgccgccgtggagcaaggcgggttcgtgctctggcggatgtccccggacatgtggtacgtggagctggccgtcggcggcagcaaggtccgcgccggctgcaacggccgcctcgtctggcgccacacgccgtggctcggcgcccacgccgccaagggtcccgtccgcccgctccgccgagccctccagggtctggatccgctgtcgactgcggggctgttcgcggaggcgcggtgcgtgggcgagaagaaggtgggcgacgaggagtgcttcatcctgaagctgtcggcggacgcggagacgctgcggcagcggagcgagggtccggcggagatcatccggcacgtggtgttcgggtacttcagccagcgcacgggcctgctggtgcaggtggaggactcgcacctgacgcgcatccagccgcacgccggcggggacgccgtgtactgggagaccaccatcagctcgttcctggaggactaccgcgcggtggacggcgtggcgatcgcgcacgcggggcggtccgccgtgacgctgttccggttcggcgagacggccatgagccacaccaagacgcgcatggaggaggcgtggaccatccaggaggccgccttcgacgtgccgggcctgtccaccgactgcttcatcccgccggcagacgtccggcgcgactccgactccgtgggcgagccctgcgagctcccgccgcgcggcgccaaggccggcgccgtgcaccccgcgtgcgacgcggtgcactcgcggcggcggcgggatgtggccccggccgatggggagctggcgacaagatctaccggacggtggagatgcgatttctgactgtgggcgacgggactgatcgagcggattcgtatcgtaagagtagcactattactagtagctaggaagaaggcgggggggaattcagcaagcaaacaatttgttcatagtactactagaaaccaaatctctctccaaatactaacgaactccatctcctcctcctaccagtcatcagtgccttgtattctgtacagatcggtgaggaagcgcctcggcgacaatgttgagctcatcaattgtactgtactccagttctagctgtatgaccgtaagaatcgcaagaatttacggtgcacaagtataccaccagattctggatatgagacgatggaactggatacttgttgcaattctacgtcacgtcttactgtgtaggcgccaggatgatcttcaagctgggtggtaaaagtggtaggtgaggtatgtcttgctgtcgacctccgtttcgtttccattccatggctttgggccttttgttttttgcttagaaactactccctccgtctccgttgcttatgaaatagacgggtcttttgttccttttggcacctatcatgtttgaccatttgtctttgtgggagggcgaatccctcggctgagtggcgagagtgtacacactccctcggaggaggagtaggcttaggcgtttgtctcgccttaggctgtctccagcagcgtcccctaaatttcgtcccctaaaggaatattccctgtactttataagacactctaaaagattctgtcctctatatcttctgtgtctccagcaacgtcccctaaattcgatcccctaaagctacagtgttaacagaattcgttttttcttttctttttctgttttctttgttttgtacccatttaatggtactgaaaggatgctaaaaattttgtaatcaataaaatttcaaataataatctaaaaactatggttcattaataa

SEQ ID NO: 156003 - DNA, 278 bp, Zea Mays
tggatgagtggtggtccggtgacgcaatctatgagaaagttaggttcgacggtgaaggagaaacttgcgtcatacgtgtttgacctagctacctcattatgctagaaaataaaaaaagagtgtgttatacctggctatctcactgtatgggaaaggtaaaaataatcacgctagtgtgaagaaattgacgtcaactgtatttagggagttcctaccgagttgctaaatgtggagagtaaatagagttgaatagcaactaagtaaatttagcaagtcta

SEQ ID NO: 156004 - DNA, 246 bp, Zea Mays
atggaaagattgaatgaagggttgtcattatttgatgcaatactgattgttccaatgtttcaaattgtttggaccttcttctctatttgtacaggatttgtttactttcaagaatatcaagtatttgatacgctcaggataattatgtgtgtgttaggcatgacatttgtctttgttgggatctccttgctagcacccgatgacagtaaaggaaagatggttcaagcacctccgaggactccataa

SEQ ID NO: 156005 - DNA, 504 bp, Zea Mays
atggctcatctgcgtgaagtacaacaacgcgaggcaggtgacgacgatgtggatgaatgtattccagaagaatgggggaagcgacgggatatgagagatacacgaagacactgtcggcgagtgcatcatcgccaggattcgtcggtcggtggaaaaccctattccaccgtcggcggatgggtggaggactcaggtggtggaggcatcaggcctgtgcggtcacgcctcgcgacttcatcgttcgcgggagctggcaggtctacggcctgtgagttgaccacaacattgtggggcacgcgcgtgagggagtgggaggagctgcgaagagggacgcggcatggaggcggaggtgggcaggagcaagtggggtggtcgcgcgagaggccatgggttttggcgctgccagcgggagcgaacggggtggacgcgtagatctgcagatgcgagagcgggaggagccacgaaccttccagatggtccgatgcatggacggggaggcgaagg

SEQ ID NO: 156006 - DNA, 377 bp, Zea Mays
cgattgtgaaaaactgaaaaatgtttagttgaaacaactattaactatagattttataagagtgtgacagcttataatatgaatgatagaaatctaaaaaatctagggtatgaggtgattctgaattgaactagagaaatatattatgctattgtacctgtttagttgagattctagatttttagtactgaatctagttaagaaagatgagccaaacacgcccttatatatgcacggatactccgcgttagttaggccatatgaaacccaaactgggtactagtataagtttgatgcatgcatatgcatgtatcattaccatgtggaccaaaagtgaaaaaacacacacacacaaacgagtaaaagcgacccaaaag

SEQ ID NO: 156007 - DNA, 618 bp, Zea Mays
cgcggtgtcggcagcggcggcggcgtcgccactgggtccgggggcctcggccgcggacgtgggcgcgtcggcggtcttgggcttcttcgcgacgggggccggagcaggggcagaagcgcccttcttcttcttcgtcttgtccttggaggaagacgacggcttcttcttcttggcgggcgcgggggcgggggcctcggcgggcttggtctccggcgccggcgccgcggagggcacctcgggcacgggcgcgggaggcgcggcggccggaggtgtcgccgcggggggagtggcgacgggcgcaggcgcggcagcggccggggccggggcggcggccttggtgtggggcgcgggggccttgggctgcggcttggctggcgccgctgcgggggccggggtggttggcgcggcggccggcgctgctgatgggctactggccttggaggaggacttgggagcgggcgcagccggggtggcggacggcgcggcggtgggcgtgtccttggagggcttgggcggcgccttggctggcgcggccgcgggggactgcgcgacggagctagtggcgaagagcaggcagaggagcgcggcgtagaggacgacggtggcccgcgccgccat

SEQ ID NO: 156008 - DNA, 81 bp, Zea Mays
ggcgagcagagccgccgcacccagcgccaccgcgacggccgacgacaccatcacgcccgcctgtgtcctccctgcggcgcc

SEQ ID NO: 156009 - DNA, 792 bp, Zea Mays
ctcatcgatcgaacttgctaaaccagcggaaacctaaccagctagcagcattagcttttcaacaagcctcgctcgcgcgccgtgaccgatagatggccatcacccacgacgactacgtctccctgtgcctcatggcgctcgcagccgcgggaggaggagggcacgctgcggcagccagtgccaggacgacgacgacaatgacgacgcaagagtgcgagctccgcttccggtgctccgtctgcggcaaggccttcgcgtcgcaccaggcgctgggcgggcacaaggccagccaccggaagccgccgccgccgctcgcacaggcgccgtcgtcgtcgtcgtcggtgacgacgaatacctcgtcggcgggcggcagcggcgccgggcaggggaggcacaggtgctcggtgtgccaccggggcttcgccacggggcaggcgctcggcgggcacaagaggtgccattactgggacgggctctcggtgtcgctcaccgcgtcggcggcgtcggggtccgcgtcgagcttgaggggcttcgatctgaatttggtgccggccgccggcgcggcaaggtggcgagaggaggaagaggtgcagagccccttgccggtcaagaagcggcggctgtcctccggtccttccaccgaacttagtttaacgatttagagttccttttggcgatctgaggcttgtagagtgttttcgttgcttcattcttttaaccgtattttagtttttgtgtttgcgcggtgaataaacgtgtatttaattttgtcgagccatatatacttgagat

SEQ ID NO: 156010 - DNA, 938 bp, Zea Mays
caacgccgccgatccaatccatccttcttccagctctgctaccgtagcgtagagacgcgtgcggagcagcctgagacctacagtagaactagaagttagcctgagaccagcgagttttctcagcacctgtcgtcatcagatcagctagccatggacggcggtttcccagcacttcttgaccccaccgcgctctcactggcgctgccggtgacccagggcccgcaagggctcaataagctcagcaaggacgactacctcgccatctgcctcgccgcgctcgccggcacgcgaggaagcagcctcgtcgtcaaggccgccgctgggttcgggaggcaagagaccggcggcattaataagcagtcgtggtgcccaccgcagccggcccccgccgcgcacgacgaggcgctccggctccggttccggtgcgcggtgtgcgggaaggcgttcccgtcgtaccaggcgctgggcggccacaagtccagccaccgcaagccgcccacggcggagcagcaggcggtggtttccgcggccgactccgaggacgagacgacgacgtcctcgggaggaggcccgcaccgatgcacgatctgccggaggggattcgccacgggccaggcgctcggcgggcacaagcgctgccactactgggacggcgcgtcggcgtccgtctccctgtccgcgtccggtacggggtcgtcgggcgtcacactgaggaactttgacctcaacctgatacccgtggcggagaacgctgggatgaagaggtgggtcgaggaggaggaggtgcagagtccactgccgatcaagaagcgcaggatcttggattagttattagctctcggctctcgcgctcctaccagcggttgagacctgtgtgcccatagcctcggttcgtgtaaaaaggaagattgattgtttcatcgattatttgattcgtt

SEQ ID NO: 156011 - DNA, 1406 bp, Zea Mays
ccaccaaaccgccgcgcctatcgacccagtctgtgaccacgtcccacgcctagtcccgctggccgctgtcgccgaaacacgggcagcaggagcagtagcgtccgtccggtccgcgcgcgttcccctccccgaccggcaggttccccggccattcatccgtttcccactgctcctccgtggctcagctctgctccctgtatcggtctgcccctctgccctcccggtctctcctcttcccgtcccgcccagcgcgtccaccaaggaagcccccacgccacggcatggggatcgtggaggaggcgcacaacctgcgcgtggtgggcgaggggaagcgcggggtcatcgtgctggcgcacggcttcggcaccgaccagtccgtctggaagcatctggtgccgcacctcgtcgccgactaccgcgtcgtgctcttcgacaccatgggcgccggccccaccaacccggactacttcgacttctcccgctactccacgctcgagggctacgcgctcgacctcctcgccatcctccaggagctcggcgtccaatcctgcatctacgtcggccactccgtctccgccatcatcggcgcgctcgcgtccatctccaggcctgacctcttcaccaagctcgtgctcctctccgcgtccccaaggtacctcaacgatgtggactactatggcgggttcgagcaagatgagctggatgagctgtttgaggcgatgcaatcaaactacaaggcctggtgcttaggttttgcacccctgtgtgttggaggagatatggaatcagtggcagttcaggagtttagcaggacactcttcaatatacgtccggacattgcactaaatgttgcccagacgatcttccagagcgatgtgcgcagcctcctcccgcacgttagtgtcccatgccacattgttcagagcaccaaggatctcgcggtgccagttgtggtgtctgagtacctgcacaggcaccttggtggcgactccatcgtggaggtgatgccctctgaaggccatcttccccagcttagctctccagacatcgtaacccctgtcttactccggcacatccagcatgacatcgcagtctaggttggccagtcgttccaacaagacaatgtggaaattgtagcatatatatatgaccatgtaatctattgttcgtctaatgtaggataccgtgttggatgctctgacatcttaagtccttgagaagctcttcatgtcatttgtgttttttccatgaaacagaaactactaccatgtggtatatgttggtgtcgatgatcattttgcgctgtagggtttgcttatatagttctgggcttctttgcaaaggagaaaaaacaagcgaagctacattgttgttaaggggtgtaaatacatctaaaaaataaaaaa

SEQ ID NO: 156012 - DNA, 1266 bp, Zea Mays
acgacgcttggcacgacgcagcgcatgttgtactcgtgcccaattatggccggtgcgccccggacgacgtgaaaagacgatcaacatggacccccaaagcagcagcaggtgcacctagccccggtcacccacttaaataagagaaacacaccaccaccaattcactcacgaattccccattcccttcccccatcgcatcgagagccaggccagccagccacctctgctaggtctccatggccgccgcgctcaggtccccggcctcggccaaggtctcgagccccgccgccgcctccaaggtgcgccaggcgtccagagtcgcggtgggcgggttccggcagcatccgcggagccgtgtcggccccgtggccgtgcgggcgtcgctgttctcgcccaagcccgcggcggccaaggacgcgcggccgaccaaggtgcaggagctgtacgtgtacgagatgaacgagcgggaccgcgagagccccgcgtacctgcgcctcagcgccaagcagacggagaacgcgctgggcgacctggtccccttcacaaacaaggtttacaacggcagcctggacaagcggctgggcatcaccgccggcatctgcgtgctcatccagcacgtccccgaccgcaacggcgaccggtacgaggccatctacagcttctacttcggcgactacggccacatctcggtgcagggcgcgtacctgacctacgaggagtcgtacctggccgtcacgggcggctccggcgtcttcgagggcgcctacggccaggtcaagctccaccagatcgtcttccccttcaagatcttctacaccttctacctccggggcatcccggacctgcccagggacctgctctgcacgcccgtcccgccctcccccaccgtcgagcccacgcccgccgccagggccgccgagccgcacgcctgcgtcaacaactacaccaactgactgatcaactccagcccaggaaccatctctgcctgccatgcctgtccctcactcgatttgtatgtttgtatggcttaggtccttcgattcgtacgttcgtgcgtggtagcaccaataaacatgcgatcgattgagttgtgtgtgcttctccattcattcacttgctctttctgcagctcgtgatcgagttgtgtgtgctccattcccaaattatgtatgatcgattagtagcgttaggggttaaccagtagccgctgtgtacttgtgtcacccttggacaaacaatgagatatttctttgtcgtcgagtaatc

SEQ ID NO: 156013 - DNA, 1455 bp, Zea Mays
gacgcaccgcacaccctagcataggaggcaaagaagtacagagggaggaggcgggcagcagatacgcggcgtgacagacacccagggccaggaagggtgctgtttatccatgctgctccggctgaagatcgtcgtcggcgtccactcggtggtgctcccggttcctgttccaggcggctatggccatggcgcctgctacgcggcagtagagccctgctggcgccgcagccggaggccagcgctagcggcggcgggtggcctcgtcgcgaggcggccgaggcagagcgccacggtggtgatggcgctgaaggaggagccggagggcagcagccgccgcggcttcgccggcggcggtccgagctgggaccccgggctggagatccaagtccccttcgagcaaagaccggtgaacgagtactctgctctcaaggatagcgccctctactcgtgggcggagctgagcccagggtccttcttcctccgcctcggcggcctgtgcctcgtgaccttcactgtgctcgcggctccaattgccgccgcaagcttcaatccaggaaaggatccactcaagttcgtgctagcagctgggatcgggacgctgcttctggtgtcactggcggttctcaggatatacctggggtggagctacgttggtgatcgcctgctgtcagcggtggtaccgtacgaagaaaccggatggtacgacggccagatgtgggtgaagccaccagaggtgttggcccgtgacaggctcctgggatcttacaaggtgaagccggtggtcaacctgctgaagcagacgctggtgggcaccggcgcgctgctcgtgggcgccgtgtcgctcttcgcgttcgccgcgccggtcgaggacttcctccacgccctgagccagcctccctcctccgccaccgcctcgtccaagccgagcttgaggaaggaggagctgctgcggctaccagtcgaggtgatgcaggacgacgacctcgctgcggccgcggccgaggccgccgacggccggcccgtctactgcagggaccgctactaccgggccctcgccggcggtcagtactgcaggtgggacgacctgctcaactgataaatacctagagcagtattgctgtggtacgacgcggcaggacaggacgtattttttttgtcagatgggaaatttcggactgaactgctagaaattgagttcttaatggcacacaagcataaggaacagcaagaaaaagcaacacagaatcagagaaaaaacaagagtttatatattcacttttctctctttgtttctggagttacatctggtctttccgtttcttgagttacctctgatctttttgtttcttgagttacatctgtagagagtgaccttttatttacagcaaaggatgcaagggttaatacacattacagtgtgtacttctcagtttctcccctctaactaattttgcc

SEQ ID NO: 156014 - DNA, 1516 bp, Zea Mays
gacgcaccgcacaccctagcataggaggcaaagaagtacagagggaggaggcgggcagcagatacgcggcgtgacagacacccagggccaggaagggtgctgtttatccatgctgctccggctgaagatcgtcgtcggcgtccactcggtggtgctcccggttcctgttccaggcggctatggccatggcgcctgctacgcggcagtagagccctgctggcgccgcagccggaggccagcgctagcggcggcgggtggcctcgtcgcgaggcggccgaggcagagcgccacggtggtgatggcgctgaaggaggagccggagggcagcagccgccgcggcttcgccggcggcggtccgagctgggaccccgggctggagatccaagtccccttcgagcaaagaccggtgaacgagtactctgctctcaaggatagcgccctctactcgtgggcggagctgagcccagggtccttcttcctccgcctcggcggcctgtgcctcgtgaccttcactgtgctcgcggctccaattgccgccgcaagcttcaatccaggaaaggatccactcaagttcgtgctagcagctgggatcgggacgctgcttctggtgtcactggcggttctcaggatatacctggggtggagctacgttggtgatcgcctgctgtcagcggtggtaccgtacgaagaaaccggatggtacgacggccagatgtgggtgaagccaccagaggtgttggcccgtgacaggctcctgggatcttacaaggtgaagccggtggtcaacctgctgaagcagacgctggtgggcaccggcgcgctgctcgtgggcgccgtgtcgctcttcgcgttcgccgcgccggtcgaggacttcctccacgccctgagccagcctccctcctccgccaccgcctcgtccaagccgagcttgaggtgcgcggccgtcacgtactcacgtgtgcccacggtccacggcgaacatatgctgcaagcaaagctctttgcatggaaggaggagctgctgcggctaccagtcgaggtgatgcaggacgacgacctcgctgcggccgcggccgaggccgccgacggccggcccgtctactgcagggaccgctactaccgggccctcgccggcggtcagtactgcaggtgggacgacctgctcaactgataaatacctagagcagtattgctgtggtacgacgcggcaggacaggacgtattttttttgtcagatgggaaatttcggactgaactgctagaaattgagttcttaatggcacacaagcataaggaacagcaagaaaaagcaacacagaatcagagaaaaaacaagagtttatatattcacttttctctctttgtttctggagttacatctggtctttccgtttcttgagttacctctgatctttttgtttcttgagttacatctgtagagagtgaccttttatttacagcaaaggatgcaagggttaatacacattacagtgtgtacttctcagtttctcccctc

SEQ ID NO: 156015 - DNA, 1114 bp, Zea Mays
tagcataggaggcaaagaagtacagagggaggaggcgggcagcagatacgcggcgtgacagacacccagggccaggaagggtgctgtttatccatgctgctccggctgaagatcgtcgtcggcgtccactcggtggtgctcccggttcctgttccaggcggctatggccatggcgcctgctacgcggcagtagagccctgctggcgccgcagccggaggccagcgctagcggcggcgggtggcctcgtcgcgaggcggccgaggcagagcgccacggtggtgatggcgctgaaggaggagccggagggcagcagccgccgcggcttcgccggcggcggtccgagctgggaccccgggctggagatccaagtccccttcgagcaaagaccggtgaacgagtactctgctctcaaggatagcgccctctactcgtgggcggagctgagcccagggtccttcttcctccgcctcggcggcctgtgcctcgtgaccttcactgtgctcgcggctccaattgccgccgcaagcttcaatccaggaaaggatccactcaagttcgtgctagcagctgggatcgggacgctgcttctggtgtcactggcggttctcaggatatacctggggtggagctacgttggtgatcgcctgctgtcagcggtggtaccgtacgaagaaaccggatggtacgacggccagatgtgggtgaagccaccagaggtgttggcccgtgacaggctcctgggatcttacaaggtgaagccggtggtcaacctgctgaagcagacgctggtgggcaccggcgcgctgctcgtgggcgccgtgtcgctcttcgcgttcgccgcgccggtcgaggacttcctccacgccctgagccagcctccctcctccgccaccgcctcgtccaagccgagcttgaggtgcgcggccgtcacgtactcacgtgtgcccacggtccacggcgaacatatgctgcaagcaaagctctttgcatggtgcgtctcttctcttgttaactgcagcttcgtttcatgatgcgtgcaacgcatcgcccctacgcaggaaggaggagctgctgcggctaccagtcgaggtgatgcaggacgacgacctcgct

SEQ ID NO: 156016 - DNA, 1990 bp, Zea Mays
atgggcaactgctgccgctcgccgaccaccatcgcgtgggaggacgtcagctcctcgcacttccccgcatccaacgcaaagaagaagccgcaccaagcgcggaacggcggcggcggcgacgggcagaagcggctctcggttctggccgggcgacgaggggagctgctcgcctgcaagtccatctccaagcgcaagctgcggacgaccatcgacgtggaggacgtgcgccgggaggtggccatcatgcgccacctgcccaagagcccgagcgtcatgtccctgcgggaggcgtgcggggacgagggcaccgtccacctcgtcatggagctctgcgagggcggcgagctcttggaccgcatcgtcgcgcaggggcactacaccgagtgcgccgccaccaatgtcacccgcaccatcgtcgtggtcgtccagctctaccatcggcatgacatcatccaccgcgacctcaagccggagaacatcctcttcaccaataagaaggagaactcgccactcatggtctctccatcttcttcaagcctaaaagaaattggtacactcaaataccatccaaagtctgctcggttatactttattactcacggtaaggtcccatacttggaggagatgagaaagaagaaagttgaaagatgggaccaatttgttgatgtcatagagcaaattaagaaggttgcatctgaaatcaggcctgcagattttgtaccctttagaattcatgtggatcagtctgatcagtctttaagaaagctggaggagctaacgaaagagctgcaatcccttcagaaggagaagagtgatcggctgaagcaagtcatggaacatcttaacactttgcattcgttatgcgaggtgcttggtgtagacttcaaacaaacagtaaatgaggtgcaccctagcctgggtgaggctgatgaatcaaagaacctaagcaactgtacaattgaaagccctgcatcagctacaagcagactgcgtgaattgaaagtccagaggatgcaaaagcttcaagatttggcctctagcatgcttgaactttggaatctcatggatacaccacttgaagaacagcagatgttccagaatgtaacgtgcaatattgctgcttctgaacatgaaataactgagcctaacaccctctctattgacttcctcagctacgtggaatctgaagttttaagactcgagcaacttaaagcgagcaagatgaaagaccttgttataaaaaagaagacagaactggaagagcataggagacgtgctcatttgtttggcgaggaaggctatgcagctgaatttcgcgatgaggctattgaggcagccataattttccagcctatcttacatcccctaaaattacagttggatgacacaatcatcaaaaccattgagactgctcccaacaatgaactgaaaaaagcaaaagaaatcattcaacgtattcgccgaagagaactttacaaggctggaaaaaagttgcttctcattactaattcagatttccattatacaaacaaaatgatgaatcatgcattcaatcgctttcttcctaatgatgtgggatggagagatctgtttgaaatggttatagtctctacaaggaagccagaatttctccagctttcacatccattgtatgaggttgtaacagatgatggactgatgcatccctgttttaaagtaaattcagttttgcaaccagtattctgttccaaaggacaaactagagcatttcaaaaatattactgcacaggacatagtttgttcgcagaaatcttctgaggtgctgctgaaggaagaggatgttgcagtaagcaatgttaagatagatcttactcgtggaaaagataacccccttgacagcatcaagttctttaaggattccggctctcatcaagtgactcctcccctcacgatgactttgcggacagatgtctcaattctagtggtggagctacgaacaacaatccgatgt

SEQ ID NO: 156017 - DNA, 1005 bp, Zea Mays
ctcgcccacttggtgtggttagagtcagagaccagcgctggccgcccggccatggagaagaagccgctgatgccgctggcggtggcgcacaagcacgcccacggtcacggaggcggcgcggagcggacgtgggcgcggccgtggcgatgggccaagaccgccttcgtcctcgcggccatgctcgcgtcgctcctgctcgtgtgcgcgccgccgctgctggtcgtgctcctcgacctcgcgctcccgccggcgctcctgtccgcgaccctccgcggatcgctcgcgccggcggtcgtggcccaggcgcgggccttcgacttccgctcgtcgctcgtcgacctgcccgccgtgtccgcggcgcgcgcgctgctcatcctctgcgcgtacgtggtgtgcggcggcgacgcgtacctaggggtggtcgtggcgtgcgcggccgggtccgtgtcctacgtgctcgccaaggccgcggccgtgctgccgcgccgcgccgtggccgctgcaggtgccggtccggaggccatgctcctgctgtccctggcgctcgccgccgcgcacctcggcgtggcgtacaggaccagctgccgcgagcgccggcgaaggctcgtgtacaggatggacgtcgaaggcgccgtgaggttaaaaggaggccatcaaacacccaaagggctgaagcagtgtatcgtctgacactctgctcccatcatcctcaccattagcgtccgctgcatcaccattcaccatatacacgtacgtacagaaagattaaccaagtttttgttgggttcgccttcgtcaagtgtacactaaggctatctccagtagctttcttatttcactctctatctcatttctccatttcaaacttacaatttacagtaaaaaaatagtactgctgtttgcactaaacggccatatgcttactattacccgtgtaactactgtcagtcctgtcactgctgcaagtgaacatactgtgaatactaaacggccatatgcttacta

SEQ ID NO: 156018 - DNA, 76 bp, Zea Mays
gaaatcatccttcatcatatactcccttgtgctattaacatctctcttgagtattttcaatgagtttggaaggaaa

SEQ ID NO: 156019 - DNA, 2498 bp, Zea Mays
accccgccccgcatcccgcgaccttcttcctttgctgcctcctacccgcatcccaccggtggatgcaccccgcaccgcatcccgcgaccttcttcctctgctgcctccacgggagccttctcatctccacgcgtcgttgcgtcagatccatctgccgctagagcaaaccctacccaatgaccacatgcattcttactggggcgacgccactatttgcgcagaggagcagatatggcgcatcggcatgtactccgtcgctgccctcctcgactccgcctctttctccaacgccacaggcaaggagatgcctgcccaccgccctggcacctcccgccctcgccgcgcacacccccaagccccgcggatcacaattgcctctaccctagcgggagccgcgcccgcacccacattacccgcatgatggcaagaggcagcggcacaaggccacggcgactcctcagtagaggaacccgatcgagcgcagcaacacaaatcttcaatctcaaatccctgctgtgagaaaagagagctcccacaagtggtatggctcgatagaggttatttggatctatgatgcgatagaaattcatgagtttttaggatctgttgtgtacatgcatggtttaaagataggggtgacgagcagccgcgggtggctgagcacttgctgtcttgcatcagggctgaaggcagctgcagggattacgtggctataaagatggatggctcgagtattctgcggcttcttcagagtaaagtgcttttggtaaggataactgcagtgggtttgctcatggaactggtctgcttaagaaggagagaaatggttgaattgctcctgcatggatcgagagcagagttgatcgtggaggcaatggatgtgctgctgaagtacctccggagcttgcccgcagaagaacaagccccaatcgccgttctactgatgtgtttggatgcattggtggagccaaacagaaacaacacgtacagagaagaggcgatcaagaccatcacacattctctgagatgctgcctgtcagaggacactgccgtgcccagcactcggagagctctgctgctgctgggagggcagttcaacttctcaggcgaccttcacgcagaggactggatgctggaacatgccggcttcgtcgaccactcacaggccaccactgccacttctgatgctgttgtacacgacaaggaagcggccgaaaacgatgcgtggctgagacacgtggccgcgacactactcggcagccgtagcaggatcaagagaccattcctggaggcgttgtccaggtgcctaggctcccccgatgtcggcctggtgggggcgtgcctgacgatggcctagtggaggttatcagtgagaaagtagatatctgggtaaaccacctcttcaactatgattttgcactctggttttatgcaaatgttgcctatcatattattgaattgcaatttttttactgattaaatactaatagtgccatgagttaacgttagtgtttgtgattttttacaggctcttgggtgtctcttgtatagaatctgcacagaatattaactgttggttatgattatggaaggtcttgttttcagctcatgaatataggtttcaaattttagttgttttttattaggatggtcgaatataaaagtaactgattttattgtatgtgcctgattaatctaaaagcattgaaataattctgctcttggctcgagtatgtatctgaagtatacagagaaatggaacgtgctggatgcgctccagatagaaaggctagagaaatgtttcatataaaaatttttactaccgtcgcaatgcacgagcacatacctagatgagtctgtctgttactgcgaaaagctacatacaaattataattgagggcacattttcattactaatagtttttttgttttccttctttttttacctgaggttacaaagggtgcagggtattctccatggcagtgtgtccaatgatcctaaacatgacaatatgtattttctctttattatcaattcatctatattgtgaaaatctaaaagaacgtggaacctgaaactattgtctggtgggctggtggctgattttcattcaattgggctggtacacctctgttttgactcccatacaccaagaatcaagggcgcctgcatccgtgggagtaagactctccggctttgaaggaggagacaaagccgaagggcagacacattgccttctgttcatgctgcttgatgttgaaacaccaaccactcaccagtcatttactctctcacttgctcattggatcatgtgcaccaccatagttagaaacctttatgtcacagtcagcgcaatgcattgggattttttttgctatgcacagaatacgaaggttatattatctctctatattttgaatgggagtcattgaagcataggcaaggtacttgtatttggatctggcataattacaatcatcctgtcatcatcagtttc

SEQ ID NO: 156020 - DNA, 1106 bp, Zea Mays
gtaccagtagcaggataactaaacgaaaataaatgaatgaatgaatgaacaagagtaagtaaaggggcgggttgccgctgaagactttcccaaacccaaactaacccttctaatccaaggctgtgaagggagctgctagccgccaccagccgccatgtctggagggatcgcgcgcggccgcctcgccgaggagcgcaaggcctggcgcaagaatcacccccacggtttcgtggcgaggccggagtcgctgaccgacgggtccgtgaacctcatggtctggaactgtaccatccccggcaagcacgggaccgattgggaaggtgggtactacccacttacccttcatttcagtgaagattacccaagcaaacctcccaaatgcaagtttccacagggttttttccatccaaatgtttatccatcaggaacagtctgcctctcaattctgaacgaggatagcgattggagacctgctatcactgttaagcagattctagttggaatacaggacttgcttgatcagcccaatccagctgatcctgctcagactgatggttatcacctattcatccaggatcctgcagaatataagcgacgtgttcgtctgcaggccaagcaatatcctgctctggtctgaggatgttggcatactagagatccatgatccatcctgcaaatctgcatggtagttgcaaaatgtatcgtctcaatttggattagacaggatacaagttatctggcggattgcccagtgtaaacctgaaccttttatgatgtgtggtgtccggtattggcagcaaaaaacaattcgtttactgctgttgtcgtattatacataggaggggccttcgtcagggagatcctctctcacccatgctgtttattttagtaatggatgtcctaggttttctgttttcgaaggctgaagaagaggggctgctgcaacagctttcatgtagaaagaaacttcatcgggtctccatgtatgtagatgatgttgctctcttcttgcatccatccacagctgatatggccctctctcttgatattttaaaactgttcagggatgcatctgggtagcacaataatgctcagaagtcaaaagt

SEQ ID NO: 156021 - DNA, 1053 bp, Zea Mays
gtaccagtagcaggataactaaacgaaaataaatgaatgaatgaatgaacaagagtaagtaaaggggcgggttgccgctgaagactttcccaaacccaaactaacccttctaatccaaggctgtgaagggagctgctagccgccaccagccgccatgtctggagggatcgcgcgcggccgcctcgccgaggagcgcaaggcctggcgcaagaatcacccccacggtttcgtggcgaggccggagtcgctgaccgacgggtccgtgaacctcatggtctggaactgtaccatccccggcaagcacgggaccgattgggaaggtgggtactacccacttacccttcatttcagtgaagattacccaagcaaacctcccaaatgcaagtttccacagggttttttccatccaaatgtttatccatcaggaacagtctgcctctcaattctgaacgaggatagcgattggagacctgctatcactgttaagcagattctagttggaatacaggacttgcttgatcagcccaatccagctgatcctgctcagactgatggttatcacctattcatccaggatcctgcagaatataagcgacgtgttcgtctgcaggccaagcaatatcctgctctggtctgaggatgttggcatactagagatccatgatccatcctgcaaatctgcatggtagttgcaaaatgtatcgtctcaatttggattagacaggatacaagttatctggcggattgcccagtgtaaacctgaaccttttatgatgtgtggtgtccggtattggcagcaaaaaacaattcgtttactgctgtaagtgctgcagccactgatattttgtctatttaacttgactgtttgtgtgttggtagtctatcttgaagacaaatgtttatcaagaaagttatatgcttagaagatgtattatgtatataacttttagcttttttgcccccgtctgttgtcatttcaaattgcagtatggcacttacacaagtgattgtccagttttgtgggattctttctttttttttaaaaaaacaaaa

SEQ ID NO: 156022 - DNA, 150 bp, Zea Mays
tagtatttgcaatacttcagttttgaaaacagagattttagtaagcttgccaaataccattctgtatataatattgcagtattttagaatacttcagtattcttccaaaactgtgaaaaaacttcactcccaaacaccccctaggcctcc

SEQ ID NO: 156023 - DNA, 1138 bp, Zea Mays
atggagttcacgcccgcgcatgcgcatgcccgtgtcgttgaggattccgagaggcctcgcggcggcgtggcctgggtggagaaggagcacatgttcgagaaggtggtcaccccgagcgacgtggggaagctcaatcgcctggtcatcccaaagcagcacgcggagcgctacttccccgcgctggacgcctcgtccgccgcggcggcggcggcggcagcagccgcgggaggcgggaaggggctggtgctcagcttcgaggaccgggcggggaaggcgtggcgcttccgctactcgtactggaacagcagccagagctacgtgatgaccaaaggttggagccgcttcgtgaaggagaagcgcctcggtgccggggacacagtcttgttcgcgcgcggcgcgggcggcgcgcgcggccgcttcttcatcgatttccgccgccgtcgccaggatctcgcgttcctgcagccgacgctggcgtctgcgcagcgactcctgccgctgccgtcggtgcccatctgcccgtggcaggactacggcgcctcggctccggcgcccaaccggcacgtgctgttcctgcggccgcaggtgccggccgccgtagtgctcaagtcggtccccgtgcacgttgctgcatccgcggtggaggcgaccatgtcgaagcgcgtccgcctgttcggggtgaacctcgactgcccgccggacgccgaagacagcgccacagtcccccggggccgggcggcgtcgacgacgcttctgcaactgccctcgccatcgtcgtcaacatcctcctcgacggcagggaaggacgtgtgctgtttggatcttggactgtgaagacaatcaacatcctctagcaaaaagaaggagaaattgggtcgaggaactgatggggcactgacacacgaactgatatggctccagtactgcatctgcatgtgtaattgttgatgaattggtatttcttgatgatatcctgctcatataatcatattagctcatttgtgctttccgtaactaatgtgtgtttcttctcttttcttgatttgatctttgttccgaggatatgatatcgatcttgctcattataaatgtacatattctgaatcatctctgactaaattcagtaattatttaagaa

SEQ ID NO: 156024 - DNA, 358 bp, Zea Mays
atattttcacataagagtctcaggaaccgtgcctaatctcctctccagttgaccagtatggcggttcacctacaaaatgggagcatgttctgaaggagaatttcttccatccaggcaaataggtgaaatctgaaccataaaccagaaagctatggtttcagctcatgttgcttcaaaatgttgatgcttcttgtaaatatgatatatacatcctctcctccccaacctttatcagtatgttcaataatctgcatatcggtgatcatgtaacccctcatggtgctatacggaagtaatctggtttttctgcttgggtctatgccaaagtttgtctataaacgacactatggtctggact

SEQ ID NO: 156025 - DNA, 1164 bp, Zea Mays
atgggagtttcttgcctgacggcttttgctgggctggcagcgaggcaaagcagcaatgacaccactagcccagcaggaggatttctgtctagtggagttgaggcttggggaacaccggcgctttattattttgattccgtgtggaatgaacaaaagggtcttagataccaaactactgataagcagtatggaaaatggagtaaccctgatgacaaggcaacagtggggaactatttcctcaattcttgtggagagatccaccttaatccggagcatttagggaatgagagactaatgtggggatcttctgaaatgaaacatgatctaggaagttttagttccaaggtttcttcggctgagtctagatttattcagacttgtgaaggttcatctgagtttcctgatgtcaataacactagtgttgattcgccttgttggaagggcacaccagcctcgtaccagtgttcgtttgggattatggaaaataacggtgttcctcctgtggcgataagaacagcaggctacatcaattcacataaaaaccagaagccccctgagttgggttctgggtatccatggcgattctgtgaacaccaagtagcattgagttctgagattgacccttttaaggtgttcaagttgcccgaaagatgtaaaatctccaaagatcataaagaagttccaccaattgatgtcaaggttcttaatgacatgactactcatgcttgttgtttgcctgacaaacagcattccgcaacacagaaatgctatgattctagagaagattctcagaatgtgataacttcaagtcaacgggaaagtttgtgtcctgccagcaagccaaaacttttaggtgaacatggtggcaaccttatagcaagcataaatgaactaatgaataaaagtgtgatgaattctattgctattactcctagaattcatactgatcatttaacaacaggaagccaacatggaatattttttctgcagttgtggagaaggaagaaagcactcacacaagaggtgaagacccttctcaatgttatccagggtggttctttgttgcacgaagatgaagaggaccttctgcaatcagtgattcaaaatcttacagctgccagttccaaaagaagcaagccatttcttccggagaatgtaccttag

SEQ ID NO: 156026 - DNA, 1876 bp, Zea Mays
aataggagcgagatccgcatgtccgccggcgagcgcacgcatcggcatcgcactgctagagccaccacgggccgaggcccgcatgccgccggcgatcgcacgcatcgggcatcgcattcgcagcgcgtccagccgtccacgtccccaagcgccgtcgcgccatcaccgtcccctccccacccgctctgccgttgcgctgttcccatcccgccgacccgctgcgccaccgccacgctcgccaatctccatccctaaccccaaccccggccggccagccccaccatcaccccacccccacccaccaacccaccacgcgacgcggctgtggcgtccctctaatctcgttcgcttccgctccacgccgcacccccggccgactgcctaacctcgtgttggccgcgatcccgctcccgcccagatctggtggcgccttcgccgctcgagcgcgtgccctcacgggtggagtgcaggcggccgctcggttcagccggctggccgatggtttcggccgcggcgcaggcgggtgtggtcgcggcgtgcgtcgtgctcttcgtccccatggggctggccggctggcacctcagccgcaacaaagtgcttttcttctccggcgcgctcttcatctcgcttgctgtcggggtccacctatccccgtacctcccctccctgccccacctcgcctcctccttcctcctcccccactccggcgccgcgtccgcgtccgcgtcctcctcctctgggtcttcctgcgtcccgtttctgcaccgtgtgtcgtggtctgacgccgccggcgccgcggacgacggctcgggaggcggaaaggcacgggcgtggtcgtggccgccctcgctggcgtccgcctgcgggttcgcgcggctgtcgcgcgatgacgcgtcgctgctgcttaacggctcgtgggtgatggtggccggggattcgcaggcgcgactgctcgtcctcgcgcttctccgcctcctgctcgacccggccgcggcggcggccgccgagccggagctcttccgccggcacagcgactaccacgctgccgtccctgcgcggggcatttccgtggacttcgtctgggcgccctttgagagcaacctcacgcgtctgctccgcgaggatctgcgcctcgcgccgcgtctccccgacgtgctcgtcctcggatccgggctgtggcacatgctccacgtcacggacgccgcgagctacggcgatgcactggcgtccgtcgcgggcgccgcagagtcgctccgctcgcagcttcccgtgccgccaccacatatgttctggcttggcttgccgcacctcttgaaccacatgctcaacacagacgccaagagggcacacatgaacggcaccatgcttcatgcctatgatcgtgaggtcgatcggaggggtgttttgcgccgtgatggtggcccgttcctgctgcttgatgtggggaagctcacccaggggtgcgggcagcagtgcacagcagatggtatgcattatgatggtggtgtgtatgacgctgtcatgcatatcatgctcaatgcactggtgattgagtcccaacaaaggatttgagtgggtggggggttcttcaacaggtttgcccccaaccccttgttctttttggtcagtcacggtacacaggtaaccagagattgttgtgaactagggaaggttctttgattgcttcaacattttggtcgcttgccacaagtcacaacccttgaattgctcaacctttagattgtaaaatagggatatcctagaaccacactgttctttgctgaatggcaaaccgaactagctgtactgtatacttcttggtggaataactaagatggtgattctgacacgaagattgtgaaatgctacgaaatat

SEQ ID NO: 156027 - DNA, 1295 bp, Zea Mays
atggcaaggaagacaagagtccctgaagaaggtgcaagcatggaaattccaacacgatgtcgtcgatcccatcgttcttctaacacaaccacggggaccctaccacaagaggttcttgcagccctgacgtctgccttcaacctcgatgggtcggcgaaggagaacttcgaggatgctttgcttgcgatgctttggcccttcgctgatagagtggcaaccttcaagtcgggcctagtggcaccagaggagggattacgctgctatggagcaccatccatgtggaactttctgattttttttgtgggtgatttccacatttctgtcaagattggttcgtctcttcggctcctccttggcttcgcaagagtggtgccgccagtagctcctccgcgctccgccgggaccgacttgccgctggccgccaggggctccctcgcccaggaccggctccgccgtccaaccgtcctatcccctccggcctccgcccagattttattcagtattcactatatggcatttggttgtaaatagactacgatcacgatgactcttgaataagtgcgggaagcctacaacactgggtacacccttttttaaagaagggtgggcctagcgcagcggtagagcctaccgtctgtaactggaaggtcctgggttcgagccacaacctcatattatgcgggtaaggcttgacgcttaaagatacccttctccagaccccgcacagtgcgggaagcctacggcacttggtacgccctttatattgcaggtgattcatatcaaagatctgattcacataattaccaagttcagcagttttgcctctgacgatatgggttcttgggagggccaagctaggcagcttttgttggatgaggaagaagacgatgaagagtttttctttcttcttctccctgctatactttcattcctctctgaagagcaaagcgaaactggagcagctattgaaagtttcgtggaattcaagaggagcaccgcagccaaaacgctcgaagctcttgaagaaaagaagaagcatgatgaagatttctctattaaaaagtgtctagaggagttggatacaattgatgggctgacagatgaggatagatcatatgcaatggaagtctttgaatctgggttcaacagagaagtgtttatgagttcaaaaaaccacaatgttaggttgttttggctcaagagagaaattaaagcgcttgctgctatcatgtgatgtgaagtgaatgtggttgtgaagagataggcttacagaaattcctaatagatgcaactgc

SEQ ID NO: 156028 - DNA, 1225 bp, Zea Mays
atggcaaggaagacaagagtccctgaagaaggtgcaagcatggaaattccaacacgatgtcgtcgatcccatcgttcttctaacacaaccacggggaccctaccacaagaggttcttgcagccctgacgtctgccttcaacctcgatgggtcggcgaaggagaacttcgaggatgctttgcttgcgatgctttggcccttcgctgatagagtggcaaccttcaagtcgggcctagtggcaccagaggagggattacgctgctatggagcaccatccatgtggaactttctgattttttttgtgggtgatttccacatttctgtcaagattggttcgtctcttcggctcctccttggcttcgcaagagtggtgccgccagtagctcctccgcgctccgccgggaccgacttgccgctggccgccaggggctccctcgcccaggaccggctccgccgtccaaccgtcctatcccctccggcctccgcccagtgcgggaagcctacaacactgggtacacccttttttaaagaagggtgggcctagcgcagcggtagagcctaccgtctgtaactggaaggtcctgggttcgagccacaacctcatattatgcgggtaaggcttgacgcttaaagatacccttctccagaccccgcacagtgcgggaagcctacggcacttggtacgccctttatattgcaggtgattcatatcaaagatctgattcacataattaccaagttcagcagttttgcctctgacgatatgggttcttgggagggccaagctaggcagcttttgttggatgaggaagaagacgatgaagagtttttctttcttcttctccctgctatactttcattcctctctgaagagcaaagcgaaactggagcagctattgaaagtttcgtggaattcaagaggagcaccgcagccaaaacgctcgaagctcttgaagaaaagaagaagcatgatgaagatttctctattaaaaagtgtctagaggagttggatacaattgatgggctgacagatgaggatagatcatatgcaatggaagtctttgaatctgggttcaacagagaagtgtttatgagttcaaaaaaccacaatgttaggttgttttggctcaagagagaaattaaagcgcttgctgctatcatgtgatgtgaagtgaatgtggttgtgaagagataggcttacagaaattcctaatagatgcaactgc

SEQ ID NO: 156029 - DNA, 1118 bp, Zea Mays
atggcaaggaagacaagagtccctgaagaaggtgcaagcatggaaattccaacacgatgtcgtcgatcccatcgttcttctaacacaaccacggggaccctaccacaagaggttcttgcagccctgacgtctgccttcaacctcgatgggtcggcgaaggagaacttcgaggatgctttgcttgcgatgctttggcccttcgctgatagagtggcaaccttcaagtcgggcctagtggcaccagaggagggattacgctgctatggagcaccatccatgtggaactttctgattttttttgtgggtgatttccacatttctgtcaagattggttcgtctcttcggctcctccttggcttcgcaagagtggtgccgccagtagctcctccgcgctccgccgggaccgacttgccgctggccgccaggggctccctcgcccaggaccggctccgccgtccaaccgtcctatcccctccggcctccgcccagattttattcagtattcactatatggcatttggttgtaaatagactacgatcacgatgactcttgaataagtgcgggaagcctacaacactgggtacacccttttttaaagaagggtgggcctagcgcagcggtagagcctaccgtctgtaactggaaggtcctgggttcgagccacaacctcatattatgcgggtaaggcttgacgcttaaagatacccttctccagaccccgcacagtgcgggaagcctacggcacttggtacgccctttatattgcaggtgcgcatcttgttatcctccactcgtagatgtcgctagctggtcagtaatccgctgcaaggtacttactctattatgtgtaaaatgtcagtagaactttggtacgccatacatacagcaagtgtcaaatggaccatcctccactgcagttgagtcggatagctttgcctcgatttcctcttgtcttataaagttctccacttgctgtgccaaggcctaccctgcctgaaagcaaatttcatctcttggtttccaagcagaccaaagaactgacaaaaaaattatatttgtaagcttgtgatgtctgttagcaacccagaaccgagcaatcgattgaactctgatatag

SEQ ID NO: 156030 - DNA, 471 bp, Zea Mays
gctactgcccctgaagcgcacatggcaaggaagacaagagtccctgaagaaggtgcaagcatggaaattccaacacgatgtcgtcgatcccatcgttcttctaacacaaccacggggaccctaccacaagaggttcttgcagccctgacgtctgccttcaacctcgatgggtcggcgaaggagaacttcgaggatgctttgcttgcgatggtagaggaaggaattgtggatctacaagatggccttggtagcctgcgcattgatgaactgcatgcgactgcgtgatccagcgacctgcgactaagggccttttcctctaattcatgttttcatcagacctcgatcctttgcctcatttgtgtgtcgaggtttcagtttgttgcatgtgctcgatgtatgttttggacatcttaagtgtggctcttttgtctgtctcgcgccagcaatgccaaaacgtgcttgtttcaatga

SEQ ID NO: 156031 - DNA, 639 bp, Zea Mays
atgtgcctagagttcgccttgaacgcctcgaacctgctctgcttctccgtgaggtcccgcgacacggtgtgcacgctgctccaccgctcgtacatgctctcctccgactccaggtccttatccgtcagcagcagggcaaccgtggccgggttggtctgcgaacgatggggccacacgctgtcgacgttgtcgataccccatggcgatggtgtggtgcctcgatgtggggaagcgccgaaccggggcaggaattggggacacgaacgtcgacgcgcggaagcgccgtccgcgaacgggaagggagaggaacctgggatttggggacgccatgggtcgagggctcggaagcgccatccgcgaacaggaagggaggggaaccggggatttggggacgcgtacgtcaacgcgcggaagcgtcgtccgcgaacgggaagggagaggaaccgggggcgggatttggggatgccatgggtcgagggcgcgcacgtggtttgtgccggcgaggagccggggctagatctgcgcgccacggggatttcggggaggagaatagagtcgggcatgctgtgtgcggtggagacggtggaggggtggtggggaatggcgggggaactgaagagctactaccttgggttgtga

SEQ ID NO: 156032 - DNA, 351 bp, Zea Mays
cgccgacagataggttctttactctacttatgtgcatctcgatcggatattatgctttccgtatgcatgtgtgcaagattccaagccgaccctaaggaagctcaccttacgaccgtgaaacgaatcttgagatatttggcttatactcctaagtttgggctttggtatcctaggggatccacatttgatttaattggttattcggatgccgattgggcggggtgcaaaatcaataggaagagcacatcggggacttgccagttcttgggaagatccttggtgtcttgggcttcaaagaagcaaaattcggtcgctctttccaccgccgaagccgagtatattgccgcaggt

SEQ ID NO: 156033 - DNA, 660 bp, Zea Mays
ggtcagcacaagctatgtaaagaaataatggtattcatgaaaagaaactatggtggtcttgcttaggatgaaaagattgcattatggggagccatacagtcgttgtttgagggctcgatgtacacaattgtcgtcctggggactcctgcattgagtttaaatgaagaaaacattcctcatggttttatttttgcaacactcatgttgtcatccatgttggctagctccattacatctcgtctattagcccgcaagctcaaggttcaaggttacatgcagattgtgttctcaatatcgattgtcaccattatcctccgtggtgtctccaacatcttagtatcgacgtctttggtgaaaggaagtagcatattaattggaggttgtcttcagcttcttggtttttgaacctttgaggcttgcgttggcatattcgggccatcaatcgtgaagaagaggttccagtacattccagacggagcacgaagaacaatcatgaatttattccatatattgctcaacgtaattgttggtgtggtgctttgcaacgtgactgcattccctatggatgtcatgttcgagctgttttctatcttcctcttcatgacaacaatcttgtagggtcgactgatggttgtatcaaatctacacgaatcatcaact

SEQ ID NO: 156034 - DNA, 223 bp, Zea Mays
cacatactccctccggtgcagtaaaagaagtcatcctgcgcgtgaccgagcgtgcacaaaaagaagtcatagcacgcgtgggtctgggatttggacgttgttgcccctagtaattgcacaaaaaaaatgcatttaagaggaatcgaacttaagacctccagtctagaatgccttggagctgctgcagcaaccaatcaagcctgattgttttagtgacgttaat

SEQ ID NO: 156035 - DNA, 1341 bp, Zea Mays
atggatatagtggtggaggaaggaaatgtcgatgttggcaatattgctgaaccatcgtatgaggttgtggctagaagtggttgttcagcacaattgtcaactaatgacactgatgaacatgaactggctatagagagcgaggatagtaaggtcagtgttggtaatgctgcaaaacaatcacacgatgttgtgggagtaggcattgactgtattttcaatcatgctaaagtgtcaactgaagctgatcttggaccacaaccggattataagtgcaccccagaagatgttaagcttattgaatacattaaaacattaccggggaaacaagttgtggtgaacatcgacagcgcatggttaaatagaaatgatatggaatgtctttttcatggtgacatccaattgtctggcgaaaccctcagtgcatatatacactgtattagggatgaagagcatttacttcatagagaaggtggaaaggtcttcttggagaacacattcatttctagtctgcttaagcgtgatggcgaccctaaggtgctcttaaattgtgttcattccaatgaatataaaaaaatttcactggtacctggcagttctgaatgcaaaaaaagagagggtatcttgcgggctatggatgataaactatatggaatactggacaggatcctcctatctgataacgtaactcagggcacccctaaagttgttgctgcatttgctgaaaggagggagtttgacaagatactgatatactcaaagcaggttgggtacactccagattatctcttcctcctccagaccatcttgcgtacagatccacaggcgattgattgtttgaacataatcggtcattttcattatgatcgccctcgtattgctcagctgtgtgaaaaggctgggttgtacttgcgagccctccagacacttgttgagttctttggcacattgtcaagagagtgggctttggaatgcatgaaagaccttctactggttaatctgaggggaaatcttcagattgttgtgcaggccgcgaaagaatactctgagcagctaggggttgatgcttgcatcaaattatttgagcaattcaaatcttatgagggcctttactttttcttgggatcctatctgagctccagtatggatttgctaggagtttttccaactggccttgcaacttcaacacctgagacaaatacatctcagtcccaagggagcagtgacagcagtggtaataacaagagcaagagccattcaacagagccagttctttatgcttacaaaaaggaaaggaaggtgaaccaaaatgttctcccaggtcttcgaactgaaatacagtag

SEQ ID NO: 156036 - DNA, 656 bp, Zea Mays
ttcgtcattcttgcctaccacagtccttttacttcaaaatacggggaaatagaagtccttcatcagctcttctcatcttggctcacatgcagtacttgaataccagtttcttcctgagcagccaagtgatgcatatgagaggggaagccagttgcgcttctatgatgctctaggagaagtgttaaactcgagggtagattcgttgtctatagaatcacactttatccatgtagttgagtaggcacctagctatacatttaacacagtaaatcatctggttctagctgtttgtcaaatattattgctagcatggctcaaatccacggtcaaaaattggcatccctcaagttgtcggatttgaaagctccctcacatcccctaaaagattgggttatcatgatgaagatacatgtcacatggacagaaaacacaagaactatatttatggatataatatttttcttcttttgtattattatattcatatccttttttacctttgtattattattttttgatatatgttgtatttgtctaatgttacttcgtcataatgagaacgctaagattgctagggaggttgaggctcatgaaaagagaattaaaaaggagcttgagagttgagaagcaaggtctactaaatagaaaggtcttcc

SEQ ID NO: 156037 - DNA, 1075 bp, Zea Mays
attccaacactacacacccacctagcctggcaaccagccgccgacctcctatctaccatggatatgtgccttggagccaaaagatccatcaccaatcttttccctcttctatacctcctcatgccgcggcatggatctccttgttcgtttgtcatctaggagtatctggctaggtcgccggccggaggaggaggaggagaaagaaatggaagtgtaactatggtgttggctcggctcactcagaagttgaagccgaatccaaatggtagctgccggcgtttctgattgagccgtgccaatatctcagtactctttcatgctgatctcgcgtcacacgtcgatctcttcctgaagtgctgtagtctctctcgtactctcatgcatcttggtcatgtgttcttatactgtctcttttgcttctgctgcctgccagtatgtggactgcacacgtacattgtttttttcgattcgtttataaagtttcatggcacggtttgtatcagtctgtgactaggctagctaaccattgacagtcttgcttgcgtgttgttgcaacagacaccagtcgtttggcgatgcagaaatcgctcgacagatcgagcaggagaaatagaaagagagacagcaggcagccaagcacatatgcaaattagcattcggttcaagctagccgcgcttcagagagctcagaagcatcatgaacgtcatagttgaaaccaacgccctaatttcattgcattgcgcccagccaatctattgcatggaatatgaaccaactgaagccacttccgagcagtttcttttcaggaaggacatggccggacgatatgatcaagctactagcatgtgtagtagtatatacttcgattagtttctgtaaccacatcatgcatgtgcccgtttcttaacttcttgagggagaaaaggagaaatgcataaattatggatgatctctgtacgttcatcatgtaccatcagttgtgagcatctgttgattctcttatgtattgcctgcagtagtcgtacacttgtactccatacatacaaaattcagtacaatatgaatttgttttca

SEQ ID NO: 156038 - DNA, 1155 bp, Zea Mays
aaacgtgctgcttattcttgcattgggtttaccacctcacaaatcctctgtcgtggagcggtccacatcccaccgccaccgttgtccgcaacccacattgcgttaccacgagccgatccaatggcgatgttgtctaggttgtctctaggaatcaagaaggcctcctaatcccacgcgtgccaccgccgcggtctgtgggcaatcaaggctaagcacggtgacgccttccccaaggccaagaagcccaccgcagtcgccaaggccaagttttaccccgccgatgacatgaagccacacaagccctgtacccgcaagccgaatcccaccaagcttatctacctgcgtgtggatgtggattgcaccatttcaccatttcttcagtactatttgtttgccgtgagctgtgggtcctggcggtttctggttggccctaccctgctctttttaaggctgaaatgctctggtcagcctgaagaggaaatctctcagagaaacaaagagtcttcaaaatggtgaaagggtaatataatggttttaccttcctgctcggttattttagtgcgttgtttgccttatagagtaaaactttccagttccttgtttctccattatgttttgtttaatttgtcttaattatgcagtatactgaaataacttacacaagagaaatttgagataaagtattttagaaccggacagccttcagtttcagtattcagagttagacaatcacacttttccaaaggtgtccaatatacaaatgcattagcctatatgcgagtaaatgatccagtatatatagtcagacacatgaaaaagccactttaaaaatcataagatttagccttattataagagagtatggcttatctgcatcttccagtataaaaatcatgtcactttaaaccattgcattgcagttcattataggatacatttcatctagagccttattatggagacatgccactgctgaatgtttagcttcaagttgttctctagagccttattatggagactgactgtttggcctgcaaaacatttctctgcagttttaacaatatatttagcattcatggttagtgtacaaagttactattatacacttgtgaagtggaacttgatgatatcttcattttttgactttttgtgctt

SEQ ID NO: 156039 - DNA, 387 bp, Zea Mays
ctgcgtgttgggccgtttcctttcctcgcggtcggcccaatatcgttcacccgcgcgcgcggcccactctcacttcctctgcactccacagctagctcctgacgcgtggggcccggacgtcaggaactccttctccctcccgtatccacttctctgttgggcaccgtttctctccctggcgagatctccgcggagcgcgatccagtgatgaaattcgttggaatcctccgtgctggtgcctctcctcacccctgctcgcgcctcaactcaccactgtgtgggccctgtgcgatgttgtctcctttccagcgcgattggggcatatcgtgggatagctccgcattgaccgcttctccggcgtggctgttgcgcggtcgcggggatcta

SEQ ID NO: 156040 - DNA, 225 bp, Zea Mays
atggcgctcctctgtttggggatcggtgctgctgtggtcatcaatgcggtgaagctgaagccatgcgcagtcagcagcgagggccgccaagatccgctggtgcactcagggcaaatcagcagcagacgcagcgaaaccaatttcacagcggcggagccttcacgcccgccggtatcgcagacccggagcggcagcagattatctgggctccgcctcgtgccatga

SEQ ID NO: 156041 - DNA, 1823 bp, Zea Mays
gacccattcacccccactgtgccgcgccccgccccgccccgccccgcccacgccgccgtggcaacgccatggggaagcgatccggcggccggaagctgccgttcttcaccagatcctccccaagcaggacaacgcgacgagggctcttctcgcctccccctctgctgcctcgccgtccgcgaccccgggatcggcggcggcggggcagaccgcccagctgccccctcccctctcagttaccgcgggcggcggggttgccgtgtcggggaaggtcaacaagaagaaggccggcacgcgcctatggatgcggttggaccgctggagtgcctccgagatcgtcgagctcgacaaggcctccataatccgccgcgccggactgcccccgcgcgacctacgcatcctcggccccgttttctctcgctcctccagcatcctcgctagggagaaggcgatggtgatcaacctcgaattcatcagggcgatagttactgccgaggaggtgctcctgttggaccctctcatgcacgaagtgctccctttcgttgaccaattgaggcagcacctgcctctgaggagccgggtgggtgagaatggtgagtgtgcccctgatggcaatggggaaaaacagaagggctcgcttaatgaagcgaccggggcagagcatgagctgccattcgagttccatgtgctggaggtagcactcgaggttgtgtgctcatcgttggaccttagcgtgtctgaccttgagaggcatgctactccagtgcttgacgaactgaccaagaatgtaagcacaaggaaccttgagcgagtgcggaaccttaagagtcatcttacccgtttgcttgcccgtgtgcaaaaggtcagggatgaaatagaacatcttctagatgataatgaagacatggaacatctgtatctaacaaggaagcaagtacaaaaccaacaggttgaggctttaatgtcatctgctgcttccaacagcattgttcttgccggaacaggtgtgcccaggctgaactctagcttccggcgtagcctgagcattgctactagcatgcatttggataatgatgtggaggacctagagatgttacttgaggcctacttcatgcagctggatggaattcgcaacagaattttgtcggttcgggagtatattgatgacacagaagactacgtcaacattcaactcgacaaccagcgtaacgaactcattcaactccagcttacacttacgattgcatcctttggcatagctgccaacactttcattgctggagcttttgcgatgaacatcccgggctctctgttcaacaccgatggcagcctcttctggccatttgtcgggagcacctcatctggctgctttgtaatcaccgtcctcttgttggggtatgcctggtggaagaagttgctgggtccttgaacatgaagcaagatggcagagagccttgtcatgcttgcagaaaggaagaaggcgtcctatcctaaggatattagagaaccgtggggatagcatgaaaacctgtatataacatctcaacagtgttcataagatgagtacgtataatatatcattagcataaacgagatgatgtgatgatcgatatacttccttgttaacatcattagctggcaactgaaaaatgttgccatgaaactatattatccagcagcggctggctttgtgtacaatttgcttttctttctgttttggaggcaccatcttctgtgcttcagtttttggtcaattggcaggtgatggttgtttagccactatagccgcatctcgtgcccagtctcactgatcgttcttctct

SEQ ID NO: 156042 - DNA, 1706 bp, Zea Mays
gattaaagtttagtaactaaaatacctcgtttggttctagtgactaaatctgattaaatagtattaattggtgccaataataactgcattatttctattaattagtggatgtcaaaaaaaatgagaggtcaaataaaataaaaaacctgctgactaaagagattaaaaataactagtcacctaaacctaagaaaagagaaactgccaaaaaaaaaagggacaaaagtcggcccaggagtccaggacaaggtccctgcgggtgcgctgcgctccctccgagcccgagcccgagcccgaggaccgggctactgccgtccgccgcaagccccgtcctgcactcctgcatccgttcacgttttaccccgtccggccgtccccctcgttctttctctcccccttctctctcgctgcgacgactgggtaggctgccgccgccgccctacgccaggtcccgaggaccaaggcattcgtattcgtcagtctcttcgccgggcgacgccagaaagaagaccagaggtttgtgggagtatcgaaggtggtggtgattttgtagcgtggtgttgcagtttggttggaacttggagtgtagagggaagatttggtgatgagcagccgcagcccgccgccgaaggaccgcaggatgcgtactgaacgcacctcataccgtggcgcaccatatcggagggacagccgccatggtccaagcaggtttcggaatgatttgtgcaacaattgtaagcgtcctgggcattttgctagagagtgtcctagcgtggctgtctgtcatacctgcgggcttcctgggcacattgcagctgaatgttcttccaaaggtacctgctggaactgcaaagagcctggccacatggctaacagctgcccaaatgaagggatatgccgtaactgtggcaagtccggacatattgcaagagactgcactgctccaccagtgccgccaggagaagtgatcctttgcagcaactgctacaagccagggcattttcgtgaggaatgcaccaatgagaaggcctgcaacaattgccggcagagtggccatattgcccgtaactgcaccaatgatcctgtttgcaacctgtgcaatgttgctggccacctggcccgtcagtgccccaagtctgatacattgggcgagaggggtgggcctcctcccttccatggtgttggcgctcccttccgtggtgttggcgttcccttccgtggtggcctcagtgacgtgatctgccgggcctgcaaccagattggccatgcgagtcgtgactgcatggctggtgctttcatgatctgccacaactgtggcggccgtggccacacggcatatgagtgtccctctgtgagtctcattgagaggttcccacctcgccgtttctgaaggacgtccaagggctatccagatgactgttgttttcagcccattgtgtcaagaacactcatttccgttttcttttttttttccaaaccctaatggattctagatctttcagattcttaacttgtcagcactatttgtgattccctaatggattctagatatttcagattaataactcgtcagcaccatttataattctggattttctacttgactcagatgttctgttgatgataatgtttgaagacatatggtacttgtcgttatgaactcaaattcatctcgtgagttttaacaccattcgaactggaacatc

SEQ ID NO: 156043 - DNA, 1642 bp, Zea Mays
gattaaagtttagtaactaaaatacctcgtttggttctagtgactaaatctgattaaatagtattaattggtgccaataataactgcattatttctattaattagtggatgtcaaaaaaaatgagaggtcaaataaaataaaaaacctgctgactaaagagattaaaaataactagtcacctaaacctaagaaaagagaaactgccaaaaaaaaaagggacaaaagtcggcccaggagtccaggacaaggtccctgcgggtgcgctgcgctccctccgagcccgagcccgagcccgaggaccgggctactgccgtccgccgcaagccccgtcctgcactcctgcatccgttcacgttttaccccgtccggccgtccccctcgttctttctctcccccttctctctcgctgcgacgactgggtaggctgccgccgccgccctacgccaggtcccgaggaccaaggcattcgtattcgtcagtctcttcgccgggcgacgccagtttggttggaacttggagtgtagagggaagatttggtgatgagcagccgcagcccgccgccgaaggaccgcaggatgcgtactgaacgcacctcataccgtggcgcaccatatcggagggacagccgccatggtccaagcaggtttcggaatgatttgtgcaacaattgtaagcgtcctgggcattttgctagagagtgtcctagcgtggctgtctgtcatacctgcgggcttcctgggcacattgcagctgaatgttcttccaaaggtacctgctggaactgcaaagagcctggccacatggctaacagctgcccaaatgaagggatatgccgtaactgtggcaagtccggacatattgcaagagactgcactgctccaccagtgccgccaggagaagtgatcctttgcagcaactgctacaagccagggcattttcgtgaggaatgcaccaatgagaaggcctgcaacaattgccggcagagtggccatattgcccgtaactgcaccaatgatcctgtttgcaacctgtgcaatgttgctggccacctggcccgtcagtgccccaagtctgatacattgggcgagaggggtgggcctcctcccttccatggtgttggcgctcccttccgtggtgttggcgttcccttccgtggtggcctcagtgacgtgatctgccgggcctgcaaccagattggccatgcgagtcgtgactgcatggctggtgctttcatgatctgccacaactgtggcggccgtggccacacggcatatgagtgtccctctgtgagtctcattgagaggttcccacctcgccgtttctgaaggacgtccaagggctatccagatgactgttgttttcagcccattgtgtcaagaacactcatttccgttttcttttttttttccaaaccctaatggattctagatctttcagattcttaacttgtcagcactatttgtgattccctaatggattctagatatttcagattaataactcgtcagcaccatttataattctggattttctacttgactcagatgttctgttgatgataatgtttgaagacatatggtacttgtcgttatgaactcaaattcatctcgtgagttttaacaccattcgaactggaacatc

SEQ ID NO: 156044 - DNA, 2110 bp, Zea Mays
gattaaagtttagtaactaaaatacctcgtttggttctagtgactaaatctgattaaatagtattaattggtgccaataataactgcattatttctattaattagtggatgtcaaaaaaaatgagaggtcaaataaaataaaaaacctgctgactaaagagattaaaaataactagtcacctaaacctaagaaaagagaaactgccaaaaaaaaaagggacaaaagtcggcccaggagtccaggacaaggtccctgcgggtgcgctgcgctccctccgagcccgagcccgagcccgaggaccgggctactgccgtccgccgcaagccccgtcctgcactcctgcatccgttcacgttttaccccgtccggccgtccccctcgttctttctctcccccttctctctcgctgcgacgactgggtaggctgccgccgccgccctacgccaggtcccgaggaccaaggcattcgtattcgtcagtctcttcgccgggcgacgccagtttggttggaacttggagtgtagagggaagatttggtgatgagcagccgcagcccgccgccgaaggaccgcaggatgcgtactgaacgcacctcataccgtggcgcaccatatcggagggacagccgccatggtccaagcaggtttgagctaatctaagtcaaacaggacgagtgtttggcattgttcttccaaacatcactgcttcctcttgttatcatgtatatatttggctaaatgctatgtgaaattaccataattgttattttatttagatgtaaactttgcctatatttatcccattgcaaccacttatgcatgtatgtagcttaaataagggcacttgatattggttaatgtagcactatttttttttctgaaagtctagtaaaaagtgtatggtaaagtgatctgggattgaaattttttggatgaattcatgttgtgccatggttttaggagaaagcctatgcaggattgtaactagaaatgagtcatgacaagaatggtgaaattacttaaaaatttatgtgaatggaactgtaatatcttattattcagacatttggaatcttatgtatcctttagttatttccctttccattgtgcaggtttcggaatgatttgtgcaacaattgtaagcgtcctgggcattttgctagagagtgtcctagcgtggctgtctgtcatacctgcgggcttcctgggcacattgcagctgaatgttcttccaaaggtacctgctggaactgcaaagagcctggccacatggctaacagctgcccaaatgaagggatatgccgtaactgtggcaagtccggacatattgcaagagactgcactgctccaccagtgccgccaggagaagtgatcctttgcagcaactgctacaagccagggcattttcgtgaggaatgcaccaatgagaaggcctgcaacaattgccggcagagtggccatattgcccgtaactgcaccaatgatcctgtttgcaacctgtgcaatgttgctggccacctggcccgtcagtgccccaagtctgatacattgggcgagaggggtgggcctcctcccttccatggtgttggcgctcccttccgtggtgttggcgttcccttccgtggtggcctcagtgacgtgatctgccgggcctgcaaccagattggccatgcgagtcgtgactgcatggctggtgctttcatgatctgccacaactgtggcggccgtggccacacggcatatgagtgtccctctgtgagtctcattgagaggttcccacctcgccgtttctgaaggacgtccaagggctatccagatgactgttgttttcagcccattgtgtcaagaacactcatttccgttttcttttttttttccaaaccctaatggattctagatctttcagattcttaacttgtcagcactatttgtgattccctaatggattctagatatttcagattaataactcgtcagcaccatttataattctggattttctacttgactcagatgttctgttgatgataatgtttgaagacatatggtacttgtcgttatgaactcaaattcatctcgtgagttttaacaccattcgaactggaacatc

SEQ ID NO: 156045 - DNA, 1500 bp, Zea Mays
gattaaagtttagtaactaaaatacctcgtttggttctagtgactaaatctgattaaatagtattaattggtgccaataataactgcattatttctattaattagtggatgtcaaaaaaaatgagaggtcaaataaaataaaaaacctgctgactaaagagattaaaaataactagtcacctaaacctaagaaaagagaaactgccaaaaaaaaaagggacaaaagtcggcccaggagtccaggacaaggtccctgcgggtgcgctgcgctccctccgagcccgagcccgagcccgaggaccgggctactgccgtccgccgcaagccccgtcctgcactcctgcatccgttcacgttttaccccgtccggccgtccccctcgttctttctctcccccttctctctcgctgcgacgactgggtaggctgccgccgccgccctacgccaggtcccgaggaccaaggcattcgtattcgtcagtctcttcgccgggcgacgccaggtttcggaatgatttgtgcaacaattgtaagcgtcctgggcattttgctagagagtgtcctagcgtggctgtctgtcatacctgcgggcttcctgggcacattgcagctgaatgttcttccaaaggtacctgctggaactgcaaagagcctggccacatggctaacagctgcccaaatgaagggatatgccgtaactgtggcaagtccggacatattgcaagagactgcactgctccaccagtgccgccaggagaagtgatcctttgcagcaactgctacaagccagggcattttcgtgaggaatgcaccaatgagaaggcctgcaacaattgccggcagagtggccatattgcccgtaactgcaccaatgatcctgtttgcaacctgtgcaatgttgctggccacctggcccgtcagtgccccaagtctgatacattgggcgagaggggtgggcctcctcccttccatggtgttggcgctcccttccgtggtgttggcgttcccttccgtggtggcctcagtgacgtgatctgccgggcctgcaaccagattggccatgcgagtcgtgactgcatggctggtgctttcatgatctgccacaactgtggcggccgtggccacacggcatatgagtgtccctctgtgagtctcattgagaggttcccacctcgccgtttctgaaggacgtccaagggctatccagatgactgttgttttcagcccattgtgtcaagaacactcatttccgttttcttttttttttccaaaccctaatggattctagatctttcagattcttaacttgtcagcactatttgtgattccctaatggattctagatatttcagattaataactcgtcagcaccatttataattctggattttctacttgactcagatgttctgttgatgataatgtttgaagacatatggtacttgtcgttatgaactcaaattcatctcgtgagttttaacaccattcgaactggaacatc

SEQ ID NO: 156046 - DNA, 444 bp, Zea Mays
atggctgaggcattaatcgatgaggggattgcggcgataccatgcggatgcaggggtagaggggagagggcgcgcacggggaagaaggaagacactaacatgtgggtcgtatgcgccgtgaggaggcagaaccgtgcaccgcggtctacgttaggttcttatagagtagtagagaaaatgaaagtacaattccatggaaagaagaatctaaggtacaggaagaacaagtgcatgcctaatgttacgttacgttttgtagtgaagtacaatgacgactacaaactgaaaatatcagcgatacaacactacagcatatgcaatccttcacccgcggatctagagtatgctggagcctcttacaagttacaacagattgtggaaatgtacagcatggttttacgaaaaagaaaaagagaagaaggtattgatggacaatggccttaa

SEQ ID NO: 156047 - DNA, 174 bp, Zea Mays
atggcggggtggtcctgcacttgcgatgggatgcgggccgacggtggtcctgtgcgctggatggcgatgaggggattgggttgcgattccttccatggtggcgaggcgtggattgcgtttggggcgagaaggataatgggcggggcatccacggtgcatggaaagaatgaatag

SEQ ID NO: 156048 - DNA, 243 bp, Zea Mays
atggcggggtggtcctgcacttgcgatgggatgcgggccgatggtggtcctgtgcactggatggcgatgaggggtttgggttgcgattccttccatggtggcgaggcatggattgcgtttgggacgagaaggatatgggcagggcatccgcgatgcatggaaagaacgattgggcaatgggtggtcctacgcgtcaccgacaatgggattcctgcgtgctggattgctgcgaggcgtggatag

SEQ ID NO: 156049 - DNA, 1788 bp, Zea Mays
agttgcatcccttgtggacatgtctacggcagacattgcttagagatgtggttactgcagtacggcaagaaaaaggcaccgtgtcctcaatgtggcaagagatatacacagaacaacatcatcaacctctatgtaccagagattgttgttcccaataatgatcttgaaaatcaagtattgtccttgagagagagaaatgaatatcttgagaagcaacaagcaaaattacttgaggagataaaagagcataagaggcagattatgttgcaacaaaatgtaatatatgaatcaaacaaaaagagacagagagtggcagagcagtcatcagatggaatactaggggctgagctaattgcctcacatacaaaggacattgaccacagcaatctgtcaagttttgctctccagaatgagtttttggtcgatggagctcgggtcatgggtatagatgcatccagtcaaattatattcacttcgggaagggcacatggagttagtgctgaacacatacttacaaaggttagcatgtttcatggacatggaatggagaaaatccaccttcctcctggtactaaagctattagggatatctgtgtactgcctgggggccatgttgtttttgcatcactgggcaggaagttgtctattttcagtgtggctaccaacaatgttgtccttcaatatgatctgccggctcctggttggtcctgttcaggggattatactacttcaagtcatatttatgctgggttacagaacggcatgctattagtctttgatatccgtcaaacttcagcacctttgcattctagcatgggtctatcaacacacccagttcatacaatacactgcgctgtagatggcagtggttccaggaaggttttttctgcttcttctataggaccctgcgtttgggatgccagcgaaaacaggccgagtttggtaagtgggatggaaaaccaaggggtctgcatatctcttgcgtgcagctctccatcaagtgatgtcctggtggcttcatatcgcccgagagttgagctgccagacgctatcgccacatctcaagcgtctacaccacaatcaccggcacccaccggttcaggaaaactaggatgccacacactccttaggtctagtttgggtaatctagtaatgaaagggattggagtggattgtgatgtattatgagagtttttgatctattggggatttatacactctccaatccctccaaaccacttcaatactagagtacccaaactaggccttaggagaaccaccgccacatcctttgccagggaccatatctgcagtggtagcgtaagtgagttgcgaatgtcgaagtctgcaataataccctgcagagacaatcagcatctatttgcctatggagatgaatcgttgtacggagtccggacttggcggctgccttcgtttcagcggtacaccgatctcaagccccacaggcaaccggtccttgatctaaggtatgctgaaagttcaactggggagaggtaccttggttgcttaagtgccgaaaagctacaggttttcacaattaggtagcttgacagaggcattagcttggtttctggaattctggtagttgtgcttgtgcatgctaacatttgtttcttcagcagctttgctgtataagtaaaggccattgtccatccgtacagtcttcacttaaaacagcgtgtaaaaccatgctgtacatttcaaacaatctgttgtaacttgtaagaggctccagcatacaatacaccagcgggtgaaggattgcat

SEQ ID NO: 156050 - DNA, 78 bp, Zea Mays
cgggacggcagaccattccctgccgccgtcgtatgcgagtcctcatgccgccgtcgcggacgagtccccacgcgttga

SEQ ID NO: 156051 - DNA, 1684 bp, Zea Mays
gaagcggcgggaggctgggagagcgggcgggaaagcgcgggaatggaaggcggcgggagggcgagagggggatatggcgagtcctacagcctcggcaaatgtaccgagcgaagggcagaaacggatcggattaggatggggtccattcctattcatttatgaactaaaatatttttaggaccctaccgaattagttgcatcccctgtggacatgtctacggcagacattgcttagagatgtggttactgcagtacggcaagaaaaaggcaccgtgtcctcaatgtggcaagagatatacacagaacaacatcatcaacctctatgtaccagagattgttgttcccaataatgatcttgaaaagcaagtattgtccttgagagagagaaatgaatatcttgagaagcaacaagcaaaattacttgaggagataaaagagcataagaatgagtttttggtcgatggagctcgggtcatgggtatagatgcatccagtcaaattatattgacttcgggaagggcacatggagttagtgctgaacacatacttacaaaggttagcatgtttcatggacatggaatggagaaaatccaccttcctcctgatactaaagctattagggatatctgtgtactgcccgggggccatgttgtttttgcatcactgggcaggaagttgtctattttcagcatggctaccaacaatgttgtccttcaatatgatctgccggctcctggttggtcctgttcaggggattatactacttcaagtcatatttatgctgggttacagaacggcatgctattagtctttgatatccgtcaaacttctgcacctttgcattctagcatgggtctatcaacacacccagttcatacaatacactgcgctgtagatggcagtggttccaggaaggttttttctgcttcttctataggaccctgcgtttgggatgccagcgaaaacaggccgagtttggtaagtgggatggaaaaccaaggggtctgcatatctcttgcgtgcagctctccatcaagtgatgtcctggtggcttcatatcgcccgagagttgagctgccagacgctatcgccacatctcaagcgtctacaccacaatcaccggcacccaccggttcaggaaaactaggatgccacacactccttaggagaaccaccgccacatcctttgccagggaccatatctgcagtggtagcgtaagtgagttgcgaatgtcgaagtctgcaataataccctgcagagacaatcagcatctatttgcctatggagatgaatcgttgtacggagtccggacttggcggctgccttcgtttcagcggtacaccgatctcaagccccacaggcaaccggtccttgatctaaggtatgctgaaagttcaactggggagaggtaccttggttgcttaagtgccgaaaagctacaggttttcacaattaggtagcttgacagaggcattagcttggtttctggaattctggtagttgtgcttgtgcatgctaacatttgtttcttcagcagctttgctgtataagtaaaggccattgtccatccgtacagtcttcacttaaaacagcgtgtaaaaccatgctgtacatttcaaacaatctgttgtaacttgtaagaggctccagcatacaatacaccagcgggtgaaggattgcata

SEQ ID NO: 156052 - DNA, 1059 bp, Zea Mays
gctgggagagcgggcgggaaagcgcgggaatggaaggcggcgggagggcgagagggggatatggcgagtcctacagcctcggcaaatgtaccgagcgaagggcaggcgatggcgagcattccacgtctagttgcatcccctgtggacatgtctacggcagacattgcttagagatgtggttactgcagtacggcaagaaaaaggcaccgtgtcctcaatgtggcaagagatatacacagaacaacatcatcaacctctatgtaccagagattgttgttcccaataatgatcttgaaaagcaagtattgtccttgagagagagaaatgaatatcttgagaagcaacaagcaaaattacttgaggagataaaagagcataaggtaccacacaaatgaaatattgtctcagtaaccgaattgaccaatttctctgaggaaacatgggtgactccttctgataggcagattatgttgcaacaaaatataatatatgaatcaaacaaaaagagacagagagtgacagagcagtcatcagatggaatactaggggcagagctaattgcctcgcatacaaaggacattgaccacaacaatctgtcaagttttgctctccagaatgagtttttggtcgatggagctcgggtcatgggtatagatgcatccagtcaaattatattgacttcgggaagggcacatggagttagtgctgaacacatacttacaaaggtacaagtcttaagagaaggttttgcttaatgacttaaggttagcatgtttcatggacatggaatggagaaaatccaccttcctcctgatactaaagctattagggatatctgtgtactgcccgggggccatgttgtttttgcatcactgggcaggaagttgtctattttcagcatggctaccaacaatgttgtccttcaatatgatctgccggctcctggttggtcctgttcaggggattatactacttcaagtcatatttatgctgggttacaggtgtactttttggaatgccttgtgattcttctaaagcttttgacgctctttgaagtgt

SEQ ID NO: 156053 - DNA, 403 bp, Zea Mays
actcgctgaaatttcttttcccaatccagttcattctgccgctctccaatagtccaatccggtcgcggcgaagctcggccagacggccaccccaccccaatgccgtcacggtcgggctcccggggcaggcggccgcggccggccccagaggtggctgctcccacggctgtacaagtgagctcgtccggctcgagtgaggaagggagcgatgaggaggaggaggaggggagcgagggatccggtgacggtgcgaggagcccgggcggctctgccagcaagtataaggcggcggagagtgaagccgaggcggaggacccatgccttcccagctgccccatttgtatggtcgcgtggaccgctgatggttcgcatcgcgtgaggtgaggaggaattgtatatttct

SEQ ID NO: 156054 - DNA, 535 bp, Zea Mays
ggatgcatggaaaaggaagaaaaaatgaatgcaccccccctgctaactcttttatctttgctctccaggtacgaggtccaacttgtgctcggatgttctcagactatctatcggagaccaaggaggattcagggataaagaacatcatggtactggagcgcgggtttaacggatgggaggtttcagggcagcctgtctgcagctgcaccgacgctcattgcaaagggacgtgttcttaagcacacgagtttatatctctcttaggccttgaacaaccaaggatcggcatggtctccgtttctcttgtcggtggttacttcacctcattaaaactcattaaaatgattgacacgcgacagattattgggttggcaactcctttgtgggaactgcatgcataactaccaccagaccactgtcagacataagacacttcacggtgtactgccaggtggcagtattcgtttcagaattcacagttttttgcttctgcatgtgccttgcagctctgtgcatcgaactgagttagtgtttg

SEQ ID NO: 156055 - DNA, 765 bp, Zea Mays
aaaaaaaggaagacctcaaattctgattttttgttcccttcaccgacggcgaggagtgagggttgacaacgggatggcgcggagcgtatcgtacgtttcggcggcgaagctggtatccatggcgcgaggcaatccccgcctcgccatcatcgacgtcagggatgaggagaggagctaccaggctcacatcgcgggttcgcaccacttcgccagcggcagcttcgaggcgcggatgccggagctggtgcgggccgccagcggcaaggacaccctcgttttccactgcgcgctgagccaggtacgaggtccaacttgtgctcggatgttctcagactatctatcggagaccaaggaggattcagggataaagaacatcatggtactggagcgcgggtttaacggatgggaggtttcagggcagcctgtctgcagctgcaccgacgctcattgcaaagggacgtgttcttaagcacacgagtttatatctctcttaggccttgaacaaccaaggatcggcatggtctccgtttctcttgtcggtggttacttcacctcattaaaactcattaaaatgattgacacgcgacagattattgggttggcaactcctttgtgggaactgcatgcataactaccaccagaccactgtcagacataagacacttcacggtgtactgccaggtggcagtattcgtttcagaattcacagttttttgcttctgcatgtgccttgcagctctgtgcatcgaactgagttagtgtttg

SEQ ID NO: 156056 - DNA, 1866 bp, Zea Mays
ctcgttcattccctcccggttcaggccctgtagtcctgtaccaagttttcgtaggcattcggatcgaggcaggctaggctttcgtttcgtccggaagaagcaagctaaaggaaggcgatcggatcggaggccatcgggaacggaacggaacggaagaagcctcagctcgagttatcggaggagtcgctagcaccacaacacagggccttcgattgcacgtattggggtgggaggatgttgcagaaacgatggaagggatgcatcttcttccttcttctctcaggcgcgttaggcgtactgatggcttcagaaagctcttcgtcagagtttgccaagatcgttcagtctaagcagacgaggcaagctcggctgtgcggagcggactctgagctactgagctccctggcgggcagcgacgcggaggtcatggtcaccatccccaacgagcagctggagcacgtggccgagttccaggaggaggccgacctctgggtcgccgccaacgtcgcgcggttcctcccgtcgaccaggatcacgcacgtcgtggcgggcgacgacgtgccggcgaactcccccggcagcgcccacttcctggtcccggcgatgctcaacctccggtcggcgctcgtcgccgcgggcctcggcggccgcgtcaaggtgtccagcgcgatgtccggcgaggcgctgtccgcgccggcgtggtccggcgtcgtgggccacgtcctgcggttcctcgagtcggccggctcgccgctgctcctcaagtcgtcgtcgcgcccgtcggaagaagccagcgacgccagggtcggccgcgcgtacgccgcgatgcgcgcgctgggcgtctcgggcgtccccgtgatcgcgacggacctcgcggccggcggcgacgccgtgccgtactactactcctactacggctacggctacccgggcggtcacggtcggcggcggtcgctggcgacgacggggacgttctgcgtggcgctgcaggacgcggaccccgcggcgctgcaggccgggctcaactgggcgtgcgggccgggccacgccgactgctcggccatccagcctggcggcgcctgctaccagcagaacaacctgccggcgatcgcgtcgtacgcatacaacgactactaccaggagatggccagcaccggcgccacctgctccttcaacggcaccgccaccaccaccaccaatgacccaagttcagggtcttgcgttttcgcgggaagctccacagcgggaggctcctccaactcgagcgtgccggtgggcgcaagcccgccgaccagcctctcccctccgacgggcttcgcacctccagtcggctccagccccccgtcgtcgtcgtcggagtttagccccccggcggtcggcaccgcccctttgtccggcttcaccccgccggacggaggcggcttcggcaccccgccgggttccttcaatggcaccgggacgttcgggccgagcggcacgctcagcccttacaacggcggggcccctgggctgtcgcgcgccggcttgagcttgacggctctgtccgccgctgcggtcgccgtgcttctcgcgtccattgatgcgatgtgaatcaaatcatcgatgcagagactagacatcccttttctctcgcgccgcaacatgttcttagttgttgatctactggtcatgtcatgtagatgtcaggtcagatttgtacgtattatttaggtgccgtgaatgtgaagcgaatgtctctgtatgcgtgtgcgttgggtgccgtagttctgatgagcgcatgtggatatacgcttatatgtatgtatgacacgacacaaaacttcagtacagtgatggattatatatttaccggtttggaatcagaaa

SEQ ID NO: 156057 - DNA, 1171 bp, Zea Mays
gtctgataatttagaaaacgagactgatgagccacagcatccggggaattcgactgattcagcaggacacactgttcatgccacccagcccacacccgatatgccatcccaagcttcgcagctcgagacccagctgggtggtactcagtttgaagaaattcatgaaagacaacagcatatccgtagagtgcttgagacgtgtcctgacgaatcagatgtggttacagatcaacagagaggtgatttggcaacagaggaaatggaacacaatgacagtgggccagtttttgaccagaccccaactcctcatgatgatacactgaaagggacaacaaactctggatctgatccaccccttacagagcacgagtgcgttcgttctctatgggatttaatttgttccaaggacattgaccaaagcagggttgtcatagattacggtgaatacaatgcaaactgtatcgatatttatgaatctttcgcggagggcaaatgtcttgagaatgtcttcatgcagtgtttcattgagtgtgttcgtgatgattccaaaaatcatcgtcgaactatgacatctaacagattaatacttgatgtcaatgttggagctctgttaaattttgaagagcaggaacgccacagcaagaatcctcagccgtttgatcaaaatgtgttacagaattgcttgcacaacacattgcctcctttggtaaatctggataaatgcaagtcgatattggtacctatgcttagtaggggacattggacactgtgtcataacttctttcaatcaactagacaattcccgagacctacgtgctcatgcccttcatcatatcacattccatcgcatgaacaaggcgctgccacttccattagatatccagagatttatgtttgcgcgcaagtagttaactatgtgtcagaactaagcaatggtatgggcaatgtaccgtactgtggtattttggccattattgtgagttaacaatgttaggaagcttccttatatgtgctgttttagaacaattgttatgctaccttgtcttaggggtgttacacaggttctttctgtgaacactagttggttggatacttatggttatgctgcgaatatgtgaacatcagatgttttcacttctgtgggcttaaatatgatctttttatatgttat

SEQ ID NO: 156058 - DNA, 279 bp, Zea Mays
accctacgacatctactactcaaacagtatgttccattattctccttgttggcccctacctacctagtactgtacaccacttcatcatcgaactgtctgatgattttttcaaaacttttcatatcttcaataatgaattatccgaggactattcaagaaatgtttcagctgatgcaggtgcaactgcgtgcgtcactcagactcaactgcggctgccacggccagtgctccgtgctgcagaggcgaccggagcgcctccttcggcgtggacgcctcgca

SEQ ID NO: 156059 - DNA, 1718 bp, Zea Mays
gtacgcccttttcctttttctagttccgtgtgcgctgcctgctacctttgcttctcgttcttccccctcgcctctctctccttccaccgagtcacgccgcttccagaaacaagggagggaaccggagacccgggagccgagcagagtcgcaccaaatgctctgatccccgttcgtgggctttcctccccgtcgatccctcctccatggcgcgcgtcctcccgctcgagactgccgagatggccagaggcgaagaggcagtggtagacatgccaaggtcatcagccggggcgtcatgcacagcagttgaccattctgagcagagcagaaaggatgatgaatatgagaggctggttacaagagctcaacatgcaacatctgatgttggcacgacaattttatctgagcaaccaaagtcaagatctttcatttggtggatgaaagttctgcttggctgcttccttcttatattagtgggctatgtcttcgtgaaatggggggtcccctttgtctttgagaaggttctcttgccaatcatgcaatgggaagccagtgcttttgggcgtccagtattagctattgttctcgttgcatctttggctctctttccagttattctagttccttctggaccttctatgtggttagcaggaatgatctttggatatggttggggtttcttgattataatggccgggagtactattggcatggtggttccatattggattggttcattgttccgtgaacgtctgcatgtatggctgacaaagtggcctcagcagatagcactaataaaactcgcgggtgaaggaaattggttccagcagtttcgggttgtcgcgcttttcagaatctcaccattcccatatacaatttttaattatgccgtgactgtgacagaaattaagttcaacccttatctatgtggttctgttgctggaatggtacctgaggccttcatttatatctacagtgggcgtttaatacgtacattggctgacatgaagtacggcaactataaaatgacaccagtggaaatagcatacaacgccatttccttcgtcatcgctatcgccctcacggtcgccttcacggtgtacgcgaagagagctctgggtgacataaaaagtccggacgatggcatcggtaaagacgaagaagatcacggcccaaatggctcaggggtgcgtatgaatcgtcgtcaggagcgtgccgacgcacgttacatagaactagatgatatgtgatggtgtgttggcccggatcttgcttggaaggaggcaccagtaggtcattaggtgcacggctacggtaggtagctagctatagtttacaagaggaggctaaaataatccacacccagctgacgtggtttgcgtgattcgtttcgtgtgctttgcctactgcactgccatactgtctgaatctgaaggtgcagggctactcactactgagttactgaccgagcgatgctgctctcaacgatgtttctgtgaccatcagcgtatcaatcagtccttgatctgaagcctacactggagcttcatgttgaagcatacattggacttgagtagtacatttgtatataacgtaactgctaatagagttagcatatgatctagttttgaacatgaagctcgtgggctgttcagccatgttcggtcccatcctgtctctgtctcaaattatatgttattatgggttttgttttttctgt

SEQ ID NO: 156060 - DNA, 1600 bp, Zea Mays
agggccagttccgtccgacgcgtcgcaacaacccccagggctcaattgacgcgcgggggcgtttcggtcatccagtcatccccctcccctgccaaaggcgaagagcagaagcagaagcagcagcagcaggcgaagaggcagtggtagacatgccaaggtcatcagccggggcgtcatgcacagcagttgaccattctgagcagagcagaaaggatgatgaatatgagaggctggttacaagagctcaacatgcaacatctgatgttggcacgacaattttatctgagcaaccaaagtcaagatctttcatttggtggatgaaagttctgcttggctgcttccttcttatattagtgggctatgtcttcgtgaaatggggggtcccctttgtctttgagaaggttctcttgccaatcatgcaatgggaagccagtgcttttgggcgtccagtattagctattgttctcgttgcatctttggctctctttccagttattctagttccttctggaccttctatgtggttagcaggaatgatctttggatatggttggggtttcttgattataatggccgggagtactattggcatggtggttccatattggattggttcattgttccgtgaacgtctgcatgtatggctgacaaagtggcctcagcagatagcactaataaaactcgcgggtgaaggaaattggttccagcagtttcgggttgtcgcgcttttcagaatctcaccattcccatatacaatttttaattatgccgtgactgtgacagaaattaagttcaacccttatctatgtggttctgttgctggaatggtacctgaggccttcatttatatctacagtgggcgtttaatacgtacattggctgacatgaagtacggcaactataaaatgacaccagtggaaatagcatacaacgccatttccttcgtcatcgctatcgccctcacggtcgccttcacggtgtacgcgaagagagctctgggtgacataaaaagtccggacgatggcatcggtaaagacgaagaagatcacggcccaaatggctcaggggtgcgtatgaatcgtcgtcaggagcgtgccgacgcacgttacatagaactagatgatatgtgatggtgtgttggcccggatcttgcttggaaggaggcaccagtaggtcattaggtgcacggctacggtaggtagctagctatagtttacaagaggaggctaaaataatccacacccagctgacgtggtttgcgtgattcgtttcgtgtgctttgcctactgcactgccatactgtctgaatctgaaggtgcagggctactcactactgagttactgaccgagcgatgctgctctcaacgatgtttctgtgaccatcagcgtatcaatcagtccttgatctgaagcctacactggagcttcatgttgaagcatacattggacttgagtagtacatttgtatataacgtaactgctaatagagttagcatatgatctagttttgaacatgaagctcgtgggctgttcagccatgttcggtcccatcctgtctctgtctcaaattatatgttattatgggttttgttttttctgt

SEQ ID NO: 156061 - DNA, 1861 bp, Zea Mays
aaatagattatagagtccagtttcaccacgttttcattcttcctattgtcagcatcgctctccaaatcccaaaaccctaacctatccatcgtcgccaccgtttaccgtcgctgccgccaatatgggagcaagaggaggaggaggaggcggccgcaaggcccgcaactttgcgaccttccgcctcttcccgcgcgccggcgccgccgaccccaacgaccgcgtgttcgtacgcgtcgacaacaacgactacactgtccccgggttcgccgacgaggactccttcgacccatcccggtccgacccttccgccggcaatggaaacttcggctccgcatccggccccctcccggagcacgtccgccgcgagatcctcgagctcggcctccctgacgacggttacaactacctctcccacctccgcgagctccgtcccgccgccgccgcagcctcatccttcgtccccagctccaccggtcgcccggagcccctcccgctcgatgtcaaggcttatgatgcaagcagggtacgcattggtctcagcgagggtgaactggacgaggggaagacgatgtgtaaggtggctgccaagactgcgccagtgaggcgaattgagaaggctgtcgacccagatatcgccaggttgctcgatgagagcgatgtgtctcatgttgggtccgaggatgaggggctggaggaggattttgtcatcatagctaaccaagctgaggaggaggaggaggatgaggatggagacatggaagaaaagcaagagtggaatggtgtcttcagtgatgttgaagaggaggagttcgattttgaggaggatgagccaaagccaagagtgagacgattgctggatgaacaatttgatttgcttgctttagaggaatatggagacagtgatgatgatgacatgggtgttaaaggtggggaatatgaactgccaaatgaggctattgatgaactgaaactgttccaaaatcagaatgtatgtgttgatgaagaatatagaacaccagcagattttgttcgtcaaaaactggattcaagcatggctgatgaggtggatgaatctgctcgtgtgataaaaaaatgtgctgaatatgctgaaatatatttaaatgaaactgcagaagaggaggtggttgtgcttgtttcggaaagcagtgatgaatctgaagtttgggactgtgagaccattgtttccacattctctaaccttgataatcatcctgggacaattgaaactccaggaatctccagagcgcggttccctagggttttccctggagaaacaactacaacaaatggcatcatcaagcttcatgggaaagagaaactgccagtagaatacctgccacagaggagaagaaatggtgaaaaggagaagaaagtaaagcctgtagaagcttctgtcactgataaatttaaaaaaggagctgagaaggaaacaaaagaggagaagaaggcaagaaaggcagcagtgaaagaagaaaagagagaagcccggaaagcaaagaaagagctcaaaggcctgtataaatcagaaacgcagaaggctcagaaagttgccgctgttactggaccttcttccattcgactaatgtgatggttgatctgtggcacgtttactgatgagcgacgactatgacagtcttgaatccaaaagatcgcctggacaaatgcatcaaagctacgaacgatgtatgataccagttcatatttgtgctatactcatggattttgtcgacaggatacccaatgcttgcttactatatattagttagttgaaggagaagataattatacacacttatcgaaagcatgaaagatccttaaaagaaactttacgtcagaaaca

SEQ ID NO: 156062 - DNA, 790 bp, Zea Mays
aagaaaaaaagggtgaagggtgatccactcttatctttttgtgatgacattgaaaatggaactgatgaagatgattttgagaaacatatatggttcttcttacctatatgcgatctcactttttttgttttttttgtaccacatttatgtgtattcctcaagcatatctgttcattttggcatgtgctgcatacatctttgtatattgctttgacttttttctcttctatattccccacttgtgtgggctggttatagcttgtgatttcacatttcatttgttagcggccaagatgtattcctgttagtttatgactaccactcaggaaagttgattgattctccattccaatctttgttatacctgcaagttgtttgctaacagtgatccttcagagaaagggggacatgggaacaaacagaacaagaatgactaaagaaacaatggttgcttgaggaggaatcaatcgaaagtactgtagttccagttacttactcttaccgggatgggactgggcacaagagagttatccatgtcctttaaggtgacaccaatggagaattccttatggctatgcaacaacagcttgtccatgaaattcgtgaagtatggacaacttcagttgagaatctactttatatgaaggaagaccttatcatccctgatggatgtgtgcattctcttgtaatctacgaagttctgttaaatttagtcgaaccattttctgattctatgttctctcatttgtttgacaacaacacatcttttatgaattaattattaaacaaa

SEQ ID NO: 156063 - DNA, 395 bp, Zea Mays
ataagaaaaatatgtcaaattctcacttaataatggtacaagtaaaaactatcaacaaattctaaaaaagaatttacatgcatgagaaaaaacttgttgggcccctcctcgatgaagtacagccctcacttaacaattatacaaccgaatctaaaagaagtttacgtgacaaagaaaaactggtttaaattcaacttgcttaaagttaaaataccgtcaaaagcttatttacaattgttgggctcctcactgaggtggaacccttcaaaaatatttgtatgctgcttaatgcagcaagcacacggtattctttagtaaaaggcgaaagaatagttcgctttgtgctcgctgcgcagctgcgtgttctgttcgaaacgctgccagctctcgtaaat

SEQ ID NO: 156064 - DNA, 3024 bp, Zea Mays
atgggcaacagcacgtcccgcgtcgtcggctgcttcgcgccgcccgacaaggccggcggcgtcgacctcgacttcctcgagccgctcgacgaagggctcggccactccttctgctacgtccgcccgggcggcggcgccgccgcagactcgcccgcgatcacgccctccaactccgagcgctacacgctcgattccagcgtcatggactcggagacccgcagcgggtccttccgccaggagcctgccgacgacctggccgccgccgccgccgctgccgccggtctgcagcggccctgcaggagcttcggcgagactaccttccggaccatatcgggggcctccgtcagcgcgaacgcgtcctccgccaggacgggcaacctcgccgtctccctcgccggtgacgtgcaggagcccgccgccgcgttcgagagcaccgcctccttcgccgccgtgcccttgcagccggtgccgcgaggctcgggggcgctcaacaccttcctgtcgggcccgctggagagaggattcgcgtccggcccgctggacaagggctccggcttcatgtctgggccattggacaagggagccttcatgtcaggccccatcgatggtggcagcagaagcaacttctcagcacctctttcctatggcgggaggaaggctcgtctcgggcgtcttgtacataggatcagcagacccatgaaaaccgcattgtccagaacattcagcaggagctcacaaaatccaggctgggttcaaaagtttctctcgcatcctatgactcaactgccctgggcaagggacgcaaagtccagatcagaaggctcacagaatggcttggaacccgggatacctgaacatgagtataatgtgacaaggaaccttcagtgggctcatggaaaggcaggggaagatagggtgcatgttgttctatccgaagagcaaggatggctattcattggaatttacgatggttttagtggccctgatgcacctgactttctaatgagcactctatacaaggccatcgataaagaactggaaggactgctctgggtctacgaagacagctctgaaaggagtgatcatgtatctactcatgaagagggtgaatcagttgctgcttctgtggatgctcctcatggtgatagtgaccagttccagagtgacagtgggaaacaagaacaagttggtaattttggaaaacaaaatatttcacctggaaagggttgtgatgaaagtgtcttgcaggttcagccaaactgtaccagcagtgaagagaaaaatttggctacacagggttcaactagtgagaagttggccagggatgagatagttgaggaaatggctggagctgatctgggaaatgatctccaaagtagagaatctcaaaactcaaacagaggtctttcagatacagatctaaacaacaattgtagctgtgcaacagaaaccacttcctattgtgatcagcatgccaaattcttgaaagaaaacagaaagagcaagcgtctttttgagcttcttgagatggaattgctagaagattataacaaaaggttatctaaggcatcaccaaaggaaaggaaaataccgaacttgcatgttacacaggcgggcactgcagaagtgttctcaagaaacacagctgaagtctccaggtgttcattggcagcaactggagaatgttttgatgattctgaagatcttggaagttcaagacacgctgatagtgtacttggcatagatattaaagagtgtactgggtgttccatatctacatcttcatcagggcacaagcaagttacgagaagatttgtgttcggatcaaagttgaggaagatgtacaaaaagcaaaaaatgctgcaaaagaagtttttcccgtggaactacgattggcacagagatcaacctcatgttgatgaaagtgttataaaatcttcagaggtcactaggagatgtaagtcagggcccgtagagcatgatgctgtattgagggcgatgtcacgggcgctggaaacgacagaggaagcatacatggatattgtggaaaatgagcttgatagacacccagaacttgcattaatgggttcttgtgtccttgtaatgttaatgaaggaccaggatgtatatgtcatgaatcttggggacagccgagctatcttggcacaggacaatgatcagtacaatagctcaagtttctcaaaaggagatttacgacatcgaaacaggtcaagggagtcacttgttcgtgttgaacttgataggatatcggaagagtcgccgatgcataatcctaacagtcacctaaacagcaacacaaaagctaaggaactgtcaatatgtagactaagaatgagagcggtgcaactgtcaactgaccatagcacgagtattgaggaggaagtcttgaggattaaagtagagcatcctgatgatccccattctgtctttaatgatagagtgaagggacagctgaaggttactagagcttttggtgctggttttctaaagaagccaaaatttaacgaggcactacttgagatgttcagcatcgactatgttggaacatcaccatatatcagctgcaacccttctgtacttcaccatcgtctctgtgcaaatgatcggtttcttgtactgtcctcagatggattgtatcaatatttcagcaatgatgaggtagtttcgcatgtgttgtggttcatggaaaatgtaccagagggagacccagcgcaataccttgtagctgaacttctttgtcgggcagccaagaagaatggaatgaattttcacgagctactggatatcccccagggtgatcgtcggaaataccatgatgatgtttctgttatgattcctgttctcgttgaggacctgttagttacaaccaaggaggttcaaaggaacaaaagattccagaggaatgtggtggttatcagcctatgatgaatcaacctcaactatgagataatgacagtattgtgattctgaatttgggaatatatgctgtgaccgacctttgac

SEQ ID NO: 156065 - DNA, 3990 bp, Zea Mays
tgcaaaccaccagctccccctctggagtctcgtctcgcttccactccactgcgctgtgctcttccactccactgcctcctccctccctcgctcacacagcttccaacgattccattcccagctccctccctcctctccccaactttttcctccgtcccccgttcctcccctcccaacccatttcaaatcgcaccaaaacccccccgaggacctgcagcgaggcctcccctctccgcgctcgccctagcctagccaggcatccgccccccgcgtagatcccccattcctcggccccatcgctctctcgcccgcccgccgccggcggccagattccggatccgccgggaggtctcgttcggagacgggaggcgccgcccgtgcctgcctgatcggtcgctgagacttggcggcgggtcctggcatgggattgcggcgccggggcatttccccgaccaggcggcgggcggcggcctaagatgcgagggcggctggcccggggtgtggggcaccagctcggggaccgcttctcgccgtgcgccggcgtccgcctgctcatgctgccggccgcccggggccctcggcgacgggcattggggcgcgctcttcccgcgggctgctgagacgcggacgcgccgtgccaccagcctcccgccggccatgggcaacagcacgtcccgcgtcgtcggctgcttcgcgccgcccgacaaggccggcggcgtcgacctcgacttcctcgagccgctcgacgaagggctcggccactccttctgctacgtccgcccgggcggcggcgccgccgcagactcgcccgcgatcacgccctccaactccgagcgctacacgctcgattccagcgtcatggactcggagacccgcagcgggtccttccgccaggagcctgccgacgacctggccgccgccgccgccgctgccgccggtctgcagcggccctgcaggagcttcggcgagactaccttccggaccatatcgggggcctccgtcagcgcgaacgcgtcctccgccaggacgggcaacctcgccgtctccctcgccggtgacgtgcaggagcccgccgccgcgttcgagagcaccgcctccttcgccgccgtgcccttgcagccggtgccgcgaggctcgggggcgctcaacaccttcctgtcgggcccgctggagagaggattcgcgtccggcccgctggacaagggctccggcttcatgtctgggccattggacaagggagccttcatgtcaggccccatcgatggtggcagcagaagcaacttctcagcacctctttcctatggcgggaggaaggctcgtctcgggcgtcttgtacataggatcagcagacccatgaaaaccgcattgtccagaacattcagcaggagctcacaaaatccaggctgggttcaaaagtttctctcgcatcctatgactcaactgccctgggcaagggacgcaaagtccagatcagaaggctcacagaatggcttggaacccgggatacctgaacatgagtataatgtgacaaggaaccttcagtgggctcatggaaaggcaggggaagatagggtgcatgttgttctatccgaagagcaaggatggctattcattggaatttacgatggttttagtggccctgatgcacctgactttctaatgagcactctatacaaggccatcgataaagaactggaaggactgctctgggtctacgaagacagctctgaaaggagtgatcatgtatctactcatgaagagggtgaatcagttgctgcttctgtggatgctcctcatggtgatagtgaccagttccagagtgacagtgggaaacaagaacaagttggtaattttggaaaacaaaatatttcacctggaaagggttgtgatgaaagtgtcttgcaggttcagccaaactgtaccagcagtgaagagaaaaatttggctacacagggttcaactagtgagaagttggccagggatgagatagttgaggaaatggctggagctgatctgggaaatgatctccaaagtagagaatctcaaaactcaaacagaggtctttcagatacagatctaaacaacaattgtagctgtgcaacagaaaccacttcctattgtgatcagcatgccaaattcttgaaagaaaacagaaagagcaagcgtctttttgagcttcttgagatggaattgctagaagattataacaaaaggttatctaaggcatcaccaaaggaaaggaaaataccgaacttgcatgttacacaggcgggcactgcagaagtgttctcaagaaacacagctgaagtctccaggtgttcattggcagcaactggagaatgttttgatgattctgaagatcttggaagttcaagacacgctgatagtgtacttggcatagatattaaagagtgtactgggtgttccatatctacatcttcatcagggcacaagcaagttacgagaagatttgtgttcggatcaaagttgaggaagatgtacaaaaagcaaaaaatgctgcaaaagaagtttttcccgtggaactacgattggcacagagatcaacctcatgttgatgaaagtgttataaaatcttcagaggtcactaggagatgtaagtcagggcccgtagagcatgatgctgtattgagggcgatgtcacgggcgctggaaacgacagaggaagcatacatggatattgtggaaaatgagcttgatagacacccagaacttgcattaatgggttcttgtgtccttgtaatgttaatgaaggaccaggatgtatatgtcatgaatcttggggacagccgagctatcttggcacaggacaatgatcagtacaatagctcaagtttctcaaaaggagatttacgacatcgaaacaggtcaagggagtcacttgttcgtgttgaacttgataggatatcggaagagtcgccgatgcataatcctaacagtcacctaaacagcaacacaaaagctaaggaactgtcaatatgtagactaagaatgagagcggtgcaactgtcaactgaccatagcacgagtattgaggaggaagtcttgaggattaaagtagagcatcctgatgatccccattctgtctttaatgatagagtgaagggacagctgaaggttactagagcttttggtgctggttttctaaagaagccaaaatttaacgaggcactacttgagatgttcagcatcgactatgttggaacatcaccatatatcagctgcaacccttctgtacttcaccatcgtctctgtgcaaatgatcggtttcttgtactgtcctcagatggattgtatcaatatttcagcaatgatgaggtagtttcgcatgtgttgtggttcatggaaaatgtaccagagggagacccagcgcaataccttgtagctgaacttctttgtcgggcagccaagaagaatggaatgaattttcacgagctactggatatcccccagggtgatcgtcggaaataccatgatgatgtttctgttatggtaatctcacttgaaggaagaatctggcgatcttctggatgagtgttgaaacatgacctggtctgttccttgcagccttgcttagtgtagtaaatcgactcaatcaggaaaggcaccaatgtcttgctgtctttatttttcaaccatgttcaaattctggcaatccatgtgccttctctgtcttatacgttttggatttgcgctgcattcttgggcagtccgaattgacgtatacatgtttttctcttttgttattaggaagaaaaggttctttggagggcagatatgttttcccggtgttcccttaaaatttatttttgtattgtggggttattattttattttttctatttttttacatttgctaaaaaaaggaccgttcttttctgagttggggcacagccgcacaggtgacgggtgtccatggtgttgtggatcgatgctaagcaattatgcattatgtttatgtgataaattgtt

SEQ ID NO: 156066 - DNA, 4106 bp, Zea Mays
tgcaaaccaccagctccccctctggagtctcgtctcgcttccactccactgcgctgtgctcttccactccactgcctcctccctccctcgctcacacagcttccaacgattccattcccagctccctccctcctctccccaactttttcctccgtcccccgttcctcccctcccaacccatttcaaatcgcaccaaaacccccccgaggacctgcagcgaggcctcccctctccgcgctcgccctagcctagccaggcatccgccccccgcgtagatcccccattcctcggccccatcgctctctcgcccgcccgccgccggcggccagattccggatccgccgggaggtctcgttcggagacgggaggcgccgcccgtgcctgcctgatcggtcgctgagacttggcggcgggtcctggcatgggattgcggcgccggggcatttccccgaccaggcggcgggcggcggcctaagatgcgagggcggctggcccggggtgtggggcaccagctcggggaccgcttctcgccgtgcgccggcgtccgcctgctcatgctgccggccgcccggggccctcggcgacgggcattggggcgcgctcttcccgcgggctgctgagacgcggacgcgccgtgccaccagcctcccgccggccatgggcaacagcacgtcccgcgtcgtcggctgcttcgcgccgcccgacaaggccggcggcgtcgacctcgacttcctcgagccgctcgacgaagggctcggccactccttctgctacgtccgcccgggcggcggcgccgccgcagactcgcccgcgatcacgccctccaactccgagcgctacacgctcgattccagcgtcatggactcggagacccgcagcgggtccttccgccaggagcctgccgacgacctggccgccgccgccgccgctgccgccggtctgcagcggccctgcaggagcttcggcgagactaccttccggaccatatcgggggcctccgtcagcgcgaacgcgtcctccgccaggacgggcaacctcgccgtctccctcgccggtgacgtgcaggagcccgccgccgcgttcgagagcaccgcctccttcgccgccgtgcccttgcagccggtgccgcgaggctcgggggcgctcaacaccttcctgtcgggcccgctggagagaggattcgcgtccggcccgctggacaagggctccggcttcatgtctgggccattggacaagggagccttcatgtcaggccccatcgatggtggcagcagaagcaacttctcagcacctctttcctatggcgggaggaaggctcgtctcgggcgtcttgtacataggatcagcagacccatgaaaaccgcattgtccagaacattcagcaggagctcacaaaatccaggctgggttcaaaagtttctctcgcatcctatgactcaactgccctgggcaagggacgcaaagtccagatcagaaggctcacagaatggcttggaacccgggatacctgaacatgagtataatgtgacaaggaaccttcagtgggctcatggaaaggcaggggaagatagggtgcatgttgttctatccgaagagcaaggatggctattcattggaatttacgatggttttagtggccctgatgcacctgactttctaatgagcactctatacaaggccatcgataaagaactggaaggactgctctgggtctacgaagacagctctgaaaggagtgatcatgtatctactcatgaagagggtgaatcagttgctgcttctgtggatgctcctcatggtgatagtgaccagttccagagtgacagtgggaaacaagaacaagttggtaattttggaaaacaaaatatttcacctggaaagggttgtgatgaaagtgtcttgcaggttcagccaaactgtaccagcagtgaagagaaaaatttggctacacagggttcaactagtgagaagttggccagggatgagatagttgaggaaatggctggagctgatctgggaaatgatctccaaagtagagaatctcaaaactcaaacagaggtctttcagatacagatctaaacaacaattgtagctgtgcaacagaaaccacttcctattgtgatcagcatgccaaattcttgaaagaaaacagaaagagcaagcgtctttttgagcttcttgagatggaattgctagaagattataacaaaaggttatctaaggcatcaccaaaggaaaggaaaataccgaacttgcatgttacacaggcgggcactgcagaagtgttctcaagaaacacagctgaagtctccaggtgttcattggcagcaactggagaatgttttgatgattctgaagatcttggaagttcaagacacgctgatagtgtacttggcatagatattaaagagtgtactgggtgttccatatctacatcttcatcagggcacaagcaagttacgagaagatttgtgttcggatcaaagttgaggaagatgtacaaaaagcaaaaaatgctgcaaaagaagtttttcccgtggaactacgattggcacagagatcaacctcatgttgatgaaagtgttataaaatcttcagaggtcactaggagatgtaagtcagggcccgtagagcatgatgctgtattgagggcgatgtcacgggcgctggaaacgacagaggaagcatacatggatattgtggaaaatgagcttgatagacacccagaacttgcattaatgggttcttgtgtccttgtaatgttaatgaaggaccaggatgtatatgtcatgaatcttggggacagccgagctatcttggcacaggacaatgatcagtacaatagctcaagtttctcaaaaggagatttacgacatcgaaacaggtcaagggagtcacttgttcgtgttgaacttgataggatatcggaagagtcgccgatgcataatcctaacagtcacctaaacagcaacacaaaagctaaggaactgtcaatatgtagactaagaatgagagcggtgcaactgtcaactgaccatagcacgagtattgaggagttgaatttgtcttggcgacagccaggggtatggccttccccgggactgacaacattattatcatattatcatctagagaacttattgcttgctagtttgacggtagccttatattgtccgatctttagatttgaagtcttgaggattaaagtagagcatcctgatgatccccattctgtctttaatgatagagtgaagggacagctgaaggttactagagcttttggtgctggttttctaaagaagccaaaatttaacgaggcactacttgagatgttcagcatcgactatgttggaacatcaccatatatcagctgcaacccttctgtacttcaccatcgtctctgtgcaaatgatcggtttcttgtactgtcctcagatggattgtatcaatatttcagcaatgatgaggtagtttcgcatgtgttgtggttcatggaaaatgtaccagagggagacccagcgcaataccttgtagctgaacttctttgtcgggcagccaagaagaatggaatgaattttcacgagctactggatatcccccagggtgatcgtcggaaataccatgatgatgtttctgttatggtaatctcacttgaaggaagaatctggcgatcttctggatgagtgttgaaacatgacctggtctgttccttgcagccttgcttagtgtagtaaatcgactcaatcaggaaaggcaccaatgtcttgctgtctttatttttcaaccatgttcaaattctggcaatccatgtgccttctctgtcttatacgttttggatttgcgctgcattcttgggcagtccgaattgacgtatacatgtttttctcttttgttattaggaagaaaaggttctttggagggcagatatgttttcccggtgttcccttaaaatttatttttgtattgtggggttattattttattttttctatttttttacatttgctaaaaaaaggaccgttcttttctgagttggggcacagccgcacaggtgacgggtgtccatggtgttgtggatcgatgctaagcaattatgcattatgtt

SEQ ID NO: 156067 - DNA, 503 bp, Zea Mays
agtcccacccatccagcaacgttactatagcataataatatagtgctcactgctcagcaacgtacgttactaggaacgtacgttacttgagttcccacaagtaattaacggtcccatatatcgtcgccgatcagcaggtagcgcagtcgtcgtcacgcgcgcgcggccggcatatgggtctcccgctggagcagtggcgcggcggcgaggcggacggcaggaaggtcgtcgacggcgacgcgacggcggccgggtgcaggacgcccgacgctgccaacgggcaggcggccggtcgacgcgctggcggcggggactgccccgccgcgccacggaagaggcgggccgcccccgccgccgccggcgtggtcgcgcagcagcagcagcggcgcagggactactacaccggcgacgacgtggaggccttcttcgccgcgcacaacctctagctagatccagcatcagcctgctacataaacgtaccaatgcatgcacgcgaggcacgg

SEQ ID NO: 156068 - DNA, 1940 bp, Zea Mays
agctagcttgtagaggacgactatgcatgcatacgttcggggtcgagatcgagctgaccaatgatccaatagccgccgccttgtggttgtgtcatatatgggggccgaccagtggccgtggccgtggccgtgggcgacgccgccgccgccggccctgctgcttctggcctcactactgccggcgctgctgctcgcgctgtggcgcctggtgtggcaaccgcgggccgtggcgcggtcgttcgcgaggcagggcatccgggggccgccctactgtttcctggccggatccttgtcggaggcgaagcggctggcgcgtgccagccggagaagggttccgcagctggacgtcgcttcacatgacatcatgcccatcttgctgccaccgttccaccgatgggtcgtcgagtatgggaggacattcctgtactggatcgggccaacacctgcaatcttctccgttgatttagagttgattaaggaagtgctcacagacaggacgggcctgtttggcaaggacttcatgatccccgttttcaaagtcctgttgggcaacgggctcatcttagcaaacggcgacgactggaaacggcacaggaaagttgtccttccagccttcaaccacgagaggatcaagagcatgtcggcagtgacggcggaagctacggaacagatggcacagcgatggtgcgagcagctaatactgcacagtggtgcccgtcaagcagcggaaatacaagtggaccgcgccatctgcgacctgactgccgaaatcatcggccgcgccgctttcggcaccagcctccaggaagccggtgaggtcctcctcctgatgcacgagatgcagaagatgggcgccgcggccatggtggatgctcccatactctggtatctgccgacgcggcgcaacctaacggtgcgacgtctggacaagctgttgagggccaagatcactgcgatgatggcagcgcgggtggccgccaattgcggcggtggctacggcgacgacctgctcggcctcctgctggaggcgtggtcgccggagcctgggcggcgccatgctgggagcgacgacgaagggacgacgacgacgacgctgaccaccggagaggtgatcgacgagtgcaagaccttcttcggcgccgggcaggagaccaccgccaccctcctcgtgtggaccatgttcctgctgagcacgcacccgcagtggcaggacaaggtcagggaggaggtcctccgcgaattccgcggcgacgtccccaccaccgacaccctctccagactgaagctgcttcacatggttctgctggagacactgaggctctacccgccgatcgtgtacatacaacggaggactgcctcagacgtcgtgctcaggggcatgctgcaggtgcccgaggggaccgtggtatcgatccccatcggcctgctgcaacgggacagggaggtgtggggctccgacgccgacgagttcaaccccttgaggtttagcaatggcgtcgccagggccgccacggatccacacgcgctgctgtctttctcgctcggcccgagagcctgcaccggcaagagcttcggcatcatagaagcacagatcgtcatggcggtcatcctcaggaacttctccttctcgctctcccccacctacgttcacaagccaaagtatgtcgtctccctcactcccaaatgtgggatgcctctcatcttaaagaacatccatgcttgagaaaagattactggcggcactgtaacttgctaatattatattgtacgttgtgtggcatcgacagatcatatatatatactagaactagtcatgtgcccgtgcgttgctacggattctatatatcacatagataaactctgtttaattgggatatatagttgttcaaacatgtttcaaacatgtacaataatattaattcgacatatttcagtggcaa

SEQ ID NO: 156069 - DNA, 2052 bp, Zea Mays
ctagcctcggatccagctgcggatcatcatcaggttctccgttccactccatggccttccctgctgtgcccctcctcgccgctctgctcctggtcgccgccacgcggctgtgggactacgtcttcgtgcgcctcgtatggcggccgtacgccatcaccaaggggttcagagagcaagggatccatggaccctcctacaggttcttcaagggctgcaacgaggagatcaggagcatgaaggagaagaccgacggtctcgtgctggacgtcggcgaccacaagtacctcccgcggatcgcgccgcactacctcgaatggagggctcagtacggagaaccatttctatattggtacggggcacaagcccgaatttgcatatttgactacgaactagcaaggcaaatcctttcgagcaagtctgggcatttcgtgaagaacgatgcgcaccctactttgttggctctggtcggcaagggactcgggttcatggaaggctctgactgggtgcgccatcgcagggtgatcaaccctgctttcaccattgacaagcttaagattgtgaccgagacgatgctggacttcgccgatagcatggcaggtgagttggaagctgaagcatcccagaacgagaacggagaaacacaagtggatatatacaaacatttcagcgatctgacagttgacaatatcgcctacgccatctttggaagcagctacaagttaggcaaacaagtgttcgaggcacaaactgagctgctggggatcaccatggctactttccttgacgtgcccataccaggatccaaataccttccaacccaagcgaatcggcgaaaatggatgctggagacgaagctcaagagcttactcacgcggatcatacagccacggttagcaagcggtgagcacggaaacgatctgctgggcgtgatgctggactcctgcactgagaccaagcaaggagggaagcagcagcaagtggatcgtctgcgtctcagcttgagcatggaggagatcatacacgagtgcaagctgttcttcttcgctggccacgagaacacagcccttctcctcacgtggtccgtgtatttgctcagcatataccccgagtggcaagaaaggctccggaaggaggtcttgagggagttcgggagggacgctcctaaccccaacgcgctcaacagattgaaagagatgacaatggtgttgttcgagaccttgaggctctactcgcctgctctcttcatgcaaaggaagaccctggccgacatgaccgtggggccaataaaactgcccaaaggcactgcaattgtgatacccattccgatcatgcatcgagacaagcaggcatggggcgacgacgcagacgagttcagtccgatgagatttgcgaatgggatcacgggagcagcgaaagttcctcacggcctgctggcgttctcgatggggccaaggtcttgcatcggccagaacttgtcgatgctggaagccaagtcgacgctggccctgatgctccgcaagttctccttcgctctctcccctgactacgtgcacgcgcccgtggatctcttcactctcaaacctaagtttggccttcccgtcattctgaggccactggataatgttttgatttgagttgggcatatagtacaacaggaagtaacttaggtacatatcaaatttgctagctggtcaaaacgttatatgatgttctcaaccctccgttgttctatatcgttgaaaacaagtattttaatttaggtgcggtttggtttggcgctgcaagcgaaaatggggacgtaaatccggaattaattatagcaaaacatctcttcaagcttgaagtagttcataaatgaagactggtaaagtgtctgtaagttgctacagattctatttatgtctaagtatagaacataaaacataaaaacacggctgatttgttagctaggtggatgtaaatataggtttagagccaataactatggttcaaatcaccatttgtgcataattttaatatttttattatttaatcactactggaatcttcggc

SEQ ID NO: 156070 - DNA, 737 bp, Zea Mays
aattcactcctttcttcttctcctgcatcaggatcatcatcaggttctccgttccactccatggccttccctgctgtgcccctcctcgccgctctgctcctggtcgccgccacgcggctgtgggactacgtcttcgtgcgcctcgtatggcggccgtacgccatcaccaaggggttcagagagcaagggatccatggaccctcctacaggttcttcaagggctgcaacgaggagatcaggagcatgaaggagaagaccgacggtctcgtgctggacgtcggcgaccacaagtacctcccgcggatcgcgccgcactacctcgaatggagggctcagtacggagaaccatttctatattggtacggggcacaagcccgaatttgcatatttgactacgaactagcaaggcaaatcctttcgagcaagtctgggcatttcgtgaagaacgatgcgcaccctactttgttggctctggtcggcaagggactcgggttcatggaaggctctgactgggtgcgccatcgcagggtgatcaaccctgctttcaccattgacaagcttaaggtacacgcaatgcctagctctctctctctctctttaaaaaagaagttcgtttgcagtatgcacgcgagcagcaagaacaatggccgtgctcattgcataaacagattgtgaccgagacgatgctggacttcgccgatagcatggcaggtgagttggaagctgaagcatcccag

SEQ ID NO: 156071 - DNA, 946 bp, Zea Mays
caacgccaagtaggcatcgacgacgacaaacagcaagagcaagcaagagaggacgacatggcggcgccacggagcctggcggaccgcgcgctgcgcggcgtggcggacctgataaagctgctcccgagcggcacggtgttcctgttccagttcctgagcccgctggcgagcaacaacgggcactgcgccacgctgaacaaggcgctgagcggggcgctggtggcgctgtgcggcgcctcctgcgccttctcctgcttcaccgacagctacgtgggcgcggacgggcgcgtgtactacggcgtggtgacgcggcggggcctgcgcaccttcacgcccgacccggacgccgccgcccgggacctgtcggcgtaccgcctccgcgccggcgacttcgcgcacgccgcgctctcgctgctcgtcttcgccaccctcgcgctcctcgacgccgacaccgtcgcctgcctctacccggcgctggagctcgccgagcccaccatgatggccgtgctcccgcccgtcgtcggcgccgtcgcgggctacgtcttcatggtgttccccaacaaccggcacggcgtcgggtaccagcccacgcccgccaccgaggacttccagcacaaatactagccagccggttcgtcgtcgttgcagagtactgtactgcgcgtgtgtctttgattgtctgtctgtctgattcattcatttgcttggtggtgtgggggtgccgtctttgtacgtcgtctctgcttgttcattcgggctttcattaacttacggaatcaggtctgtaataattaatctgtgtatattcttcccgactgcaatgcatgcatcctcaaacacacaattcctatctgaaactgcggcggacgactcctttgatagtcaccctcaccacacacatctcctccctatacttacacttacaattacaaaaaagaaaaaaaaa

SEQ ID NO: 156072 - DNA, 1708 bp, Zea Mays
ccaccgcgctcgccctcttcgtcgttgccgtccgtctccacagtccccacccatattccattttggttatcctcttgcgtcacacctcctccctcctggcctcctcctgcggcccacttatatataccaccacgtcgatgcgctgctccgccggcatctccatcgccgtcgcgccgccgtagatggcctgacatttttcacttcatttgtcatcccaattccacaaacctcgcgcgcggcggcggagggaaacaaaaaaaaaaaggaaggatggcgttggagccggtggcgcgggcggtggcggaggaggtggcgcgctggggcgcgatgcgccagaccggggtcagcttgcgctacatgatggagttcggggtgcgccccacggagcggaccctcctgctcgccgcacagttcctgcacaaggagctccccatccgcatcgcgcgacgggcgctcgacctcgactcgctccccttcggcctctccaccaagcccgccatcctcaaggtgagagattggtatgtggagtcattccgtgacatccggtccttcccagaggtgaagaaccaggaagatgaactcgccttcacccagatgatcaaaatgatcaaggtgcggcacaccaatgtggtgcctgcggttgcattgggtgtgcagcagctgaagaaggacttgggtggtccaaaggcgttcccacctggaatccatgagatccatcagttccttgatcgcttctacatgtcaaggattgggatccggatgctgatagggcagcacgtcgctttgcatgaccctgatccagagcctggtgtgatagggcttataaacacaaaaatgtcacccatgacagtagctcgaattgctagtgaagatgcacgtgctatttgcatgcgggagtatggatcatctcctaatgtcgacatatatggtgatccggggtttacattcccatatgttacaccacatctacatctcatgatttttgagctggtgaagaactcccttcgcgcagtacaggaacggtatatggattctgataagcttgcacctccggttcgaatcatagttgctgatggagcagaggacgtgactattaagattactgatgaaggtggtggaataccaaggagtggtctctcaagaatttttacgtatctctatagtacagcagaaaaccctcctgatcttgatgtacataatgaaggagtaactatggctggatatggttatgggattcctattagtcgtctttatgctcgatatttcggcggggacttgcagatcatctctatggaaggatatggaactgatgcatacctccacttatcacggctgggagattcggaggaacccttgacttaatcgattcataagaagccattcctcattcctgtagttaggactctattgctttctcaattaccgtgctggtatgcaaatattgttctgaaggccagtcacctattagttcagctgtccatgccctatttgttatctttgttgttcattcatcatctcgatggaatgtgatcataattcagaatagttttgcttctggtttgtactgtcattataattgttcaacctccaataatggtatctgtcgagcacccgaggcattgaatttgagtaatggaattcaccataattgttcaacctccaataaagtctgtaactccaattcttcaaagcatgttttttagttcga

SEQ ID NO: 156073 - DNA, 1265 bp, Zea Mays
ccaccgcgctcgccctcttcgtcgttgccgtccgtctccacagtccccacccatattccattttggttatcctcttgcgtcacacctcctccctcctggcctcctcctgcggcccacttatatataccaccacgtcgatgcgctgctccgccggcatctccatcgccgtcgcgccgccgtagatggcctgacatttttcacttcatttgtcatcccaattccacaaacctcgcgcgcggcggcggagggaaacaaaaaaaaaaaggaaggatggcgttggagccggtggcgcgggcggtggcggaggaggtggcgcgctggggcgcgatgcgccagaccggggtcagcttgcgctacatgatggagttcggggtgcgccccacggagcggaccctcctgctcgccgcacagttcctgcacaaggagctccccatccgcatcgcgcgacgggcgctcgacctcgactcgctccccttcggcctctccaccaagcccgccatcctcaagatatgttacaccacatctacatctcatgatttttgagctggtgaagaactcccttcgcgcagtacaggaacggtatatggattctgataagcttgcacctccggttcgaatcatagttgctgatggagcagaggacgtgactattaagattactgatgaaggtggtggaataccaaggagtggtctctcaagaatttttacgtatctctatagtacagcagaaaaccctcctgatcttgatgtacataatgaaggagtaactatggctggatatggttatgggattcctattagtcgtctttatgctcgatatttcggcggggacttgcagatcatctctatggaaggatatggaactgatgcatacctccacttatcacggctgggagattcggaggaacccttgacttaatcgattcataagaagccattcctcattcctgtagttaggactctattgctttctcaattaccgtgctggtatgcaaatattgttctgaaggccagtcacctattagttcagctgtccatgccctatttgttatctttgttgttcattcatcatctcgatggaatgtgatcataattcagaatagttttgcttctggtttgtactgtcattataattgttcaacctccaataatggtatctgtcgagcacccgaggcattgaatttgagtaatggaattcaccataattgttcaacctccaataaagtctgtaactccaattcttcaaagcatgttttttagttcga

SEQ ID NO: 156074 - DNA, 1089 bp, Zea Mays
cgtccgcccaggccagccccgcccccgcccgcccactctcccgaggattccaggttctcaacacaacagacaacaccgctcaccgcatatatatatatatagatgggttccgaggggccttctcccgtcaccgtccacgtcaccggattcaagaggttccatggagtcgccgagaacccgacggagaggatcgtgcgcggtctccagccattcatggagacgagagggttgcccaagggccttgttctcgggagctgcaccgtccttgaggccgccgggcagggcgcgcttggcccgctgtatgaactgctggagtcgaccgtctccggccgggaacgtcaggagcgagtaattctgctccattttggcgccaacagtggttcacataggtttgctcttgagaatcaagctgttaatgaagctactttccgttgccctgatgagctaggatggaaaccacagaggacacctatcatatcgtcagatggaagcatcttacacgcaagacagactacactgccagtggaggagataagcaagtctctccaacagatgggatacgacgtggtgccttcagacgacgctggtcgatttgtgtgcaactacgtctactaccactcactcaagtttgcagagaagcatgggatcgggtctctgtttgtccatttccccctcttcctggcaatcgacgaggaagtccagatgcagtttgtcgcttcccttctagaggtcctcgcttccttgaacttccagtgaacctagtggtagatctaccacttcccggtggtgtattgttcccagattatttgggaaaggtttaagttgttcccaacttacctgtggagaataagatcgaggaatcattcgtggaattatgtgtgtggttcaaaatgtgtaggggaacaaaaacaagtcttctcaaagaacatgtacatgcagtccagatgttaatatcccaagcggtttatatgacaggtgctgttgcagcgttgttctcagagatgctgcttatggatatactgttcgctttagattaaaaccggttgtttagactgatacaactgtaatttataaaaacaaaaacactgt

SEQ ID NO: 156075 - DNA, 1520 bp, Zea Mays
cgtccgcccaggccagccccgcccccgcccgcccactctcccgaggattccaggttctcaacacaacagacaacaccgctcaccgcatatatatatatatagatgggttccgaggggccttctcccgtcaccgtccacgtcaccggattcaagaggttccatggagtcgccgagaacccgacggagaggatcgtgcgcggtctccagccattcatggagacgagagggttgcccaagggccttgttctcgggagctgcaccgtccttgaggccgccgggcagggcgcgcttggcccgctgtatgaactgctggagtcgaccgtctccggccgggaacgtcaggagcgagtaattctgctccattttggcgccaacagtggttcacataggtttgctcttgagaatcaagctgttaatgaagctactttccgttgccctgatgagctaggatggaaaccacagaggacacctatcatatcgtcagatggaagcatcttacacgcaagacaggtatattttaacagttactacctcgataaatcattgagaatctctaagcatcctacttggaagactagtatttcatattatgctgcttacctactgacttactgtcctacatatcctccgttttaatgaacatgctgtcagtcgattgaatccttttcgtttccaacagtagaaacagagtatcgattttccatcattaaacttagatgtaatactttcgatacaccactctcattaaccactgtgcatacagattcgtcctccttaaaaggtcttcgagtaaggaggtttccccaaggaaatactgcgattgatctctaatgttctccagcttctagatcaatgattaatttgcacagctgcctgtattctgtcagttatcttgtcatgtgcatcatctgctgaactacgttttgtttcataataaccaagcagactacactgccagtggaggagataagcaagtctctccaacagatgggatacgacgtggtgccttcagacgacgctggtcgatttgtgtgcaactacgtctactaccactcactcaagtttgcagagaagcatgggatcgggtctctgtttgtccatttccccctcttcctggcaatcgacgaggaagtccagatgcagtttgtcgcttcccttctagaggtcctcgcttccttgaacttccagtgaacctagtggtagatctaccacttcccggtggtgtattgttcccagattatttgggaaaggtttaagttgttcccaacttacctgtggagaataagatcgaggaatcattcgtggaattatgtgtgtggttcaaaatgtgtaggggaacaaaaacaagtcttctcaaagaacatgtacatgcagtccagatgttaatatcccaagcggtttatatgacaggtgctgttgcagcgttgttctcagagatgctgcttatggatatactgttcgctttagattaaaaccggttgtttagactgatacaactgtaatttataaaaacaaaaaca

SEQ ID NO: 156076 - DNA, 2399 bp, Zea Mays
tttcgttggactctccgccgggcgccggagaggcggggaccggcgagtccaccatcccattcccgtaccacccgcttcttccaactccaactctccaaggcgctgtgctggctgctggcctgctgctaccgactgccgcaactgctccgcatcccggccttgattagcagcagttacgcccgcgcaggacagcggccttgattagcgaagtattcctttgccctacctctctccctaccccgttccgacgcggcggccgttgagcacctgcccggaagctatagcttcggccatggcccaagatgccggcgacggcggtggggaactcccgccgcccgtaaagaagaagtcaccggcggaggaggaggccgagaagaggaggaagaagcttacacctgggagcttaatgaagggcattatacggtctgggagcggtgatgccacccctgcagagggcgatcaggttatacttcattgcactactcggacaattgatggtatcgttgtaaattctacaagaagggagcatggaggtaaaggaatcccactcagatttgttttagggaagagcaagatgatcctaggctttgctgaaggcttcccaacaatgctgaagggtgaaattgctatgttcaaaatgcagcctaaaattcactacgctgaggacgattgtccagttgcaactccagatggctttccgaaggatgatgaacttcaatttgagattgaaatgttggatttctttaaagccaaggttgtggcagatgatttaggggttgtaaagaagatagttgaagaagggaagggatgggaaacacctagagagccatatgaaataacagcacggataactgcaagaacagcagatggaaaagaaattattccgagtaaagaagaggcatatttcttcactattggtaaatctgaggtacctaaagggcttgagatgggcatcggaacaatgtcacacaaggaaaaggcaattatttttgtcagtagtacttatttgacgaagtcctcactaatgccacagcttgaaggccttgaagaagttcatttttacattgaactggttcagtttatccaggtgagagacatgcttggtgatggtcgactaataaaacgacgtgtatttgatggaaaaggtgaatttccaatggactgccctcttcatgatagcctattaagagtgcattataagggcatgctccttgatgaaccaaagtcagttttttatgatacacgtgccgataatgatggtgaaccgttggaattctgttctggagaaggcttggtaccagagggttttgaaatgtgtgttcggctaatgcttcctggtgaaaaatctattgtcacctgcccaccagattttgcatatgataagttcccaaggccagcaaatgttcctgaaggagctcatgttcagtgggaaattgaactacttggattcgaaatgcccaaggattggactggcttaacttttgaagaaatcatggatgaggcggacaaaataaagaacacgggtaacagactgtttaaagaaggaaaattcgaacttgcaaaggcgaaatatgataaggtgcttagggaatataaccacgtgcatcctcatgatgatgaagagggaaaaatctttgctaattcaagaagttccctacatctaaatgtagccttttgctaccagaagatgggcgaatacagaaaatccattgaaacatgcaataaggtgctggacgcaaatcccgtgcatgtgaaagctctttaccgccgaggaacgtccttcatgttacttggggacttcaacgatgcaaggaatgattttgagaagatgattaccattgacaagtcatcagaacaggacgctacagctgccctccttaaacttaagcagaaggaacaggaagccgaaaagaaggcgaggaagcagttcaaaggactctttgacaagaagccaggagagatatccgaagttggtgtagaatcagacggtggaaaggatgcaggtgatgcaagagtcaatggtggtgaggcaacgagtgctgatagaggtgtaaacacaaatgacagtccgaccagcgaatcagagtacgccttcgaggaagagaggcccgggcttcttggcagcttgtggccctctgcgaggatgatcttctcgtctcttggcatgaacaggtgcgcgatactctgaggtgtccagtgtgtactgcggagacatccaaaatcatggcagtgaagaggaactgccccgaggtttctggtatttattagagtaagtttggatgtatggaaaatgaacagtgtgcaagatgtaaatgagaaacaatatgcagggaattttaatagctatctaggattcattatcttccacggcataaaataatttcccaggtttcttctag

SEQ ID NO: 156077 - DNA, 738 bp, Zea Mays
gtttgaaagcaaagttatgtggtgctaatgctaaattagcaacttatttcattcactctttgagcaggtgctggacgcaaatcccgtgcatgtgaaagctctttaccgccgaggaacgtccttcatgttacttggggacttcaacgatgcaaggaatgattttgagaagatgattaccattgacaagtcatcagaacaggacgctacagctgccctccttaaacttaagcagaaggaacaggaagccgaaaagaaggcgaggaagcagttcaaaggactctttgacaagaagccaggagagatatccgaagttggtgtagaatcagacggtggaaaggatgcaggtgatgcaagagtcaatggtggtgaggcaacgagtgctgatagaggtgtaaacacaaatgacagtccgaccagcgaatcagagtacgccttcgaggaagagaggcccgggcttcttggcagcttgtggccctctgcgaggatgatcttctcgtctcttggcatgaacaggtgcgcgatactctgaggtgtccagtgtgtactgcggagacatccaaaatcatggcagtgaagaggaactgccccgaggtttctggtatttattagagtaagtttggatgtatggaaaatgaacagtgtgcaagatgtaaatgagaaacaatatgcagggaattttaatagctatctaggattcattatcttccacggcataaaataatttcccaggtttcttct

SEQ ID NO: 156078 - DNA, 801 bp, Zea Mays
tttcgttggactctccgccgggcgccggagaggcggggaccggcgagtccaccatcccattcccgtaccacccgcttcttccaactccaactctccaaggcgctgtgctggctgctggcctgctgctaccgactgccgcaactgctccgcatcccggccttgattagcagcagttacgcccgcgcaggacagcggccttgattagcgaagtattcctttgccctacctctctccctaccccgttccgacgcggcggccgttgagcacctgcccggaagctatagcttcggccatggcccaagatgccggcgacggcggtggggaactcccgccgcccgtaaagaagaagtcaccggcggaggaggaggccgagaagaggaggaagaagcttacacctgggagcttaatgaagggcattatacggtctgggagcggtgatgccacccctgcagagggcgatcaggttgaaaggactgcctgccctctctgccttcatatatcgtgcaatgaaattgtggaagtgcatacaatcaggaacgtgtgtttccctctgcagccgaaccactgtttgatgttgattgatgagcaaggacgtttggaactttagttgtacttgatcgagtaaatcatccaacaatttgtgtaattggctattggttcttacatagaatgaccctatttgtggcacaagtttttggtgtaatgccgagatcatccattaactgacattttctattgtgtcctgtaaatacacattaacagaacttatcctaatggtcaaatgaaactcttgtgttggat

SEQ ID NO: 156079 - DNA, 570 bp, Zea Mays
tcgtacaaactacacatggtaaaccccattcaagtgcgaccttgagcagaacgtggtggcagatcatagcactccttggccaggcggacacactgcaaccaatgcagcacctccgaattcgggtccttctccggaaccacatctctaacagtaatctggatcgcaccacgatacgaggcgatcttccctcgcaccctcaagagggtgcctagacgcacctcctctgacattttcagcgccatctctgcagtaggatcatggtctgacgatggcccagaggacgtcctagcattcaagtactggtggttcagccacaggatgcacggcacacacccagtgccgtcgtcgaccaggaagcggaggaacttctccctgcggtcacgcgagacgacgactccgacgagctccgcacgcgcaaccctacggccgcagcggaggaacgtcgtcggagaggtgtgccgtacggttaaggagagaaggtccgcggcgagaatcttgacgtgcacgagatggagaggttggtccattctgccaaattacacgagaggcggaagcgatggagcgggaagg

SEQ ID NO: 156080 - DNA, 3054 bp, Zea Mays
aaaacgaagaggaaaatgatacggatcgagaggcatagcacaacggaaagcaacccgaaagcctctacttttccgcccccagcaggccaggactcttcaatcgctcgcgccgtttcttcatcccctcgccatccttccttcgatccagcgttgcctgtcgtcttcgcctgcacggctgcacctaaagctctgacctttttccccactttcccttggcatctactgccttgtccggtgtagaaaacaacggatttcgttgtgttgttttgctgcggtttttgtcccctcccttctcactcggcgagctttgttgttcactttggattccacgggtttgtttcggattaggaaggctcggtttttggtctgggaaggccccccttccgaggcgatgaatttggtgcgggttgatggcgtcctgtcaggagtccgctatgcaatgatgggttctttgaagccgaggtgaatctttgacctgcctagtttgcgattccaaattccgagctcccaccgcttcttgatccgccgggcgccatgggcctctgctacggcaagtcggcggcggtccaggagccggcggtagcggaggagaacaacaaagccgatggcgcggcggcgggccgaggcgatggcccgccggcgtcgccggtgaaggtgcctcggacgcccaagcagcccaagttgtccttctacttgccgagcccgctcccgccctccagctacaagggctcgccggcaaactccagcgtcgcgtccacgccggcgcgcggcgggttcaagcgcccgttcctgccgccgtcgcctgccaagcacattcgtgcgctgctggcgcggcgccacggctcggtcaagcccaacgaggcgtccatctccgagggcggcgaaccagaccttgggctggacaagagcttcggctactccaggcactttgcggccaagtacgaccttggtcgagaggtggggcgcggccactttggcttcacctgcgctgccaagtgcaagaagggcgagctcaagggcgaggacgtcgccgtcaaggtcattcccaaggccaagatgactactgctattgccattgaagatgtcagacgggaagttagaatattgagttctttggcagaccacaacaacctagtgcagtttcatgatgcttttgaggatgaagaaaatgtatatgttgttatggagttatgcaaaggaggtgaactgctggacaggattttggctagaggtggaaaatattccgaggaagatgctaaggttgttattcaccaaattctaagtgttgcttcattttgccatcttcagggtgttgttcaccgggatctgaaaccagagaattttcttttcatgtcaaaggatgagaattctgccttgaaagtcatagactttggtttatctgactttgttaaaccagacggcagacttaatgacattgttggaagtgcatattatgttgctcctgaagttctccatcgatcttatggcactgaggcagatatgtggagcattggagtaattgcatatattttgctttgtggaagccgccctttctgggcaagaaccgagtcaggaatttttagagctgtcctaaaagcagatcctagttttgatgaaatcccatggcctaccctttctgctgaagcgaaagacttcgtaaggaggctgctcaataaggattaccgcaagcggatgactgctgcacaagccctctgtcatccatggatccgtggtacacaggaagttaagatttatctagacatgataatctacaggcttatgagggcttacataagttcatcttctctacggaagtctgctttgagggctcttgcaaaggcactgacgacagatcaactcttctacctaagagagcagtttacattgttagatccaaacaagagtggccatatatccttgcaaaatatgaaggcggccttgatgaaaaattcctcgggtgcaatgaacgattctagggttcttgactttgttaactcaatatgcaatatccaatatggaaatattgattttgaagagttttctgctgcggccattagtgtatatcaaatggaaggcctggagacctggcaacaacatgctcaacaagcatatgaattgtttgacagggagggcaaccgaccgattgtgatcgaagaacttgcatcggagctcggacttggcccttcggttccacttcatgttgttctccaagactggatcagacattcagacggaaacctcagtttcctcggcttcataaaactattgcatggagtttcttcacgcacaatccctaaagtccaagataaccgtttgcattgaccaatccctaatctcagggccagtgcatgccatgtctggctgtagaagttgcatgagaccatcagaccagtacaaagattaacagatcaggttagggtaagaggtaaaattctctcagtagttgtatatttgctccgcccttgtcctcaagatgttaagaggaatgtacagatttggtttgggaagaatggaaaggctaaaggatttggggctgttttttttttgcttgtttgttccagtaacacaggtattgcatttcttcttcttaatataatgatgtgtagctctcctgcatattcgataaaaaatgcaggcattgccttcgtttgtgctgtgcacctgtgtcgcttgatgacatgctattgttgtttttatttataatttcataacgggagttgatgtacagctttgtaactttggaatccttaccacaagaaggattatgcgacctctaccgtataatgacgaggctatgggaggtgatttgaggaaaaggccagaagctgggacatcttaggaaacagattccatgagaagaaatccaaatatatggtgaaatgcagatttgctaaagtcgccgagcttttgtatgcgttcgagatttccagtgagcgtggatcctttgttagcctgtttggcaactcacttttcaataccatagcattacagtaccatggtttactaattgcaatgtacaatctaacatctgtttggcgacaaagtattttgaca

SEQ ID NO: 156081 - DNA, 172 bp, Zea Mays
ctgcgtcctcgcggcggggactgcgggcgttgctggcgcgggtccgggggcgctgcggccgcgaggacggcggcggggaatgcaggcgctgggaggggaatcgagcgggcggagctggcgcggcggatttgcgggaccgggggcgcggcggatttgcgcgcggcagcagccg

SEQ ID NO: 156082 - DNA, 524 bp, Zea Mays
tgactagaacgtcatgtctgatgtagagttaaatatatctagttgttacacataagaattgtgatgtcttgctttaagtctgtatcctccttagtataacttatctatcttgcgctatttatgctcctattcactcatatgcattatgcatatcatctaggtacgttaattaatcacgtgatgtgaaggacaagagctggattaatcacaagacgatgctgatggacgaagctaaagtggatgaatcaaccaagtgccaggatgggagatactcaccaagtgatcgtcatttaacaacactaacatagtgttatcccagggctttattccctgttgtttttcaggttataagtttgttctgttgtggatggtgctaagtgccggtgggctcgaccttcttatataactatatcccatcttttgcttctttattgaggactgacacttaagctagcatgtattttaaaacttataaatgttttatacattcaaattgtaatctttttgaatcaacttcttttgta

SEQ ID NO: 156083 - DNA, 1989 bp, Zea Mays
ctcggccgtgctttgctcggcccacccaaccccgtccctatcgccccccatcgtctccctcaccaccagtcaccaccgccagctccccgcctctgcctcctccaggcgaccaggcccccagctttggcgtcgacggacagatacagcggcgccatttccaaagagagacacagatcgcgctgcccaaggaaaagaagccgcgccttctcccctctcccttctttcttcccttttattgacgggatcgtccgccggttccattccaacactaattcctcacgggggttccatttggattcggcctggatccgcgagatcaagaaaaacgcctgcaattaaactgccaagattaacaagaaaaatataaccaaccttgattggctgcaataatctttcttcaaaaaaaaggagagagccttcggcggcggccgatcttggctcggatggcagcgccgccgcagccgctggcgtcgctggactactggcggtgcttcttcagcggcgcgcgggctagcatctttgacgccatcgacgccgccatccgagtagccgccgccgaccaccccgacgccctccgcgcgcgccgcgacgccatcgccgagcgcctctacaccgcgattgtcgcgcttcctgcaacacaggaggcgccggggcagtccaccccgggccagccggcgctcctccttcccgagggcgccgccagcgtgcccagcctctgcagctcggaccgcgccgaggtcgtcaacaacgacggcggcggcgcgccgctgaccaacagcgatgacgacgtggtcgccgaggcgttccgtatcaaggcggctctctccaatgcccaagacaagtcggaggccgagttgctagagcttctggggaggctggggcagctggaattcacggtggacgccatcagggctactgggattggaatggacgtgagaccgttgcgaaagcatggctcgaaacagattcggcaactcgtccgatcgctcattgaaggttggacggctactgttaacgagtggatgaacaatggagatcccgttgtagatcatacaccacaatcagtggatgcttcttgcctggatgaggaagaagggggtctgccatcccctcccatggatgaggcagccttgtttgcagcaccatgtacctcaatcgagctatccgagatattagggccgacgtcaaggacggcgggcagcgtaatccggcaagccaggagtcggtcagcaagcagtcacctacggtccagcagtatgacccagagcagaactggaagctagaccagtctgccacgaagcaactgcgaccaaacgaggcattcggctggcagacaacgcagcggtcgaattcgggggcgcaagcgaaggcgtcgagtgcggcttttggtccagggagacctcaggcgtcgcagatggggaggccgagatgctcggaggtgaagccagagcagcagcagcagcagcagcgagacgtctcggtggctcaaagaagaccgaaaccgacagtgcctaagccgccgccaactgagcatgatgaatatccagtccgcgcgaagcaacagcaacagcttgcaaaggatggcaagctggaggctacgaagcgtaagctacaggagggttaccaagaattcaacaacgcgaagaagcagcggacgatccagatggtggatccacaggacctgccgaagcaagggagccggaacctggcgctgagcggcaagccgaggaacagcagcaacatcaggaaccggctggccgtccgccgctgacgctgatcccgtccaccccatccatgcttttcactagttctggagacccgccctgcttgtatactataacctggatatatggatcagtctagcgtttctttcttttggggtccagcaccatatacacatatacttgtagcccccctctaacgtctttgtcttgggtcatacttatagagatatattaacggtgcattacatggatgtagatttatagt

SEQ ID NO: 156084 - DNA, 1657 bp, Zea Mays
gcaagaaacttggaagcacgcactgagcgcagcatacaaagttgagagatggatgtggtctcgtggtttagccaggtctcggtggtggtaggcgttctggccgtgtgctggaccgtggtatggcagaacctgcagcacatccacctgcagcagttcttcgcgcgcagcttcaaccgtcgcgcgcggcggctcgccgcggtggtcgacccttacctgtcggtgaccttcgaggagtacgagggcgggcgcatcaagagcagcgacgccttcgacgagatcaagtcctacctcaccacggcgagcacgcgcgacgtgcgccacctcagggccgagtctggcggcggcggccgccgggacgccgccgccaccgacagggacaagctcgtgttcagcatggccaagggcgaggaggtcgccgacacattccggggcgccatggtctggtggtcggccgccggcgtgccgccgcccagtgacaccgtgccgtggagccgtgcctcacgcgccgagcgccggttcttccggctcgagttccacgagggccaccgcgacctggtgctcaacgagtacctcccgtacgtgcgcaggcagggccgcgccgtcatggccaagaaccgccagcgaagactctacacgaacatcctcagggaaggctttgacgacggtttctaccgagacgtttggacgcatgtcccgttcgagcaccccaagacgttcgacaagctggccatggacccggcgaagaagaaggacgtcatcgacgacctcgacatgttcaagcagagcaaggactactacaaccgcgtggggaagccgtggaagcgggggtatctcctgtacgggccgccgggcaccggcaagtccaccatggtcgccgcgatggccaaccacctcgggtacgacgtctacgacttcgagctcacgtcggtgaagaccaacaccgacctccggaagctgctcatagagaccaagagcaagtccatcatggtgttcgaggacatcgactgctcgctccaagtgaccggcaagcgcaaaagcaaggaggaggaggagggttcgaaagacgggaacggggacgacccttatgcggcgaaacagaaggaggaggaggaggacgccaagagcagcagcaaggtcactctgtcgggcctgctcaacttcatcgacggcatctggtcggcgtgcggcgaggagcggctcgtcgtgttcaccaccaaccacgtcgacaagctggacccggcgctgatccggacggggcggatggacaaaaagatcgagatgtcctactgcgacttcgagtccttcaagttcctggcccggatgcacctccgcgacgacgtcgtcgaggcacacggggcgcagtgcgaccgtgttagggctttgctccaggaagtgaacatggtgcccgtcgacgtcggcgagcacctcacgcccaggagccccgacgaattcgaagacgctggaccgtgcctcgcgaggctggtcaccgcgttggagaaggccaagaaggaggctgctatactaccgaagccacaggcccaaccggatgtcagcggcatcgttgtggacgatgatagtaataactagggtccgctagggctactccgatgaccccaccatgttggttcgagctgtttacctttctacagtgcatata

SEQ ID NO: 156085 - DNA, 2093 bp, Zea Mays
ggggttacgttttccgctttttcgttttcattatccctactgattgggatatggagtatcatatatggggtcatcgtaagttgtaatttcttttacgggaaaagggtaactgtcaatgtaaaagaaaaagaaaagaaaagaaaagtgcgacggcatgtatacgcttcatcgaaaatatccccaagctggcatctcttgctcgacgatgcttacatcaattggagcggccggagtactattcatcagcaagaagacaagcaatagttctgggcagggcacgcaaaaggcgacgcccatgcatgctcccataagcgcaccagcattgcctggtacggggagtagttcggagcagttgggtgctgtgctgcgttggaacggttggccttggtcttggtttccactccttcctatatgatccccacgcctccggtggtgtgccactctaaccaccgcacctagctcgggcatccatccactctcgtccccgtcccgtacttacctgactgagctcactcacacacacgtacgatgccgaagccgtggaggccggtgctggcgtcggccaccaagtgctgcgcggcggaggacgcggcggtggcgcccgacggtctggcgcggtgccggccgcagcagtcggagctgtcgcggcggctggcgtccttcaggcgcctctcgtcgctggccaacagcccggtgtccgccaccgccaccacggtggcggacaaggacggcggtagcgtgaagcaggccgcctgcggggagatggcgggcccgctgcagctgcactcgttcggcctgggcgagctccgcggcgtcacgcacgacttctccagcaacttcctgctcggggagggcggcttcggcgccgtgtacaagggcttcgtggacgccggcatgcgcccgggcctcgacgcccagcccgtcgccgtgaagcagctcaacgccgcggggttccagggccaccgggagtggctcgccgaggtcatcttattgggccagttccgccacccgcacctggtcaggctgctgggctactgctgcgaggacgaggagcgcctgctcgtctacgagttcatgccgcgcggcagcctcgagaaccacctcttcaggagtaggatctcgacgacgacgctgccgtggggcacccggctgaaggtggccatcggcgccgccaaggggctggctttcctccacgccgccaacacgcccgtcatctaccgggacttcaaggcctccaacatcttgctcgactcggacttcactgcgaagctgtcggacttcgggctggccaagatgggccccgagggcgaggacacgcacgtgacgacgcgcgtgatgggcacccacgggtacgcggcgccggagtacgtgcagacgggccacctgaacgtgaagagcgacgtgtacagcttcggcgtggtgctgctggagctcctgacggggcggcgcgccatggagcacgtccgggcccgcagcgcgcacgcggagcagcaggtgaagctggtggactggacccggccctacctcagcggcggcagccgcaggctgcgctgcatcgtggaccagaggctggcgggccactactccgtcaagggcgcgcgcgccgtggcgcagctggcggtgcagtgcacggcgcagcagccgcgggacaggccgcgcatggcggccgtcgtcgaggcgctcgagaagctgcaggggctcaaggacatggccgtcgccgtcggcctctggcccgccggcgccgccaccgcgactggcgccggcaaccggagcgccaaggtcgttcgtgccgaggtcaagggcgccggcgcagcgtcgcggcggaggagctcgtcgtccaagctggcttgaatcgttgatcgatcgtcgaacagggctggacgtacggtcggagccgtgtatcggggggtttgtttgtatataatgtgccgcgagcttggcgtctgtgtatgcagtctagtacgtagtagcttaggcgcgccgagattggtgaggcagagatcatgcatttctccaattcatcacgcatggttttgcgaaacgaagatacatacaacttttttccccttcttgttcacatccatgtcctccgt

SEQ ID NO: 156086 - DNA, 1890 bp, Zea Mays
agaaattagaatgtcaattgtgcaaagccagttatttagggtgtcaaaaatacaaatttctcctcccgaacaccctactcgttctcccccatcggcgccgctacgaccagcgtttgagccactcgccgccgcgcacgatcctccacgccttgctccagtcctcgtcggcacgcctccttcccaaccctaaccctagcactagcagtcagtcgagcggcggcaagtcaagggtctgtcgagcgggccggcggcgaagaagtgtctagcgaggcgagtcaggtgcagggggacccacccgcagcggtggcgtgaagcgcgtttgactggatcgaccaggttggcggctaaacagaggaggttgcttgtttgttttctccgtccggctgcggttttcctttgactggatcgatcagatttgccggcggcggcagcggtcccccggcaaaggcgtggggatccctgccgggatggaggtgccgtggctgctgctggtgcacgggtcagtgacggcgctggtggtggtgtcgttcctctgcgggcaatggcccatcttcgagggcaccttcatccagagcatcaaccacttcctcacctttggggcctaccactacctcctgcggtttgtgcagtctgtgtgcggcactggggctagggatctcgtcctcggtgtcgagggatactgctgcgaccgacccaacccgatattgcaggtattttatgttgccataattggagtgacatattttataatagtgcagacatctttccagtatattcctgggtattatgtgagtggattgcacagatatctgagtgttgtggctgtttctgttggtgctatactcttcgtgcttactagcttttctgatcctgggactgttactgctgaaaatgtttctcaatacgtatcttcctacccatatgacaacattatttttgtggagaaagaatgttcaacttgcaagattactaggccagccagggcaaagcactgtagaatatgtgacaagtgtgttgctcgattcgatcaccattgtggatggatgaataattgcattggggagaaaaatattcggtattttgtggcctttttagtttggcatttccttatatgtctgtacggggctttaatccttggcttcattcttgctggtgaaataaaagagcggaaaattatatacattctgacagtttattatggcatcgataattcattctcgggcttgtttccacatgttgcacagtggttgcttgctgtgcataacactcagatactcttgagtgtatttttggctatattagcactgctccttggtggcttttgtgcttaccatgcacatctttgtttgacaaatacaacaaccaacgagacattcaaatggcaagactacatcatgtggatgaaaaaggaaaatgaagcaaaggcggacgctgccacgctcagatccagcataggctcggccaatagtgatgcacagaaagctcctccaagcaaatggaggacgttcttcatgagatcccgcacaccaagcatggaaccagttgtgagaaacaacatatatgacagaggcatgattacaaacctgtgcgaggtggtcgtccctttatcagaacggaaggcattttcccgcatgaaatcagattgatgtcttttgttgcagttgctttgtcaccaaactgttgttgtatatcagtgtagaatttgcgacacattttttttggtcataccatagaggcataggggaaaatattcaggataatcgtgttcagtacctacgacctatttattataggtgaaaggttttgaagttgcatttgcctttgcaatacgccgatgtcactattctgtttttagaacatgattctgaaatggcactaaatatgaaactc

SEQ ID NO: 156087 - DNA, 991 bp, Zea Mays
atggtgggcaggaggagatggggaggagcagaggaggaggtgaagcttaacatcgacaacgtgttcgtggagcttgagtccctcaagaagaagggcaacaaggcagggcggtcaggccgacctccaggaagaagcatagtgcagggcccgtgcagcagcagtagcaggaaccgcctcagaaggaggtcttctgggctcccgcaccactcactaccgacgccctctctcgtggccttccccgccaacgacgatgactcgctcgacaacccggatctggggcccttcctcctcaaccaagcgcgtgacaccatggtattgtgcgagggcggcggcaccactcactacctcgtgacgccggtgcaagaactgtctgccaactgcgaggctaaggctggtgcagccggcggcggcgatgaccagcaactgcagcctgtcgagcccgactagagggttgtagaagactcaatggaggggagtacgccaatgtctgttggtcccaccgtcgcattcatggacgtttcggccacccacccctccacccaaactggcatctccttgctccctagtgagtttttctcttgatctatcttctctgttagttgttttcggcgttgtcaaaatcttaggtgccaaaatggacgaaagaacaacatgaagaattgggttccaaaggacttgagggctacttcatcacaacctataactgaagatcttgaataactgactacatcaccatgcaagactaaagtttttattttattaataaaatgaccccaaagaagaagaaactagatgttgcagtgcagtctacacagtcatacgttgtatgttagtttctggaaaaaaactagatggttcattgtggtatgtgtgtgacagaagtctatatgtgttccttttagtttgttaagtgatctcggcaaggactaggtaactgtgtgtttgtcttagttgaagtgaactttctgtgttattgttaagtgaacttggg

SEQ ID NO: 156088 - DNA, 1161 bp, Zea Mays
atggtgactatgtctggcacccgcaccgccctggcgcacgagggcttggattatggtcccaggctggtggcgccgcgccgcagcaggctaagcgtcgtcgccgttgcggtgcggaccaggccggccagcctcgcagtcccgggcctcccgcccccgacgccggagcccgtgctgccgtcgccgcccgtggccgcaggcgtcgcggcggtgctgctcgaggcgggcgtgccgcccgcggacctccggcgcgcggcggggatgtgcccggagctgctgtccgtgcccgcggaggccgtcgcggccgcgctccggttcctgacggaggaggcgggcgtcccggaggcggagctccagcgcgtgctccggcggcgcccgcgcctgctcgtgtgccccgtggcggcgcggctgcggcccacgctctacttcctgcgcgcgctcggcgtgcccgacctgcaccgccgcgccgacctgctgtccttctccgtggaggacaagctgctgccgcggatcgagttcctcgagtcgctaggcctgcccgcgcgcgccgctcgctccatggcgcgccgcttccccgcgctcttcggctacggcgtggacgggaacatgcggcccaaggcggagtacctcctgggcgtgggcgccatgggccgccgcgccgacgagctgtacgagttccccgagtacttctcctacgcgctggccgcgcgcatcgtgccgcgccacgaggcgtgcgccgcgagcggggtcgcgatgccgctgcccgccatgctccgccccggggaggccaagtttcgcgccacgctcgatagctgcgtcgggtccacgctgccccggaggcggtcggcgctgtggcacgccacgtgggtggacgacgacgcgacggcggcgaaggagacgatggtgaacggaggcattaattcttgcttggctatacttggttgtgcttatatagccatgcagttagttgctttggtagaagaaagaaagttggaggcatatgacagaattcacagacaaaagctcatcatagaggagaagttgaatctggagcatgtgaggatggacaagcagaaagaaaatgaggacaaggaggaagaggatatgatcctaagcatggatctgaacaaattcaacatgttgcttcgggagtacaccaagtga

SEQ ID NO: 156089 - DNA, 1080 bp, Zea Mays
attcacatacaaagagatagagaaaaaagagaaaagcttgcgagcgatggtgactatgtctggcacccgcaccgccctggcgcacgagggcttggattatggtcccaggctggtggcgccgcgccgcagcaggctaagcgtcgtcgccgttgcggtgcggaccaggccggccagcctcgcagtcccgggcctcccgcccccgacgccggagcccgtgctgccgtcgccgcccgtggccgcaggcgtcgcggcggtgctgctcgaggcgggcgtgccgcccgcggacctccggcgcgcggcggggatgtgcccggagctgctgtccgtgcccgcggaggccgtcgcggccgcgctccggttcctgacggaggaggcgggcgtcccggaggcggagctccagcgcgtgctccggcggcgcccgcgcctgctcgtgtgccccgtggcggcgcggctgcggcccacgctctacttcctgcgcgcgctcggcgtgcccgacctgcaccgccgcgccgacctgctgtccttctccgtggaggacaagctgctgccgcggatcgagttcctcgagtcgctaggcctgcccgcgcgcgccgctcgctccatggcgcgccgcttccccgcgctcttcggctacggcgtggacgggaacatgcggcccaaggcggagtacctcctgggcgtgggcgccatgggccgccgcgccgacgagctgtacgagttccccgagtacttctcctacgcgctggccgcgcgcatcgtgccgcgccacgaggcgtgcgccgcgagcggggtcgcgatgccgctgcccgccatgctccgccccggggaggccaagtttcgcgccacgctcgatagctgcgtcgggtccacgctgccccggaggcggtcggcgctgtggcacgccacgtgggtggacgacgacgcgacggcggcgaaggagacgatggtgtgacgtgcgcattatattggtaggctggtagcgtatatgcgtatgtccatatggcattggctgcttgtaagtatgagagccatgatgaatctggttgcgtgcttcttccatcaggtgaacggaggcattaa

SEQ ID NO: 156090 - DNA, 2381 bp, Zea Mays
agctcaataaggactgcatgcacgcaaacgcagcagcagctaaagtcctattccggcaggaggggcagcacgcacaggcacagctagcagctgtctgctagcgcgcgagagaggagagcagcttggaaccgtacgtacgcggtgcgcccaccccaccggcggatgccatgacgacgtacagggtctgctgcttcctgcggcggttccgggcggcgtcgaacgagccgtcggaagcggtcggcgacgtgttccgggcgtacgccgacggcggcggcggcttgctcggggaggaggcgctgcggaggttcctgcgggaggtgcagcgggagaccgacgctggcgccgacgcggcggccaaggaggtggtggcgttcgcggcggagcacaggctgctcagcaagggccgcggcctcaccgccgaggggttcctccggtggctcttcagcgacgccaacgccgccctcgatccgcgccgaggggtataccaggacatgggcttgccgctgtcgcactacttcatctacacgggccacaactcgtacctgacggggaaccagctgagcagcgggtgcagcgagaggcccatcgtgaaggccctccacgacggcgtccgggtgatcgagctggacctctggcccaacgccgccaaggacgacgttgaggttctccacggcaggacgtggacgtcgccggtggagctgatcaggtgcctggaggccatcaaggagcacgccttcgcgacttcgccctaccccgtcatcctcaccctggaagatcacctcaaccgggacctccaagccaaagtggccaagatgctgaaggaaaccttcggggagatgctgtacgtgtcggagtcggagcacatggcggagttcccttccccggacgagctcaagggcaagatcgtcatctccaccaaggcgcccaaggagtgcttccagactaagagcagcaaggacgcggcggcgacggaggaggaggagggcgtctggggggaggagatctccgacgacaaggccaccgcccgtcaggcacgtcctcgctctccacccactgcaactttatgtctgcatctgcatgcatgctgctccaccaaggcgcccaaggagtacttccagaccaagagcagcaaggacgcggcggcgacggaggaggaggagggcgtctggggggaggagatcaccgacgacaaggccaccgcgcgtcagatgtcggagcagtccagcggcaagtacacggcggatgaggagaccgccggcgccggcgcagaggatgagatggaggtggaggcggaggcggaggccgagaagaagtcgcggcaggggacggaggacaacgagtaccggcgcctcatcgccatccagctcaccagacggaagcacgacatagagcaggacctccgggtggacccggacaaggtgacgcgcgtcagcctcggggagaaggcgttcgagaaggccatcgtctcccatggcgatcacgtcgtcaggttcacgcagcggaacctactgcgcattttcccgcggtcgacgcgcatcacttcgtccaactacaacccgctgatggggtggaggtacggagtccagatggtggcggcaaacatgcagggccacgggaggaagctgtggctgacgcaaggcatgttccgggcgaacggcggctgcggctacgtgaagaaacccgacgcgctgatgcgcagcaagccgttggacttcgacccgagagccgagctgccggtgaagacgaggctgagggtgacggtgtacatgggggacggctggcggttcgacttccggaagacgcacttcgaccggtgctcgccgccggacttctacgcccgggtgggggtcgccggggtgccggcggacacgaggatggagcagacgcgggtggcgatggacagctgggtcccggcgtgggaccacgagttcgggccgttcccgctggcgatgccggagctggcgctgctgcgggtggaggtgcacgagtcggacaaccaccagaaggacgagttcggcggccagacctgcctgcccgtgtgggagctccgcccggggatccgctccgtcaggctgtccgaccacaagggccagccgctgccctccgtcaagctgctcatgcgcttcgacttcttccccgcctccgactccaactccacgcagtgatcgatatatactgtgtctggcagcgcgtcaatgaatgaatgaatattcagagaattcgttttgtgcggtgtttctgttgttgtatgtgcttgtgcatatgaatgactgaatgtctatgagtgagtgtgtgattatcttcagtggtgttgataactaagtgaggtaataaattaaagatttattatgttaatacaatggacgctgataaataattgt

SEQ ID NO: 156091 - DNA, 1988 bp, Zea Mays
agctcaataaggactgcatgcacgcaaacgcagcagcagctaaagtcctattccggcaggaggggcagcacgcacaggcacagctagcagctgtctgctagcgcgcgagagaggagagcagcttggaaccgtacgtacgcggtgcgcccaccccaccggcggatgccatgacgacgtacagggtctgctgcttcctgcggcggttccgggcggcgtcgaacgagccgtcggaagcggtcggcgacgtgttccgggcgtacgccgacggcggcggcggcttgctcggggaggaggcgctgcggaggttcctgcgggaggtgcagcgggagaccgacgctggcgccgacgcggcggccaaggaggtggtggcgttcgcggcggagcacaggctgctcagcaagggccgcggcctcaccgccgaggggttcctccggtggctcttcagcgacgccaacgccgccctcgatccgcgccgaggggtataccaggacatgggcttgccgctgtcgcactacttcatctacacgggccacaactcgtacctgacggggaaccagctgagcagcgggtgcagcgagaggcccatcgtgaaggccctccacgacggcgtccgggtgatcgagctggacctctggcccaacgccgccaaggacgacgttgaggttctccacggcaggacgtggacgtcgccggtggagctgatcaggtgcctggaggccatcaaggagcacgccttcgcgacttcgccctaccccgtcatcctcaccctggaagatcacctcaaccgggacctccaagccaaagtggccaagatgctgaaggaaaccttcggggagatgctgtacgtgtcggagtcggagcacatggcggagttcccttccccggacgagctcaagggcaagatcgtcatctccaccaaggcgcccaaggagtgcttccagactaagagcagcaaggacgcggcggcgacggaggaggaggagggcgtctggggggaggagatctccgacgacaaggccaccgcccgtcagatgtcggagcagtccagcggcaagtacacggcggatgaggagaccgccggcgccggcgcagaggatgagatggaggtggaggcggaggcggaggccgagaagaagtcgcggcaggggacggaggacaacgagtaccggcgcctcatcgccatccagctcaccagacggaagcacgacatagagcaggacctccgggtggacccggacaaggtgacgcgcgtcagcctcggggagaaggcgttcgagaaggccatcgtctcccatggcgatcacgtcgtcaggttcacgcagcggaacctactgcgcattttcccgcggtcgacgcgcatcacttcgtccaactacaacccgctgatggggtggaggtacggagtccagatggtggcggcaaacatgcagggccacgggaggaagctgtggctgacgcaaggcatgttccgggcgaacggcggctgcggctacgtgaagaaacccgacgcgctgatgcgcagcaagccgttggacttcgacccgagagccgagctgccggtgaagacgaggctgagggtgacggtgtacatgggggacggctggcggttcgacttccggaagacgcacttcgaccggtgctcgccgccggacttctacgcccgggtgggggtcgccggggtgccggcggacacgaggatggagcagacgcgggtggcgatggacagctgggtcccggcgtgggaccacgagttcgggccgttcccgctggcgatgccggagctggcgctgctgcgggtggaggtgcacgagtcggacaaccaccagaaggacgagttcggcggccagacctgcctgcccgtgtgggagctccgcccggggatccgctccgtcaggctgtccgaccacaagggccagccgctgccctccgtcaagctgctcatgcgcttcgacttcttccccgcctccgactccaactccacgcagtga

SEQ ID NO: 156092 - DNA, 1018 bp, Zea Mays
tcttccctccccattattactggaacaaaaagaaaaaaaacacgagaaaaatcaaatcaggagacggggattccagagagccccgttcgggtagggaagggaaggagaggcgaagcggaggcgagatgggggcggccgaatccgtgccggagacctccatacacgaattcaccgtcaaggattgcaacggcaaggaagtgagcctggaaacctacaaggggaaggtcctccttgttgttaacgtcgcctccaaatgtgggttcacggagaccaattacacgcagctgacggagctttatcagaagtacagggacaaagacttcgagatattggcattcccttgcaatcagttcttgcgacaggagccaggtactgatcagcagatacaagactttgcttgcaccagatttaaagctgaatacccagtttttcagaaggtgcgcgtaaacggaccagatgcggcgccggtttacaagtttctgaaagctagcaagcctggtttgtttgggtcatcaaggatcaaatggaactttaccaagtttctggtggacaaagatgggaaggtcatcgagagatacggaacctcgacagctccaatggcaattgagaaggacatccagaaggcccttgaggaataattttttgtgagcttgtctcgtctcatccaccacacacttgcagcagaaataggcacttgctgaaatatttcgtcgtagtaacattcagaccggacgtctttgcttatctgtagtaaaaattctgtgtaatgttaccctccttttcgccttccgttcgtgtaagtagaggttgtattaagtagccatcatctgctagcttttgccctttctgtgtgaagaagtgaagacatggtatattgatgcaaaacttaacgttggtgaagcatgtatgttttgacgctcgttccggatgacggactggtctcatcgaggctggtggtactggacggccatgttttgcgccatatcacactgggcgggcttgtgttactggcctgttt

SEQ ID NO: 156093 - DNA, 801 bp, Zea Mays
tcttccctccccattattactggaacaaaaagaaaaaaaacacgagaaaaatcaaatcaggagacggggattccagagagccccgttcgggtagggaagggaaggagaggcgaagcggaggcgagatgggggcggccgaatccgtgccggagacctccatacacgaattcaccgtcaaggattgcaacggcaaggaagtgagcctggaaacctacaaggggaaggtcctccttgttgttaacgtcgcctccaaatgtgggttcacggagaccaattacacgcagctgacggagctttatcagaagtacagggacaaaggtctgttctttgcctgatgtggttcttgatctgttgttgcgcctgaaatgtgaatctctctggaagttggtgcgtagaagtgggtaattggagtagtgcacgttgatgcttgttggaacagtggttcttgtcttctgtttgaagtggaatggcaaaaaatcacgaaaaatattctcctgaaaaaagtgtgcgagtagtcttgcccaagggagattttacattgcttgccacacagcattcataccaaaagctttgtttacctgtagctcatttcttcaactattttcagacatgcatgtgttttatgcagcttagattagataggcagctggtgaagtgcgcatacaatttcattgcattcgcttatcaaatctgaatgatctcccgttttctggagtgcttggatagtagttctaacttgcagataccttttgaggatcagcgaagggttctgaaaggagcctgtgagaaccctgtttccca

SEQ ID NO: 156094 - DNA, 111 bp, Zea Mays
aaatgtgtaactatgtttggagctacaaggattataatccaaggtggtactaaactactaaaccaccagacaccaatacaagtacacaacctggcccacatgggccaacaa

SEQ ID NO: 156095 - DNA, 1632 bp, Zea Mays
gttcgtgcaccgagcggagaaacaggggggtgagcgacgagctgcgccgacgcagaggagggagcggacgtggagcttgcgctgacgcagaggagcgcgatgagatgcactgcgtcagtcacggatgatgaggcggcggacgcggcggcctggatgaagcagtgcggtcgccggttggaaagccgctgagatgtgaacaaaaccgcagcgagcagaccggtgttgctgtcaaacattgtaaggagggcactgagagctctattttctggtcttctcttggtggaaagcagagttatacaagtagaaatgttgtacctgatgttgttcttagagaacctcatttgtataccttctctcttaggaatggttactgaaattttcaatttttcacaagatgatttgttgaccgaagacatgatgatacttgatacacactctgaggtttttgtctggatgggtcagtgcgtggagacaaaagaaaaacagaaagcatttgacattggccagaaatacgtacaaaatgccgtggcctttgaaggaatttctcctgatgtgcctctctataaagtcaatgaagggaatgaaccttgcttcttcaggacattcttctcctgggatagcacacggtccctggttcatggaaactcttttgagaagaaactttcagttcttttcggaatgcgttcagagggtggcaataagagctcaggtgatggtggaccaactcaaagggcatcagccttggcagctctttcatccgcattgaatccatcgtcgcaaggaaaacagtcagatgagaggcccacaaaacccagcagcacacaggcgcagtctcattcaggccaagggtcacagagagccgctgctgttgcagcactttccaatgttttgactgcagagggatcgcacagcccccgccacagtaggtcgtccccaacagcagatgctgagaagactgaattagctcctgcttctcctcaccagttggaaacagggcctgcagaagatgtccggacagagcctgatgtctcacaggaacaaactgctaacgaaaacggaggccagaccacctttagctacgaccgcttggtatcaaagtctactgaccctgtcagtgggatagaccacaagcgcagagagacatatttggtggacaatgagttcgagaccgtgtttggcatgaccaaagaggagttctacgagcagccaaggtggaagcaagagttgcagaagaagaaagctgatcttttctgaactcacacacacggctagctacgaataaaagccctccccgttgcgcgaccctttctctctccacggctgtcgtccagcattctcaccatgctcgttccacggatgcgtgatcaccagcagctttatccgtgagttgtatactctttatctgcacacgttttgggcgcgttatatatattattattattcccctagcccctccattattctggagtccacgttctggaagttgacctttcacgtgtttctttttgtaatcattaaaaatcaatttgttcagatgtcattaccagtgagattttcgtatgtaatgatgcactggcaccaaggtgtatggaacattttttttttttttgctataagacttgagcttctatt

SEQ ID NO: 156096 - DNA, 3123 bp, Zea Mays
atgccagccgtggcagctgctccagcagccacggaccagtgtgggaggcaccacaccctgatccttaggcgtcccggccctagcagcaacagaatcacatccctcttccatgcccttgccctcagtagtggcggaacccttcagggtctcgatctcctcctcgggggcgaccttctcctggctcgcctcaccgttcggtggctcaatcggtcaatcgaccgtggacaccaccaccagaggctcatcagcttcgatgaggagggagggtggtccccgttggcgtcatccaaagtcaggttcgaggcgcaggcgcacgagtggcgcgacacgactgctcctgatccggtgatggggttcctggttcttggacggctccttcaactgggaatgggggcgactggaagtgagcaaggatggaaggggagcgtggcatgggggcgacgatggaaggcgggtggtatcgcctgccgggcggcacggtccggcccgcccgaaaacggcaggcacggaccggcccgatacgtccctctccggctctccctctccagtcggccatcccaatccctaaccctaaccctaatctcctcttctcagactctccctctcgcgtcgtccgtcgtcgtgcacttgacccttgtctccggctctgggctccggcttggcaggtcgccggccgactacgtggtcgtgctagtgccgccagtgccgtcgaggtacggtgccgagatagaagtgtcgagatcttcctcaccagtccccactccccagtcggcattctctaaccctaatacagaggcagagaataatgttgagattgaggatattattattgatgtcgatgattcttttcatcctgatatatttgatccaagatattgggattctcttgattctaagcagattgatattttagcgcaaaagggtcctagaagggacttatcaattcagaaaggtcatcggaaaggtcagttggcaaatgacgggtataatgattggatacatcttggcgctaggcttaaagagcatgagacaagtcctgatcataatttgagtatggtcacttggtatgaattgcgcaatagattggcaaaggatgacactattgataaaactgtccagcaacaacttgagaaagaaaaggaccattggagaaagtttcttgccaagcataatctagcctttcgtggttctaatagtaagttgtatgatgatagcaatgggaatttcttgggcttagtagagatgttggctgaattcaacccagttattcaagaacatgttcatcgtattacaaatgaagaaactcaagctcattatcttgataataagattcagaatgagttgatacacttgcttgcttctgctattaagtctgaaattattaagaaaataaagaggacgacgtgcaaaggaggtgcttatcttttcgatatccacttctggatcgggaaggattctagccaggatgaagctggaaccgccgcgatcaagacggttgaactcgacagcatgcttggaggtcgcgcggtgcagcacagggaaccacagtgctacgagtccgacaaattcctctcgtatttcaagccatgcatcatacccatggagggtggttttgcctctggctttaagaagccagaagtggacaagttcgaaacgcggctgtatatttgcaaagggaagagagctatcagagttaaagaggttccctttgctcgctcgtcgttgaaccatgacgatgtctttatcttggacactgaaaataagatatatcaattcaacggcgccaactccaacattcaggaaagagccaaagcgttggaggtgatccaacatttgaaggagaaataccatgacggagtgtgtgctgttgcaattgtcgacgacgggaaattgcaagcagaatcagattcaggagaattctgggtcgtttttggaggctttgcgccaatagggaagaaagcagtaagtgatgatgatgttgttcttgaaactacatcaccaaggcttttcagtattagtaacggccaactgaagttagaagacactgttcttacaaaatcaattttggagaataccaaatgctttttacttgactgtggggctgagctatttgtgtgggttggtcgggtaacacaggtagaggacaggaaagctgccagtgcggcagttgagaaattcattattaaagaaaatagaccaaagacaacaagaataactcaagtgattcaaggttttgagaatcacacattcaagtctaagtttgagtcatggccagtaagtaacacggcagggagtgccagcacggaggaaggccgagggaaagttacagcactcttgaagcagaaaggtgttgatgtcaaaggaatatcaaaaactagtgtgccagcagtaaatgatgaaattcctccacctttgctagatggtggtggaaagctcgaggttttgctgaacttaatcacattttcctaccaagtttggtgtattaatgacagtgtgaagattgctcttccaaaggaagaacttggaaaattctacagtggagactgttatgttgttctctacacttatcattctgttgacaaaaaggaagagttctatctaacttactggattgggaaaaatagtgtacaggaagatcaagagtccgcttttcaaatagctaatacaacatggaattctttgaaaggaagacctgtcctgggtcgcatttatcaaggaaaagaaccaccacaatttgttgctcttttccagccaatggttattcttaagggtggtaccagctctggttataagaaatatgtagaagagaagggtctgaaagatgaaacatattgttctgatggcgtcgctctcattcaaatttctggaacagcagttcatagcaataaaacaattcaagttgatgcggtcccagcatccttgagttccacagattgttttgttttgcaatctaaaaactccatttttgtatggaatggaacttcaagttctgttgaacagcaacagtgggcttctaaagttgctgaatttctgaaggtatggaacaatggaaccaaatttgacatttttttcacgcatggtaaccttggtatggggcgtcagttaaggaccaactgcccataa

SEQ ID NO: 156097 - DNA, 1949 bp, Zea Mays
ggggagcacacagctcggcggggcgggcagcgagcgggcgcgcgagctcggcgtcgtggcggagcaaaacttccggggcggggggaggagagagaaactttgaaaggacccagttttgcggggggggcgcgggtctctggatggggacaacacgtgcggcattgccgagaggggttgcgagagcgacgcttttggaggacgaagacgacgacgagggggcgcgccgcgacggtgagggtggaggacgccggcgatgggagggggctgccgccgccgtcgccggcgacggggccctacgccggcggtaggtcgcgcgggccgcggcggcagggcgagaccatagccaagggccacaagaactacgagctcatgctcaacctgcagctcggcatcaggcacgcagtaggaaagcaaggtccaattacacttgatctcaagtcatcagcttttgaccccaaggagaaagtatggacaaggttccctccggaaggctcaaaatacacccctccacacagctcatgtgatttcaaatggaaggattactgcccgcaagtattccggacattgcgcaagttgttcaaggtcgatgccgcagactacatgctatctctttgtggagaccaggctctccgggagctgtcgtctcctggtaagagtggaagcttcttttacctcaccagcaatgaccagtacatgataaagacgatgaagaaatctgaagtgaagatatttctgaagatgcttcgagcttattataatcatgtcagatcattcgagagcactctagtcacaaagttttttggtcttcactgtgtcaaattagccggagctaaccagaagaaggtccgttttgtcataatggggaacctgttctgctccgactactctatccataggcgattcgacctgaaaggttcatcccttggacgcacgactgataagccgcagacagagatcgatgagtacactactctcaaggacctcgatctcaacttcatatttcggctgcagaagcattggtaccaagagttccaaagacaggtcgacagggactgtgagttcctggagcaggaaaacatcatggactatagtcttctggttggtgtacattttagggacactagggataggctattgaccggaggttcgttcgatagcgattgcagcagaggatcatcgcctcaattgtcaagaggagacacggatccaaacaggttagccaagataaagcttgggtcgaacatgccgacgagagctgaacggacgataaggaagggcgactgcgaggtgcagatcatgggggagcctacgggggagttctacgacgtcatactgtattttgggatcatcgacatactccaggactacgacatcagcaagaagctggagcacgcgtacaagtcctttcagtacgacccgacgtccatctcggcggtcgatccgaagcagtactcgagacgcttcagggatttcgtgttcagagcgttccaggaagacaagttcgatttgtgactgaagaaggcacaaggaagccagcctaccgggtgccggccgctgacatgtacggataaccagtgttgaaatgcagagtcagacatgcatggcactgctggcatcgcattgcagcagagcttttggtgaccctacctgcttgctacttccacaccagactgcagcgcacggcagaagcttcagggcaggccgtcaggctgatgaagccctgagggggattcagctggcactcatgtagaagcgagggaggctccaattcgagatgtcggtgcatttcaatgtttttcatataaaaagctatgcctaagaaaaaagcatacatgcatatagaaaccaactgatattagcgtagacgctgacaacctacggagaaatttgtaatggcagttcagggatgtaaatcttttcttacgaggcaacaggtcacagttcttatt

SEQ ID NO: 156098 - DNA, 108 bp, Zea Mays
gttgatttttagagaagcccaattcacccccctcttgggcatcgtgatcctttcatacttgtatcatctcgatgtattgtatttgaatgaataacattccttcctttt

SEQ ID NO: 156099 - DNA, 452 bp, Zea Mays
caggtatgtggatgatgggagaaccttttggcagcacatagtcacttcttctgcaggatgttcagatgcacaatactttgaggaactttatcaatactttatgacagaaaaggcctcgaagctttgtgaccctgatgctgaaaatgtattcaaagctttgaggaaagctggtgttaaaactgcagtggtctccaattttgatacccgtctacggccacttctgcaggccttgaaatgtgaccactggtttgatgcagttgcagtctctgcagaggttgcagcagagaagccaaatccaataatatttttgaaggcctgtgagttcataggtgtgtagcccgaagaagctgtgcattttggtgacgatcgtagaaatgatatatggggagctagagacgcaggctgtgatgcttggctttggggcagcgatgttcgctcttttgaattgaggt

SEQ ID NO: 156100 - DNA, 240 bp, Zea Mays
ataaatttttgtagaaccacatatccattaactttggcgtcacttggtgagagcctccatagcttcaaagaagagaggaaccatctctctatttggagttttgactgcacatttcacaccaggaacaccaaccgcagctgtaacctctataagaaaggggattccgcggggcatcttcgcggacagatacagaacatccatgtttgcatttttccgcttggctataaagaacacatttga

SEQ ID NO: 156101 - DNA, 361 bp, Zea Mays
gcgataaatagcgagagtaccatcttgtaaactttattgaaaatagtacatttaggatcttcagatatggtgctttctaatcatttacttcttttatatggcatggtgaaagggcctctaccgagttggttaggtggtctgagtagcatttctcaggtcttgagttcgacttctcgtgggagcgcagggtgtggttaaaaaaatccgctcgtctgtcctacgtcaaagtacaggtttaaggctcagtcctggttgcggtcgttctcacatgggtttcgatgccgctgtgtatggatgaggcaggagttcagaggttttctcgacctgtgtgagaagttcttcttaatacaatactaggtgg

SEQ ID NO: 156102 - DNA, 2376 bp, Zea Mays
gacctgagacctccagtcctgcgcgccgatccttggagacctgcacgccaccactgattggagacctccgcttctcctgcgcgccgccagccgtcgccgatccgtggccatcaggtcgtccgccgcctccagttctgtggtcgtgttttctgccatcagccagcccgtctgccgtcgtgagatctcatggcaacgagtgcatctactgatgctagcagcagcgaaggaagttttccagtcgcaaataacactgccatcgcaaaacaagtcttggctgctgcttgtatggtgatgatgagaaaaaaccattgtggaggtatgccgagatacttgaaagaactggaaagggtttgggagggcaacacgaggattaggtgtagactctgtaaccatgtttataatggaagatattctagagttaaagcacatatgttgaaaattcctggttttgggtgaagttttgtcgagtggtgacagtacatgttcttgaacaattgaaagctgaagttgctgcagccagtgttgttgctgatagaaccatgcctagagatacccgacttccagttgagggcaatgagaagaggaaaaggaggggtgtttcagctattgaatctagcttcaatttgggtgttcgaagacatcttgatgaactaatagctagaatgttttacactggtagtctgccttttaatcttgcacgtaacccatattttagaaaggctttcatgtttgctaccaataacccaattggagaagatggtccaatgtttcttagagcgatcaacactgaaggaatatccaagaccaaggagtatattgcagagaagatgttagcagtaattgatgagaccccttgtgttgtgcatactttgaatcttgctttgaagaacatatgtgcttctagggaaattgaaaatgtgctttatactgaattccagtggattagcgaagtcattggagatgccagcatgattaaaaatttcatcatgaatcactccatgaggttgtctatgttcaatgagcaaagcaatctgaaattccttgccattgctgacacaagattttcctctgctattgtgatgttgaagagatttattgctataaaagatgctctttcagtgatggttgtgagtgaaaagtggagtgcctatagggaagataatccacgtcaggctcaatttgtaaagaagattgtgaatgatctgtggtgggataaagtgcgctatttccttagtttcactgagcctatctatacaatgatacgagcgacagatactgacaagccatgcctccatttgatatatgagatgtgggacacaatgatagagaaggtgaagagtgtgatctatcgtcatgaaatgaaagagacacatgaagaatctatcttttactcagctgtgcatgacatcttggtgagtcgatggacaaaaagcaacacgcccttgcactgcttggcacacttactaaattcaaagtattacactgatgcatggatcaatgaggtcctcaaccgacaggctcctcataatgatgaggaaatttcagagatgagaaatacttgtttcaggaggtatttttctggtgcagaattaaaaaagattaagttgcagtatgctaatttctctttgtttggacctggattcaattcatttgactcacttgaggatagaagttatatggaaccaaaaatgtggtggggaattcatggccattctgctccagaattaaagaagttggcacttaaattacttggacagccagcatcatcttcctgtgctgaaagaaattggagtacatatgggctgatccatagttcattgagaaacaggctaaatcctgggcgtgctgaggatttagttttcacacacccaaaactcgcgtctttctttctagaaaatctgatgaataccgttgtggtccattagcaatgtgggatgttggagctgacactttcgaagctgattttgagggtggtgctgattttcttgagcaaagctgatcgatactggatgagccataacttgaagaaagattgtttgaagatcttgaggcattgggtttgaccgaagatgcagaatggaatctagttgttgtttcatgtctggtctgttagaattagaacttagaacttgtgtggtgaactagtgattatttgcgagtctgctggtatagcgtatcgttacacatgtttttggcatgctggattcattgatttgagtctagataaattctggaagaggaagtagatgattactttagtcaaagttgttgaacattaacttctaatgcccttaaactgaactgatcggcggtggtctatttcagacatttcaacatttaattttatttataatatatattgtgtatcgtcgtatc

SEQ ID NO: 156103 - DNA, 8760 bp, Zea Mays
tgttggatcttgaggacccgctgtatccaccgttccaccgtccacgcggcgcttggcttggacgcggcgctgtgcgcggtacgggcgtacgcccgtgccagttccgggtatgttttttatggaattttgactcggacgtgggtaaccgccgcgccactccgcccgcaccttttttcctccccacccggaccggccacccccttcgcttcccccggaaatggcgcgccacctcttccccactccgctcctggccaccctctcctctccattactccagtccgcgattccgcaccatctccgctcagccccgcgcttcccctcaactttccacaacctcgaccaatcggatcccgcacggagcgcgcgccgcgattgctcgccgtcgtggcgacctcgcattcttctgcaaggaagggtttgatgccatgacggagtgctagaggccgaggaggagagtcgaagatgatgcttgggctagtgcagctgctggtggggttcgtcgtcgcctgggaagccgtcgagctcgtcctccgccacggcctcctcctctccgtcttcaagctcgccatcctcgccgccctcgccgctgcggccggatgcgtcgctatcatcttcttcgccagggcggtagcctgggtactccaacgcgcggccaagctctccatcggttgccgctcctacggcttcaattacctgagggacatcaccatttcatcaccgaagggcgctgttgagtctatctgcattggtgaaattagacttggcctgcggaaaccgatcacccagctgggatttacagtactaacccatggcccaatcctgcaactgcaaatctctgatttggatgttgtcctcaggcaacctgtgaaatccactaacaagaagaaacccgcccctcgcaaaccgatctcaaccacaacagctaaagcaaaaggaaaatccaaaggacaagtaaaatggaggctcataacaagcatggccagtctgttgtcattatccatagtggagctgaggcttaaggctccaaaagctgctcttggtatcaaggacctcaagactgatatatctaaaactggaggactggatccagttcttaatgttcaagttaatatcatacctttatttgtgcaagcactggattcagacagcattggaaacaacacattggtgtttagtaaattggattggtgggttagtggacaatattgttcagccatggacacttcagaccatagctctttcctgtttgaggatatatcactctcatgtgatcttcatcagagggataaagcaattagagtaaaaaatttggacttgatgcttggtccaattgttgtgaatttggaagagaaattactagcaaaaaagaaaccatctgcctctactgttgctgagcaaaaggatgaaccttctgtggataataaatcagcagccagatctgaagggggcaaacttgcatcactaaataagaagatcagtatgtttccagaaaaggttagcttcaatatgtccaaacttgttctgaagtttttgcctaaagatcatggcctctcaatcaacaatgaaattggtagcatatctttgagatgtacaaggttacaaccacaagacttcggagaggtcacaacacatattcggttggaaactgatgtaacggagattcatcttctaatggatggcgctacctccgtattagaggttgtaaaagtttcaacagttgtttcagctaacattccgtctcagccagcattaccagttcaagctgaagtagatatcaagattagtggattccaatgtaacctcattgtaagcagaattaagcctctgattagaataaactcagataaaaagaagcctcttgttcttcatgaaaatcctcagcaaaagaaggcacccaaagaaaaattagcattgtctttggcatgtactatgtcagttcccgagttgactcttgtgcttcatagtcttgatgacgtaccactttaccattgtatttttcaatcagctaatgtttctgccagtaagatgatagaccgaggaactcaattgcatggcaagcttggtgacttaaaatttcttgttcctagtaaacaccaacagtcaatgaaagaaggtgcttcaggcaccttactacacattagccattcaactcttgacttggaacaaaatgatccaggccaagataatgatgaggaccatgctaaatctgctatctctgttaatatatctggaatcagaatgcacttctgtttttcctatcttgagtcactctgtgcaactgcaatgtcatacaaagtgtttatgaaaagcattttgcctcctaagaaacgatctgtccaggagaatgcttctcaaaaatctaccaagaaagccaaaagagcactgcttctcaaaatcaatgttgcacagtgctctattgtgtatgatggtgaaatgaggctggaagatatgagtattgctgatccaaagcgtgtaaattttggttctcagggtggtcgtgttgtaatcatcaacgaagctaatggttccccaaggatggcttatgtaaattctaccagtcttccagatcataagaatgtccacttctccacttctcttgagatctatcagtttggtgtatccttgaataaggcaaagcacaccatgcaggttgaacttgagaacttcagattgacgcataaagaggaccagcttgataataaacctgtagaggaaaccaagctttttgatgtgcgtaaagcaaagtttgtccagcgttctggtgggttaaatgatattgcagcctgctctctcatcaatgtgactgacattgcagtaaggtgggaacctgatccctatctggaattgcttgaagtagctacacggcttaaatctgttctgcatagaatgaaactccagaattctgttaccgaggtaaaagatgaaacattgaacatggatattctttccaaaaaggaatcaccctcagaccatggtcagcaagaaaaggcacaaaagaagcgagaatcagtgattgccattgatttggaatcactgaaaatttcaggtgaacttgctgatggggtggaggcaatgattactgttggctacatattttctgagaatgcaaagataggtgttttggttgagggaatatcagtcagcttttgtggtgcgtggatattaaaaagcagtcggatgcagttatctcgtatcccaatttctgtttctgatagcaattctgataagaaattacaatctgcagctgcatgtgattgggttattcaatgccgtgatgttaatatttgcttgccttttaggttgcaactgagagctattgatgatgctgtagaagacacattgagggcctttaaacttatttctgcagcaaaaacatctgtgttgtttcctgagaagaaatctagtaccaccagcagcaaaaagagcaaaccaaaatcaacggcatttcggtatgtgcggatcatcgtacgtgacctgatagcagaaattgaggaagagcccatgcaaggatggcttgacgaacatatgattttaatgaagaatgtattttgtgagtccacagttaggttgaatctgcttgatgagctttcttcaggtaaaaataaggattcccccaaggcaaaactggatagttctgaaaagaacagtggttgccctgatgttgatgcatatgttcctggcacacactccattgaaaaactccgggaagagatctatagacaagcatttcagtcatattaccaagcatgccagaaattgccagtatcagaagggtcaggtgcttgttcaagtggcttccagtcaggattcaagatgagtactcgtagagcatcagttatgtcagtatgtgcaaaagatgttgatgtgagcttatcaaagatcgatggcggtgatgaaggaatgattagttttattaaatctctagatccagtttgtgacaaagatgacatcccgttttcccgattgtatggtagcaattttagtttgaaaactagatccttatctgcgtacttgagagattacacatttccactcttttccggaaccaatggcaaatgtgatggacgccttgtgctgggtcagcaggcaacctgttttcagccccaagcacgacaggatgtctatgttggcaaatggtggagagtaaatctgctacgctctgcaactggttataccccaccaatgaaaacatatgctgacataccactgtattttaaaaaggcggaagtatcatttggagttggttatgagccagtttttgctgatgtgagctatgcttttacttgtgcacttaggagggcaaatttagcaaagaggtggtattttgagcgtcctgagccccctagaagagagcgcagcttaccctggtgggacgatatgaggaactatattcatggaaaatttaaattgtgttttaatgagacaaagtggcatctccctgcttcgacaagtccttatgagaagcttgatgagctgttaatcataactgacttcatggaaatacattatgtggatggttatgtcagtctttcttcgaagtatctgagggtgtacctaactagcttagagagtctagcaaagaagtccagcttggaaattccacaccatccagctatacctttccttgaaaccccctcctttttcatggatatttcaatagaatggggttgtgattcaggtaatcctatggatcattttatatttgctcttcctgcagagggaaaaccacgggataaagtttttgatgcatttcgctcaacttctctgtcactgaagtggagtttctcacttaagccttatactactgaacccatagaacaccaaaagaagagtaatttgaatacaactgctccaactgtgaatgtgggggtgcatgatttggcgtggctaatgaagtggtggaacttggtttttcttcctccccataaactaagactgttttccaggtttccgcgttttggagttcccagatttgtacggtctggaaacctcccacttgacagagttatgacagaacagtgcattcgttttgatgccatgcaattacaaattaacaacatgcctctacaggcggatgatcctgcaaaaggtttgacactacacttcacaaagtttaggtacgaaatagctttcagccgtgggaagcagatattcacctttgattgcaagcgcgaacctcttgatcttgtctaccagggcatagacctgcacttgttgaaggtatttattaacagaattcctgaatcatcaacttctatggattctaagatagaaaataaggttctgcagacaaaagataaagatagtcttggttgtgaaaaaggaaaaaagaaaactagtccaaccgagaaaagccgagatgatggattctttctttattctgattatttcacaatacggaaacaaactcccaaggctgatgctgctagattatcagcatggcaggaagatggcagaaaaaaaactgaaatgccattgatcaagtctgagtttgatgggggggatgaaagtgatcatgatcaatcaggtagtgatgatgagggatttaatgttgtggttgctgatagttgccagagagtttttgtctatggactaaagattctctggaatttagaaaaccgggctgctgtcctctcttgggttggtggtttaactcaggcatttcagcctccaaaaccatctccttctcgccaatacactcaaacaaagattctcgagaagaaacagttaattaaagaagctgagatgtccaaggatggggctctcagctctgtatcctcaacatcacagccttctgaacctcaacaaatcaagagttcagagtcaccaccttccaatggatctggcaagccagatctgacatcaagtagtgaaaatgcacttaagcgttcaaataatagtgattcagaagaggaaggtaccaggcatttcatggttaacgttgtccaacctcagttcaatttgcattcagaagaagcaaatggtaggtttctgctagctgctggtagtgggcgggtcatggttcgttcatttcattcaattgtgcaagttggtcaagagatgtttgagaaagcaattggttccagtaatgatgctactggtgggactgggccagaaatgacctggtcacgtgttgagctctctgtcatgttggagcatgttcaggctcatgttgctcccacagatgttgatccaggtgctggtattcagtggttgccaaaaatacaccggcgatcatctgaagttaagagaacgggtgctttacttgaaagggtatttatgccatgccaaatgtatttccgctacacgaggcataagggaggaacccctgaactaaaggttaaaccactgaaagagctgacatttaactcaccagacataactgctggtatgacatcacgccaatttcaagttatgatggacgtattgactaaccttctctttgcaagaactcccaagaaaccgaagagtaatctaagctatcccctggacaatgatgatgacaacattgaagaagcatctgatgcagttgtacctgatggagttgaggaggtagtattagctaagattggtgttgaggtaaaagaaagagctcggaagctactgcttgatgatatccgggccttatctatctgtggtgaaacatctcatggtcagagtcagtcaccaaaggctaatgacattgcatggattgttactggttcaaggttaatgctggtcaaacaactgaagaaacgactcgtgaatgtccgcaatggtaggaaagaagcatattctatgctaagaaccgctatgcagaaagctgcacagttgaggttgatggaaaaagaaaagaacaaaagcccttcatttgccatgagaatttctgtgaggataaaaaagatcgtgtggagcatgttagcagatggaaaatccttttctgaggccgagataaacgatatgatttttgaattcgaccgagattacaaagatattggcatcgcccagttgacaaccaagctgtttgtcctaaaaaatggacttgctaatgcaaaatcagatactgttgtatcaccctggaatccacctgctgaatggggcaagaatgcaatgcttcgtgttaatgcctggcagggagctccaactggtgggaatccagttatcgagagtttcttagtagacatctatccactaaaaatttatctgactgaagcaatgtacagaatgatgtggggatattttttccctggagatgaacagcaaccacaaaagcgacaggagcttttcaaggtctccactacagcaggaacaagacgaaagaaaaacacttctgttgcagagacaaacagtcccaataaccagtcatcaaaagaaactacatttgcacagaagcctgaacttcgaaggacatcttcatttgacaggacatgggaggaaacagttgctgagtctgtagctaacgaacttgtttcacaaatggagggtcaaacaaatacccaatatgaacctcaagatgctgctaaggattccaagttattacgtcctgtccgctctacccgcgaggataagaaaattgtagagcccaatgagttgaaacaatctagacctcaaaaaatgatggacttccgcaatataaaaataagccaggttgaactgcagctcacatatgaaggattgccatttgctgttagtgatgtaaggctacttatggataccttccatcgtgaggattttacaggaacatgggcaagactgttttctcgagtaaagaaacatattgtatggggtgtattgaagtctgttacaggcatgcagggtaaaaagtttaaagctaaatctagcagccaaaaagaaccatctacagctttaatcagtgccgctgattttaatttaagtgacagtgatggtgatgaagctggcagttctgatcaacttccagcatttctaaaaaaacctagtgatggagctggtgatggatttgcaacctccgttaagggcttgttcagtacacagaaaaagaaagctatggcatttgttttgaagacaatgaaaggagacgctgatcatgatttccatggtgaacggagtgagaacgaaattgagttctctccatttgctcggcagttgactataacaaaaacgaagaagcttatacggcggcacacaaagaagttaaacaagtctaaggttcataaagttacagctactgagctagaagtggcagagctgccaccgcgtgctcctgggtacaacacggactcctcctccgactcgtcatcggcggaaacaagcccaaaagattagcctgtgccccatgtgaaaggttgattcagagggatgcttcgaagtcgtcctgagccctggagtgatgtccaagttggttctttacaaattctggttttgatcgatacatcgttgatcctcaagatggttttgcagccatccgaatagatatagatagtgtttcaacattccctcctcatcggatgtggtgttgtctgagctgaagtttttagttgtgacgatgaattcagtgctctgcagacaacaactattatcataacctgagggtagagtgaattattcattgtatttttcttgagttgagggtagtgtttgagacatcattctcggctttgtagtactcacagtggacagtataaaatcaagtgcgacagcaaatatcgtattttaaatattgtacttaataaaatatttaatatatactagtatatatgcagcagagataagaagctttgctgttgaaggttctgactctgt

SEQ ID NO: 156104 - DNA, 7695 bp, Zea Mays
tgttggatcttgaggacccgctgtatccaccgttccaccgtccacgcggcgcttggcttggacgcggcgctgtgcgcggtacgggcgtacgcccgtgccagttccgggtatgttttttatggaattttgactcggacgtgggtaaccgccgcgccactccgcccgcaccttttttcctccccacccggaccggccacccccttcgcttcccccggaaatggcgcgccacctcttccccactccgctcctggccaccctctcctctccattactccagtccgcgattccgcaccatctccgctcagccccgcgcttcccctcaactttccacaacctcgaccaatcggatcccgcacggagcgcgcgccgcgattgctcgccgtcgtggcgacctcgcattcttctgcaaggaagggtttgatgccatgacggagtgctagaggccgaggaggagagtcgaagatgatgcttgggctagtgcagctgctggtggggttcgtcgtcgcctgggaagccgtcgagctcgtcctccgccacggcctcctcctctccgtcttcaagctcgccatcctcgccgccctcgccgctgcggccggatgcgtcgctatcatcttcttcgccagggcggtagcctgggtactccaacgcgcggccaagctctccatcggttgccgctcctacggcttcaattacctgagggacatcaccatttcatcaccgaagggcgctgttgagtctatctgcattggtgaaattagacttggcctgcggaaaccgatcacccagctgggatttacagtactaacccatggcccaatcctgcaactgcaaatctctgatttggatgttgtcctcaggcaacctgtgaaatccactaacaagaagaaacccgcccctcgcaaaccgatctcaaccacaacagctaaagcaaaaggaaaatccaaaggacaagtaaaatggaggctcataacaagcatggccagtctgttgtcattatccatagtggagctgaggcttaaggctccaaaagctgctcttggtatcaaggacctcaagactgatatatctaaaactggaggactggatccagttcttaatgttcaagttaatatcatacctttatttgtgcaagcactggattcagacagcattggaaacaacacattggtgtttagtaaattggattggtgggttagtggacaatattgttcagccatggacacttcagaccatagctctttcctgtttgaggatatatcactctcatgtgatcttcatcagagggataaagcaattagagtaaaaaatttggacttgatgcttggtccaattgttgtgaatttggaagagaaattactagcaaaaaagaaaccatctgcctctactgttgctgagcaaaaggatgaaccttctgtggataataaatcagcagccagatctgaagggggcaaacttgcatcactaaataagaagatcagtatgtttccagaaaaggttagcttcaatatgtccaaacttgttctgaagtttttgcctaaagatcatggcctctcaatcaacaatgaaattggtagcatatctttgagatgtacaaggttacaaccacaagacttcggagaggtcacaacacatattcggttggaaactgatgtaacggagattcatcttctaatggatggcgctacctccgtattagaggttgtaaaagtttcaacagttgtttcagctaacattccgtctcagccagcattaccagttcaagctgaagtagatatcaagattagtggattccaatgtaacctcattgtaagcagaattaagcctctgattagaataaactcagataaaaagaagcctcttgttcttcatgaaaatcctcagcaaaagaaggcacccaaagaaaaattagcattgtctttggcatgtactatgtcagttcccgagttgactcttgtgcttcatagtcttgatgacgtaccactttaccattgtatttttcaatcagctaatgtttctgccagtaagatgatagaccgaggaactcaattgcatggcaagcttggtgacttaaaatttcttgttcctagtaaacaccaacagtcaatgaaagaaggtgcttcaggcaccttactacacattagccattcaactcttgacttggaacaaaatgatccaggccaagataatgatgaggaccatgctaaatctgctatctctgttaatatatctggaatcagaatgcacttctgtttttcctatcttgagtcactctgtgcaactgcaatgtcatacaaagtgtttatgaaaagcattttgcctcctaagaaacgatctgtccaggagaatgcttctcaaaaatctaccaagaaagccaaaagagcactgcttctcaaaatcaatgttgcacagtgctctattgtgtatgatggtgaaatgaggctggaagatatgagtattgctgatccaaagcgtgtaaattttggttctcagggtggtcgtgttgtaatcatcaacgaagctaatggttccccaaggatggcttatgtaaattctaccagtcttccagatcataagaatgtccacttctccacttctcttgagatctatcagtttggtgtatccttgaataaggcaaagcacaccatgcaggttgaacttgagaacttcagattgacgcataaagaggaccagcttgataataaacctgtagaggaaaccaagctttttgatgtgcgtaaagcaaagtttgtccagcgttctggtgggttaaatgatattgcagcctgctctctcatcaatgtgactgacattgcagtaaggtgggaacctgatccctatctggaattgcttgaagtagctacacggcttaaatctgttctgcatagaatgaaactccagaattctgttaccgaggtaaaagatgaaacattgaacatggatattctttccaaaaaggaatcaccctcagaccatggtcagcaagaaaaggcacaaaagaagcgagaatcagtgattgccattgatttggaatcactgaaaatttcaggtgaacttgctgatggggtggaggcaatgattactgttggctacatattttctgagaatgcaaagataggtgttttggttgagggaatatcagtcagcttttgtggtgcgtggatattaaaaagcagtcggatgcagttatctcgtatcccaatttctgtttctgatagcaattctgataagaaattacaatctgcagctgcatgtgattgggttattcaatgccgtgatgttaatatttgcttgccttttaggttgcaactgagagctattgatgatgctgtagaagacacattgagggcctttaaacttatttctgcagcaaaaacatctgtgttgtttcctgagaagaaatctagtaccaccagcagcaaaaagagcaaaccaaaatcaacggcatttcggtatgtgcggatcatcgtacgtgacctgatagcagaaattgaggaagagcccatgcaaggatggcttgacgaacatatgattttaatgaagaatgtattttgtgagtccacagttaggttgaatctgcttgatgagctttcttcaggtaaaaataaggattcccccaaggcaaaactggatagttctgaaaagaacagtggttgccctgatgttgatgcatatgttcctggcacacactccattgaaaaactccgggaagagatctatagacaagcatttcagtcatattaccaagcatgccagaaattgccagtatcagaagggtcaggtgcttgttcaagtggcttccagtcaggattcaagatgagtactcgtagagcatcagttatgtcagtatgtgcaaaagatgttgatgtgagcttatcaaagatcgatggcggtgatgaaggaatgattagttttattaaatctctagatccagtttgtgacaaagatgacatcccgttttcccgattgtatggtagcaattttagtttgaaaactagatccttatctgcgtacttgagagattacacatttccactcttttccggaaccaatggcaaatgtgatggacgccttgtgctgggtcagcaggcaacctgttttcagccccaagcacgacaggatgtctatgttggcaaatggtggagagtaaatctgctacgctctgcaactggttataccccaccaatgaaaacatatgctgacataccactgtattttaaaaaggcggaagtatcatttggagttggttatgagccagtttttgctgatgtgagctatgcttttacttgtgcacttaggagggcaaatttagcaaagaggtggtattttgagcgtcctgagccccctagaagagagcgcagcttaccctggtgggacgatatgaggaactatattcatggaaaatttaaattgtgttttaatgagacaaagtggcatctccctgcttcgacaagtccttatgagaagcttgatgagctgttaatcataactgacttcatggaaatacattatgtggatggttatgtcagtctttcttcgaagtatctgagggtgtacctaactagcttagagagtctagcaaagaagtccagcttggaaattccacaccatccagctatacctttccttgaaaccccctcctttttcatggatatttcaatagaatggggttgtgattcaggtaatcctatggatcattttatatttgctcttcctgcagagggaaaaccacgggataaagtttttgatgcatttcgctcaacttctctgtcactgaagtggagtttctcacttaagccttatactactgaacccatagaacaccaaaagaagagtaatttgaatacaactgctccaactgtgaatgtgggggtgcatgatttggcgtggctaatgaagtggtggaacttggtttttcttcctccccataaactaagactgttttccaggtttccgcgttttggagttcccagatttgtacggtctggaaacctcccacttgacagagttatgacagaacagtgcattcgttttgatgccatgcaattacaaattaacaacatgcctctacaggcggatgatcctgcaaaaggtttgacactacacttcacaaagtttaggtacgaaatagctttcagccgtgggaagcagatattcacctttgattgcaagcgcgaacctcttgatcttgtctaccagggcatagacctgcacttgttgaaggtatttattaacagaattcctgaatcatcaacttctatggattctaagatagaaaataaggttctgcagacaaaagataaagatagtcttggttgtgaaaaaggaaaaaagaaaactagtccaaccgagaaaagccgagatgatggattctttctttattctgattatttcacaatacggaaacaaactcccaaggctgatgctgctagattatcagcatggcaggaagatggcagaaaaaaaactgaaatgccattgatcaagtctgagtttgatgggggggatgaaagtgatcatgatcaatcaggtagtgatgatgagggatttaatgttgtggttgctgatagttgccagagagtttttgtctatggactaaagattctctggaatttagaaaaccgggctgctgtcctctcttgggttggtggtttaactcaggcatttcagcctccaaaaccatctccttctcgccaatacactcaaacaaagattctcgagaagaaacagttaattaaagaagctgagatgtccaaggatggggctctcagctctgtatcctcaacatcacagccttctgaacctcaacaaatcaagagttcagagtcaccaccttccaatggatctggcaagccagatctgacatcaagtagtgaaaatgcacttaagcgttcaaataatagtgattcagaagaggaaggtaccaggcatttcatggttaacgttgtccaacctcagttcaatttgcattcagaagaagcaaatggtaggtttctgctagctgctggtagtgggcgggtcatggttcgttcatttcattcaattgtgcaagttggtcaagagatgtttgagaaagcaattggttccagtaatgatgctactggtgggactgggccagaaatgacctggtcacgtgttgagctctctgtcatgttggagcatgttcaggctcatgttgctcccacagatgttgatccaggtgctggtattcagtggttgccaaaaatacaccggcgatcatctgaagttaagagaacgggtgctttacttgaaagggtatttatgccatgccaaatgtatttccgctacacgaggcataagggaggaacccctgaactaaaggttaaaccactgaaagagctgacatttaactcaccagacataactgctggtatgacatcacgccaatttcaagttatgatggacgtattgactaaccttctctttgcaagaactcccaagaaaccgaagagtaatctaagctatcccctggacaatgatgatgacaacattgaagaagcatctgatgcagttgtacctgatggagttgaggaggtagtattagctaagattggtgttgaggtaaaagaaagagctcggaagctactgcttgatgatatccgggccttatctatctgtggtgaaacatctcatggtcagagtcagtcaccaaaggctaatgacattgcatggattgttactggttcaaggttaatgctggtcaaacaactgaagaaacgactcgtgaatgtccgcaatggtaggaaagaagcatattctatgctaagaaccgctatgcagaaagctgcacagttgaggttgatggaaaaagaaaagaacaaaagcccttcatttgccatgagaatttctgtgaggataaaaaagatcgtgtggagcatgttagcagatggaaaatccttttctgaggccgagataaacgatatgatttttgaattcgaccgagattacaaagatattggcatcgcccagttgacaaccaagctgtttgtcctaaaaaatggacttgctaatgcaaaatcagatactgttgtatcaccctggaatccacctgctgaatggggcaagaatgcaatgcttcgtgttaatgcctggcagggagctccaactggtgggaatccagttatcgagagtttcttagtagacatctatccactaaaaatttatctgactgaagcaatgtacagaatgatgtggggatattttttccctggagatgaacagcaaccacaaaagcgacaggagcttttcaaggtctccactacagcaggaacaagacgaaagaaaaacacttctgttgcagagacaaacagtcccaataaccagtcatcaaaagaaactacatttgcacagaagcctgaacttcgaaggacatcttcatttgacaggacatgggaggaaacagttgctgagtctgtagctaacgaacttgtttcacaaatggagggtcaaacaaatacccaatatgaacctcaagatgctgctaaggattccaagttattacgtcctgtccgctctacccgcgaggataagaaaattgtagagcccaatgagttgaaacaatctagacctcaaaaaatgatggacttccgcaatataaaaataagccaggttggcatttacttcactgaatgcagtgtttttatacaacctggtacttgtaatacatgacatgataaa

SEQ ID NO: 156105 - DNA, 1347 bp, Zea Mays
aaggaggacgagtgatcgaacgatctatgaaaaaagattagactcattttcaactcatatatttcttgattttttggttaagataaagtgtaacatttatttttattagtttaatatttggtaagtgaaccatatgctcaatttaatattaattagtttgcagctcaagagaggatttcacgagagggttgtactagtagaagatattggagaattgatacattatccaatgcaaaagtctatatattcaaacaccggagcaaacagtcgcgcagcctccacggctccacgtgacctcccaaacctagacctagttgtccttcctgttcaacctgcatagcggcggcgcgtcctgccttcagagagagagggagagagagcgcttgatctccgtaggcatggcatgggaggaggaggcggtagaagaggaggattacggggaggagatgtcggcttcggagtcggaggaggacgtcgtggtggggcagatgccgacggttatggtgccaaagcatatcaataagcggtccctgaagaacaaggcgctgtctgttaccctcgacaagaaagcgctcagggatttcgtgactgggttccacaagcggaagaaaaagagaagaaaggaggcgcagaagattttgcaggagaaggagaggaagaagaaaatacaagaccgcaagaggaggaaagaagagaaggagattgctctgtatggtagagtactgacatcggataaaaatgatggtgctggattagaaaacgaagatatcggcgatgatggtgaggatatggaaaatgacaaacctttgtctgaaatcaaaacctacgaagatgatgggaccagaactgtagtcaccaccagtgaaattactcctgaagaagatgacattgtcccgaaaactgtcggccccgtggcgacgagcctcaccagcaagaatcctagctcttttgccaagaagaacagcagtttaggtgtgaagaggaagccaccgaagagaacgttcaagagcaaggctagagcgaaaaggggtgacaagaagcggggtgctgcaaagggtaaaaggaagggcaagggaatgaagtagtgttttgtgaaccctctgtaggaagaattatgctgtcactggctgtggacctgtggttaatctcgcatcacctgatctgcagtttgtttggtaatatattgatgatcatttgttccgcaaacaaattgttagggaacaaatttgtgatatcgatgctcagttgttgggttgtgctacatgtctgttgccagtcttgttggtcaatattacgtagacagtttctgctcctttcggctaatctctctgccatgtttgccttgtc

SEQ ID NO: 156106 - DNA, 1314 bp, Zea Mays
aaggaggacgagtgatcgaacgatctatgaaaaaagattagactcattttcaactcatatatttcttgattttttggttaagataaagtgtaacatttatttttattagtttaatatttggtaagtgaaccatatgctcaatttaatattaattagtttgcagctcaagagaggatttcacgagagggttgtactagtagaagatattggagaattgatacattatccaatgcaaaagtctatatattcaaacaccggagcaaacagtcgcgcagcctccacggctccacgtgacctcccaaacctagacctagttgtccttcctgttcaacctgcatagcggcggcgcgtcctgccttcagagagagagggagagagagcgcttgatctccgtaggcatggcatgggaggaggaggcggtagaagaggaggattacggggaggagatgtcggcttcggagtcggaggaggacgtcgtggtggggcagatgccgacggttatggtgccaaagcatatcaataagcggtccctgaagaacaaggcgctgtctgttaccctcgacaagaaagcgctcagggatttcgtgactgggttccacaagcggaagaaaaagagaagaaaggaggcgcagaagattttgcaggagaaggagaggaagaagaaaatacaagaccgcaagaggaggaaagaagagaaggagattgctctgtatggtagagtactgacatcggataaaaatgatggtgctggattagaaaacgaagatatcggcgatgatgaaatcaaaacctacgaagatgatgggaccagaactgtagtcaccaccagtgaaattactcctgaagaagatgacattgtcccgaaaactgtcggccccgtggcgacgagcctcaccagcaagaatcctagctcttttgccaagaagaacagcagtttaggtgtgaagaggaagccaccgaagagaacgttcaagagcaaggctagagcgaaaaggggtgacaagaagcggggtgctgcaaagggtaaaaggaagggcaagggaatgaagtagtgttttgtgaaccctctgtaggaagaattatgctgtcactggctgtggacctgtggttaatctcgcatcacctgatctgcagtttgtttggtaatatattgatgatcatttgttccgcaaacaaattgttagggaacaaatttgtgatatcgatgctcagttgttgggttgtgctacatgtctgttgccagtcttgttggtcaatattacgtagacagtttctgctcctttcggctaatctctctgccatgtttgccttgtc

SEQ ID NO: 156107 - DNA, 869 bp, Zea Mays
gagtccactagggcattgggagctcactcgctggtcgttgcctgctgcggattgcccccaggcggccccactcactccgctgttgatatttcgtttggttctcctttccgtcttgtccgtcgccgaggccttcttcccctcgctccccagctccagcaggcagatcagatccatccaaccacgaacaggaaggtggaggacttctcgccgcagtggtgggacctcatcaccaccaccgcctggttccgcgaccactggtcccgcgagcacgcccacctggacgagatagccgagcagctcgagttggtcgccctccttgcctacgatgaggatgaggacctcttctacggcgagcaggcccccgccgccgccgcccttaagacagattcggtgctcaaggcgctgaacttgggttccccgaagagcggcgacgccccgcgggggttccgggagaaacccaggcactccgagaagccgaccaagtacgccggcagccccaagagcagcgctcctcgcgtgatccaccagcctcgctaggttcgctggccggcccctgatggggactcggtgactcacatggaaggctgctgcctctctagcagcatctgctactggctgcagctgccgtcggcgtcgtggtctgtctgtcaaagtcgaagtaaaaaaacgtgagtagttgtactactgtagaagtttcttttgtatagcatgcacgtaagaaatgaccaaaaaatataacaagaatgcagctgttagtttactgctgctctcctcgtgtgtctagggtgcacttctgtaagcaaacgtatatgatgtgtaatggcagacagcttaatgttacaactagctcttctactgttcttggtgca

SEQ ID NO: 156108 - DNA, 927 bp, Zea Mays
aaaaagagctcccacaagaaacatacgaatagtcatgataatgacaatatagacaagaatggagaggccgatgtgggagatcatccggggagtagtaacacagaaaacgaacagatgcccgaatcaagacctaaaagatcaaaaaggctgatgaagagcattactgatgacaaggaactagctgctgctgcggatcatgagaaaccggagttgggctgcatgctgcatcaaaggtatgagcagtttggttgtttgcacttcatcgaacaccctaagcacgtgatcctcttcggcaggaacatcgaggaactcggattccaggttgtaatgtctggtgccttgttgtgaacactgtggtacagtggtggactggataggcaatgttcaacggtggtgaactcatatgcactattatgttcggtaatgctttgttcgttgacatccccatacaagcaagcaaacgaaactatgcccgctcttcgatgggcggggaaagccgcatacaagaaaacaacttccctctcaggctcaaacattttgtttcgtgcagacaataaaaaaagaatcgttccagaaaggagagtaagcgtcaggagaagtatccaaataaatggtcacggtagtgtacatcttcaagccgatctttcttcacggacagaggttaatgaacgatataggtttactgcaggcgatgcgtcttatcatttcgcttgcgggtgtgaggcaatgaagttaactgcaactttgatggtgtccatcttgtcatcagcttcattgtcaggtatctcgaatctgaattcatcttccaagtccatgacaagctccaccgcgtccaaactgtctaggccaagatcattcttgaaatgggcatctggcgtcaactgcaactttgatggactccatactacactgtactatgtgctttta

SEQ ID NO: 156109 - DNA, 3950 bp, Zea Mays
caccacgtcacaacagggcctccacaccgcctccctccgcccccttccgcttgcgcccacgaaccctaaccctaaccccgtcgccgccgcgggacctacccggctagcactcgcaccgcgccttcggcgtcatattcggcgcctgcgctctccgtcctcgcgcggcgagccggggtgctagggttttctagatggatccacgccgcgcacccccgcggggcgggggcgccaacgggctctcttactccacgctgttcaatctcgagcctttgctgaacttcagggttcctgtaccggaagatcttgcccgctacgagaatagcagctcaaatgggagtccaagcagtgaaggtcagggatccttattggatcagtacaatggtgtaaatgatgcttcccatggcctgcaccggaagcggaaaaggcatcttgacggtgccagcgatgatgatgaggcagatgcctatagtaacaaaataactgaggagcaataccgtgctatgctcagtgaacatgtccagaagtaccggaggtcaaagttcaaggagggtgcttttagttctgatcctcctcgtgtggcaacccctcaattaaaacacaaaaatggtggtaaaaaaaatatgaagcgcataagtgatttcagcgatgatgtggcattagatgggatagaagcctcacatgaatataatgggatagagtgtattaaaactcatggcggttttaataagcttgttgcaactcttgattccacttatttagatatgggggatagtacacgttacttagttccagagggttatgataagttagcatcatccctcaatctccctgtttcttctgatatacgtgtcgaggaacacttcttgaagggcatgctagatttacgcaccctagcagcaatgcttggtactgaccaaaggtttgaggcttccaatcgtggtggaatatctgaacccctgccacaatttgaatctctcaaagaaagggtaaaggtgcaggaattttctcttcaagttaccaaggacccctttgcaattccggaaggatcagctgggaggatacgaaggtatattatatcagaagctggcgatttgcaggttcattatgttagagtcatggaaaaaggagatacatatgagattatcgagcgtagcttaccgaagaagcaaatagtaaagaaggaaccttcggtaattatgaaagaagagtctgaaaagacttacaaactatggcagtctcttgctacaaaaagcataccaaagcatcacaagaattttactgctttgataaagaaacgacaagtagatgcgaagcgcttctctgatagttgtcaacgagaggtaaagctcaaagtaagcaggtcactgaaactgatgaggtgtgctgcagtacgcacaagaaagtttgttaaggatatgcagatgttttggaaacgtgtagacaaagagcagtatgagttgaggaaaaaagaggaaaaagaagctgctgaagctttgaaacgggaagaggagctacgtgaagccaaaagacagcaacataggctaaattttctgctgtcccaaacagagctttatagtcatttcatgcagaacaagactggtggttcagcgccgcctgatgaggaagatgtccctgatgaagaagatcctgaggaagctcaattgaaaagagaggccttgagagcagctcagcatgccgtctctcaacaaaagatgaagacaaatgcatttgatagtgaaattgtgaggcttcgtcaaacttctgattctgctcttccaactgatgattcatctagcatggaccctagcaagattgatctattacacccctcaacaatgcctgagacgtcttctgtgcagaccccggagttgtttaagggtgtattaaaagaatatcagttaaaaggcttacagtggctggttaattgttatgagcagggcttgaatggcattcttgctgatgagatgggtcttggcaaaactgttcaggctatggcattcctgtctcatttggctgaggacaaaaacatatggggcccctttcttgtggtggctcctgcatctgttgtgaataattgggctgaggagttgattagattctgccctgacctaaagatacttccttactggggtccagagaggatgattcttcgaaagaatatcaaccccaagcgtctgtatcgcagagatgctagctttcatattcttattacaaactatcagatacttgtgaatgaagagaagcttttgagacgtgttaaatggcaatacatggtattggatgaggcccaggctatcaaaagttcaagcagccagcgatggaagacattactgagcttcaactgtagaaaccgtcttcttcttactgggacaccaatacagaacaatatggctgagttatgggcacttcttcatttcattatgcccactctatttgacagccatgaacagttcaacgagtggttctcaaagggtattgagggtcatgctgagcatggaggagctttgaatgaacatcaacttagtagattgcacgctattttgaagccctttatgctccgccgggttaagattgatgtcattgctgaaatgaccaaaaagaaagaagaaattgttccctgcaaattgagttctcgtcaacaagttttctatcaagccataaaaaataagatctcgcttaacgagttgcttgctggaagtcgtggcagtctaaatgacaagaagttacttagcctgatgaatattgtcatgcagttacggaaggtctgcaatcaccccgagctgtttgagcggaatgagggaagctcttacttcaactttgctgaaatcccaaactcacttctttctcccccatttggggaattgcaagatgtacactatgcaggcaagagaaatcccataatctttgagattccaaagttagtttatgagggaatcatctccaacatggaaaattctggaaacatctgtggatttcagaatggatatttgaacaggctgtttaatatatttttgcccagcaatatctatcgctcagccattccagaagttagttcatcaaaagagtctcttctatcatctggtgcatttggctttacacgtttgtcaaatctgtgcccagttgaagcttccttcctggctactgcttcattgtttgagagactagtcttttcagtaatgcaatggaatatgaactacactgctgaaattctggatgaattccttgattcagaagataccggcatccagtccagtcataatgattccacaaaagttcgtgcagttgcccgtttgttgctttcttctacaaaggtcaagcccagtttgcttaggacaaagattgggactgggccaattgatggcccatatgaagcactggtgctttctcatcgcgacaggctcgcttcaaacattaggcttcttcgttcagcatatgcttttattccgccagctagagcaccacctataaatgtttggtgtgctgatcgaaattttgcctataagttcaccgatgagatgtatgatccttgggccaagaaactgttcctgggatttgctcgtacttctgagttcaatggtcctagacaaccaattgctcctcatcctttgatacaagaacttaatactgatttgcccatcattgagccgatgctgcagctaccctataggatatttgggtcttctccaccgatgagtaattttgatccagctaaaatgctcactgattctgggaagctccacaccttggatatgctactacgacgccttcgagctgaaggtcatcgtgtgcttctttttgctcagatgactaaaatgttggacattcttgaggattacatgaatttcagaaaattcaagtatttcagacttgatgggtcttcagccatctcagaccgccgtgacatggtccgagattttcagaacaggaatgacatatttgttttcttgtta

SEQ ID NO: 156110 - DNA, 98 bp, Zea Mays
taacaaagtaattaataaatataatttaaatattagcatcccaagttggacctatgtttgtgcatttaaatttaaaatttgaaatttaataacaagtt

SEQ ID NO: 156111 - DNA, 128 bp, Zea Mays
aacaaagtaattaataaatataatttaaatattagcattccaagctggacctatgtttgtgcatttaagtttgaaatttgaaatttaataacaagttgaaaattgaaatacaaaagaaaacagaaaag

SEQ ID NO: 156112 - DNA, 619 bp, Zea Mays
ataatgatagaaggtcgtagcacaaccttaaatgaggtgccgccgtcgccgccgatgatgctgaacggacgtgccgcgtccccatccagaaccatccctgctcaacaccttctccgttgctcaccatggcgtcgtagttgttgccggacccattgccaccagatagtcacggcctcttcgtaacttcactccgttcatgttcgtcgccgctcgtgccaccctcccgcggctgtaactccctctcccttcctcctctcaccgcaggcctcatcacgccctcatcacccatcgttgctggttctgcccgctgttgctggagatcgtgaccatggaactcacgtcgtcgtcctagcgctcctcgcgatgttgctgctccagggcgtcatcctcatgtcaacggtggagggccttgtgtggatcatgcaagaagctccacaagttcctcatcaagaagatcaggcaaactggttggagggatcttatcagaaatgtagcggcggactactcatctctttggagagcggaaacagccttactttccaacttgataagtttctttggcgctttgaaccattgcccatcccttttcatgggctgcatcttctaccagagcgggtat

SEQ ID NO: 156113 - DNA, 187 bp, Zea Mays
acgtatgcagtacaagcagacccgacaagcacaacatcgaagaattcaaaaaaattctttccgaactgtttctccacatctctaaccacatcaaatggtgtggctggggccttatcgcaaagcgcgatgagtctcttcactcaagccgtaggtgccaaatcaggttttcccagaatttgagcggcct

SEQ ID NO: 156114 - DNA, 319 bp, Zea Mays
ttcggaagccaaaggctcccaacagtcaccttgatgatgaatgacaagcatctgacagtttaccaagcaaattttatcgatgttcttgtaaatgtcaaaccaaaatgttcgcttgactggatatattaatcttagtccagataaaatagttgcaaaaccacgactcgcaagtctggcaattgtgaagcaagatcaatggttggaccacttccaacagactggcagtataagattatatcctcatctgctacaccatattttccttgaggcagttatatgctgcttcaatgtctggatatgtattacactcagtgggttg

SEQ ID NO: 156115 - DNA, 1341 bp, Zea Mays
gagagccagttagccatggatcgccgcggcgaggcgagccaccgtggccggagttcctaccgcggccgaggctggcgaggacgcggacgcggcggcggccgcccctccccatcaccaccttcctccaccgcctcccctgcggcgctcaaccccgtcccgtctctgaccccggccgttcctgtcgacgacgcagcgccgatcatgggcacctgccccgacatgtgtccagcgagggaacgagcgcagagagagcggctgagggacctggctgtgcttgagcgggtggacggcgaccccgcgcgcacgtctctctccctcgccgtcaagaaattttgcagaactatatcttccactaatgtactggcatcagatatacgtcctttgccagttttacaagaaacaatggattatcttttgcatttactggattcttcagagcatccatttgagacaatacatgatttcatcttcgataggacgagatctataagacaagacttaagtatgcagaatatagtgaatgatcaagcagttcaaatatatgaggatgcggtaacatttcatatcaggtcccatcaaagactttccacgtcttgccaggattcagctgcatcttccctttgttacctaaacatggagcagctaacaaaatgcctgctttctctgtatgatatgtatcatgtacttcataagtgtgattcacacagcaaaaaggaggctgagtattattccttctatgtgcttctacatttgggatgcaagatacacaaaatgatagattcactctctttgtggtatggtcaattggctactccagtcagacggtcaaaggaaatgatatttgctagatctttattaagatgctatcgcctaggaaacttcaagcgtttcttttgcatggtagcagctgaagcaaccgatcttcagttgcgccttgtagaaccttttctcaacgaggtccgagctagagccttaatgtacttcaactatagtggctacaaactccaacatcaccctttggaacatctatcaggaatcctgatgatcgaggagtcggagctggaatctctgtgtggaatatgcggacttgaaatcaccaggagcgaaggtacgaaagcttttgtgcctaaacaaacaagcttcaacctaccgacatccatgccccaaagtaatggcatttatgtctcaagggagtttgaaagattaatatagcattgtagttcaggttttcaatggattgtataatgtgtcaggattcaggaaagagtttgtcacgcatgatatgtgtaatacttactgttacaagaaaaaggctgaatatctatctcgatgcgtttttac

SEQ ID NO: 156116 - DNA, 407 bp, Zea Mays
ctccaggtctgaaaagaagttcggcctccctctgacatcaacctcccggttcatccctgccataccatgccgcatcacggcggagatcgcctccatgatcccgaaccgtgggtcgcgatggaaatcaggatccgtcccaacgaagtggctcatgagagcatctacatcatccatttcagccacaaacccagaatcgcagtagggacaaaccatctcccggccccgtggcctcaccctctgtcggcactggtaacaccagtatgcttgcctgccagctgacatttcttttggttggttgatattacttacccaacggacgaagaagccgtcgatccccgaccgtagtcctccaccgccaccacgagggaggagcggcgccgcggcaaccaccagcagacggtggtgag

SEQ ID NO: 156117 - DNA, 915 bp, Zea Mays
tagggttttttgccaagtcgccgccgtcgctctgcccgcattcccttccacaacaccgagacgccaggatgacggcgcagactgcggaggagctcgccacccagatcgagcagcagaagctcgaggagcagaagaccgaggcagaggaggttgtggtggaggatgaggaggacgacgacgatgaggacgatgaggatgatgatgaacttgacggacaagaaggggatgccagcggcaagtcaaagcaaagcaggagtgagaagaagagccgcaaagccatgctgaagcttggcatgaagcccatcactggtgtcagccgtgtcactgtgaagaaaagcaagaatatactgtttgtcatctcgaagccagatgtgttcaagagcccgaactcagacacatacgtcatattcggcgaggccaagatcgaggacctcagctcccagctgcagacccaggccgcagaacagttcaaggcccctgacttgagccagatcacgagtccagagacttctggcccgggccaggaagacaatgacgaggaggtcgacgaaactggtgttgaggccaaggacatcgagctggtgatgacccaggcatctgtttcgaggcccaaggctgtcagggccctcaaggcttctaatggggacattgtcactgccattatggatctgacaacttaaaaccatttttttttctctctccctttggagtgccatgctatgcagcttgagtgttatctgtggaccatatggttagagatgttagcatgatggcttcttctgtcaaggtcattcaaacacggtttcatctttgctggctgtggttctggtgtttcagtaatgtcattcaatggctctgcaatgcccactgttcctttacatttttcattacctctatctgatatgttaactgtca

SEQ ID NO: 156118 - DNA, 1848 bp, Zea Mays
cgcagaggccgcacgagagattaggatggtctgcccatccgtataaaaggcgcggccggcgattgcagccccctccgtcctcgttctcgtcttcgcgccgcctctcatcttccgtgagccgaagcttcggcggcggcggaatatggcggggaaaaccaagggtgggaagaacaaaggaaaggcgcagggcgctggtcagtccgcctctgctgagccagaggtgccggcgactgacggagccgaagtggtgaatccagagaatggggaagtaaacgaaccccccgtcacggaggatggtgtgaaaaatgttgagaaaggagacggggatgccctggaggttgtgcagcctgcaagaaagccagctgaaggagagcttcatctatacgctgttcctgtcaggacacaatcaggtgaaaagcttgagctgcagctaagcccaggagattctgttattgatgttaaacaattccttttggatgctcctgaaacatgcttctatacatgctacaatttgatattgcatactgaagatgggtcagctcatcagttggaagactacaatgaaatatctgaaatagcagatataacttctagtggatgttcactggagatggttgctgcaatatacgatgagaggtctattaggtcacatctccgacgtgtgagggagctactatctctgtctagtctttatgtttccctatcaacatccttagctctgcatcaggagtctgctcaaggaaaatctgcaggtcctgaaaaaggccctattcaggagcttgatggtttaaatttcatggaggatagtgctggcgctctcactaatttattggcttctgcaccagcagagataaaatgtgttggaagcattgttttttcgtctttcaatcctccgcctagttatcggagccttttcactgcttcaacagataactggtcccatgcacaaggatgctgcaaattgttgccggatgccagtaatatgaataccgctctcaggtatcttcaagaagcccttatgaagaatgagcgacttcttgggcctgtccatgttcaaacagctgtgtgctatcatgctctagccattgcatttagttgtatgagcttatataagctttcaattcagcatgaaaagaagacatatgatatactggtaaaacaattaggggaaaatgactcacggactgaagactcaaaaaattggttgaatacatttaagcttcgagaagagcaggtcaacgcccagaagcagaagggccaggaagctaatgcatccgataacgctgttaaattcttgaaggcaaaccctgcagttttacaagcaatgaaggctgctgcgatccaatcaggtggtgtgtcagcaaatgtcaacaggtcgctcaatgctgcagtcgttggagaaggtgtaccacgactgagaggagtggatgagcgagctgctcgagcgactgcagaagcacggaagaaagctgctgcaagaggccttaatgtccgtaatggccctgtggcaaaccatgcgtctgatgaactagctcagattctcaaactcatcaacgctgtttcggggtcttccactcctggctctgcaaagactgaggtatctgcctctgaagggcaggcaacgaatggatgtattcaaaatggaactgacactgaaccgaaggctgcggataccaacgggctatctgcatcggttaagtccactgtcaacgcaccatttggactggggacaacattggagtcgaagaagcagaaatcgaagcaaaagtcgtagaaaacctgtgcttggaatttcctttagcaacagttttggactgtagagtgatttgggtttttgacctttatagg

SEQ ID NO: 156119 - DNA, 1014 bp, Zea Mays
ctcttgtccattctcagttcttctctgaagcagcctggtctcgtggccgatcgatggccgccgtgcagccgcgcgtagccccacgccggcatcgcccgccgcctctgctggtcccgccgctaccagcggcaccgtcgcaggagccggttgcgcggccgcagcttccgtgcaagaggagccgttcagacgccgtcgccgtcgtcgcccacggcaggaaggagagggtggcggagtcgtgctgcccctcgtcgcggctggaccagctggagctggtgctgctcgacgacgacagcggcgacgaggacgacggctgcggcagctgcgtcgacggtgccggtggtgctggctgcggacaggacgaggacgaggaggagagcgggagccgcggtgtcgctgtcgcctggtggagccaggacaccggtggcggcggccgccgctccctatgggcgaacgggagcatagcgaccgagggcggccacttacccaccgacggtgagcacgacgacgaggaccctacggtggcggcggcgaggcggcaggaggaggaccgcaagttctgggaggcgtgcctggcgtcgggttacccatgaacctgcaggtgcttgtcgtgcttcttcttgattagaagtttgtttgtttgatcgatgccgacggcgacaagaagaaggctgttgttaggacaaagttaaaagttagtgcatggtatgtatggcgtgtaaattgcaatcatgaaacaaagatgcatggatggccaaacagctgcgctactggtagattgtcacattgcttcattcatcagaaataataagagcgtgtgggcaatcctgctgggctggcaatgttgatgcgcttctttgtggttttggccttggtttatttttctgtgtccgtggtacaagacggggataatgtggaaatcgctaaaatttagatgtctagatttttagcttcgtttcatgtgatggctattgtatatattttggattaaaattatagttttagtttgttgcaatt

SEQ ID NO: 156120 - DNA, 1009 bp, Zea Mays
tatgtagatgctctatatatctaggggttaacgtccaatatgtactgaaatatctcactgcttgcctgtagtttgtgttactttaacccgtactgaaatgcccagtgacttgtggagttgtttgcagatcacataaacaatggtgaaggctgttgctgtgcttggtagcagcgatggtgtcaagggcaccatctttttcacccaagagggagatggccctaccgctgtcaccggaagtgtctctggcctcaagcctggcctccatgggttccatgtacatgcacttggtgacaccaccaatggatgcatgtcaactggaccacactacaatcctgcgagcaaggagcatggggcaccagaagatgagaaccgccatgctggtgatcttggaaacgtgacagctggagcagatggtgttgctaatatcaatgtcaccgacagccagatcccactgactgggccaaactcaatcattggcagagctgttgttgttcacgctgatcctgatgatcttggaaagggtgggcacgagctcagcaagagcactggaaacgccggtggccgtgttgcttgtgggatcattggactccagggctgaaaacgatcgccggacttgggggtgcctgagaggtccgtctcctgccgtccccagcagacgagcctgaacattcggagacatcgtgaaataagagcgtcgctgatctgtgatcatcgtatttgtcattatgcacctgtagcaaccgatggactgaactgtgctggattatgctgttggatcacctgagtatgtgttacatgtcggttttgatgtgacatcctatcgtttcgatgtgttttgtggaagtgttgttgcaagatttcaacagtcacgacttggttttgatatgcagtcagcagcagctcctgagttgtgattgctcagctgcggtccttttctttttttgggataactgatttcttgttgaaatacgctcgctgcatcacctgtgtttagtgctgtcggctagat

SEQ ID NO: 156121 - DNA, 1050 bp, Zea Mays
gcctaacaaaaccttcaaggattcctggggcttgttcgcctcactctgatgttgttgcttcgtataacctgatcacataaacaatggtgaaggctgttgctgtgcttggtagcagcgatggtgtcaagggcaccatctttttcacccaagagggagatggccctaccgctgtcaccggaagtgtctctggcctcaagcctggcctccatgggttccatgtacatgcacttggtgacaccaccaatggatgcatgtcaactggtgtttatttttctttttctttggcttgcttatgtgatcagggtgtgtgctaagttaatatcagtcattgaactttctacttgttggtgaaatcaaggaccacactacaatcctgcgagcaaggagcatggggcaccagaagatgagaaccgccatgctggtgatcttggaaacgtgacagctggagcagatggtgttgctaatatcaatgtcaccgacagccagatcccactgactgggccaaactcaatcattggcagagctgttgttgttcacgctgatcctgatgatcttggaaagggtgggcacgagctcagcaagagcactggaaacgccggtggccgtgttgcttgtgggatcattggactccagggctgaaaacgatcgccggacttgggggtgcctgagaggtccgtctcctgccgtccccagcagacgagcctgaacattcggagacatcgtgaaataagagcgtcgctgatctgtgatcatcgtatttgtcattatgcacctgtagcaaccgatggactgaactgtgctggattatgctgttggatcacctgagtatgtgttacatgtcggttttgatgtgacatcctatcgtttcgatgtgttttgtggaagtgttgttgcaagatttcaacagtcacgacttggttttgatatgcagtcagcagcagctcctgagttgtgattgctcagctgcggtccttttctttttttgggataactgatttcttgttgaaatacgctcgctgcatcacctgtgtttagtgctgtcggctagat

SEQ ID NO: 156122 - DNA, 1318 bp, Zea Mays
acacaccgcgcgcgtcctcatcctcacttcaggtctgcagcccccaactacccccagcctcggaaggaaccttccagaagcgcaagactctaaaggccgtcgccttcccattcttcctcgccgcgggggtcgcctgaggtatgatgcctaacaaaaccttcaaggattcctggggcttgttcgcctcactctgatgttgttgcttcgtataacctggtctccgaaatccgaataccccgtagcagctgcggttggatctcagatcggtgctgcggtccctcttttaatttgtttcccctccgcttccgttagcgccgactgatcgtcgagtcagatcttacaccctatatatagtctcatctagccgtcactagtgagactcgatttgattcgttccactggattaagcgctttgagcgcgctagatacgtgtcatatcacataaacaatggtgaaggctgttgctgtgcttggtagcagcgatggtgtcaagggcaccatctttttcacccaagagggagatggccctaccgctgtcaccggaagtgtctctggcctcaagcctggcctccatgggttccatgtacatgcacttggtgacaccaccaatggatgcatgtcaactggaccacactacaatcctgcgagcaaggagcatggggcaccagaagatgagaaccgccatgctggtgatcttggaaacgtgacagctggagcagatggtgttgctaatatcaatgtcaccgacagccagatcccactgactgggccaaactcaatcattggcagagctgttgttgttcacgctgatcctgatgatcttggaaagggtgggcacgagctcagcaagagcactggaaacgccggtggccgtgttgcttgtgggatcattggactccagggctgaaaacgatcgccggacttgggggtgcctgagaggtccgtctcctgccgtccccagcagacgagcctgaacattcggagacatcgtgaaataagagcgtcgctgatctgtgatcatcgtatttgtcattatgcacctgtagcaaccgatggactgaactgtgctggattatgctgttggatcacctgagtatgtgttacatgtcggttttgatgtgacatcctatcgtttcgatgtgttttgtggaagtgttgttgcaagatttcaacagtcacgacttggttttgatatgcagtcagcagcagctcctgagttgtgattgctcagctgcggtccttttctttttttgggataactgatttcttgttgaaatacgctcgctgcatcacctgtgtttagtgctgtcggctagat

SEQ ID NO: 156123 - DNA, 1003 bp, Zea Mays
cgggcggcagggcctgctggtcgttgcggaatagtaacgcaacttgactgcaatgtttggctgcgcctacaaatccaacgcaccaacacaccgcgcgcgtcctcatcctcacttcaggtctgcagcccccaactacccccagcctcggaaggaaccttccagaagcgcaagactctaaaggccgtcgccttcccattcttcctcgccgcgggggtcgcctgagatcacataaacaatggtgaaggctgttgctgtgcttggtagcagcgatggtgtcaagggcaccatctttttcacccaagagggagatggaccacactacaatcctgcgagcaaggagcatggggcaccagaagatgagaaccgccatgctggtgatcttggaaacgtgacagctggagcagatggtgttgctaatatcaatgtcaccgacagccagatcccactgactgggccaaactcaatcattggcagagctgttgttgttcacgctgatcctgatgatcttggaaagggtgggcacgagctcagcaagagcactggaaacgccggtggccgtgttgcttgtgggatcattggactccagggctgaaaacgatcgccggacttgggggtgcctgagaggtccgtctcctgccgtccccagcagacgagcctgaacattcggagacatcgtgaaataagagcgtcgctgatctgtgatcatcgtatttgtcattatgcacctgtagcaaccgatggactgaactgtgctggattatgctgttggatcacctgagtatgtgttacatgtcggttttgatgtgacatcctatcgtttcgatgtgttttgtggaagtgttgttgcaagatttcaacagtcacgacttggttttgatatgcagtcagcagcagctcctgagttgtgattgctcagctgcggtccttttctttttttgggataactgatttcttgttgaaatacgctcgctgcatcacctgtgtttagtgctgtcggctagat

SEQ ID NO: 156124 - DNA, 1129 bp, Zea Mays
aaactccgatccaacgggcggcagggcctgctggtcgttgcggaatagtaacgcaacttgactgcaatgtttggctgcgcctacaaatccaacgcaccaacacaccgcgcgcgtcctcatcctcacttcaggtctgcagcccccaactacccccagcctcggaaggaaccttccagaagcgcaagactctaaaggccgtcgccttcccattcttcctcgccgcgggggtcgcctgagttgtttgcagatcacataaacaatggtgaaggctgttgctgtgcttggtagcagcgatggtgtcaagggcaccatctttttcacccaagagggagatggccctaccgctgtcaccggaagtgtctctggcctcaagcctggcctccatgggttccatgtacatgcacttggtgacaccaccaatggatgcatgtcaactggaccacactacaatcctgcgagcaaggagcatggggcaccagaagatgagaaccgccatgctggtgatcttggaaacgtgacagctggagcagatggtgttgctaatatcaatgtcaccgacagccagatcccactgactgggccaaactcaatcattggcagagctgttgttgttcacgctgatcctgatgatcttggaaagggtgggcacgagctcagcaagagcactggaaacgccggtggccgtgttgcttgtgggatcattggactccagggctgaaaacgatcgccggacttgggggtgcctgagaggtccgtctcctgccgtccccagcagacgagcctgaacattcggagacatcgtgaaataagagcgtcgctgatctgtgatcatcgtatttgtcattatgcacctgtagcaaccgatggactgaactgtgctggattatgctgttggatcacctgagtatgtgttacatgtcggttttgatgtgacatcctatcgtttcgatgtgttttgtggaagtgttgttgcaagatttcaacagtcacgacttggttttgatatgcagtcagcagcagctcctgagttgtgattgctcagctgcggtccttttctttttttgggataactgatttcttgttgaaatacgctcgctgcatcacctgtgtttagtgctgtcggctagat

SEQ ID NO: 156125 - DNA, 1129 bp, Zea Mays
aatgtaaatgaaactccgatccaacgggcggcagggcctgctggtcgttgcggaatagtaacgcaacttgactgcaatgtttggctgcgcctacaaatccaacgcaccaacacaccgcgcgcgtcctcatcctcacttcaggtctgcagcccccaactacccccagcctcggaaggaaccttccagaagcgcaagactctaaaggccgtcgccttcccattcttcctcgccgcgggggtcgcctgagatcacataaacaatggtgaaggctgttgctgtgcttggtagcagcgatggtgtcaagggcaccatctttttcacccaagagggagatggccctaccgctgtcaccggaagtgtctctggcctcaagcctggcctccatgggttccatgtacatgcacttggtgacaccaccaatggatgcatgtcaactggaccacactacaatcctgcgagcaaggagcatggggcaccagaagatgagaaccgccatgctggtgatcttggaaacgtgacagctggagcagatggtgttgctaatatcaatgtcaccgacagccagatcccactgactgggccaaactcaatcattggcagagctgttgttgttcacgctgatcctgatgatcttggaaagggtgggcacgagctcagcaagagcactggaaacgccggtggccgtgttgcttgtgggatcattggactccagggctgaaaacgatcgccggacttgggggtgcctgagaggtccgtctcctgccgtccccagcagacgagcctgaacattcggagacatcgtgaaataagagcgtcgctgatctgtgatcatcgtatttgtcattatgcacctgtagcaaccgatggactgaactgtgctggattatgctgttggatcacctgagtatgtgttacatgtcggttttgatgtgacatcctatcgtttcgatgtgttttgtggaagtgttgttgcaagatttcaacagtcacgacttggttttgatatgcagtcagcagcagctcctgagttgtgattgctcagctgcggtccttttctttttttgggataactgatttcttgttgaaatacgctcgctgcatcacctgtgtttagtgctgtcggctagat

SEQ ID NO: 156126 - DNA, 1226 bp, Zea Mays
aatgtaaatgaaactccgatccaacgggcggcagggcctgctggtcgttgcggaatagtaacgcaacttgactgcaatgtttggctgcgcctacaaatccaacgcaccaacacaccgcgcgcgtcctcatcctcacttcaggtctgcagcccccaactacccccagcctcggaaggaaccttccagaagcgcaagactctaaaggccgtcgccttcccattcttcctcgccgcgggggtcgcctgagatcacataaacaatggtgaaggctgttgctgtgcttggtagcagcgatggtgtcaagggcaccatctttttcacccaagagggagatggccctaccgctgtcaccggaagtgtctctggcctcaagcctggcctccatgggttccatgtacatgcacttggtgacaccaccaatggatgcatgtcaactggtgtttatttttctttttctttggcttgcttatgtgatcagggtgtgtgctaagttaatatcagtcattgaactttctacttgttggtgaaatcaaggaccacactacaatcctgcgagcaaggagcatggggcaccagaagatgagaaccgccatgctggtgatcttggaaacgtgacagctggagcagatggtgttgctaatatcaatgtcaccgacagccagatcccactgactgggccaaactcaatcattggcagagctgttgttgttcacgctgatcctgatgatcttggaaagggtgggcacgagctcagcaagagcactggaaacgccggtggccgtgttgcttgtgggatcattggactccagggctgaaaacgatcgccggacttgggggtgcctgagaggtccgtctcctgccgtccccagcagacgagcctgaacattcggagacatcgtgaaataagagcgtcgctgatctgtgatcatcgtatttgtcattatgcacctgtagcaaccgatggactgaactgtgctggattatgctgttggatcacctgagtatgtgttacatgtcggttttgatgtgacatcctatcgtttcgatgtgttttgtggaagtgttgttgcaagatttcaacagtcacgacttggttttgatatgcagtcagcagcagctcctgagttgtgattgctcagctgcggtccttttctttttttgggataactgatttcttgttgaaatacgctcgctgcatcacctgtgtttagtgctgtcggctagat

SEQ ID NO: 156127 - DNA, 1552 bp, Zea Mays
aatgtaaatgaaactccgatccaacgggcggcagggcctgctggtcgttgcggaatagtaacgcaacttgactgcaatgtttggctgcgcctacaaatccaacgcaccaacacaccgcgcgcgtcctcatcctcacttcaggtctgcagcccccaactacccccagcctcggaaggaaccttccagaagcgcaagactctaaaggccgtcgccttcccattcttcctcgccgcgggggtcgcctgagatcacataaacaatggtgaaggctgttgctgtgcttggtagcagcgatggtgtcaagggcaccatctttttcacccaagagggagatggtaagccatttcatattctgtgatatggggtgtttggttccaccaaactaaagtttagtccttatcacatcgaatgtttgaatgataattatggatattaaatatagtttaattataagactaattgcatagatgaagactaaaagataagataaatttattaaacctaatcaagcatgtatttaatacttataattgatattcaaatatttgatgtgtcacgaactaaactttagtcagaaaaacttaacactcctatagtattctatattcaattgaatgttgtcttcaccttgttgactctagctgcttggatctattgttaggccctaccgctgtcaccggaagtgtctctggcctcaagcctggcctccatgggttccatgtacatgcacttggtgacaccaccaatggatgcatgtcaactggtgtttatttttctttttctttggcttgcttatgtgatcagggtgtgtgctaagttaatatcagtcattgaactttctacttgttggtgaaatcaaggaccacactacaatcctgcgagcaaggagcatggggcaccagaagatgagaaccgccatgctggtgatcttggaaacgtgacagctggagcagatggtgttgctaatatcaatgtcaccgacagccagatcccactgactgggccaaactcaatcattggcagagctgttgttgttcacgctgatcctgatgatcttggaaagggtgggcacgagctcagcaagagcactggaaacgccggtggccgtgttgcttgtgggatcattggactccagggctgaaaacgatcgccggacttgggggtgcctgagaggtccgtctcctgccgtccccagcagacgagcctgaacattcggagacatcgtgaaataagagcgtcgctgatctgtgatcatcgtatttgtcattatgcacctgtagcaaccgatggactgaactgtgctggattatgctgttggatcacctgagtatgtgttacatgtcggttttgatgtgacatcctatcgtttcgatgtgttttgtggaagtgttgttgcaagatttcaacagtcacgacttggttttgatatgcagtcagcagcagctcctgagttgtgattgctcagctgcggtccttttctttttttgggataactgatttcttgttgaaatacgctcgctgcatcacctgtgtttagtgctgtcggctagat

SEQ ID NO: 156128 - DNA, 908 bp, Zea Mays
gcctaacaaaaccttcaaggattcctggggcttgttcgcctcactctgatgttgttgcttcgtataacctgatcacataaacaatggtgaaggctgttgctgtgcttggtagcagcgatggtgtcaagggcaccatctttttcacccaagagggagatggccctaccgctgtcaccggaagtgtctctggcctcaagcctggcctccatgggttccatgtacatgcacttggtgacaccaccaatggatgcatgtcaactggaccacactacaatcctgcgagcaaggagcatggggcaccagaagatgagaaccgccatgctggtgatcttggaaacgtgacagctggagcagatggtgttgctaatatcaatgtcaccgacagccagatcccactgactgggccaaactcaatcattggcagagctgttgttgttcacgctgatcctgatgatcttggaaagggtgggcacgagctcagcaagagcactggaaacgccggtggccgtgttgcttgtgggatcattggactccagggctgaaaacgatcgccggacttgggggtgcctgagaggtccgtctcctgccgtccccagcagacgagcctgaacattcggagacatcgtgaaataagagcgtcgctgatctgtgatcatcgtatttgtcattatgcacctgtagcaaccgatggactgaactgtgctggattatgctgttggatcacctgagtatgtgttacatgtcggttttgatgtgacatcctatcgtttcgatgtgttttgtggaagtgttgttgcaagatttcaacagtcacgacttggttttgatatgcagtcagcagcagctcctgagttgtgattgctcagctgcggtccttttctttttttgggataactgatttcttgttg

SEQ ID NO: 156129 - DNA, 1105 bp, Zea Mays
cgttagtgtatgttgtctattgttcagactaaaagcattagtgttgtctgttattcagattttttggcggcgcgaggctgtccgtcgatggcagaacgggcctttggcagaacaggtcaaaggcagaacggtcaaaggcagactactattgcttacttaataagtagtagagattgttgaagagaggctctcccttactacttttcttggttcatccatggtataggatgtgactgtcagcctgggccctaacggcgagctccggtacccaccatacccgccggggaaccagggcgccgatggctacgccggcatcggcgagttacagtgctacgacaagtacatgctggcccggctgaagcggcacgccgagttgtcggggcagccactgtggggcctgtcaggcccacacgacgggccgcggtacgacgagtcgccggagacgtccgccttctttagggagccggggggctcgtggaagtcggcctacggcgagttcttcctgtcctggtacgccggggagctgctggcgcacggcgaccgcgtcctggccgcggcgtccagggcgttcggcggcaagcccgtcgagctgtccgccaaggtgccgctcatgcgcggaccgagccccgccgacgccaccgcggggctctacggcgggtacagcccggtcgcggagatgttcgcgcggcacaggtgcgcggtgatcgcgtccggcgtggaggcgcggccggacgccgcggcggaggggcgcctggcccgggtcaaggccgcctgcgcggagcacggcgcgcgcctcgcggcggagagcgctcctctctccgtggcgcgcggcggcgccagcgccggctcaccgggcgtcgtctggctgtccgccgggcgcactcggccgtgccagttcacgtaccagcggatgggcgcagagttcttctcgccggggcactggccgctgttcgtgcagttcgtgcgcgcgctggagtgccccgaggaggcccatgaggacgacctgccggtcagcgctggcggcggcgagcggctcaccgtaccgtccgcgtccgccccgacgagcgaagccacaaggacaagggaggtgcagaccgtgtgaatg

SEQ ID NO: 156130 - DNA, 1078 bp, Zea Mays
aaaaaatctgtaccactactaccgccaagcgaaccaaccagaaaagtgcaaagcgcagcgaccgacgcgtcccgaccagctgctgacgcggcagacacagggcactaggacagcagccaataatggaggccgcgctgatgcaccagacggcggcaacggtgcctgcgaggtggcggtgcgtgggggacgcgtcgcgggctggccgcggccagcagctagccggcgtcgtccggctcggcgcggcgcggcgtgcagccagcggggctctccctgtcctccggggcagcaggctgccgggccccgtgcgggcgctcgtctccgagtccgagtccgaggccgccgccgagcgggcggcggatggcgcggtgaggctgttcgtgggcctccccgcggacgcggtggtctccgacggccgcggggtgagccgctccagggccgtctcggcggcgctgcgcgcgctcaagctgctcggcgtcgacggcgtggagctgccggtgtcctgggccgccgtgcagcccgggtccggggcctggttcgagtgggccgggtaccgcgccgtcgccgccatggtccgcgacgcggggctcgacctccgcgtctcgctccgcaccgacggcgacgcgctccccgagtgggtggccgacgctgccgccgccgaccccgacgtgctcttcacggaccgctccgggcgccgccgcgtcgggtgcatctccttcgccgtcgacgagctcccagtgctcgtcggcaggtcgccgctccaggcctacgaggccttcttccgcagcttcgctgaggagttcaacgacttgttggggtcaacagttacggttggggccatcacctggtcatggacattcctctgagatttatggccctggagatggagtaggtggatgccatctatcttgctgttcttatggtggacaccgtggtaaatatcatgcttgccacaaccattcatcggaatgggccaggcacaacatttcacctgaacctggtcctatcagatcttactggtgatctcttgttctgacagtaaatgtttgtcgttatggcatttccaacaacttttcatact

SEQ ID NO: 156131 - DNA, 1836 bp, Zea Mays
gagtgtttgtgttggccttggtttgcatgatggatacttttggttattgttcgtcccagaatttatcgcagtaatttcatgagatgttagatcatgtactccagttggagcagggtgagtttgaacttaggagggcattgtgttttcacaattactacctttggggccatcgcagctataatcgccattcagggtgcagcactgatccattttggtagttcctatacaatttgtgttttctgatcttttgtttcttgtcttttaaccttcctttcttgtttgacactgttctttagtgtctgatgatcagactcaccaaccctatagagctatcacggtgcaacatcctgaattgttagctttgttattttgctcaaattgctggcaaactaggatgggtttgaccaacaagtaaccagtttgcaacgaattgttgccgttgctgctgctgtggtggtgtagtatgttatatatattcgaccgaatgttcccaagttcatttagaggggtgggagtacatggtgcttctacaaatattgtgtcgatactggggcagccagccttggcattaatggtcacaaatcctaattgtgtgccctgaccttgatgaatcttggttgattaaacaaatagagagacatacgaaattactatcatgagtgtggctgtacttttttggtcatttgtgtgaaaacctgtccatgtgtgcgcagttcacatgggaacgagctatttcttatcatgaggaacatagcctgcatgtttaggtcatggctcataagttactgcaaaggctaagattagttaggagtcaatactatactttattgggggatataatcattcaatcagtgaaacagcacaaggtcaacttattagaacttcgccctctgatctctgctgcatgttgctcctcccactgattgaaccacacgagctctcatgaagttgtcgccttgcatccttcttaggtaaccatcaccacccttctcaggtaaccatcccagatagtgttcctctcgtttgctaactgatctgtgctgctgagttttgcctccatgatatgtgctatctatctagctaagaagttctagaaggtatatttctgaaacaatccagaaccatatctatcatctaatatgtggttctaatatgtgttcactgtgaacgttaggagcaggaacagcctagttcggcagtttacgagtttctgatgaatctggtggcctggacagtcgtttttatgaaataccttccataaatggtctgtacatcactgtcggtgtctttggggaactaaatcgtagctggattaaagattcattcacggcaatcatttgtactgctatagcgcattcttgtatgaaactaaaggcctgtagcagtaatagtgtttcctgttattggagttttttttcctgcgcatatcgatctgagccttacaaattgttaccagccaactatctaatcaatgcctcagccatgaaagagtaaatttacaagcttatttgtagatgatgcttttcattttgcagcagtgtgtagtccatggttattttggggaaagttctcacgatctaaatctctggcagctggtgatcgatctgtcagtttcggaattggagagctaatgcgtagacatccatgaggttacagtgtcttatcaatcagaggtgatttttgtctgttatgataatttaccatgacaattctgtaattcaaaatcagtttatttttgatttggtgtcagggcaaatctgaaccaattctgtaattcatagttcgagaaggcattttccacaattgtgcgcattatggttcacttcgtcttgtgct

SEQ ID NO: 156132 - DNA, 578 bp, Zea Mays
atgagcgactaaagaactttgcacaccccctgaacccaaaccctagatcgaatcgagggtgtgcacggaccattcttcgtttcggccatcgtttcacaccgccgtcactacggtgccgcctcgccgccgttccattgcctggcattggtggcggtaagggatgggaaccgtgcggtggtgcctgacgcggcttacgagtcgggtttggtctgctagggctgccctcattcgtcactcctgatggatcgatggaccatgcaacgcaatggcggcggcgcagcagtgtgtgtagtccatggttattttggggaaagttctcacgatctaaatctctggcagctggtgatcgatctgtcagtttcggaattggagagctaatgcgtagacatccatgaggttacagtgtcttatcaatcagaggtgatttttgtctgttatgataatttaccatgacaattctgtaattcaaaatcagtttatttttgatttggtgtcagggcaaatctgaaccaattctgtaattcatagttcgagaaggcattttccacaattgtgcgcattatggttcacttcgtctt

SEQ ID NO: 156133 - DNA, 1931 bp, Zea Mays
attttcaacttgcttctcaagtttgctcggtgtcgctcgcgactggctctagttgtactcagccagctatccttggtgtgggggtttgatcgacggagccgtcacaacggcgcctatggcgaagccttccgtacagactcatttcgtcttggacgcgatggccgcggagagggtgaaagtcgcggagaactgggagcgggcgttggattcgttggagaacatgaatcagcgcctgggaaagttcgccaaggtccagcgccagttggtggagcagtcggaggtcgcggcgcaggcggccaagcaggcggcgaaggagcgttctgttctgtcgcgtcaagtggaggaatctgggcagctgctggcgcgggtacagctggaatccatggcggcggagacggagaagtccaggaggagcggatccaccagcccgtcatctaggtcttcaccccctgttcaggtacggaagggtcctcagaagggtgttcagatcaatccactgcctgagatgtcattcccaaagtttgatggtgctaatccgagagtttggttggacaagtgtttggattacttccatattttcaaggtttctgaagctatgtgggtacaagtggcgtctctgcacttggaagggattgctgctcgctggtttcacgtgcatagactgaaacagaggacggggtggaatcattttactcgggatgtgttgaacaagtttggcgcagacgagtatccaaaggcgatgaggagattgatgggtctcaggcagacggggtcactggacgagtttgtgcgggcgttcgaggaagcacggtacatggtatcgctgcataacccaaagttgggtgaggtgctctttgtcactcagtttatttggggtctggagtatgatttgcaaggggcggtgcaatctcagatgcccaccactttggatcgagcagtactaattgccaagttgcaggatgaactgaatgatcaatacaaaggaaggtcgacaaggtcagtgttccagtcgaggtcctcgtccacagcagtcaaggccaaggcgatcagtggtactactggtaaagggtgcatgaaggtgcggggtcttttgaagaacaaagttacgttgctgttgtcaattcattccgggagtcctacttgctttatcaacaagaatctggtggctcgggctcgtttgtctgctgtttcttgtcctccagccaggttcacattggcaaatggcgagtccctaacgtcggatttgttggttcctcagcttgcctggtgcgcaaatggccacacgttccacactgatatgagagtgttggatctgggaccgtatgacgccatcttgggttatgactggctgaaatcacatagccctatggaatgtgattgggcaaacaaggtcttggtctttcatgatgcaggggtggaggttactttgaaaggggatgatgataatatcaagaaggaggtgcaggaggtttcagccatttgccacaagtgttgatcagatggtccaatctatcggtggactcgtcgactcgggaagattactatatggttaagcggtatcctaatgccgctgtttcggtacaaacagtatctgaaggtctgtgtgtgtctgggtggggggcatgttcagagctgagcgctggacaagtgaagctgatgaggagtgatggcgtagtgtcatagggcgttttctattttacgttttccagttgggttggcgtctttaggcgcatactgtcccgaacaacccgtgcgtgcagcaagtcgctgatgggaggttacctcagctcatagtttatggaacagactacaacacgaagaatggaactagggtacgtactctgttgcttgtcgtgctgctctgttatcgtttaataatggttggtagtccagaaactcagctcatcattcctgatcgatatgttgcttct

SEQ ID NO: 156134 - DNA, 1772 bp, Zea Mays
attttcaacttgcttctcaagtttgctcggtgtcgctcgcgactggctctagttgtactcagccagctatccttggtgtgggggtttgatcgacggagccgtcacaacggcgcctatggcgaagccttccgtacagactcatttcgtcttggacgcgatggccgcggagagggtgaaagtcgcggagaactgggagcgggcgttggattcgttggagaacatgaatcagcgcctgggaaagttcgccaaggtccagcgccagttggtggagcagtcggaggtcgcggcgcaggcggccaagcaggcggcgaaggagcgttctgttctgtcgcgtcaagtggaggaatctgggcagctgctggcgcgggtacagctggaatccatggcggcggagacggagaagtccaggaggagcggatccaccagcccgtcatctaggtcttcaccccctgttcaggtacggaagggtcctcagaagggtgttcagatcaatccactgcctgagatgtcattcccaaagtttgatggtgctaatccgagagtttggttggacaagtgtttggattacttccatattttcaaggtttctgaagctatgtgggtacaagtggcgtctctgcacttggaagggattgctgctcgctggtttcacgtgcatagactgaaacagaggacggggtggaatcattttactcgggatgtgttgaacaagtttggcgcagacgagtatccaaaggcgatgaggagattgatgggtctcaggcagacggggtcactggacgagtttgtgcgggcgttcgaggaagcacggtacatggtatcgctgcataacccaaagatgaactgaatgatcaatacaaaggaaggtcgacaaggtcagtgttccagtcgaggtcctcgtccacagcagtcaaggccaaggcgatcagtggtactactggtaaagggtgcatgaaggtgcggggtcttttgaagaacaaagttacgttgctgttgtcaattcattccgggagtcctacttgctttatcaacaagaatctggtggctcgggctcgtttgtctgctgtttcttgtcctccagccaggttcacattggcaaatggcgagtccctaacgtcggatttgttggttcctcagcttgcctggtgcgcaaatggccacacgttccacactgatatgagagtgttggatctgggaccgtatgacgccatcttgggttatgactggctgaaatcacatagccctatggaatgtgattgggcaaacaaggtcttggtctttcatgatgcaggggtggaggttactttgaaaggggatgatgataatatcaagaaggaggtgcaggaggtttcagccatttgccacaagtgttgatcagatggtccaatctatcggtggactcgtcgactcgggaagattactatatggttaagcggtatcctaatgccgctgtttcggtacaaacagtatctgaaggtctgtgtgtgtctgggtggggggcatgttcagagctgagcgctggacaagtgaagctgatgaggagtgatggcgtagtgtcatagggcgttttctattttacgttttccagttgggttggcgtctttaggcgcatactgtcccgaacaacccgtgcgtgcagcaagtcgctgatgggaggttacctcagctcatagtttatggaacagactacaacacgaagaatggaactagggtacgtactctgttgcttgtcgtgctgctctgttatcgtttaataatggttggtagtccag

SEQ ID NO: 156135 - DNA, 952 bp, Zea Mays
attttcaacttgcttctcaagtttgctcggtgtcgctcgcgactggctctagttgtactcagccagctatccttggtgtgggggtttgatcgacggagccgtcacaacggcgcctatggcgaagccttccgtacagactcatttcgtcttggacgcgatggccgcggagagggtgaaagtcgcggagaactgggagcgggcgttggattcgttggagaacatgaatcagcgcctgggaaagttcgccaaggtccagcgccagttggtggagcagtcggaggtcgcggcgcaggcggccaagcaggcggcgaaggagcgttctgttctgtcgcgtcaagtggaggaatctgggcagctgctggcgcgggtacagctggaatccatggcggcggagacggagaagtccaggaggagcggatccaccagcccgtcatctaggtcttcaccccctgttcaggtacggaagggtcctcagaagggtgttcagatcaatccactgcctgagatgtcattcccaaagtttgatggtgctaatccgagagtttggttggacaagtgtttggattacttccatattttcaaggtttctgaagctatgtgggtacaagtggcgtctctgcacttggaagggattgctgctcgctggtttcacgtgcatagactgaaacagaggacggggtggaatcattttactcgggatgtgttgaacaagtttggcgcagacgagtatccaaaggcgatgaggagattgatgggtctcaggcagacggggtcactggacgagtttgtgcgggcgttcgaggaagcacggtacatggtatcgctgcataacccaaagttgggatgaactgaatgatcaatacaaaggaaggtcgacaaggtcagtgttccagtcgaggtcctcgtccacagcagtcaaggccaaggcgatcagtggtactactggtaaagg

SEQ ID NO: 156136 - DNA, 208 bp, Zea Mays
agtgtttgtcgtaacaaccgagtaccaatctgttatgcaactcattttagctatatggcgaagtgcaactagcacatgctggcataacatccaaacgttaagatcattcgttaccgttattaagccatttcccacattaataattcaatcacggttaataattgagattaatctataccctctattcttaacaaagaaaaaaagaaaa

SEQ ID NO: 156137 - DNA, 883 bp, Zea Mays
cagatgctggacgcggacaccgccatcgacgtcttgaggagccccgagaggaaggccatgggcacggggctcttcctggactgcgccgggagaaggcccacgatggcctccacgacggcgcgctgcttcttgacggcgtcggcgtccgcgccgccgcatctgtgcacgtccctggccatgagcccgtgcagcgcgttctgcgcgtagttgatgaggatcctggtgaccgtctcctgcttgagccccttggccttgaccgcggagagcagccgctggaagaagtcgaggccgagcgcggccacggacttgccccaccagtcggccggcgggtcgaggtcggcgaacgccgccgcgggcttgagctgcgcgcactggtccagcttggacagccccgaggtgagctgctccttgcacacgttggtggcgacggcggcgatgaggcggggcacgaggccgacgtcctcggcggccgggagcagcgcctcgcagctgcggagcacggcgacggagctggcgatgctggggagcaccgcgtcgcggaggaaggcctcggcgcggagctccaggctcttgtcggagaagtcgtcggtgatctgcaggtagtgcgcggcgcagcgcagcatggcgacgttggcgaccgtgacgtccacgtggacgccgtagcagaacttggcggcgagctcgaacgccggcgcgccccccggggtgccgtgcaggctgagccgcgccagcttggcgtccttggcctccgcgacgaggcgccggatcttgccgctccgggagaccagcgggaactgcgcgaacagctatgccgccggcgttagcacatcgttttaatcttctttctttttttttttcgttttcttgtggaagggcaaggagc

SEQ ID NO: 156138 - DNA, 858 bp, Zea Mays
cagatgctggacgcggacaccgccatcgacgtcttgaggagccccgagaggaaggccatgggcacggggctcttcctggactgcgccgggagaaggcccacgatggcctccacgacggcgcgctgcttcttgacggcgtcggcgtccgcgccgccgcatctgtgcacgtccctggccatgagcccgtgcagcgcgttctgcgcgtagttgatgaggatcctggtgaccgtctcctgcttgagccccttggccttgaccgcggagagcagccgctggaagaagtcgaggccgagcgcggccacggacttgccccaccagtcggccggcgggtcgaggtcggcgaacgccgccgcgggcttgagctgcgcgcactggtccagcttggacagccccgaggtgagctgctccttgcacacgttggtggcgacggcggcgatgaggcggggcacgaggccgacgtcctcggcggccgggagcagcgcctcgcagctgcggagcacggcgacggagctggcgatgctggggagcaccgcgtcgcggaggaaggcctcggcgcggagctccaggctcttgtcggagaagtcgtcggtgatctgcaggtagtgcgcggcgcagcgcagcatggcgacgttggcgaccgtgacgtccacgtggacgccgtagcagaacttggcggcgagctcgaacgccggcgcgccccccggggtgccgtgcaggctgagccgcgccagcttggcgtccttggcctccgcgacgaggcgccggatcttgccgctccgggagaccagcgggaactgcgcgaacagctatgccgccggcgttagcacatcgttttaatcttctttctttttttttttc

SEQ ID NO: 156139 - DNA, 359 bp, Zea Mays
agaactatcaagtttagcatcattaatataataaggagcatgcgacaactgtgccccagcatggcaacgacatgaatatggacatcgagcatgtgctcaaggagaagttcggtgacgttttcaaggaaatccattaggtgttcgacggggaccagccgacagcagagacaatgtccgaggcggtgaactggcgcctggacattctgcggccaccgattgggaactacaacgggagcgtggatgcgttggccgtcgatggcgaggactgcctggtgaggtatgacatactggaatccattggcagcgatatcaaggcgtccatcatggagaaattccctactatattcagtaaacagtag

SEQ ID NO: 156140 - DNA, 318 bp, Zea Mays
atgactgccgacgctttctccctccgtggcggactccaatcgcgcgcctgcctgtgcctggacgacggtctgccgatcgagtgcgtccccacgtcagccctgcgccgaccgacaccgcgcgacacgccggcgccggggcgtggccctggtctcccccagccacgggagtcgggaggtgtggccggcgtgctgagcgagagaagacaccggggccgcgggcagagcagggttgatgctcgggactcgatgctcgaattgtttgatccaagaatccgcgacatcggggttggcatcgatttgtttgagcgtcctgtttga

SEQ ID NO: 156141 - DNA, 1066 bp, Zea Mays
tgtttcgtgcaactatgcattgctaacatatcagctagcatggtttgcactgctagaatatcagtttattaccattttcgtgcaatcgtgactgaggtggatggggttattgaacaacgtatttgaatatttgatgttttagctgcatggaagtattcattccaatccttctattgaattgcaaagaattggtaaactttgagatctgtatagttcagttttagttatgcctcttcattggagcctgaattggacttcagttgtttgcatagttatagttacaaatatagaatagccttgcttatccatcaattttgaattgttacagtactgaatgagtcctcagagtgcatagtgttgttctctttttatgtgcatgatagttggtcctcttgtaattcagttgctcttgcgggtagttcccccccaactgtcaccatgcagaatgaggagggtaagacggtggacctctatgtccccaggaagtgctcggccacaaacaggatcatcactgccaaggaccatgcctctgtccagatcaacattggccacttggatgcaaatggcctgtatgatggtcacttcaccatgtttgctctctctgggtttgtccgtgctcagggtgatgcagacagctccttggacaagcaggctgtggcagaagaagaagactgatatcaagcagtagattttacatctagtttaccaagaattggacactgccttagctatgtttttgaatttcatgtcactatatgcaatgttgtgatttcagctggtaccttaaatctgaagatttagtatctttgttgggttccttctgagtttgatgtgtggtgttcgtttaattcccttgtaactgtcagctgttctccatattcagttggagtattatttttcttcaaacgtgcattcagttcaaccgcccagtggcaccgaaatattcaaaaaaaacagcgtggtggctgcgagcgtgcgcacgatgatgccatgccagtgccagccttatcgtaatccataggcagatgctgactctgcacgaagaaaccccggtcccccattggtg

SEQ ID NO: 156142 - DNA, 2020 bp, Zea Mays
atgacggcggcccagcagttgagttacgctggggcaagcctttctggatcaaaacaccatgcccgcaccttgaaggatgagaaatccctcacactctcagtgtccggatgcaagtcagaaatccagcaagattcatgcaagatgtgctctgccgttgaacggaaccaagcatgctcaggaatacctctaatttcaacatctcagtgtccggatgttgatggcatgttgggaaggcgggagaaccctggagaacatgaagccatgcggaagatgaaaaatgagtttatggtgaactgggatggtctgagaacaagggagaaagaacgtgtattagtacttgctgcaactaacaggccatttgatcttgatgaggctgttgttaggcggcttccaaggaggttgatggtgaatttgccagatgcatcaaataggagaaaaattcttagtgtaatactagccaaggaagatttggcagacgacgttgatctagaaactatagctaacctgacagaagggtactcaggcagtgatctcaagaatctgtgtgttactgctgcacaccgtcctattagggagattcttgaaaaggaaaagaaggagagagcttcagcagaagcagaaaatagatcattgcctccgtcacacactagcaatgatgtccgtgcattaagaacaagtgatttcatacatgcgcatgaacaggtgtgtgcaagtgttccctcggattccagtaacatgagcgagcttgtgcaatggaatgatctctatggagaaggcggatcaaggaaaaagacaacgctaagctacttcatgtagcttaggttataaatatattgggagaagtgccctggcacaaagcagcaatagttggaggcggtgcagttggaaaaaaaaagctatgctcatctgccagacatccatatcaaagagaattgatggttcaggtggagcggaatagaatggaatggaatagtatacatacacatggttgctgcctctgctctgggccatgcatcatgcatctggacaggacggctatcctggcttgcagttgccctatgcagttttgagtgcaatggtcaccatctgtgaagcacggataccacagagatcctggccccaaccactcttttcacaaatggagctgaggacctttggagttctaccaaaagtgatcttaaatctttgttctttgactttccgttttgtgaacggaaggccccactctgctagtatggattgttgatcctccgtttctctggtactgactgaactgctcatacaaaactcgttcaacaggcagaaatgctgcctggtggccttctagagtgcttctttgacgccgcagagagcacatcaaaaaaaatgtgtttgtttcgaacgatttgtgctgcattccattcacggcgatatcaggtgccgttgtttgtgtttggttccgcaatcaagggagtgaaagccattagcacatccaatcaaacaaatagcgatatctctttcactgtaccagttagcgctggtctcggatgctattaacattgctgttgtctgtctcggaaccaaacaccgcctaactcgtcggctgttaaatatttctgaactgaattactgcacttggttggggtttcatgcttatcaagttggcttatatagccaacaatactttgtgcagttctgcatcctctgcctgcttatgcgcgatctcattggctgagcggtacgaagataaaacggtagctaatccgaagcgatggcttctctttttctttctacggtattttgtctctatgaattacagttacagcagtcagaacagctgatttaaaaccgcagcgaaaaggctgattgccttgcccatttttgggtgggtggaggttaatacagatttctgtaatttttttactttaatattgtttgacatattgtgcaaggcaaatgatttcctaatgatttgttctacttgatattgtaatccatattgacctatatgctatgctcagttccttagagcatctccagt

SEQ ID NO: 156143 - DNA, 2986 bp, Zea Mays
atccttcggttttgtattcttcgcttcctttcgccttcctcttcgcctctctctcgtgttctggcgtcgccgtcgccgctggcgcgagatggtggagacgcggcgaagcgccgcggcgaagcgctcggcggcggtggtggaggaggagaagggctcgctggcatcgccagcgctggagcccgcggaggacgcgccggcgggtcttggagcgggtgacgatgtcgcgtcgtcgcagcccccgaagcgcgcgaaggttgggtgcacggagtcggataccgcgaagccgtcggtggcgccggctgccggcgctgttgcgggtccactgcccaacacggctgggctgcaggccaggaccggcgccatggacaagctggaggccttcttgaagtccaaggaggctcagtccaatccggccggtcataagcaggggactaatgataaagatttatcggcgaagatgaagagagtcatggatttgtcggaggatatatcggagaagataaagagaagcaaggataggttggctgtgttattgaataagccggctgcaggcaccagcaggcgtcaggagccctggtgcagactaatttcacaacattccatgcaccctaccctttctatttacggtgcgattttcacaattggtcatggagcgcatcatgatttcagactggatgaatcatccactgcctcatctgtttgtagactgaagcaagctaagcgaggtgcactccttgaaatctttgaatccaaagttgttcgtgtaaacgggaaatctttggacaaggctgccaaggttaccttaaatggaggagatgaaattatcttctgttcaccagtgaggcatgcttatatatttgagcaacttcatgaggagaaatcaagcacttcagtgttatcttccacttgcacttgcagtagtatccagctggggcaacactcacatttcaatgatattcaggatcatgtgtcatctaaagggcgcaaagcctcatcctttctctttggaagaggtcggtgttcattgttgtcttgtggtctatcagcagacccacttaatatatgtaaaacgacggagggccggagccagtttatctctgaagataatatatcatctggtcggtgtcagctactaaaggaggatttgattaatgcaacggttgatgtgagtgacatctctgagtcatttgatagttgcccatattatctaagtgagcataccaaacatgctctaatgtcagcagcatttgtacatttacattgcaagaactacttcaagtttacaaaagatatatcttctcttagtcaacgagtgctgctatctggcccaacaggaactgatatgtatcaagaatatctggtgaaggcccttgcaaagtattttggtgctagattgctcactatagattcttccatgctgtttggtgggcaaacttccaaggaatcagaatcatacaaaaagggtgatagagtgaggtatattggctcaggcattatccttgatggacagagccctccagattttggttcacagggtgaaatatttcttccttttgaagaaaacagatcatcaaaggttggtgtaaggtttgataaaaaaattctgggaggaaacaatcttggaggcaattgtgaagttgatcatggtttgttctgttctgttgattctttatgccccgacattccaggatgggaggttacgttcaaacatccatttgatgtgatagttgagtttatctctgaagaaattcggcatggccctttaatcctttttctgaaggacacagagaaaatttgtgggaataatgattcctatcatggtctgaagagcaagctaaaacattttccagctggcgcttttataattggatctcaaatccagcctgacaatcgcaaagagaaggcaaatgttagttctccttttctttcgaagttccggtacagccaagctatacttggcctcacattacaggacattgatgggggaaatgataataataaagaaacatcaaaggcaataatgaagcatttgatcaaacttttcccgaataaagtgacacttgaggcaccacaagctgaaatggagctttcacggtggaaccagatgttaaaccgagatattgaagtccttaaaggaaatgcaaacatttcaaaaatacgctcttttctaacaaggcttggattggaatgcactgaccctgaagcgatattggtcacggatcgcattcttacaaatgagtgtattgataaaataattggttttgctttgagccatcaacttaagaactgtacaaatccagacccccctttgggtagtgtgcagtttgctctatccagcggaagtcttaagcatggcgttgacatgttgaaaagtatccagtctggctcgaagagcagcaccaaaaggaaatcacttaaggatattgctactgaaaacgaatttgaaaagagccttcttgctgatgtcacccctccacatgaaattggtgttacctttgaggacattggagctttagaaagtgtcaaagatactctgaaggagttggtgatgcttcctttgcaaagacccgaacttttcaaccgaggacaacttatgaagccatgtaaaggaattttactttttggcccacctggtacggggaagacaaatgctggctaaggctgtggcaactgaggctggtgctaatttcataaacatatcgatgtcaagcatctcttcaaagtggcttggtgaaggagaaaaatttgtgaaagctgtgttttcactggcaagtaaaattgctccaagtgtaatttttgtggacgaggtaagttttttttctcgaaatgcacaggagaattgcgcctcattatattaagaagaaataagaaccaaggtctaaagaaagtcgcgatacagagaaaccacttacagctatgtttggatactttagtatttgacttgcacatttgacttgcacgtgtgcagccacctggatcccatgaa

SEQ ID NO: 156144 - DNA, 279 bp, Zea Mays
atggccggatggggagcacgccggcgagctcacgcggcgcgcagggaatccgaccagggcgcgcgaccggccggcgagggaatggagcaaggtctgagcagaacacaaagaaactccaggagagagaagctgctggacagagggagctacggcgctggtgcagggatatggcagcacgcgcaggaagctcagccatggggagcggatagagctcggcgagcagaggggctgggcgaactgcggcgcgcagggaaacttggccgggcgcaggagctgtag

SEQ ID NO: 156145 - DNA, 2915 bp, Zea Mays
acgaagcaagcaagactactgctacagaaagcagcagcaaaggtctagccggctgcgtggcctaggcgcctaactatatagttaaggtctatctttgagcagttaacgtgcaggaggaataacacgatagccatggacgtgtacatctaccaggcgctcctcctctcggtccttgctgtggcactgctgcagctggtgaagatggccctcaagccgaggccacggctgccgccagggccttggaagctgcccgtcatcggcagcatgcaccacctcgtgaacgtgcttccacaccgggcgctgcgggatctggcggacgtccacggcccgctcatgatgctgcagctcggccagacgccgctcgtcgtcgcctcttccaaggagacggcgcgcgccgtgctcaagacgcacgacaccaacttcgccacacgccccaagctcctcgccggcgagatcgtcggctatgagtgggtcgacatcctctttgccccctccggcgactactggcgcaagctccgccagctctgcgccgccgagatcctgagccccaagcgcgtgctctcgtttcgtcacatccgggaggaggaggtgatgctgcgggtggaggagatccgcgcggcgggcccgtcgacgccggtgaacctgagcgtgatgttccacagcatcacaaacagcgtcgtgtcgcgggccgcattcgggaagaagcggaagaacgcggcggagttcctggcggctaccaaggccgtcgtcggcctgtcgagcggcttcaacatcccggacttgttcccggcgtggaccacagtcctggccaagctcaccggcatgacgcgcagcctcaaggagatccacaagacggtggacaccatcctcgaggaaattatcgaggagcgcaagcgcatccgcgacgaaaagatcatgggcggcgccgccgccgaggacgtcgacgagaacctcgtcgacgtactcatcggcctgcaggagaaaggcggcttcggcttccaacttaccaacagcatcatcaaggccatcatactggacatgttcgcgggcgggacggggacgtcggggtcggccatggagtgggggatgtcggagctgatgcggaacccaccagtgatgaagaagatgcaggcgctgatcagggaggcgttccgtgggaagacggtggtgacagagggcgacctacaggcgagcaacctccagtacatgaagctggtgatcaaagaggccctgcggctgcatccgccggcaccgctgctggtgccccgggagagcatcgaggagtgcgagctggacgggtacacgattccagccaagtcacgggtcatcatcaacgcgtgggccatcggccgtgaccccaagtactggaatgacgccgacgagttcaagccggagcggttcgaggacggctcccgagacttcacgggcagcagctacgagttcttgcccttcggctccggccgaaggatgtgccccgacttcaactacggcctcgccagcatggagctcgcctttgtcggcctgctctaccacttcgactcgtcgctgcccgatggcgtcaaggaggtcaacatgggggaggtgcctggactcggcgtctgccgccgcacgccactaatgctttgcgcaaccccgttcgtcccggtccccgcctagctagccaacgtacatcgtcatgccagccgcgagctgagggacctattgtatctctgtctcagtatctctatgtgcttgctggctaaataaacacgtcatctgtacgtctcgttatgggtgctgcccattgtagtgtgctgtgcgtacgtgtagtagtacagtgaagagtgtactataatcatgtacctaaagtttcaacttccaaagtaaagtgcgtcccaagggtaataaatctatacttacactctggacccgccccacgtgcgccaagttacaccaaactacacataacttagtatcactagtacaatttggctctatacaaacggtagactttttacatcacaggcggttcggttagaaaaccgtctgtgatgtcccaggcggttcagtacgcctgtgatgtaatagtatcataaacggtttttgtttaggaccgcctgtggtgctctatccttttcacaaacggaccctaagaaaaaaccgcctgtgattgtaaaaatatgaaaatacaatttaaatatgaaaataattttaatttttaacagaaatatgcaaatacaatttaaatgaattaatatttaatttttaacaataatatgcaaatacaatttaaatgaattataatagcacacatagataactagagagattttaaattaattggcaaccacaattcatagtcgatcatacatgataacaaatacaatttgattcatacaatttttcatgaactaccatttttccgcatgtatggctttaagttcttatcaattttcttttccacacgcttgattctctctggaccgttaaagacgaacatctcttcatacttattgtattcctcatcttggtctcccacattctcaactccaacaattttttgctttccagaaataactacatgcatcttctcatctgctggatcgagtacatagaacacttgtgcaacacattcagcgagaacccatgggtcatctttatatcctactttctttaagtctaccagtgtgagtccgtagttatccactatcacccccacgggatgttgtacccattggcacttaaataagggtattttcatgcttgggccataatcaagttcccatatttcctctatgaatccaaaatatgtggtcttctgtccttgtaggtcaaaagcatcgatacgaacaccgctattttgtgcaacacttttcatgtcttttgatttagtgtagaatgtgtacccattgatgtcatatgcttgccatgatgtc

SEQ ID NO: 156146 - DNA, 2694 bp, Zea Mays
actgcactgcaccgcaagccgtcgtcaccaagagggaggaatgcggtaagcggcaagcctattccgtcttctactgtcctgttccgccgaacacgtcgccaggtctccttccgccagagcacgccacctcgaatccccctccctgctcaagtgctcggcgactcggcacctccgccccacgtctttctccaccgaccacctgccccgacccctcctcgaccggcgtcgagtggggatccatcaggactggttgggaaggatcggcatgctctacagagaagtgttgcagagcgttaaaagcagtttgggaagactacagaaatacccaaaaagatcgccccctagcttctgaatccttcaattctctagcctgtaaaagaacaagccaggggtagctaaatacgacaaccccagcacttactcattatctttgctgacagtatggcactgaaaaatgtgatccgtgtcattttggtgctggcccatgtgagcagttgtctggctcgattagggaacatgttctctcctggcttcgtttcagcatcaaagccattgccaagctggccaattttgagtgcaggaacatctgtaactgtggctcttgttttgtcattgtttctaacctttgagcatctgtgtgcataccatcaacctgaggagcaaaaattcatgattggtctgattctgatggttccagtatatgctgttcaatcattcttttcattactgaattcaaatgttgcattcatctgtgaactgatgcgtgactgttacgaggcatttgccatgtattgtttcgagagatatttgatagcatgcttaggtggagaagaaagtaccattaggtttatggagggtcggcttcaaatcagtgagagctcacctctgctagatattgattatgattatggcattgtgaaacatcctttcccattgagctgctttatgagaaattggtacctcggtcctgacttctaccatgctgtgaagattggtattgtgcaatatatgatcctcaagcctatctgtgctgttttggcaattttctttgaacttcttggaatctatggagaaggaaagtttgcgtggaaatacgggtatccatatttggctgttgtcctaaatttcagccagacgtgggcattatattgtcttatacagttttatactgctaccaaggagaagctgcaacctataaagcccctgtccaagtttcttactttcaaatctattgtatttttgacctggtggcagggtgttgctgttgcgtttcttttctcaactgggctttttaatggacatttggcacaaaggtttcaaacacgtatccaggattacattatatgccttgagatgggggttgcggcagtggtccatttaaaagtgtttccagctaaaccttaccgacgtggggaaagaaatgttcccaatgttgctgtcatgtctgattatgcatcactgggagctccagaccctgaagaaattggagggatcgacagcttaacaatcttgcaaactcctgtcactaaagacaggcagctgagtttttctcagagtgttcgtgatgttgtgttgggcagcggtgaaatcatggttgatgatgttaaatatacagtttcacatgtcgtggagcctatggagcggagttttacaaagataaataagacaattcatcaaatctcagaaaacgtcaagcagcttgagaagcaaaagaggaaggcaaaggacgacagtcatcttattcccctagaaccatggtcagaggaattttcagaagctcatgaccatgttgcgggcggtagtgccagtgacagcggattagctaagacaaggtacaacaggatcttaaataggccccggaggtcattcgagtccagattgcgcagatggttctagcagccagccggtgctagtgggttaattgattttgatcaaaagaggcggttaaccttttcgctccggttgtttgacaaaatgatagcaattctgacaaactagttctccctccgttcttttcttctttatttgctggtgacaaatattcgagaacggagtttggagtttggcacggggtggaggcagtagccagcagctcttcattattttgtgggtgacaaatattcatgaacggagtttggagtttggcacggggtggaggcagtagccagcagctgcttcctgttgtttatagcttgaccctgggctctttcccattttggaggctgtagctacacgagtttttgatgttagcgtccttgtttagaacttacctcttaggatcggcaaataccgatgtaacctgttgcttcctagagttagtataaagtaccatgctttgaactggggttctagtttagaattcatctttgaggacggcgaagtaaaaggtttctctggaactgtttcagctggaatgatatgtttatttgtattaatattgattaggcagcgttcgttttgtacggaatggggctggaactattctaggttgatcaatattaatacaaaataagcttatcaatttttagggcaaacgaacgaggacaatagtttctagcctcaatccgagataaatgagggtcctaatatggatgcaatccgtttcttcttctagaatgagtaggaagtaacatgcatggaacagagagatttgtaatctgggggtaaacatggttttaaagtgaaataaaagaa

SEQ ID NO: 156147 - DNA, 994 bp, Zea Mays
aatgaacgatatgaactgcttagtctgttctgttttgtttttgaagactcaattatcttgcccttttatctgggattgtgcggtgatctggggattgcgcattaagatattgaggatgggattttcacaatttgctacagttcagttgattttataaggtatggttattaattgagagtttgtatgaaaagctaaaatcgtcccattattttacctaatgccctgtaactgattgacatcagagtttggcataagcgcattgtttggaatactggacataggagcgttaaggattggtgatctggattatggtggtacagtggctaggaatgtacttggagttcaatgcttggggaatgagttttcttcgtacctcaggcacacttcagatggttgctgtagttcatatatgcactgtcgacattgttatacaacaatgttacatttgcacggaactgaacacttctattttcatgagcttttattgctttgattcgacgcggcatcatggcttttggaaccaagttgttaaagctgcattttggatattgaatcagttgtttctggaacgttttgcagatcaccagcaagatcgaaatctcctaatgtttctccagcaaatggtgaagcagcaagccccaagaagcagagcccaaacaggagcccatctggctcacgctctcctgatgcgaagcctgaataaaattgctatgctgttaaaggattgcagatggagtcaggagctcttcttttcttaacatttgtcctctgttctagtaccatcagtgtcttatcgcagtacgagattggatgatattaactatctgtatcagcttgtatcgatggactccaagtgttgtcactcttgttgtctagtgtgctgaaggacccatttacttttgctaaacttttccattggtgattgttggatgcatggtgtggatttgtgctgtgttggctaaatcatgttgttctagaccttatgcattttttt

SEQ ID NO: 156148 - DNA, 1749 bp, Zea Mays
cccggtcgtctttctttcgggcctctccgagtggtcaataaaccccgcctcccttctgtcatcccgtacgtctcgacctcgcagccgcaaacgcgaaaccctagcctcgagctctatctccggccacagctggtcaggttagcgacgaaggatgagcaggcgctggagccgcacgatctacgtcgggaacctccccggcgacatccgggagagggaggtggaggatctgttctacaagtatggtaaaattgttgacattgacctgaaggtccccccaagaccacctggttatgcttttgttgagtttgaagatcctcgtgatgctgaggaggcaattgctggacgggatggatacaactttgatggacaccgtctaagagtggaggctgctcatggtggtagaggtaatgcttcctcgcatgatcgttcaagtggctttggtggcggtggtggagcacgtcgtggtgtgtcgagacactcagagtatcgtgttcttgtcactggactgccttcttctgcatcatggcaggatttaaaggatcatatgcggaaggctggtgatgtttgtttctctgaagtgtatcgcgaaggcggtggcaccgtaggaattgtggactacacaaattatgatgatatgaaatatgctataaagaagctggatgatactgaattcaggaacgcctttgggcgagcctatataagggtgaaggaatataacggcaaacgtggtcgctcctactcacgtagccgaagcccaagtcgtagttacagcaaaagcaggagtccgagtaaatcacccaggactcgccgttcatcatctagatcccggtcaagatctgtttcttctcgttcaaggtccccatcaaaaggacgttctccatcaagactcaattatcttgcccttttatctgggattgtgcggtgatctggggattgcgcattaagatattgaggatgggattttcacaatttgctacagttcagttgattttataagagtttggcataagcgcattgtttggaatactggacataggagcgttaaggattggtgatctggattatggtggtacagtggctaggaatgtacttggagttcaatgcttggggaatgagttttcttcgtacctcaggcacacttcagatggttgctgtagttcatatatgcactgtcgacattgttatacaacaatgttacatttgcacggaactgaacacttctattttcatgagcttttattgctttgattcgacgcggcatcatggcttttggaaccaagttgttaaagctgcattttggatattgaatcagttgtttctggaacgttttgcagatcaccagcaagatcgaaatctcctaatgtttctccagcaaatggtgaagcagcaagccccaagaagcagagcccaaacaggagcccatctggctcacgctctcctgatgcgaagcctgaataaaattgctatgctgttaaaggattgcagatggagtcaggagctcttcttttcttaacatttgtcctctgttctagtaccatcagtgtcttatcgcagtacgagattggatgatattaactatctgtatcagcttgtatcgatggactccaagtgttgtcactcttgttgtctagtgtgctgaaggacccatttacttttgctaaacttttccattggtgattgttggatgcatggtgtggatttgtgctgtgttggctaaatcatgttgttctagaccttatgcattttttt

SEQ ID NO: 156149 - DNA, 1372 bp, Zea Mays
cccggtcgtctttctttcgggcctctccgagtggtcaataaaccccgcctcccttctgtcatcccgtacgtctcgacctcgcagccgcaaacgcgaaaccctagcctcgagctctatctccggccacagctggtcaggtaggaccgtaggaatctcctttcctcatcgttcctcgggtggttcgtgccccgcgccccgctgctttctgggttagcgacgaaggatgagcaggcgctggagccgcacgatctacgtcgggaacctccccggcgacatccgggagagggaggtggaggatctgttctacaagtatggtaaaattgttgacattgacctgaaggtccccccaagaccacctggttatgcttttgttgagtttgaagatcctcgtgatgctgaggaggcaattgctggacgggatggatacaactttgatggacaccgtctaagagtggaggctgctcatggtggtagaggtaatgcttcctcgcatgatcgttcaagtggctttggtggcggtggtggagcacgtcgtggtgtgtcgagacactcagagtatcgtgttcttgtcactggactgccttcttctgcatcatggcaggatttaaaggatcatatgcggaaggctggtgatgtttgtttctctgaagtgtatcgcgaaggcggtggcaccgtaggaattgtggactacacaaattatgatgatatgaaatatgctataaagaagctggatgatactgaattcaggaacgcctttgggcgagcctatataagggtgaaggaatataacggcaaacgtggtcgctcctactcacgtagccgaagcccaagtcgtagttacagcaaaagcaggagtccgagtaaatcacccaggactcgccgttcatcatctagatcccggtcaagatctgtttcttctcgttcaaggtccccatcaaaaggacgttctccatcaagatcaccagcaagatcgaaatctcctaatgtttctccagcaaatggtgaagcagcaagccccaagaagcagagcccaaacaggagcccatctggctcacgctctcctgatgcgaagcctgaataaaattgctatgctgttaaaggattgcagatggagtcaggagctcttcttttcttaacatttgtcctctgttctagtaccatcagtgtcttatcgcagtacgagattggatgatattaactatctgtatcagcttgtatcgatggactccaagtgttgtcactcttgttgtctagtgtgctgaaggacccatttacttttgctaaacttttccattggtgattgttggatgcatggtgtggatttgtgctgtgttggctaaatcatgttgttctagaccttatgcattttttt

SEQ ID NO: 156150 - DNA, 1300 bp, Zea Mays
cccggtcgtctttctttcgggcctctccgagtggtcaataaaccccgcctcccttctgtcatcccgtacgtctcgacctcgcagccgcaaacgcgaaaccctagcctcgagctctatctccggccacagctggtcaggttagcgacgaaggatgagcaggcgctggagccgcacgatctacgtcgggaacctccccggcgacatccgggagagggaggtggaggatctgttctacaagtatggtaaaattgttgacattgacctgaaggtccccccaagaccacctggttatgcttttgttgagtttgaagatcctcgtgatgctgaggaggcaattgctggacgggatggatacaactttgatggacaccgtctaagagtggaggctgctcatggtggtagaggtaatgcttcctcgcatgatcgttcaagtggctttggtggcggtggtggagcacgtcgtggtgtgtcgagacactcagagtatcgtgttcttgtcactggactgccttcttctgcatcatggcaggatttaaaggatcatatgcggaaggctggtgatgtttgtttctctgaagtgtatcgcgaaggcggtggcaccgtaggaattgtggactacacaaattatgatgatatgaaatatgctataaagaagctggatgatactgaattcaggaacgcctttgggcgagcctatataagggtgaaggaatataacggcaaacgtggtcgctcctactcacgtagccgaagcccaagtcgtagttacagcaaaagcaggagtccgagtaaatcacccaggactcgccgttcatcatctagatcccggtcaagatctgtttcttctcgttcaaggtccccatcaaaaggacgttctccatcaagatcaccagcaagatcgaaatctcctaatgtttctccagcaaatggtgaagcagcaagccccaagaagcagagcccaaacaggagcccatctggctcacgctctcctgatgcgaagcctgaataaaattgctatgctgttaaaggattgcagatggagtcaggagctcttcttttcttaacatttgtcctctgttctagtaccatcagtgtcttatcgcagtacgagattggatgatattaactatctgtatcagcttgtatcgatggactccaagtgttgtcactcttgttgtctagtgtgctgaaggacccatttacttttgctaaacttttccattggtgattgttggatgcatggtgtggatttgtgctgtgttggctaaatcatgttgttctagaccttatgcattttttt

SEQ ID NO: 156151 - DNA, 1265 bp, Zea Mays
cccggtcgtctttctttcgggcctctccgagtggtcaataaaccccgcctcccttctgtcatcccgtacgtctcgacctcgcagccgcaaacgcgaaaccctagcctcgagctctatctccggccacagctggtcaggttagcgacgaaggatgagcaggcgctggagccgcacgatctacgtcgggaacctccccggcgacatccgggagagggaggtggaggatctgttctacaagtatggtaaaattgttgacattgacctgaaggtccccccaagaccacctggttatgcttttgttgagtttgaagatcctcgtgatgctgaggaggcaattgctggacgggatggatacaactttgatggacaccgtctaagagtggaggctgctcatggtggtagaggtaatgcttcctcgcatgatcgttcaagtggctttggtggcggtggtggagcacgtcgtggtgtgtcgagacactcagagtatcgtgttcttgtcactggactgccttcttctgcatcatggcaggatttaaaggatcatatgcggaaggctggtgatgtttgtttctctgaagtgtatcgcgaaggcggtggcaccgtaggaattgtggactacacaaattatgatgatatgaaatatgctataaagaagctggatgatactgaattcaggaacgcctttgggcgagcctatataagggtgaaggaatataacggcaaacgtggtcgctcctactcacgtagccgaagcccaagtcgtagttacagcaaaagcaggagtccgagtaaatcacccaggactcgccgttcatcatctagatcccggtcaagatctgtttcttctcgttcaaggtccccatcaaaaggacgttctccatcaagatcaccagcaagatcgaaatctcctaatgtttctccagcaaatggtgaagcagcaagccccaagaagcagagcccaaacaggagcccatctggctcacgctctcctgatgtaaaatgattctactcttatttgctgtagttgttaatggcaaacacagctgaactgacaacaatcggtcaaaatttgcaggcgaagcctgaataaaattgctatgctgttaaaggattgcagatggagtcaggagctcttcttttcttaacatttgtcctctgttctagtaccatcagtgtcttatcgcagtacgagattggatgatattaactatctgtatcagcttgtatcgatggactccaagtgttgtcactcttgttgtctagtg

SEQ ID NO: 156152 - DNA, 830 bp, Zea Mays
gtgatctaccactcttcagtcctctcgcgtgactctctctcagtctcactcacgctgtcacgcggctcacgccccacccccaccacaccgctctcttcttcaccaccgcgaaagcaagagagagagagacagagagagcaggcagcggcaatggctggcgctggggacgagtactactacggcgggccggggcaggggcaggggccgcgcggcgccccacacggcctgctgctggcggtggtggttggcctcgtggtggcgggcccgctgtttctgggcgacggcggcgaggcgctgacggaggccgtggcggagctgctgagcccggtcgggctgcttctcctccccgtgtgcctgctgttcctcatccgcctcctctcctccgaccgcggcgccgcggcgctcgccgacgtcttcgccttcggcgggtcccccgacgccgtccaccgcgtcggagggtcccccgtcggcgtcgcgctcatgctcctcctcatcctcgcgctgctctactaccgctcctcgctcttcggcggcggcggcgacgacgacgagtaggagaccggcggcgcgatctccggccgtggcgtggcgttgtttttgtgtaatgcgaggggcgtgggtgcaaaagtgcgtgtgtaaatcgagtggatcggagtaaattaatctaatttactcctttgctaatgcttcgtctgtttgtaaatcgatggctcctgaagcttctgtgctgcgtcgggccgggcgggcgggccatgtgcttctactctgcatctcgtcggtggcctctgtctgtttcgctcctccctgcctcttgccccagagccagaacc

SEQ ID NO: 156153 - DNA, 1306 bp, Zea Mays
ccgcacctctccgacatctcactagttagtcactccccatccgctgttccgcgccaccaaatccctacctccacccattcatacgcccatcccaccaaccatggccaccgcctccgactctgacgccggcgcccagccgcgcgacgaccccagccttctcccgttcgcctccttctcgttcgcgctctccatccgcgcgccggcaacccccacactcgcctctgtcccctccaccatccacctccccactcaaatctctacactcgccgtctgcctccacccctccgccgcgcagccccttccccgccgtcccacccgcctcaattccgccacctactccgtcatctccccgctgccctcctcaacgccgggcctctcccgctccttcccctcgggcgcacccgccgcctccgggcgccgccgcacgctggtctggttccgcgccgacctccgcctccacgaccacgagccgttccacgccgcagcgggggcgtcctcctcccttctcccggtcttcgtcttcgacccgcgggacttcggcaagtccccctcggggttcgaccgaacgggcccataccgcgccaacttccttcttgactcagtcgctgacctgcgccggagcctccgcgcccgcggcggggacctggtggtgcgcgtgggcaggcccgaagtggtcatccccgagctcgcgcgggcagcgggcgcggaggccgtgtacgctcacggggaggtatcacgggacgaagtccgcaccgaggagagggtgcaaaaggctgtggagaaggagggtatcaacgtgaagtacttctggggtagcacgctgtaccacgtggaagaccttcccttccgcctcgacgacatgccgtccaactatggcggcttcagggaggccgtaaagaggctggacgtcagaaaggtgctggaggcgcccgaggaggtcaagtgcgtgcccatgaagaatgtgctcgagcccggcgacatccccacgcttgctgagctcggtctcactgcgccaccagccatggcacaggactcgaaacctgctgttggctctactctcattggtggtgagacaggagctctggagaggttgaagaagtttgctgcagaatgctctatgcagccaaacaaagcagataaaagcaatacccaagatagcatatatggtgctaatttctcctgcaaaatttctccatggctcgctacaggttgcctttctccaaggttcatgtatgaggagttgaagaagcatgctactagagcaatttcttctgagtcacacccagaataatgatggcacatctga

SEQ ID NO: 156154 - DNA, 1885 bp, Zea Mays
gtctcatcgagggagtaagtagcatcctgccatgacactacctgacaaccacaaacgtcgtctccctccatggcactccgccacggcaataattgaagcaacgctgatctgttgcatctccggcgaggcagagcgcagcagctcgtgcatatatctagctaagccaattgcgcaccaccgcgcgcgccaccccaagatccccgtgccttttcagagcatctctccgtcgccgtgacaatgaagcagcagcagaccgtcatcctgtacccgagccctggcgtcggccacatcgtccccatggtgcagctcgccaaggtgtttctgaggcacggctgcgacgtgaccatggtgatcgccgagccagccgccagctcgcccgacttccgcatcgtcgacctcgaccgcgtggctgcctccaaccccgccatcaccttccacgtcctccctccggtcccgtacgccgacctcgccgtccccggcaagcaccatttcctcctcacgctgcaagtgctgcgacggtacaacggcgagctggagaggttcctccgctccgtcccgcgcgagcgcctgcactccctggtggtcggcatgttctgcaccgacgcggtcgacgtcggcgcaaagctgggcgtccccgtgtacacgttcttcgcctcggccgccgctactctggccgtcgtggcccagctgccggcgttgctctccggcaggcgagcgggcctcaaggagctcggggacacgccactccagttcctcggcgtcccgccgttcccagcgtcccatctcgtcagggagctgctggagcacccggacgacgacgagctgtgcaagaccatggtggacgtctggaagcgctgcacggacggcagcggcgtcttggtcaacacgttcgagtcgctggagagcccggccgtgcaggcgctgagggatccccggtgcgtgcccggccgcgtgctgcccccggtctactgcgtggggccgctgatcggtggcgacggcggcacaagagcagcagcggagcaagagcgcgcggcggagacgcggcacgagtgccttgcgtggctcgacgagcagcccgagaacagcgtcgtgttcctctgcttcggaagcagatgcgcgcactcggctgagcagctaaggggcatcgccgtcggccttgagaggtccgggcagcgcttcttgtggtctgtgcggacgccggccggcaccgacggcggttcggagaatctcggcgcgctctttccagaggggttcttgcagcggaccaaggaccggggcctcgtcgtgcggtcatgggcaccgcaggttgaggtgctacggcatccatcgacgggcgcgttcatgacgcactgcggatggaactcgacgctggaagccatcacagcaggggtgccgatgctatgctggccgttctacgcggagcagctgatgaacaaggtgttcgtgaccgagggcatgggcgtcggggtggagatggaggggtacacgacgggcttcatcaaatccgaggaggtggaagccaaggtgaggctggtgatggaatctgaggagggcaggcacctcaggggtcgagcggtagcactcaagaatgaagcacaagcagcgctgcgggatgacggcccatcggagacctcgttcgccaggttcctctttgatgcgaagaatcttcagggacacctcggtcacggatcggagtgaattttctttaattttctattgaggccttgttcgaaatttatattaggaataagatgcaggaagggttcttgaacttggcagtcatttgagtctcagggtcgacaatgtatcaaatacatatgtgttggagacttgttctcaaatgctataagttaagaacaaggcaacacaaaaaatgttaaacgtt

SEQ ID NO: 156155 - DNA, 1435 bp, Zea Mays
gattgcaaagaacacactacatccatagagtttcccatggccggctaccaaagttcgtttacaagattttggatgatggacgaggaagacgacgacatgcatcacttagtagacgacgatgaagttgagcttgcgacatacaaccaccttgtgcaatgcgagagttctcagcgtcggcgacggtcggatgcgccacctaagcaaatacgtccaagaaacctgggtgatgctgatggtcatcaaagaatttggcttgattatttcgctgatcagcctgtgtttaatgacaggcaattccgagaaaggtttcgcatgcggaggcatgtggtgttacgcattgtagacgctgttcaagctcggaaccccaactacttcactaggaaacatgattgttgtgggaagttgggactttccgctcttcaaaagtgtgtcgcggctcttcgcatcctggcatatggcttgcctgctaatgccattgacgagtatgttcgtataggtgagtccactgctagagaagcattacgacatttctgtcgagctatcatagacgtctatggtccgtattacctaagggccccaaacgccgccgatgtagcaaggctcttagcggagggtgagcaacgcggattcccggggatgctaggtagcatcgactgtatgcactgggagtggcggaactgtccaagtgcatggaagggcatgttcaccggacgtgggaagcatccatctatgattcttgaagcggttgcatcgcatgacctatggatatggcatgcttactttgggatgccaggcagtaacaatgatataaatgtgcttcaaagatctcctgttttctcttcgtatctaagggggcaatcagctcctgtgaatttccaggtgaacggtcgtacatacgacatgggttattatctagctgatggtatataccccacgtggcctgcctttgtcaagagcattcgtcatcccatggagacaaagacccaacacttcagcacactacaggaaagtgcgcgtaaagacattgagcgtgcttttggagtgttgagggctcgttttgctgttgtacgagggcctgcttatggttggtacccaaaacagattagtgagataatgatggcttgtatcatcctgcacaacatgatagtggaggatgaaggtgaccatgcagagaacactgcattctcggatattggttacatcgctccggtgaatcaaaacaatccagatagagagtcatttgttgatgcacaccatagagactcatttgttgatgcacaccgtaagctaaaaaaccgaaacacacattttcagctccagcatgatatcatcgagcaccaatggatgttgctagggtccgataacatttagtggtttcatgaattattgtatttgtatttgtattgtatccgtaattatgtcatgtccaaattaa

SEQ ID NO: 156156 - DNA, 2115 bp, Zea Mays
tgaggggacaccttgtatcagtgatctatacagtagccactaacccgctacaagcatactgagttcaagagagattgtacatgcgaggatcaacatggacctttcttgttctcttgtctaacttggttcatgatatcttcttctgtgactgatccattgaaatgtgactgcatgcctgcatcatagcatcaccattaagatcaaacgttacatgtttttcctagagagtacatatgtgctgtactttctggtctcaccgcatgaataatctaaagtgaaccagccaatgtgtcactgttttaacctatggcattaggtagcccaatcaatctaaatatcaactcaccgtaaccaacttgagcagccatcaaggctactcacctacgtcagtacctgctaactatcttttaaaatagtcttcactataaactaggtgcaagttggttagatggtctgagtagcactccttaggtcctgagttcgaatcctagtgggagagaattttaggttgaggttaaaaaaggtcactcgttggtttcccaggtcgtgtgcacaaagcacgagtaaagatctggcctatagggcgcggccgtggaccaaatgttgcacaggggaccagctttcgtgacctttctcggtcggggatccgattgagcttcttcttaatttaataccgtggcgcggtctttcccctaccggccgagtataaaatgggtgcaaatctgaattacatatgtgtttttcagtaaccaagtatcacaatgctcatttttattgccctgtatggctgtatccatcacgaggatttcaaggcagaaattgcatttgaaacttttttttatgtccatgaacatttgcactaactcaacatatttgtttctgtttcagaaattatctagtaagtatgcattccagcgtcaccagcagtggctacagcatgcaaaaactcgcagtgctagacacaaaattatgaaattcttaagggagcaagctgctctttctgctgctgaaataactgctgacgcagttaataattttgttgctgatcttgaagacgaaagtgatagtgagctctcacttccaagcaccaagaatgaagatagtaaattcaactgggagaagatattaagttctgataaattattctttgtcaacaaaagtagtgatggctttttacctgttaataatgtccatacgaaggtcaatgggaagcaaaacaaaactgttaaggatttgggcatcaaaatcaatggtcattctacaattcgaggtgatagcttcagtgagttaatgcaccctggcaattctacctgcaaggaagttttccctggtttggatcactggaaatctggtaaaatttctggttggcataatacggaaggcaactctgtccaatggctttgcatagcctgtgttgaccgaaaagggatgatggcggaggttacatcggctcttacagcttgtggaattaccatatggtcttgtgtggcagaagtcaataaaaggaggggaatgggtgtgatgctgttccattttgagggaagctatgagaacgtggtcagtgcgtgttcaagtgttgacatgattcttggtgttcttggttggtctgtgggatgtagctggtgtccattgggtgttcttgagtgctaatcggtaccaagagacgtgtaccacaatagttcaccactgtcttctccaagatggagttaattttggaagcactaagacatcggtggctcaaaattttgttggtcagatcatggttggtgactggtgagcgagtggaaccctttacttctctgtcaaatcagaaagtgggggtgatcgaagtagaaccagatgtcattctgaaagtgagtgtacatagcagagcgagtagggtactgttagtgcagggattgatttgattgtacagaaggccttacaaaagattgttaagggcagttcgttcttctccccactttgtggttcgcatatactagtttgcttaaatgtgcagctagaattttgacctggacactgatcccaaattttgcctgtttaattttctcactccgcctgtaaatgttattgtacagcttcaattttgccagtgaaaatttgaacaaagttaac

SEQ ID NO: 156157 - DNA, 1245 bp, Zea Mays
gagattataacttatgataaattatctagtaagtatgcattccagcgtcaccagcagtggctacagcatgcaaaaactcgcagtgctagacacaaaattatgaaattcttaagggagcaagctgctctttctgctgctgaaataactgctgacgcagttaataattttgttgctgatcttgaagacgaaagtgatagtgagctctcacttccaagcaccaagaatgaagatagtaaattcaactgggagaagatattaagttctgataaattattctttgtcaacaaaagtagtgatggctttttacctgttaataatgtccatacgaaggtcaatgggaagcaaaacaaaactgttaaggatttgggcatcaaaatcaatggtcattctacaattcgaggtgatagcttcagtgagttaatgcaccctggcaattctacctgcaaggaagttttccctggtttggatcactggaaatctggtaaaatttctggttggcataatacggaaggcaactctgtccaatggctttgcatagcctgtgttgaccgaaaagggatgatggcggaggttacatcggctcttacagcttgtggaattaccatatggtcttgtgtggcagaagtcaataaaaggaggggaatgggtgtgatgctgttccattttgagggaagctatgagaacgtggtcagtgcgtgttcaagtgttgacatgattcttggtgttcttggttggtctgtgggatgtagctggtgtccattgggtgttcttgagtgctaatcggtaccaagagacgtgtaccacaatagttcaccactgtcttctccaagatggagttaattttggaagcactaagacatcggtggctcaaaattttgttggtcagatcatggttggtgactggtgagcgagtggaaccctttacttctctgtcaaatcagaaagtgggggtgatcgaagtagaaccagatgtcattctgaaagtgagtgtacatagcagagcgagtagggtactgttagtgcagggattgatttgattgtacagaaggccttacaaaagattgttaagggcagttcgttcttctccccactttgtggttcgcatatactagtttgcttaaatgtgcagctagaattttgacctggacactgatcccaaattttgcctgtttaattttctcactccgcctgtaaatgttattgtacagcttcaattttgccagtgaaaatttgaacaaagttaac

SEQ ID NO: 156158 - DNA, 522 bp, Zea Mays
aaacttcagtgtaaaagtgagggtagctccaaacaagatcttaaagcagaagacctaaggcagatgtttcttgccatgactgaagaggttcgtgtgatcattgtcaaactggcagataggttgcataacatgcgcactctcacacatatgcctcagcacaagcagtatgccatcgccatggagacactacaggtctttgcccccctagcaaaactccttgggatgtaccgtataaagtctgagctggaatatctatccttcatgtacgttaaccccactggttttgctgaactaagaaaaagagttgaagacttgtacaaggcccatgaacaagaattggaagaggcaaatagaattttaaggcaaaagattgctgatgatcagtttctcgatcttgttagtgttgaaacaaaagtgcgctcagtttacaaagagctctacagcatttacaaaactacactcaaatccaagagttcaataaatgaggtgaatcaggttgctcagctgaggatcatcataaaa

SEQ ID NO: 156159 - DNA, 525 bp, Zea Mays
gagctcctatccacgtacacagagatggagtcgtcgtcgtcgtcgtcgttagacagcaacctcaggttcgacttgtacgcggtgctggtggcgctcggcctcgccgccttcctcgcggtgtgcttctggctcctgtacaggctcaccgtgtccgcgcggccgcaggacatgatgcccaccaccgccgacgccggggcggccggtcccaagggagcgctgcggcagcaggacgtcgcggcactgccggtgttcgtcgtgcgcgcaggcgcctgcgccgcggcgccgccgcccgtggagtgcgcggtgtgcctcgcggagataggcgacggggagaggggcctgctcctgcccgcgtgcggacacaggttccacgtcgcgtgcatcctccggtggtttagggctcactccacgtgcccgctgtgccgcgccgcggccgtcgtcgtcgggcagcagcggggcgcggcggatcagacgtgcaaggccggctccgcgcaggaacaagtggcggtggtggtgcaaagctga

SEQ ID NO: 156160 - DNA, 362 bp, Zea Mays
atggacgccgccggcgcgcgtccatcggcaccgtcggccgctgctgccgcagtcgccgggagccccgggacgcgcgggtggtgcgggagctcctgcgctcgatgggtctcggtgagggcgagtacgagccccgcgtcgtgcaccagttcctggacctggcctaccgatacgtcggagacgtgctaggggacgcccaagtctacgccgaccacgccgggaaggctcagatcgacgccgacgacgtccgcctcgccatccaggccaaggtcaatttctccttctcccagccaccgccgcgcgaggtgtttcttgtgtttcaaaatatgttgagaagttcatacaaagtacgggccaacctatga

SEQ ID NO: 156161 - DNA, 1483 bp, Zea Mays
cactgaattctgtatctcacctttttaacgctttctgcgctagaaagaaccaagtggacaggcgtcaactccatggccgatgagccaatatataaatcgcttctagcagtgcttttctcgcatcgcatccactactggagccaaagccagcttgatcggtgacgatttattagctagccgtcgtctgatagctcaattggttagctgattaacgtggtgcagaagaagaagttgagctagctagcgatggtggtttcaatattgactcacccgttcatggctgcggcggcgtgcgtcgccgtcgcgttggctctgttggccacgaccagcagcgcgcagctggacccgcacttctacgacaaggcgtgcccggcggcgctccccaccatcaagaggctcgtggaggaggctgtggccgcggagccccgcatgggcgcgtcgctgctgcggctgcacttccacgactgcttcgtcaacgggtgcgacgggtccatcctgctggacgacacgcccttcttcaccggcgagacgatggccgcgccgaacgccaactccgtccgcggcttcgacgtgatcgaccgcattaagggcgccgtcaacgccgcctgcaggggcaacgtggtctcctgcgccgacgtcgtcgccatcgcggcacgcgactccgtcgtcgcgctgggagggccgtcgtacgacgtgccgctgggccgccgggacgcgcggacggcgagccaggcggcggcgaacagcagcatcccggcgccgaccttcggcatcgaccgcctggcctccaacttcgcgtcgcacggcctctccctgcaggacctcgtcgcgctctcgggagcgcacacgctggggttctcccgctgcaccaacttccgagaccgcctctacaacgagaccgccaccctggacggctccctcgccgcctcgctccgggccgcgtgccctcgggccgccggcaccggcgacgacagcctcgcgccgctcgaccccacgcccgcgcggttcgacgccgcctacttcgcctcgctgctgcggaaccggggagtgctgcactcggaccagcagctgttcgccggcggccccggcgtcgcggacgccctcgtgaggttgtacgccgccgacaccgacgccttcaggagggacttcgcggacgccatggtgaggatgggcagcctcagcccgctcaccgggagcaacggcgagattcgctacaactgccggaaggtgaactactcttgagtgaatttggttcacatctgatgcaggaaggtctagaaccatgtcagcgtgctgtggaatccacagctgttcttgcgctcgtgtcaaacaaacatagtgttcttgttatttgagttaagttttctacatttatgttgttttgtcaccggtaaagaagagctttattacggctgtttcttattttgctgtattctttcgtttatttaatttgattggcagtttgtgaggtttgcaaggtata

SEQ ID NO: 156162 - DNA, 3609 bp, Zea Mays
ccagtgtcgcggtgtcgccgcgtatctcccttcagcttctctcccgtatctccctgccaacggcggcggcaacgcgagggtaagatggcggcggcggtgtctcgcgacgacgagctggtgatcaagtcaccaaacgacaagcggtcttatcgcctcctccgccttggcaacggcctccgtgccctccttgtccacgaccctgagatctacgccgacggttacccacctcagacctccaagccatgtgaagacgaggagatggaggaagtggatgaggaagacgaggatggcgacgacgacagcgaagagtacagtgacgaggaaggtgaggacgacgatgaggaggatggggaggatgacgaggaagaggatgagggcgagccgaagaggaggaaggagaaggttggcgccgagccaatcgttaagaaggctgctgctgcaatgtgtgttggaatgggcagttttgctgaccctgagaaggcacagggcttagcgcattttctagagcacatgctttttatggggagtaccgaatttccagatgaaaatgagtatgacagttacctgtccaaacatggcggtgcatctaatgctttcactgaaaccgagtacacatgctaccattttgaggttaaacgagagtatctgaagggagccttagacagattttctcagttctttgtgtcaccccttgttaaggctgaagcaatggaccgtgagatattagcagtggactcagagtttaatcaagttttgcaaagtgatacctgccgcctttaccaactccagtctcatacctgttctcaagggcaccctttgaacagatttacctggggaaataagaaaagtttagttgacgcaatgggcagtggaatcaatctaagagaagagattttagagatgtacatgagaaattaccatggaggagcaatgagattggttataatcggaggagaaccacttgacattctagaaggctggacaatggagctgtttagcaaggttaaaactggccctcttttggatataggtccgaagactgacattccattttggaagccagggaaactctacaaattggaggctgttagagatctgcacagccttttcttgtcatggacacttccttgcttgcacaaggagtacatgaagaaacctgaagattatttggctcatctccttggtcatgagggcaagggaagtttactttatttcttgaaagctaaaggctgggcaagctcattgagtgctggtgttggtagtggaggatcacaacgatcctcgtatgcttatatctttgaaatgtctatatgccttactgattctggactgaaaaatgtatttgaggtcattggtgctgtataccaatatataaagttgcttaagcagtctgagccacaagaatggatattcaaggaacttcaggacattggatacatggagttcaggttcgcagaagagcaacctccagatgattatgtagttgatcttgcagaaaatatgctattttattctgaaaaacacattgtttgtggagagtatatttttgaggactgggattcagaattagtgaagcatgctttgagcttcttcaatccagataacatgagagttgatgtactcagtaaatcatttgataagcagtcccaagctattcaatgtgaaccatggtttggttcacattacattgaggaggacatcccatcatctttgatagaaagttggaaaaatcctgttcaagtagatgataatttgcatttgcctagaaagaatgaatttataccaggggacttcactctgcgaaatgccaactctcctggatcctcgagcgacgataaccctcgttgcatagtggatgagccattcataaaactctggtacaagatggacatgacatttaatgtccctcgtgccaacacttattttttgatttatgtcaaggatggctatagtagccttgaaaactctgtcctgatagatctctttgcaaaccttctcaaagatgaacttaatgaggtcctttatcaggcttatgtggctaaattggagacttcaacatctgttgttgctagcaaacttgagataaagctttatggttacaatgataagcttcccattcttctgtccaacatcttgtctactgttcgatccttttctccaaaaacagatagattcgaggtcatcaaagaagatttggaaagagcttacaagaacactaacatgaagcctatgagccattctacctacttaaggctacaagtcttgcgtgaaatattctgggacgttgataaaaaactagaactacttatgaaactgacatttactgatctagtagcatttgtaccgaaaatcctttcccagctgcacattgagggactttgtcatggcaacttgtcagaagacgagacaattaatatatcaaaaatatttctcaatactctctctgctcagacactgccagaggaagcaaggcatgaggaaagagttatttgcattcctaatggtgcaaatttggttagaagtgtccgcgtgaaaaatgatcttgaagaaaattctgtggttgaggtttatttcccaattgaacaagacgttggaaaggaggcaacaaggctcagagctattacagatctttttagcaacattattgaagaaccatgctttgatcagctaagaaccaaggagcaacttggttatactgtggactctagcccaaggatgacttaccggatgctggcctattgttttcgagttatgtcctccaaatacagtcctatttatctgcaaagtcggattgataacttcattgatggtctatctgctctgctggacgagctcaatgaagagacttttgagcaccatagaagtggtttaatagctgataaactggaaaaggaaccttcacttagctaccaaactagtgattattggtctcagatcgctgataaaaggtacatgtttgatatgtcaaaactggaagctgaagagcttaagacagttcagaaggctgatgttatagcttggtacaacacatacataagatcatcgtccccaaagcgaagacgtctagcaattcatgtgtatggttgcaactcagatattgctgaggctgctaaactccaggagcaatcttggactataattgatgacgttgaatcattgaaggcttcgtctcaattttattcaagcctttgttgagggaagttgggcatgatctgtcagtgtgtgcaaagcgcgtaacttggacattgccgaggcccgctaaggtgcaagaatttcgtggatcataatagatgatttaggccccttctgcagatcaaccgccatgttatctatggccggcttgaaattgaacagcatcgttgcacctgaccaacatcatcaacgagtatagtgctagttgggtaagaaaaataggattttgtcagtgcattatgtgattttcataacaaacacacatggctttattgttactttgcgccaagaaatgttgatcttccaatatggcgtagtaattgatggatgagtttttgaggaaacataattttgtacttggagatgtaaaatgtttctggaatctttactgaacaattttggaagtcttgtcttatt

SEQ ID NO: 156163 - DNA, 863 bp, Zea Mays
aatttctttattctacttgtacattctgaataatctcatgtatcttgcagctctgaatgatgcactaaagcaggagctggagaggcttaagcttgttactggtgagatgaccaattccagtgagacatataacatgagatttcagcatattccatacaactcttccttctttccgctttcccagcaaaatgcatctccacaccctggtaccacccagttgccaccaccgttccacccaccccatcccaatgtgccaaaccaccagatgctgtcccacccaaacactctcccagacataatgcagcaagagtctcttggacggctgcagggtttggacattggaaaggggccactggttgtcaagtcagagagcagctcgatctctgctagtgaaagcagcagcaccttctaacgaggcctaccaatgagaatctgccgtttcaatacgtcccattgttcataatagcctgacatccttgtgctgcttcctgctctgtaagcttatttgttatttaattcattcaattagttgaaattgttccttgtcgcactggcagatcgatccatgttgtagaatgatccaggaacccttctagtctgtttatgttttgggaccatttcatgtttatgtgttcggtattagggcatttggattttggagtgaaattctctgatgatacttttgttgtgttcagccatgttgactgcatgaatcctcttttgaacatactcactctgtaccaaattcgttttaggccaatggtggattcatgaaagacttgttgaatgtattttatgtgtctatattcatcctcactcatttgaatatagacaaaaactactcctttcgttccaaattaaaa

SEQ ID NO: 156164 - DNA, 1634 bp, Zea Mays
cctccgcccccacctcttaaaatccaaaaccaaaccccgaaagcaccacgaaacacggcagcagcagcggcctgcgtgcctgcctgcctatccacccttcctcctccggcctctggctcggacacctgcgctcgccctcgtgcggacagagccgagagcggcagcgacggaggcggggctgcgccggcctctcaatgcagcagcagccggagcctgccgatccgccgggccgggccttaccgccaccggcggtgccggcgccggcgccggcgcctgtcgccgcgcgcgcggcgcaccaccgccgggctagatctgaggtggccttccgcctcccggacgacctcggcctcggcggcggcggtggccctgacggcgacaccttcgatgatatcggctcggaggacgacctcttctccaccttcatggacatcgagaagatctcatcctccgggccctccgaccgcgaccgcgccgccgagacgtcgtctcccccgcgccccaagcaccgccacagcagctccgtcgacggctcgggtctcttcttctcgcccggcattggcggcggcgcgggcaaggatgctgcggcgtcgctggccgaggtcatggaggccaagaaggccatgactcccgagcagctggccgagctcgccgccatcgaccccaagcgcgccaagagaattctagctaacaggcaatcagctgctagatcgaaagaaagaaaggctcgttatataacagaacttgagcgtaaggtccaaactcttcagactgaagccaccaccctttcagctcaactcacactatttcagagggacacgactggactttctgcagaaaatgcagagcttaagataaggttgcatgccatggagcaacaggctcaactccgcgatgctctgaatgatgcactaaagcaggagctggagaggcttaagcttgttactggtgagatgaccaattccagtgagacatataacatgagatttcagcatattccatacaactcttccttctttccgctttcccagcaaaatgcatctccacaccctggtaccacccagttgccaccaccgttccacccaccccatcccaatgtgccaaaccaccagatgctgtcccacccaaacactctcccagacataatgcagcaagagtctcttggacggctgcagggtttggacattggaaaggggccactggttgtcaagtcagagagcagctcgatctctgctagtgaaagcagcagcaccttctaacgaggcctaccaatgagaatctgccgtttcaatacgtcccattgttcataatagcctgacatccttgtgctgcttcctgctctgtaagcttatttgttatttaattcattcaattagttgaaattgttccttgtcgcactggcagatcgatccatgttgtagaatgatccaggaacccttctagtctgtttatgttttgggaccatttcatgtttatgtgttcggtattagggcatttggattttggagtgaaattctctgatgatacttttgttgtgttcagccatgttgactgcatgaatcctcttttgaacatactcactctgtaccaaattcgttttaggccaatggtggattcatgaaagacttgttgaatgt

SEQ ID NO: 156165 - DNA, 1630 bp, Zea Mays
gcttcctccgcccccacctcttaaaatccaaaaccaaaccccgaaagcaccacgaaacacggcagcagcagcggcctgcgtgcctgcctgcctatccacccttcctcctccggcctctggctcggacacctgcgctcgccctcgtgcggacagagccgagagcggcagcgacggaggcggggctgcgccggcctctcaatgcagcagcagccggagcctgccgatccgccgggccgggccttaccgccaccggcggtgccggcgccggcgccggcgcctgtcgccgcgcgcgcggcgcaccaccgccgggctagatctgaggtggccttccgcctcccggacgacctcggcctcggcggcggcggtggccctgacggcgacaccttcgatgatatcggctcggaggacgacctcttctccaccttcatggacatcgagaagatctcatcctccgggccctccgaccgcgaccgcgccgccgagacgtcgtctcccccgcgccccaagcaccgccacagcagctccgtcgacggctcgggtctcttcttctcgcccggcattggcggcggcgcgggcaaggatgctgcggcgtcgctggccgaggtcatggaggccaagaaggccatgactcccgagcagctggccgagctcgccgccatcgaccccaagcgcgccaagagatgttagtgcttttctggcgctgaaagatacccttccccagaccccgcacagtgcgggaagcctacggcactggaattctagctaacaggcaatcagctgctagatcgaaagaaagaaaggctcgttatataacagaacttgagcgtaaggtccaaactcttcagactgaagccaccaccctttcagctcaactcacactatttcagagggacacgactggactttctgcagaaaatgcagagcttaagataaggttgcatgccatggagcaacaggctcaactccgcgatgctctgaatgatgcactaaagcaggagctggagaggcttaagcttgttactggtgagatgaccaattccagtgagacatataacatgagatttcagcatattccatacaactcttccttctttccgctttcccagcaaaatgcatctccacaccctggtaccacccagttgccaccaccgttccacccaccccatcccaatgtgccaaaccaccagatgctgtcccacccaaacactctcccagacataatgcagcaagagtctcttggacggctgcagggtttggacattggaaaggggccactggttgtcaagtcagagagcagctcgatctctgctagtgaaagcagcagcaccttctaacgaggcctaccaatgagaatctgccgtttcaatacgtcccattgttcataatagcctgacatccttgtgctgcttcctgctctgtaagcttatttgttatttaattcattcaattagttgaaattgttccttgtcgcactggcagatcgatccatgttgtagaatgatccaggaacccttctagtctgtttatgttttgggaccatttcatgtttatgtgttcggtattagggcatttggattttggagtgaaattctctgatgatacttttgttgtgttcagccatgttgactgc

SEQ ID NO: 156166 - DNA, 339 bp, Zea Mays
atggcgacgagcgccctggcggtgaggtggagcagccgatgcgctttgcctcccctggtggcgtgcgtgtatggcggggctcgtgcccacatgggggcacttcctgggggaggctatcatggtggaggtggcggggcatcggtgattgaaggacgggggcggggcacgcacggaggagggggcacgcgcatggggaaggaaggtgatggcgtagatggcggcctcggcgcatggggaaggaaggtgatgccgcggatggcgaattgcgcggatggcggccgaggcgcgtggggaagggcggtgattgcgcagtggggaagggcggtgacggtggtggag

SEQ ID NO: 156167 - DNA, 2731 bp, Zea Mays
gtttggcagggctctacttggacggggtgaggagaggcgaggagagcagagcaggcagccgacgacttccccacgcggaggcgttgcttcccggtcgtccaacgcctggcatcccttccttctcctcacccagcagcagccggtcggcctcggctagatctcgccggccgcctccaattggttgtccactgtggccgggccgaggggtacttatctataggcccgcagatctgcgcctgcgcccgtgggaatctccgcacctcgctatccgtctcttggatagatcgatcttccgtcgctggttccccttcgccccacacgagtacttccaaggaactggaacttccagccggcacggggattcgagcttctgctctatcagcaactccactgggcgctgagggtctgtagcagagcggtgcgatcggggcagaagggagccatgatgagggggcaggcgtggctggcgctgctggtcgtggtggcgctggccttggcggacgcggcggcggggaggttcgtggtggagaagaacagcctcgaggtgacctcccccgacgagctcaagggcaagtacgagtgcgccatcggcaacttcggggtgccgcagtacgggggcaccctgcacggatgggtcgagtaccccaagtccaaccggaaggcgtgccagagcttcgaccagttcgacatctcgttcaagcccaagcaggctgggggacgacccatcttcgtcctcgtcgaccgcggagaatgtttcttcacaaccaaggcatggaatgcacaaaatgctggagctgctgcagttcttgttgtggatgacaagtcggaacctctaatcacaatggacaacccagaagaaggcaaagagcacctagaaaacatcactattccctcagtgcttataacaaagaaattgggggaaaaccttaagaaatccgcggaaaatggcgatatgctcagcgttcttctggactggagagaatcccttccccatcccgatgagcgtgtagagtatgagttctggacaaacagtaatgatgaatgtggtcctaaatgtgatatgcaaatggacttcgtgaggagctttagaggaactgcacaaattcttgagaaaaagggttacactcagtttactcctcattatatcacatggtattgtccagaagcttttgttgatagcaagcaatgcaaatcacagtgcatcaatcatgggagatattgtgcaccagacccagatcaggattttagccaagggtatgatggaagaaatgttgtggttcaaaacctacatcagatttgtgtattcaagattgctaatgagactggaaagccatggctgtggtgggattatgtgcatgatttcgcacttaggtgtccaatgaaggataagaaatacaataatgactgtgcccatgatgttatcaaatcacttggattggacatcgagaatataaacaagtgtgttggagaccctgaagccgatgtggaaaatgaaattctaaaggcagaacaagatgcccaaattggtcatggtaaaaggggagatgtcacaatactaccaacccttgtcatcaacaacaagcaatatagaggtaagctggacaaagttgctgtcctgaaagcgatctgttcaggatttgaggagacaactgaacctgctatttgtttgagcgaagagattcaaacaaatgagtgtttggagaacaatgggggttgctggctggacaaagctaataatgttactgcatgcaaggataccttccgcgggcgtgtttgtgagtgccctattgtgagaggtgtaaaatttgttggtgatggatatacccattgtgaagcttccggtgttggtaggtgtgagatcagtaatggagggtgctggcaggaaactaaagatgggaaaacaatctctgcctgctcaaacgaaatatctgaaggttgtaaatgtccaatgggtttcaagggtgatggagaaaaaagttgtgaagacattgatgaatgccaagagaaactttattgtcagtgcaagggttgcagctgcaagaatacgtggggaagctatgaatgcagctgtggtgatgacaatatgctatacatgagagagcatgacacttgcatcagcaaagagggaactgccactactgttggctggagcttcctctgggttattttctttggacttgtttttgccggggttggagcatacgctgtgtacaaatacaggctgcggagttacatggattcagagatccgtgccatcatggctcagtacatgcctctggataaccaagaaggagcaaaccagcatcaggtcgtgcacgccaatgatatctgaagctgcactccttttctgaagcagaaatagagggggcgtgcaacatttcacttgtgctgctgcatcattgggtcatgggttttacaggtataggtcaactaggctcaaagatacacaggttatgcgagatcaagatctactgtaccatgaattaagatttaagagagagacgttgtgcgcctcttgttacgacacttgatgaacagcatagggaatgataccatcatagttttagtagtccttcgttgccttcagtttgtcttcaaagagttcttgttgcctcttcacatacatgtaaacactgtaaataccgttacctgaataaagcttcagcctgctaggctacaagcagggttcactgtacgtgtccgtacatgtgatttattacagatttctttc

SEQ ID NO: 156168 - DNA, 2997 bp, Zea Mays
atgacggtctatgctcctgtccctgtacccgtaaacggcaacacgcattacaccagtgaaagcatcgagcgtttaccgaccgggaatggcaatatcagcgatctgctgagaaccaaccctgcggtacgcatggattcaacgcaaagtacctcgttgaaccagggagatattcgccctgagaaaatctctattcacggtgcgtcgccctaccagaatgcctatttgattgacggtattagtgcaactaataacctgaacccagcgaatgagtccgatgccagtagtgcaaccaatattagcgggatgtcacaggggtattatcttgatgtcagcttactggacaatgtgacgctttatgacagttttgtgccggttgaatttggtcgcttcaatggcggggtaattgatgcaaagatcaaacgcttcaacgctgatgatagcaaggtgaaattgggttatcgcactacgcgttcggactggttaacatcgcatatcgatgagaataacaagagcgcatttaatcaaggctcttcaggaagtacttattactccccagattttaaaaagaacttttataccttgtcgtttaatcaggaactcgctgataacttcggcgttaccgccggtttatcgcgccgccagtctgatatcacccgcgcggattatgtttcgaatgacggcattgtcgccggtcgggcacagtataaaaacgttatcgatactgcattaagcaaatttacctggtttgccagcgaccgctttacccacgatttaaccttaaaatataccggctccagccgtgattataataccagcaccttcccgcagtctgagcgcgaaatgggtaataaatcctatggtctggcatgggatatggatacgcagctcgcatgggccaaactgcgtaccaccgttggttgggatcatattagtgattatacccgtcacgatcatgacatctggtacaccgaactttcatgtacatatggtgatattacagggcgttgcacccgtggcggattaggacacatttcccaggctgtagataattacaccttcaaaacacgcctggactggcaaaaattcgccgtgggtaatgtttcgcatcaaccctacttcggcgcggaatacatctattccgatgcgtggactgaacgccataaccagtctgaatcctatgtgattaatgctgccggaaagaaaactaaccataccatttaccataaaggttataaccgttactatggcgggaatattcttgatatgggattacgtgatatccgcaatagctggacggaatcggtatcaggtaataaaactctgacgcgttatcaggatttgaaaacgccttataacgatgaactggcaatgggattgcagcagaaaatcggtaagaacgttattgcgcgtgcaaactatgtttaccgtgaagcgcatgatcaaatcagcaaaagcagtcgtaccgacagcgcgactaaaaccaccattactgaatataacaacgatggcaaaaccaaaacgcattcgttcagcctcagttttgaactggccgaacccctgcatatccgccaggtagatattaacccacaaattgtctttagctatatcaagagcaagggcaacttgtcgttaaacaatggttatgaggagagcaataccggtgataaccaggtggtttataacggtaatctggtctcttacgatagcgttccagtggcagattttaataacccattaaagatctccttaaacatggatttcacgcatcaaccgagcgggttagtgtgggcgaatacgctggcctggcaagaagcgcgtaaagctcgcattatccttggtaagacaaatgcgcaatacatcagcgaatattcagattacaagcagtatgttgacgaaaaactggatagcagcctgacctgggacacccgcttgtcctggacgccacaatttctgcaacaacaaaacctgacgatcagtgccgatattctcaatgtactggatagcaaaaccgctgttgatacaacgaacaccgtggcaactctgttgctccccgggcggctgattgccgccgccttaccgcaggatgaaaagttaattaccgggcaactggacaatggcttgcgatatatgatttatccgcatgctcatccaaaggatcaggtgagtttgccgactacgcagaaacaaaatctgcaacaagtgatggcaatcttcagtgaatggagtaatgccgcaacctttgaaaaactcgaagtagacgctgaacgtggcgtaattactgaggaatggcgtgcccatcaggatgcgaaatggcgcacctctcaggcgcgccgccctttcctgctggcaaatacccgtaatttagaccgtgaacctatcggcctgatggatactgtcgccacggtcacaccggcacaattgcgccaattttatcaacgctggtatcaaccaaataatatgacctttatcgtggtcggcgatatcgacagtaaagaagcgctggcgctgataaaggataatttaagtaagcttccggctaacaaagcagctgaaaatcgcgtctggccgacaaaagccgaaaaccacctgcgctttaatatcattaatgataaagaaaaccgggtgaacggcatcgcactctattatcgcctgccaatggtacaagtgaacgatgagcaaagctttatcgaacaagctgaatggagcatgttagttcagctgttcaatcaacgtctgcaggaacgcatacagtcgggcgagttgaagactatttctggcggcactgcgcgcagcgttaaaattgcacccgattatcagtcgctgtttttccgtgtaaatgcacgagacgataatatgcaggatgctgcgaatgcattaatggcagagttggcaaccattgatcagcatggtttttctgctgaagaactcgatgatgtcaaatctacccgcctcacctggctgaaaaatgcgtcgcctggcatccagctcattaaataa

SEQ ID NO: 156169 - DNA, 2156 bp, Zea Mays
  misc_feature (1098)..(1135): n is a, c, g, or t
ggtcaggtgggaccaccgcgctactgccgccaggcaaattctgttttatcagaccgcttctgcgttctgatttaatctgtatcaggctgaaaatcttctctcaatccgccaaaacaccttcggcgttgtaaggttaagcctcacggttcattagtaccggttagctcaacgcatcgctgcgcttacacacccggcctatcaacgtcgtcgtcttcaacgttccttcaggactctcaaggagtcagggagaactcatctcggggcaagtttcgtgcttagatgctttcagcacttatctcttccgcatttagctaccgggcagtgccattggcatgacaacccgaacaccagtgatgcgtccactccggtcctctcgtactaggagcagcccccctcagttctccagcgcccacggcagatagggaccgaactgtctcacgacgttctaaacccagctcgcgtaccactttaaatggcgaacagccatacccttgggacctacttcagccccaggatgtgatgagccgacatcgaggtgccaaacaccgccgtcgatatgaactcttgggcggtatcagcctgttatccccggagtaccttttatccgttgagcgatggcccttccattcagaaccaccggatcactatgacctgctttcgcacctgctcgcgccgtcacgctcgcagtcaagctggcttatgccattgcactaacctcctgatgtccgaccaggattagccaaccttcgtgctcctccgttactcttttaggaggagaccgccccagtcaaactacccaccagacactgtccgcaacccggattacgggtcaacgttagaacatcaaacattaaagggtggtatttcaaggtcggctccatgcagactggcgtccacacttcaagcctcccacctatcctacacatcaaggctcaatgttcagtgtcaagctatagtaaaggttcacggggtctttccgtcttgccgcgggtacactgcatcttcacagcgagtgcaatttcactgagtctcgggtggagacagcctggccatcattacgccattcgtgcaggtcggaacttacccgacaaggaattnnnnnnnnnnnnnnnnnnnnnnnnnnnnnnnnnnnnnnaccggggcttcgatcaagagcttcgcttgcgctaaccccatcaattaaccttccggcaccgggcaggcgtcacaccgtatacgtccactttcgtgtttgcacagtgctgtgtttttaataaacagttgcagccagctggtatcttcgactgatttcagctccacgagcaagtcgcttcacctacatatcagcgtgccttctcccgaagttacggcacccattttgcctagttccttcacccgagttctctcaagcgccttggtattctctacctgaccacctgtgtcggtttggggtacgatttgatgttacctgatgcttagaggcttttcctggaagcagggcatttgttgcttcagcaccgtagtgcctcgtcatcacgcctcagccttgattttccggatttgcctggaaaaccagcctacacgcttaaaccgggacaaccgtcgcccggccaacatagccttctccgtccccccttcgcagtaacaccaagtacaggaatattaacctgtttcccatcgactacgcctttcggcctcgccttaggggtcgactcaccctgccccgattaacgttggacaggaacccttggtcttccggcgagcgggcttttcacccgctttatcgttacttatgtcagcattcgcacttctgatacctccagcatgcctcacagcacaccttcgcaggcttacagaacgctcccctacccaacaacgcataagcgtcgctgccgcagcttcggtgcatggtttagccccgttacatcttccgcgcaggccgactcgaccagtgagctattacgctttctttaaatgatggctgcttctaagccaacatcctggctgtctgggccttcccacatcgtttcccacttaaccatgactttgggaccttagctggcggtctgggttgtttccctcttcacgacggacgttagcaccccccgtgtgtctcccgtgataacattctccggtattcgcagtttgcttcgggttggtaagtcgggatgaccccc

SEQ ID NO: 156170 - DNA, 945 bp, Zea Mays
ggagagttcggcaaaatcctgctgaaagtgaatcaggatggttcccgcgtgctgctgcgtgacgtcgcgaagattgagctgggtggtgagaactacgacatcatcgcagagtttaacggccaaccggcttccggtctggggatcaagctggcgaccggtgcaaacgcgctggataccgctgcggcaatccgtgctgaactggcgaagatggaaccgttcttcccgtcgggtctgaaaattgtttacccatacgacaccacgccgttcgtgaaaatctctattcacgaagtggttaaaacgctggtcgaagcgatcatcctcgtgttcctggttatgtatctgttcctgcagaacttccgcgcgacgttgattccgaccattgccgtaccggtggtattgctcgggacctttgccgtccttgccgcctttggcttctcgataaacacgctaacaatgttcgggatggtgctcgccatcggcctgttggtggatgacgccatcgttgtggtagaaaacgttgagcgtgttatggcggaagaaggtttgccgccaaaagaagctacccgtaagtcgatggggcagattcagggcgctctggtcggtatcgcgatggtactgtcggcggtattcgtaccgatggccttctttggcggcaccaccggtgctatctatcgtcagttctctattaccattgtttcagcaatggcgctgtcagtactggtagcgatgatcctcactccggctctttgtgccacattacttaagccactgaaaaaaggtgagcatcatgggcaaaaaggcttttttgcctggtttaaccagatgtttaaccgcaacgccgaacgctacgaaaaaggggtggtgaaaattctccaccgtagcctgcgctggattgtgatttatgtcctgctgcttggcggcatggtgttcctgttctcacgttag

SEQ ID NO: 156171 - DNA, 4521 bp, Zea Mays
gctgaaaattgtgcaaacatgagatggcttcagcatatagcgtgctggaagtgggcaccgtgcaactgagcccatccttcttgtagccagattccttattccaatgatgcagtggttggtaggttgcagtagatgactaccggtgatcccttgctcctgtcatcatcgggaagtgcagattcaccttcaaagccagctcggccttcggtaggctcattaggctgcctctgcgcaactgattcattctcttcttcactgtacgaggattgtgaaacggcttctgtcacactcacggatgaaagggaggctcaaccaagacatttacgcgagttgtctgatgtgagcagggtggcagagcgcttccagtctgctgattcacaattcttccatcgtctctcagtggaatgctctcagaaggagaggcagcggaaggtttcttggggtggcgcaatggagaggcagcattctccatcatccctagagattggaatggtatcttcttcacatgagaagccaaatcgctcccagagaatcaggaacaagagctcacagtttgaagatccatccgagcaagagccaagaaaaatatacattaatgatcctaacaagacaaatgatcgatatgaatttacagggaatgagatcaggacaagcaagtacactttgattacgttcttgcctaagaacctcttcatacagtttcatcggttggcatatgtatacttcctggttatagctgctcttaaccagctccctcctttagctgtatttggaagaactgcttctcttttcccactactctttgtgttgtttgtgactgctataaaagatggatatgaagactggcggcgtcacagatctgacagaaatgaaaataaccgagaggcactagtacttcaacatggtgattttcggtcgaaaaagtggaaaaacatttgtgcaggggaggttgtcaaaattcatgccaatgagaccatgccgtgtgacatggttcttttgggtacgagcgatccaaatggtatagcttatatccaaaccatgaatttagatggtgagtcaaacctaaaaacaaggtatgctcgccaggaaactacttccatgatatatgatgacacatattcaggcttgatcgaatgtgagctgcccaacagaaatatctacgaatttacagctaccatgaagttggacagtcagagggttccgcttggacaatcgaacattgtactacgtggatgccagcttaaaaacactgaatgggttattggggttgttgtttatgccggtcaggagacaaaagctatgttgaacagcacgatatctccttcaaagagcagcaacctagagagttatatgaacagggaaaccctttggttatcagccttcctcttgatcacatgctcagttgtggctactgggatgggggtttggctgtttaaaaattctaaaaacctggatgccctgccatactacagaagaaagtacttcacctttgggcgtgaaaatcgaaaagatttcaagttttatggcattgctttagagatatttttctccttcctcagttctgtgataatctttcagataatgataccaatatctctgtacatcacaatggagctagtcagggtggggcaatcatacttcatgattggagatacacgaatgtatgacagtaattcaggttcaagatttcagtgtcgatccttgaatatcaacgaggacctaggacaaatcagatacatattttctgacaaaacaggcactttgacacaaaacaagatggagtttcagcaagctagcatctacgggaagaactatggcagttccttgcaagtcaccagtgacttttcacatgaaataagcactgcagagtcattgagacaaagtgtcaggaagcctaaagtcaatgttgatctggcactcacggaacttctgaatcaaccattaattggggaggaaagactttctgctcatgattttttccttactctggctgcctgcaacacagtaattccagtgaacacagagggttctcacgatttgacaaatgaagtggatgagataggtgcaattgattaccagggtgaatcacctgatgagcaggctttagtaattgcagcgtctgcttatgggtatacccttgttgaaagaacaactggacacattgttatagatgttctaggcgagaggttaaggttggatgttcttggtctccatgaattcgatagtgtgagaaaaagaatgtctgttattgtaaggtttccggacaacaatgtgaaggttcttgtgaaaggtgctgacacatcaatgttaaacattttgaaagtagaaattgatgatgaactttatgattcgttgcatgttaaaattagagaagctacagaaaatcatttgtcagcctattcatcagagggtttacggaccttagtcattggttcaaaaaatctgacagatgcagaatttagtgaatggcaggaaatgtacgaagaagctagtacctccatgcatgagagatcagcaaagctccgtcaagcagcaggtctggtagaatgcaatctaacccttcttggtgcaactggaattgaagataaattgcaggatggtgttcctgaggccattgactctctgagacaggctggaatcaaggtgtgggttctcacaggagataagcaagaaactgctatatctattggtttgtcatgtcgattgttgactcaaaccatgcatttgatcatcataaatggttcctctgaggttgagtgcaggcgtcttctagctgaggctaaagccaaatttggaataaagtcagctgattttgggcgggatttgcaaggtacagaagacatgtaccatggtgatatttctaaattgaggccctcaaatggtcacctgtctgaaactggagcacaaagcctcgaactaaccggtgttattggtggtgacaagtcagagtacagtgagaacgtgacaaattttgatggcactgagttagcactgataattgatggaagctcccttgtgtatattctagagaaacctcttgaatcagagttatttgacttggcaacatcatgtaaagtcgtcatttgttgccgtgttgctcctctgcaaaaggctggtattgttgatttgattaaaagcagaacgagtgacatgaccctggcaattggtgacggggcaaatgatgtttcaatgatacagatggctgatgttggtgttggcatatgtggtcaagaaggtcgtcaggcagtgatggcttcagactttgctatgggtcaattccgctttctgaagagattacttcttgtgcatgggcactggaattatcagcggatcgcatacatgatcctgtacaacttctaccggaatgctgtcttcgttctaatgcttttctggtatatcctatatacggcttattctgcaactctggcattaacagattggagcagtgttttctattcccttatatacacatcagttccaacggtagtagttggcattctcgacaagaacttaagtcataatacccttctttgttacccgagactatatgaggcagggcttcgaaatgagggctacaacttgacactcttctggatcacaatgctcgatacattgtggcaaagccttgttcttttctatgtcccttttttcacatacaatatcagtacaatggacatatggagtctgggaagtttgtggacaattgctgtggttataattgtcaatatccatttagccatggacattcaacgttgggtgcttataacccatcttgctgtatggggttctatagctgctacgtttttgtgcatggtgttaattgactctataccaattttccctaactatgggacaatttacaacatggctgcttcaaggacttactggcttagcgtttgtcttataatagtccttgggttgcttcctcgtctcctttgtaaagtggtatatcagaccttttggccatctgatattcaaatagcaagagaagctgagctttttaaaaagctgccccaacagttgggttcaaggcctgcaagtgacatcagctaacaacagcttcacacagttattttgtcaattctaaatttgaggctgtgttgattcatttgttgagctgatttttgtcgaattttgattatacgctgaggacaaacttcggtaaggtgtacaaatttggctcgtggaagaggcttcagaatgcaatggagcggctgacaaagggaactgactactggtggtgatgaaaacggcttgggtcttcgggggctagtaatgacaattgtacagatatgggacacaacgatacatacacttgtattttacggtagagtttgttagcttgtgtttagggaataaaaacataaatagatacagattcttttcgcactgcggtatttttttaatccctgactatatgttaaccgtcttcatttacttccagctgcctgagggtttagctgtagcggtttgcgctgtcagaatttttacattttacagcaatacgaggcccagttccct

SEQ ID NO: 156172 - DNA, 2456 bp, Zea Mays
cttgcgaagcgagcgcgccataacttccaagaactggggttcgagtggggcggaggttgcaacaagaggaaggagacgacgacgacgcggccgcctcggctcggaggagaaggagacacgatcacacgaggcgtaggcgacgaggaggaagcgtccaccaggggacgacgggaccctgtgcgaaagttttacaggctgacagctgcggccgtcttctgctattgctgtctgaagctctgaactttgaaagacaactcttctcagcctcagcggcttggtgctgaactgctgactgcaggtaaccgcggccccgcctgggatttctgagctgtgggtgatgttctggtactctcttggttgatggcgaacgcggaaggttttcggctcgtgagatgcccaaactgtctcaacgttctcccagaaccgcacaacgttacagtctacaggtgcggcggatgcggcaccacccttcgagctaaaatctgtgccagcggtggccgacatgcgtctgcaaaacaagctcgccaggactccgacagttattcggtcgctacagccgtgagcaatggcaatggggcgcctccccaaatcaaagaccaaggctcagagagctccttcggtgctgatgctccaagcaccgagcatggcagcaacggggcagggagcggcgaaaatggtggtggcatactggctgtgcagaacgctgtggtggtggctcacgacgctgagaacaaggaaaaccacaccgtggaacagcctacggagaattcagagacttgccgagcagtaagtggacatgatgatgatacagaacgccgcttgaacgcctctgagatcaaaacggttccttctgagatgagcaaggcagccgtcagtgcgcaagatcccgagcagaaggaagaaggcggaggcgaacatgcagcaaacaagaaggggtatcttgtgagggtactgtctcggtcctgtgatcttcgatcgtcacgagactcgactgatttccaatctgcacggacttctctccagtcgaaaagcttcagtgccagcgagcccctccagtcgaagatcatgaacacagtggacgagctgaagggcgacctttctgagctgttcagtaataaacctgcagacgactgcaagccgaaggcgcaccaacctccacgaccttccaattccaagcaagatggccgcacgactcgtgcagccatcgcgtccagtgcacctctcgcggcataccatcctgccgccaagcattctggctacgtgtctcgcccgagcaagtctggccaggttgctgctgcttctcgtggactgccgtcgctgcggtatcgccggcactgggtttatccgttccacttccaccacaacgtgcagacggaaacgagaccttgccgtcatgggtgctgccaccatagttgccagcagccaccctgttacagatacagaccctgcaagcaagaacctgcagcgacgcgcaggccaccggtcatggtgagcaataagcgccctcctcctcccagaaactactgcctgccagtcctacgtggcgccccgttcgtgatctgctccagctgcgtcagcctggtccagctgcccgcggagttcgccgtcccgagcaggggaacgcgccggctgcggtgcggctcctgctccgaagtcctctcctactcctacagggaccccggcgccaggaagaggctgcagtcaccgttcgggggcgacgagtacagcactgacgagtacgagcaggcttccggcggccacaacgccgccgccgccggcggcttcttcggggaggcggacccggtgtcctactccgaggagtacgggctctcgttcggcatcggccactcgaccagcaccgaggacgggcagcagccgctgtacgtgtcgaggaactcgtccttcaacaccgtcgacgaaaggacgggtactagagacggcaagcttcaccggctgatggggtactcgtcggcgagcgaggtgctgcagcactcgcccgacctgttcgaaagcttcggcaggcgcgcggccgacgcaggaagagcgcacgtcggcgggaagggcaaaggcgtttgcgtggcagagaacgacgcgtgcgagcgagacggtggtgcggtggagagatcgaaggtgaggagtggtggttggccggtccatgggatcctgaagaaggggatccacggcctggaatcactcaagctcaggtcgtagctggtggttttcgtttggcggggctctggcgatcatgtttagagttcagtggcagtgtagtcatgcttattagtggttagcttgtgtgtgagttgtttgcgattcatctctgtgtctgtgtgtgccgagttggttggtttgcaatttttgtcatgtgtgtaaagccttgcacgccgagcaatgctcgatggtgtgaatgtatatacagaattactatttggttcaattcaagataaatagtactc

SEQ ID NO: 156173 - DNA, 1277 bp, Zea Mays
acgccaacccatcctgtcgtcgccgctgccggctggacctccttgagtccttgtcgaccactggactggatcagttagtttcagccttcaggcttccagcgatgtgttcctgcgcctgcgcgcgcctcctccccccgctcttcagccccgctccaagccccaatctcagacccgccttcccgcacagcccgacgccagcccgcagccgcgccgtcgtcgcgctcgcgggcgcagcctcccgggacgacgcgcctgcgccgttgtccagcttcgacttcctcgcactgaagcgggagcttgatgaggaggaggaggcagtggtggctgtggatgcgaaggaaggtgctggagctgtcaatgaggacgatggagagttgggggcggaatggagtgcgggtggtacgaggagacggcggcggaggcagatggcgaggcgatcggctctgcttgcgaagcaggtgattagtgtgacctcggcgcggagcctcgggttcgtgtcgcagctctggatcgacaccgcctcgtgggctgttgcattggttgaagtgaagccaagcttactttcaggtgaagcggagaaattcctttttgaggacatatatcaggttggagacgtggtgcttgttgcgaatgaatctgtgatcgataatgaacataaactggttggattgcacagcttggtgggctacaatgtcgtaacttcccggcgacgcaatgttggcaaggtgcgtggtttcacatttgacatcagctcaggtgctatggagtctctcgagcttgactcttttgggctttcgattgtcccttctagcttggtaagcacgtactgtttatttgtcgaagacgtgctggatatagtctccgatacagtcgtggtgcatgaagacgccgtctcacgggttcaacggttaacacagggcattttgggcactcaaaacatccacggacctggtggtgagattgacgagtacggtagatttggggggagggggaggaggaggagagcaaatggccagggaaagtctggtggccgagaactccgcagcgaaccgaagcatccggatgatgaatgggagctgccgatggactactgacacaaactcgccatgatagcattctgtttagtgctattgtattgccagaaaagtacatgctttgtacatataacataccagaggattgcgaattcagaaaagacgaaaggccctttcagccttgtcagagtttgatcgctttggcccgggtgggttagtataaaaagcgagattgtgttgcca

SEQ ID NO: 156174 - DNA, 951 bp, Zea Mays
acgtgtcgccctcccacaaaccaaagtgataatctcactgctcagtcctcccctctcttgttccgccgaccccacgccagtagagatgagggccacatcgtccccagtgcccgccgccgtcctcgtcgccccctcctccgccgccgtagcagtgaaacctcgtgccgcagcgagtggcggcggaggcagcacagcaggcaggcgcgacgtgcttgccgccggtaccgggctgggcgcggcgctgctgctggcgctggggccggcgcgcgcggcggacgaggagtacgtgagcgagacgaaggaggtgatcgggaaggtgcggtcgacgatcgggctggacaagtcggacccgagcgtggccgacgcggtggcggagctccgggacctgtccaactcgtgggtggccaagtaccggcgggagaagtcgctgctggggcgtccgtcgttccgggagatgtactcggcgctcaacgccgtgtcgggccactacatcagcttcggccccacggcgcccatcccggccaagcgccgcgcccgcatcctcgaggagatggacaccgccgagaaggcgctccaacggggcaggtaggccaaatcccagcgaagctggcccgttgcaggaacgcgagtgcccagctcggcgacaacgctaccattttgtttttgtaactactgcgatgcattcgtcgtcgttgttttcgcggctgggagcgtgtgttgtgactgtggagtaaaaagttaccgagcttttgagctgagtttgcgactttcggtcacatcttgtatcaagctgacaatgacatggcggtgagaacactcatggatgagtctgggagatatgtccatcgtccgtcccggtggctgacattcttgcttctttttcgcgttgccaatgcgcgttttcttgtgttcttttacgccaatcaaacaaaatggtgctatggtccatgt

SEQ ID NO: 156175 - DNA, 3172 bp, Zea Mays
gcaccgcccgtaatccggaggcttccccctcccccttccttcccccacccgcgggctgctgctgccaccttctcctccccacaaggctcacctccgccgccaaccccggccgcgaatccaccgcagatcggcctcggcgcgccgcttgatgcccgatctgtaagaggggcttgccaccatgagggccttgctgctgctggcgcttctcctggccacttgcgccgcggcggcggcgcaagcggccaactctacggcgttcgtgccgcgggatgacatcctgctggactgcggcgcgaaggggcagggcaacgacacggacggccgggtctggaccggggacgcgggctccaagttcgccccgcccgacaacctcgcctccgtggcctccgcctctggccaggatccctcggtcccgcaggtgccgtacctcaccgcgcgggtctcggcctcgcccttcacctactccttcccgcttggcccgggccgcaagttcctcaggcttcacttctacccggccaactacagcaaccacgacgccgccgacggcctcttctccgtctccgtcgccgtcccggggggcaagctcacccttctctccaacttcagcgcctaccagacggctgccgcgatcacctactcgtacctcatccgggagttctccgtcaacgtctcatccgcgacgctcgacctcaccttcaccccggagaaaggccacccgaacgcctacgcgttcgtcaacggcatcgaggtcgtgtcgtccccagacctcttcgacatctccactcccaacatggtcaccggcgatggcaacctccagccgttcccaatcgatgctggcactgcggtgcagactatgtaccggctcaacgtgggaggccaggcgatttcgccctccaaggacacgggtgggtaccggtcctgggacgacgacacagcatacatctttggcgctggcttcggggtcagctacccgaaggataacaatgtcaccatcacatatccaagcaatgtgccggagtatgtggcgccagaggatgtctacggcacagcgcgctccatggggccagataagaatgtgaacatgaactacaatctcacatggatgttgcaggttgatgctggattcatgtaccttatcaggctgcatttctgtgagatccagtacccgatcacaaagatcaatcagcgggtcttcagtatttacattaacaaccagactgcagtcaaggatgctgatgtgaacgcgtgggcgaccatgagtggtgctaccacccttattggcactccagtgtatcaggactatgtggtgaccacatcgggtttaggggccatggatttgtggatagctctccatccgaatcctgactcaaagccacaaatatatgatgctatcctcaatggaatggaggtgttcaagttaccgcttacaaatggtagccttgcagggctcaaccctatcccaagtgttgccccgatgactggtgggacagctaagaagaagtcaactgttgggcctatcgtcggtggagtgatcggaggtttggtggttcttgcacttgggtattgctgcttctttgtgatctgcaagcggaagaggagtgctgggaaggatgcaggcatgagtgatggacattctggttggctgcccctgtctctttatggcaattcacacacttccagttcggccaagtcacacactactggtagctatgcttcatctttgccatccaacctgtgccgccatttctcttttgctgagatcaaggctgcaacaaacaactttgatgagtccctcatcctcggtgtgggtggatttggcaaagtttaccgtggtgaggttgatgggggaacgactaaggtggctatcaagcgtggcaatcccttgtctgagcagggtgtgcatgagttccagactgagattgaaatgctgtccaagctccgccaccgtcatttggtgtcactgattgggtactgcgaggagaagaatgaaatgatcctggtctatgattacatggctcatggtactctccgcgagcacctgtacaagacccagaagccacctcttacctggaggcagcgtttggatatctgcattggtgcagctcgtgggcttcactaccttcacactggtgcaaagcacaccatcatccaccgggatgtgaagacaacaaacatccttctggatgagaaatgggttgccaaggtttcagattttggtctgtccaagactggcccatctatggaccatactcatgtgagcacagttgtcaaaggcagtttcggataccttgatcctgaatactttcgcaggcagcagctcacagagaagtctgatgtatactcttttggtgttgtgctgtttgaggtcctctgtgcacggcctgccttgaaccctactcttccaaaagaggaagttagcttggcggagtgggcgttgcactgccagaagaagggcgttcttgatcagattgttgacccctacctgaagggaaagatagctccacaatgcttcaagaagtttgctgagacagccgagaagtgtgtttctgatcagagtattgaccgcccttcgatgggcgatgtgctctggaacttggagtttgcccttcagatgcaggagagcgcggaagagagcggaagcctcggttgtgggatgtcggacgagggcactccccttgtgatggtcgggaagaaggatccaaatgacccgtcgatcgaatcgagcaccaccaccacaaccaccacttctttgagcatgggcgatcagagcgtcgcgagtatggactcggatgggctgacgcctagcgccgtcttctcacagatcatgaaccccaaggggcggtgaggtaaagctggtcccattcgttaccttgcattcattcagcatgtttttttcacgagttcgtgctgttacggttctctcgaattaagaaccagacgtccgagaattgtttcatactagatattctgccttgccctgtacttcttccccagtattgcaacgactgtacatctgttggcttgtattgtaccgctgctattgacccaactagtattttactttatgagaaagtgatgtgcacgaactattgttatgagtggtcgtgtgacgtgctgttaggaaggagtctcgactctgaattcgacatgcacacttgataatcagttttca

SEQ ID NO: 156176 - DNA, 2380 bp, Zea Mays
cggacataaaaaccagaaaaggggcgtcgaacctagggtttcgtctgtctcccgacgccgccgctaggctttgcgcctttgcctgcatcactcgctcattcggagcccctctcttcgccggcgtcgtaagaagagatggcagagcgtttgacccgtatcgccatagttagcgaggacaagtgcaagcccaagaagtgccgccaggagtgcaagaagagctgccccgtcgtcaagactgggaagctttgcattgaagtgacttcggcgtcgaaactcgctttcatttctgaggaactgtgcatcggttgtggtatctgtgtaaagaaatgcccatttgatgccattgaaatcatcaaccttccaaaagacttggaaaaggataccactcaccggtatgggcctaataccttcaagctgcacaggttgcctgtcccgagacctggtcaggttttgggccttgttggaacaaatggaattggaaagtcgacagctcttaaagtgttggctggcaagctgaaacctaacttggggcgcttcaaaaacccgcctgattggcaggaaattcttacatacttccgtgggtctgaacttcagaactacttcacacgcatattggaagataacttgaaggcaatcatcaaaccgcagtatgttgaccacatcccaaaggctgttcaagggaatgtaggacaagtgcttgaacagaaggacgagagggatatgaaagctgaactgtgtgttgatcttgaattaaaccaagttattgaccgaaatgtaggagatctttctggcggtgagctccagagatttgcaatagcagttgttgcagtgcaaaatgcggaaatctacatgttcgatgagccatcaagttaccttgatgtgaagcagaggctgaaagctgcacaagtcatcaggtccttgcttaggcccaacagctatgtcatcgttgtggaacatgacttgagtgtcttggattacttgtccgacttcatttgttgtttatatggcaagccaggtgcttatggtgtggttaccttgccattctcggtccgagagggtatcaatattttcttggctggatttgttccaacagaaaatcttcggttccgagacgaatctcttacatttaagattgcagagactcaagaaagtgctgaggagattgagacatatcagcggtataagtaccctactatgagcaaaacacaggggaatttcaagcttactgttgttgagggtgaatttaccgattctcagattgttgttatgcttggtgaaaacgggacagggaaaactaccttcattagaatgctggctgggttgttgaagccagacacagtggaaggaactgatattgaaattcctgaattcaatgtgtcttacaagccccaaaagattagcccgaaattcaagaacaccgtgaggcatttgctacaccagaaaattcgggattcctatatgcaccctcagtttgtgtctgatgtaatgaagccactgcaaattgaacaactcatggaccaggaggttgttaatttatctggtggagagctccaaagagttgctatatgcctctgccttggaaagcctgcagatatctatctgattgatgaaccaagtgcttatcttgattcggagcagcgtattgtggcctcaaaggttatcaagagattcattcttcacgctaagaaaactgcatttattgttgagcatgatttcatcatggcaacatacttggctgacaaggtcattgtttatgaggggcgaccttctattgactgttctgccaatgcaccacagtctttagtatccgggatgaataaattcttatcgcatcttgacattacttttagaagagacccgaccaactataggccacgtataaacaagttggactctacaaaggacagggaacagaagtcggccgggtcctactactacctcgatgactaatgaggaagcacagattcttcttggagagccatatggcgcatagtctttcgagggcgcggagagtgcggaaacgagaagctactatgaagctaccacactacatggcatgagacttggttgcaggagtagagtgcgccggttataacttataaagcagagcatgctgtgttgatactggttttttttccctttttggcttgacctatatgaagaaaaggattggcgttaaaatggtattgtgaagggagaggtttttaagcaaaaatgttgtaccgtcgttttgccatcgagtatatttgaccctcgattatatagatcacattaaatttttggagcaacaatatgaaatctcgtgacaagtcgttgtgctttttggttctgattgtaattcattcttgagtttgaatgatcaagtacgctggttgccgac

SEQ ID NO: 156177 - DNA, 1241 bp, Zea Mays
gtgcatgataacaaaatatggactgttaccaataacatagcgtgctctttgttggtccagccttatgcagttctcataatttaatcttcagtcatactatatatctgcacttcaaacttttatgggttaattgtatgcatgccactaaacttttgcaaatttagatggttagttcattttgatgctatggagtggcatgaaaatgcactagtttctaacttttcaaaattggagttgtatatttctaattaacccaacttttattggcctggagtctagcttattaccctttacattggttcctatagtattaacctaggatttcatgggttgtacaaaaacatagaattacgtgcactagttttcttttgattttggtgtagtatctccatgttggtttccaaaaaagatgcactagttttcttttgattttggtgtagtatctccatgttggtttccaaaaaagatccaaccaactacaggctgtttataaacgaacaggactgtgacagaccaggctcttcaagaccttactaacagcttgatgtctaacaaaaatcttcagtaggatttgagaactcgaatatatttgcacataaaaaacctgttgctgtatctgtgtcattgctttgatttcttcatcattggcttatctatttccctgcactaacttcacttgccattcttgtggtagcatcttgacattacttttagaagagacccgaccaactataggccacgtataaacaagttggactctacaaaggacagggaacagaagtcggccgggtcctactactacctcgatgactaatgaggaagcacagattcttcttggagagccatatggcgcatagtctttcgagggcgcggagagtgcggaaacgagaagctactatgaagctaccacactacatggcatgagacttggttgcaggagtagagtgcgccggttataacttataaagcagagcatgctgtgttgatactggttttttttccctttttggcttgacctatatgaagaaaaggattggcgttaaaatggtattgtgaagggagaggtttttaagcaaaaatgttgtaccgtcgttttgccatcgagtatatttgaccctcgattatatagatcacattaaatttttggagcaacaatatgaaatctcgtgacaagtcgttgtgctttttggttctgattgtaattcattcttgagtttgaatgatcaagtacgctggttgcc

SEQ ID NO: 156178 - DNA, 3662 bp, Zea Mays
acagcccccggcgcgcgggcgagccgacgagagtgggagtgtacggcagcggtagggtgggtttgctctttgattggccgcggctaaacaccaaaccttggggaaatggagctgctcagtggtgcagtggcggagcgggagcttggggaagcggaagcttgcgagcagccagagcactagccattacccagcgctaccctacactgacaagtccatcgatctgatcgcgctgctgctgagtgcagtgtgtatacaaaaggccgtgaaggcggtaagaccgagctgcaaaggggtgtgagggagaagcgagaagcccgtgagctgagctgctgcggtgctagggagccagggtttcgtttcgtttcgtctcgtctggcccctcttctcttggcgcggccatggacgcctacgaggccaccaaggtggtgttctcccggatccaagcgctagacccggaccacgccgccaagatcatgggtctcctcctcatccaggaccacggcgagaaggagatgattcgtctcgccttcggccccgaatctctgctccacgctgtcatggccaaggcgcgcaaggacctcggcctgctcctcccggcctcgccgacctccgtcgcggccgccggccacgcgccgttcctgcagctcccacgccaaaactccgggcgcgccggcgccccatcgccgctctcggtgtcctcgccgtcgtcatgggggcacgcgccggcgttctccaggagcaatagcacgagtaatggtactggcaccgcggaggaggcggcgggggctggggaggagctgcccagtcccgtgaacggcggcgcagcgccgttcttccctcatcagtccggggacgcgctcctggacgacttgcagctgcaggagcagcttgcgttcctcaacgagggcagcgcgaacccggcccaccagctcccgggtttcgtcggcggggagtgccggagccccggtccgggtgatgcctctgggatgttcgcgttcggcctcgggtggcccaacggcggcccagcgcaccgccggagctcgtcagtcaacgagttctgccttggcggcggcggcggcggcgatggtttcgggtggaagccctgtctctactacgcgcgcgggttctgcaagaacggcggcagctgcaggttcgtacatggcggtctctcagacgacgctgctgccttcgctggcgccaagatggaggcagctgccgatcagcagcagcagcagcagtgccaggacttcctcatccgttccaagagccagcgcctcggctccgccgccttcccctactcctccaccggctccctcccaggctcgccctccgccgctagcaagtgcctcagctttctgctgcagcaacagcaacagcagcacgacagagccgcggcggccgcgtctctgatgctgggcggcggcgacgaggcgcacaagttcatgggccggccgcgcctggaccgtgctgacttcgcgaacatgatgaacccgggctcgcggcagatttacctgacattcccggccgacagcacgttccgcgaggaggacgtctccaactacttcagcatctacggtccagttcacgacgtgcgcattccctaccagcagaagcgcatgttcgggttcgtcaccttcgtgtacccagagacggtgaagctcatcctggccaagggcaacccgcacttcatctgcgacgcacgcgtgctcgtcaagccctacaaggagaagggcaaggtccccgacaagtgcaggaagccgcagcaaggggacttctccggctgcacgacgcccactggcgggctggacggcgggtacccctttgatctgcaccagctcggcggcaggatgctgcagcactcgagcagcgccaacgagctgctcctacgccgaaagctggaggaacagcagcaggccattgagctccagagccgtcgcctcatgggtcttcagcttctcgaccttaaggctcgcgctgctgctgcagcagcatcgccactgccgacaccaattggcgatgccttcgcgtccagccaacctgtgagcaccaccgcagtcgagtcgccatcgccgccagagtccgggcagcagctgctcaagctgaggagcggatttgctctggaggggaaggtcaacggtggtgataaggaggaatctgctcgcgaggcgagcccagacgccgctgatagcgaccaaagcggcggagagcacaatttgccggacagcccattcgcatcccctacgaaatctgctgcgcttttgcatgacagtttcactgccacggagaccgagagcaccgccgcgtcccgtgttggcgtggatgccggtgtcgggagcaagatcgacggtggaagcaaccatctccgcccccccgcgttggaaatcccttcgcccagctcctacttcttccccatgcacaggctgtcctccgatcacggagccatggggatgtaaagttcaccattgtaggcgagttataccccccaacctaatcatagaatactagaagccaagaaaagcgatggtggaatatatagggaaaaaaaaaggagtcgagtgtcagcatagtgttagctcccttatgttctagtaccttttttagaggatagttctactaaaccacaagagaagaagatgccattagccttgattaagaaaacggcagcatatgcagtattgccagatataagtatatatatattatatatacaaataatccagtgtcaccctagtctttagagagagatatataaatagtatctgtacttaatgtttaccagtagcaggcaggtaacatgagcacaaagatgttactgtgacactgtccttgatgtactctacaatgacaggccccccaacccaccccacccccactaggtttattatactaaatgcgaggttaatccacgattctggtaccagccacatgtcacatgtaaagagcagtacagctacagcctgctgcgagattcatcagatattgtatactactaggccactagggaggcccagtgactgtagaagtgcacatgaccatggcagttgtctgtaagctattttaactgctactagtgcaagatcccaagccaggatagagagtcatagaggtgtgtgtgtatgcgtgggtgtctcggtatgggtctcctagtatgtccgcagtctgcagagacaggtcgctgcagaatactactacaatactactagtacatgattgtattgacctagttgcgtggatgtagttgacagtttgacacctctatctacagacagaatggaagtaaaagtgagaaagaaagtttgtgcgagtgcttttgcctccattgatccatctttcaaaacctcgaaaggtgtgctttgcccctccagcggtccaattgatccacctttcaagatctcaaaggtaccgggatcaggtgttgctgctgttgtgagatgggtgtgaggatcttgactgaagaatgatggcggtagcgggtagcctatgagtgaatttatttaagtgtccaaaaggcttattttggaacgcaggaatttcagagaaatcgtataggaaatttacaggaatcgtgaagctgtgatctattcagatgtggctgtggttgtttgcagctatatatacagtggaatctaatttatttttgcacccataacagtttctgcagc

SEQ ID NO: 156179 - DNA, 2727 bp, Zea Mays
tcttctcttggcgcggccatggacgcctacgaggccaccaaggtggtgttctcccggatccaagcgctagacccggaccacgccgccaagatcatgggtctcctcctcatccaggaccacggcgagaaggagatgattcgtctcgccttcggccccgaatctctgctccacgctgtcatggccaaggcgcgcaaggacctcggcctgctcctcccggcctcgccgacctccgtcgcggccgccggccacgcgccgttcctgcagctcccacgccaaaactccgggcgcgccggcgccccatcgccgctctcggtgtcctcgccgtcgtcatgggggcacgcgccggcgttctccaggagcaatagcacgagtaatggtactggcaccgcggaggaggcggcgggggctggggaggagctgcccagtcccgtgaacggcggcgcagcgccgttcttccctcatcagtccggggacgcgctcctggacgacttgcagctgcaggagcagcttgcgttcctcaacgagggcagcgcgaacccggcccaccagctcccgggtttcgtcggcggggagtgccggagccccggtccgggtgatgcctctgggatgttcgcgttcggcctcgggtggcccaacggcggcccagcgcaccgccggagctcgtcagtcaacgagttctgccttggcggcggcggcggcggcgatggtttcgggtggaagccctgtctctactacgcgcgcgggttctgcaagaacggcggcagctgcaggttcgtacatggcggtctctcagacgacgctgctgccttcgctggcgccaagatggaggcagctgccgatcagcagcagcagcagcagtgccaggacttcctcatccgttccaagagccagcgcctcggctccgccgccttcccctactcctccaccggctccctcccaggctcgccctccgccgctagcaagtgcctcagctttctgctgcagcaacagcaacagcagcacgacagagccgcggcggccgcgtctctgatgctgggcggcggcgacgaggcgcacaagttcatgggccggccgcgcctggaccgtgctgacttcgcgaacatgatgaacccgggctcgcggcagatttacctgacattcccggccgacagcacgttccgcgaggaggacgtctccaactacttcagcatctacggtccagttcacgacgtgcgcattccctaccagcagaagcgcatgttcgggttcgtcaccttcgtgtacccagagacggtgaagctcatcctggccaagggcaacccgcacttcatctgcgacgcacgcgtgctcgtcaagccctacaaggagaagggcaaggtccccgacaagtgcaggcatgcactgaagccgcagcaaggggacttctccggctgcacgacgcccactggcgggctggacggcgggtacccctttgatctgcaccagctcggcggcaggatgctgcagcactcgagcagcgccaacgagctgctcctacgccgaaagctggaggaacagcagcaggccattgagctccagagccgtcgcctcatgggtcttcagcttctcgaccttaaggctcgcgctgctgctgcagcagcatcgccactgccgacaccaattggcgatgccttcgcgtccagccaacctgtgagcaccaccgcagtcgagtcgccatcgccgccagagtccgggcagcagctgctcaagctgaggagcggatttgctctggaggggaaggtcaacggtggtgataaggaggaatctgctcgcgaggcgagcccagacgccgctgatagcgaccaaagcggcggagagcacaatttgccggacagcccattcgcatcccctacgaaatctgctgcgcttttgcatgacagtttcactgccacggagaccgagagcaccgccgcgtcccgtgttggcgtggatgccggtgtcgggagcaagatcgacggtggaagcaaccatctccgcccccccgcgttggaaatcccttcgcccagctcctacttcttccccatgcacaggctgtcctccgatcacggagccatggggatgtaaagttcaccattgtaggcgagttataccccccaacctaatcatagaatactagaagccaagaaaagcgatggtggaatatatagggaaaaaaaaaggagtcgagtgtcagcatagtgttagctcccttatgttctagtaccttttttagaggatagttctactaaaccacaagagaagaagatgccattagccttgattaagaaaacggcagcatatgcagtattgccagatataagtatatatatattatatatacaaataatccagtgtcaccctagtctttagagagagatatataaatagtatctgtacttaatgtttaccagtagcaggcaggtaacatgagcacaaagatgttactgtgacactgtccttgatgtactctacaatgacaggccccccaacccaccccacccccactaggtttattatactaaatgcgaggttaatccacgattctggtaccagccacatgtcacatgtaaagagcagtacagctacagcctgctgcgagattcatcagatattgtatactactaggccactagggaggcccagtgactgtagaagtgcacatgaccatggcagttgtctgtaagctattttaactgctactagtgcaagatcccaagccaggatagagag

SEQ ID NO: 156180 - DNA, 3072 bp, Zea Mays
ccacttagatggacttatatttgtgtcagaggaagtgaaatattttcattacatatttctttgcttatgaaaaattactctttgttttagatccttgatgagatgcctgttttctataatctgaatgccatcgaaaagcgtgaagtgctagttgtcattttgcaaattgtaaggaacttggatgatgcaactcttatcaaagcatggcaacaaagcattgctagaaccagattgttcttcaagcttcttgaagaatgtataacccattttgagcacaacaaaacaggaggcagcatgctacttggtgctagttctcggagcccagatgttgagcgccctgcacccccaaagtactctgagcgattatccccatcagtcaatgcatatttgtcggaggcttcaaggcatgaaataaggcctcagggaacaccagaaaatgggtacatgtggaacagggttagccctcaattaagttcccctaatcaaccctattcattgagggaagcacttgctcaagcacaatcttcaagaattgggtcaaccgccagggcattgagagagtctctgcatccagtactgagacaaaaattggaactttgggaagaaaatctcagtactgctgtgagcctcgaagtgttgagaataaccgagaagttttcagctgctgcaggcactagaagcatcactactgattatgcgaagctagattgtgtaacatctatcgtaatgggtcttttatctaggagccaacccttggcattttggaaggctttccttcctgtggtctacaacatatttaatcttcatggtgcaacactaatggcaagggagaatgaccgcttcttgaagcaaattgcttttcatcttttgcggcttgctgtttttcgaaatgattctattaggaaaagagctgttgttgggttgcagattctcgttaggaacgcattcaactatttcaagaacactacaaggttgagagtcatgttgacaattactttgtcagagttgttgtctgatgtgcaagtgactcaaatgaaatccgatggttctcttgaagaaagtggtgaagctcggcgccttagaaaatcactggaggaaatggctgatgtaagaagcaaggatctgttgaaagattgtggcctccctgttactgcattggaggcggcccctgatggttcctctgataatatgtggtcttgggcagaggtgaaacatctctctaaatgtctagtccaggcccttgatgctggtctggaacacgccctcttggattctgtagtgactgtagacaggtatgcagctgctgagggtttctataaactagctatggcctatgcgcccgttccagatcttcacattatgtggttgcagcatttgtgtgatgcacaccaggagatgcaatcatgggctgaagcagcacaatgtgcagttgctgcagctggcgtgatcatgcaggcacttgttggaaggaatgatgctgtgtggagcaaggagcatgttacttcgctacacaagatttgccctatcgtcaacactgatgtgagtgcagaagcatctgcagctgaagttgagggatatggtgcatccaaattaacagtggactcagcggttaaatatcttcaacttgccaataaactcttcacacaagctgaactttatcatttttgtgcaagcattcaggaactcataattcctgtgtataaaagcagaagggcttatggacagctggccaaatgtcatacatcactcacaaacatctatgagtcaattcttgaacaggaggcaagtcctataccattcattgatgccacatactaccgagttggtttctatggtgagcgtttcggcaagctcaataaaaaggagtatgtatttagagaaccacgagatgtacgtcttggtgatattatggagaagcttagtcatatatatgaggttaaaatggatgggagtcacactttacatataattccagattctagacaagtcaatgctgatgagttgcagcctggcgtctgctatttacagatcactgctgttgatcctgtaatggaggatgaggacttgggtagcaggagggaaaggattttttctttatctactggtactgtacgtgcacgtgtttttgaccgttttcttttcgatacaccattcacaaaaaatggaaaaacacaaggtggtctagaagaccagtggaagaggcgtactgtgctccagacagagggttcctttcctgctttggtgaaccgtctgccagtcaccaaatctgaatctctggagttctctcctgtcgagaatgcgattggaatgatcgaaacaagaacagctgcattgagaaatgaactagaagaaccacggagttctgaaggtgatcaactcccaaggcttcaaagcttgcaaaggatactccaaggaagtgtggctgtgcaggtcaacagtggggtattaagtgtgtgcactgcattcttatctggcgagccagcaactaggctcagatcccaagaactgcagcagctcatcgccgcattgcttgaattcatggctgtctgcaagcgtgcaatccgtgtgcatttcagattgataggggaagaagaccaggaattccacacccaacttgtcaatgggttccagtcactcaccgctgagctatctcattatatccctgctatactctccgagctatgatagaactgtaacaagccagaaattaggtagcatgtgaatgattcattctttcagttgcaggttcccaccaaatgtccatatttccattagttttggttgtatagttgcaccgattcctgattttggagtgtaaagtttgtataacctagtgttatctgttatgcaccagttatatgctgagtgccatgttttttgcggtttgctactgtatcacagcgagccgacattttacaacagttatatgtaatgttctgtagtgatacaatagtgcctattctgggtgatatgtatttttttccctgtaggaaatttgctgctgtcgagggcatcctcgcaatttgtttatgcacgatttgaagccttgtgttattgaagtcgttcccataa

SEQ ID NO: 156181 - DNA, 5846 bp, Zea Mays
atggagcccgcggtggctacggcgggtgaagggcagcggttcaagcggatttcgcggcaggcgtggtcggggaacctggaactggatcctttgcttaatgaaagcttagatcagtggccacatctaaatgatctggtacagtgctacaaggctgattttgtgaaggatgactgcaaatatggacgctatgagagtgttgcaccaccatctttccaaaatcaaattttcgagggacctgatacagacatagaaacagaattgcagctttgcaacgcaagacatttcaagcctgaagatcctaccgaagatgatatgccaagcacctcagggaggcaaatgtatgaaaccgaatcatctgcttcatcttcaaaagtgcactgtagtctgtcaccactgccagcatatgagcctgcatttgattgggagaatgagaggtctttgatatttggccaaagggtgccagaaagtataccagcaataagcaacagtggcttgaagataactgtcaaggtactatctttgtcattccaagctggattagttgaacctttcagtggaacgatttgcttgtataacagagatagaagagaaaaactgtcagaagacttctactttcacatacttccaacagatatgcaggatgctcagggttctttggatcgtcgaggcgttttttcattggacacaccttcaccatcagtctgccttttgattcaattggaaaaggctgctactgaagaagggggagtaacaccttctgtttattctcgtaaagagcctgtgcacttagctgagaaagagaagcaaaagctgcaagtatggtctcgaattatgccttgtaaagagtcatttgcatgggccatgattcctctgtttgaaggtaaccatgcgggtggtcttagtgatgctgcttctcctagcagtcctttagcaacaagtttaccaggatcaacttctcaagatagtattgtggaccctattttaaagcttactttagatggaaaagtaaaccattactcgagtggaagctcagttattgtagagatatcaaacctaaacaaagtgaaggaaagctatatagtggactccctccaagatccaaaacggaaagtacataaaccagtgaaaggtgtattgagattagaagtggaaaaacttcatggtggccacaatgatgtggataacacttctgaaggcggaagcatggccaatgatttgaatgatgctggtgacatcaataatggcagaagcaacagaagtagctttgatgggattcacagttttgtgaattctattgccattgcccagaaagatgctcatcacaatggaatcatttctaatgctgagaatggtgacaattttgaagcttttgactttcggatgctgacccgaagtgagccgttttcacaactttttcattgcctctatgtgtacccattgactgttagcttgagccgcaaaagaaacctgtttgttagagtggaactgagaaaggacgattctgacatccgaaagcctccattagaggctgttcatcctagggagcggaatatgatgctacagaagtggggccatacacagattgctgttggaacaagaatggcttcctaccatgatgaagttaaaatcagcctacctgctcttttgacaccccagcatcatcttgtgttcacatttttccatgtagatcttcaaatgaaacttgaagcaccaaaaccagtatgcagcatgttgcttattagtatggtgatcgttgggcattctgtacttccactgtcgacacatattcagttactttcagatgtatccttgccaattttgagagagctcgttccacattacctgcagggaagtggaaaggagagaatggactatctggaagatggaaaaactgttttcaagttgcgtttaaggctctgttcttcattgttcccggttaatgaaaggataagagacttttttgttgaatatgaccgccatactctacatacaagtcccccatggggttctgagcttcttgaggccataaatagtttgaaaaacgttgaatctactgcattattacaatttctgcaaccaatacttaacatgctgcttcatcttattggcgatggcggtgagacccttcaggttgctgcgtttcgagccatggttaacattttaacccgtgtgcagcaggagtcatcagatggggctgagagaaatagattccttattaattatgttgattttgcttttgatgacttcggcggtcggcaagcacctgtgtatcctggtctgtctactgtttggggaagtcttgctaggagtaaggcgaaaggttatagagttggtcctgtgtatgatgatgtgttggcaatggcttggttttttctggagcttattgtaaaatcaatgggattggaacaaagtcgtctcttctaccacaaccttccattaggtgaagatgtcccaccgctacaattgaaagaaggtgtcttcaggtgcatcatgcagctctttgattgccttctaactgaggttcatgaacgctgtaaaaagggtttaagcttggcaaaacgcttgaacagcacgcttgctttcttttgctatgatcttttatcaataattgagcctcgccaagtttttgagctggtttcgttgtacatggacaagtttgcaggagtttgtcaagcagtccttcatgactgcaaattgacattcctgcagataatatgcgaccatgatctattcgttgagatgcctgggcgggatccctctgatagaaactatctctcgtcagttcttattcaagagatctttctgaccttagaccatgatgatttgtctcaacgagcgaaggctgctcggattctggttgtccttatatgcaaacatgaatttgatgcacgctatcaaaaaagtgaagacaagctgtacattgctcagctgtacttctctcttatagggcagatccttgatgagatgcctgttttctataatctgaatgccatcgaaaagcgtgaagtgctagttgtcattttgcaaattgtaaggaacttggatgatgcaactcttatcaaagcatggcaacaaagcattgctagaaccagattgttcttcaagcttcttgaagaatgtataacccattttgagcacaacaaaacaggaggcagcatgctacttggtgctagttctcggagcccagatgttgagcgccctgcacccccaaagtactctgagcgattatccccatcagtcaatgcatatttgtcggaggcttcaaggcatgaaataaggcctcagggaacaccagaaaatgggtacatgtggaacagggttagccctcaattaagttcccctaatcaaccctattcattgagggaagcacttgctcaagcacaatcttcaagaattgggtcaaccgccagggcattgagagagtctctgcatccagtactgagacaaaaattggaactttgggaagaaaatctcagtactgctgtgagcctcgaagtgttgagaataaccgagaagttttcagctgctgcaggcactagaagcatcactactgattatgcgaagctagattgtgtaacatctatcgtaatgggtcttttatctaggagccaacccttggcattttggaaggctttccttcctgtggtctacaacatatttaatcttcatggtgcaacactaatggcaagggagaatgaccgcttcttgaagcaaattgcttttcatcttttgcggcttgctgtttttcgaaatgattctattaggaaaagagctgttgttgggttgcagattctcgttaggaacgcattcaactatttcaagaacactacaaggttgagagtcatgttgacaattactttgtcagagttgttgtctgatgtgcaagtgactcaaatgaaatccgatggttctcttgaagaaagtggtgaagctcggcgccttagaaaatcactggaggaaatggctgatgtaagaagcaaggatctgttgaaagattgtggcctccctgttactgcattggaggcggcccctgatggttcctctgataatatgtggtcttgggcagaggtgaaacatctctctaaatgtctagtccaggcccttgatgctggtctggaacacgccctcttggattctgtagtgactgtagacaggtatgcagctgctgagggtttctataaactagctatggcctatgcgcccgttccagatcttcacattatgtggttgcagcatttgtgtgatgcacaccaggagatgcaatcatgggctgaagcagcacaatgtgcagttgctgcagctggcgtgatcatgcaggcacttgttggaaggaatgatgctgtgtggagcaaggagcatgttacttcgctacacaagatttgccctatcgtcaacactgatgtgagtgcagaagcatctgcagctgaagttgagggatatggtgcatccaaattaacagtggactcagcggttaaatatcttcaacttgccaataaactcttcacacaagctgaactttatcatttttgtgcaagcattcaggaactcataattcctgtgtataaaagcagaagggcttatggacagctggccaaatgtcatacatcactcacaaacatctatgagtcaattcttgaacaggaggcaagtcctataccattcattgatgccacatactaccgagttggtttctatggtgagcgtttcggcaagctcaataaaaaggagtatgtatttagagaaccacgagatgtacgtcttggtgatattatggagaagcttagtcatatatatgaggttaaaatggatgggagtcacactttacatataattccagattctagacaagtcaatgctgatgagttgcagcctggcgtctgctatttacagatcactgctgttgatcctgtaatggaggatgaggacttgggtagcaggagggaaaggattttttctttatctactggtactgtacgtgcacgtgtttttgaccgttttcttttcgatacaccattcacaaaaaatggaaaaacacaaggtggtctagaagaccagtggaagaggcgtactgtgctccagacagagggttcctttcctgctttggtgaaccgtctgccagtcaccaaatctgaatctctggagttctctcctgtcgagaatgcgattggaatgatcgaaacaagaacagctgcattgagaaatgaactagaagaaccacggagttctgaaggtgatcaactcccaaggcttcaaagcttgcaaaggatactccaaggaagtgtggctgtgcaggtcaacagtggggtattaagtgtgtgcactgcattcttatctggcgagccagcaactaggctcagatcccaagaactgcagcagctcatcgccgcattgcttgaattcatggctgtctgcaagcgtgcaatccgtgtgcatttcagattgataggggaagaagaccaggaattccacacccaacttgtcaatgggttccagtcactcaccgctgagctatctcattatatccctgctatactctccgagctatgatagaactgtaacaagccagaaattaggtagcatgtgaatgattcattctttcagttgcaggttcccaccaaatgtccatatttccattagttttggttgtatagttgcaccgattcctgattttggagtgtaaagtttgtataacctagtgttatctgttatgcaccagttatatgctgagtgccatgttttttgcggtttgctactgtatcacagcgagccgacattttacaacagttatatgtaatgttctgtagtgatacaatagtgcctattctgggtgatatgtatttttttcc

SEQ ID NO: 156182 - DNA, 816 bp, Zea Mays
ttcaggtaaaggagagattttttctatggagaaagaaagcatcaggacattctgctttgcatcacaaagctccaaacccagcatggttcaaacgaaaccccagacgacacatcaggtaggatgattggcggtaacaagggaaacaaacacacacgatgttcataagcacagctactgctttctaccatttgctcttcctcaccagagtcccgcaggttgccacccagctcactggcactgctccgacaacggtctacactcaggcgaccttaatctcgatggtcttgggcttcttgggctccggcgggggcagcttctcgacggtcaccgtgagcacgccgtccctgcacacggcggcgaccttgtccacgtcggcgttgtccggcagcacgaacttgcgcatgaacttgcccatccgccgctccatgcgcaggtacttggcgtcctcgcgctcctcccggcgccgctcgccgctgatcacaagaacccgctcgtcctccacctgcaccctgatgtcgcccgtgctcagccccggcatgtccaccacgaacgcgtacgctcccgcgagctccttgacgtcggccggggtggccgccatggcgcgcgcgtcgcggacgtaggtgcgcgtggcgccgccgcccgccttgtcgccgcccgctccggcgtcgccatcgggcacgtccagcaggtgatgcagcgccgccaccagggggttctccagcccgaacatcctcgcgtccatctctcggatcgctgctttgcttgttgctgacttgctgtgttgattggggattaattcgtttcgtattgtgattc

SEQ ID NO: 156183 - DNA, 606 bp, Zea Mays
acaaatgaaaaactccctcgccagcagcatggagagaagggaggccgacctgggcactaatggaacaagaaatcggccaccaggggatctcgccgggagccttggaccaccgcgctaacaggagaggcaaacaccgcaggggccagcacggcgtggtgagcagccgcacggagaatgcagccgcgtacaaacacacgtacaggggcctgcgtagggacagctcgaccgcgcgagggagcagtgcgagggcgcgcggggcctgcacgccggggtgctggggtcgcccgcgtcgcgctggacgagccgcgcaggctgccgcgcgctggccgcgccgggacgccgcgcccgaggacgtcgggcctggccacaccgcgccgccgaccgaggaaaatagagggagcacgcaggggaggcagccatggattgaagacgccctgccgcaggggacatggccacggcacagcggcttgatcgaaaaaaaaagggagcacgcagaggagggagagagggagagggctcacctgcgcacgcaagaagaccaataaccgcctggatgggatgcctggtcctgcgcgattttggatctggggagggagacgaggggtt

SEQ ID NO: 156184 - DNA, 809 bp, Zea Mays
tttaggtaacaggagagatttattctatggagaaagaaagcatcaggacattctgctttgcatcacaaagctccaaacccagcatggttcaaacgaaaccccagacgacacatcaggtaggatgattggcggtaacaagggaaacaaacacacacaatgttcagaagcacagctactgctttctaccatttgctcttcctcaccagagtcccgcaggttgccacccagctcactggcactgctccgacaacggtctcccctcaggcgaccttaatctcgatggtcttgggcttcttgggctccggcgggggcagcttctcgacggtcaccgtgagcacgccgtccctgcacacggcggcgaccttgtccacgtcggcgttgtccggcagcacgaacttgcgcatgaacttgcccatccgccgctccatgcgcaggtacttggcgtcctcgcgctcctcccggcgccgctcgccgctgatcaccagcacccgctcgtcctccacctgcaccctgatgtcgcccgtgctcagccccggcatgtccaccacgaacgcgtacgctcccgcgagctccttgacgtcggccggggtggccgccatggcgcgcgcgtcgcggacgtaggtgcgcgtggcgccgccgcccgccttgtcgccgtcgggcacgtccagcaggtgatgcagcgccgccacccggggggtctccagcccgaacatcctcgcgtccatctctcgggtcgctgctttgcttgttgctgacttgctgtgttgattggggattaattcgtttcgtattgtgattctcggtgtggg

SEQ ID NO: 156185 - DNA, 1769 bp, Zea Mays
gagctctccgctggcgttgtgcaacgaacaaagctcatgtcataatcaccaatcgataatcggctgatgataccaaacaaggagtcactaattatcccaaggcgcccatcggctttaaaatatccgagttgcgtgcgttgccatcctctcttgctcggtcgcctttcccggtctttggtgtggataaaccggctttcttgctgttctcgatccttcttcaattcgctgtagtttttccttttgtcgcttgctcttgttctctttccaagaccgaggaagacgagtcagatttggtgattgtgtagagcgtacaagtgattgttcttggagaagcataggcctctcttggctgaaattgccaagaattatcagtttcgcattctcgtcttgggtgtagctcttgtcttcttgagcaaggaggcggaggaaaggaaagacatggaagaggaatccgtcgcagcttcaaggtactactgccacatgtgctcgctgatcataaggcccgaactgggcatcgaggaggtgaagtgcccccactgccacaccggcttcgtggaggagatggcgggcgaccggcgaggcagcgacgacgcagccatcagaggccgtcctcccggcggcgaggcgagctctaacgcctcggacgcggcgctggagcgcgaggtttcgctctgggcgcctgtgctcatggacttcatcgccgcctcgtccggccgccacggcctcgacggccacggaggggacctcgccgctttggcgcgaaggcagtaccgcaacatcgccctcctgcagctgctcaacgcgctccaggaaggcgacaccgatgccgggcgcgagcgggtcgtgctcatgagccccgcggacgcgcgcgccatgcttatgggacaagagcgaggggacggcgccgccgccctgggccccggcggtctgacgctcggggacctgttcctcggcccggggctggacttgctgctggagtacctggccgagaccgacccaaaccggcagggcacgccgccggccaggaaggaggccgtggccgcgttgccgacggtccgggtgcgcgaggacttcacctgccccgtgtgcctggacgaggtcgcgggcggcggcgacgcgcgcgagatgccgtgcaagcaccggttccacgaccagtgcatcctgccctggctggagatgcacagctcctgccccgtgtgcaggcaccagctgcccacggaggagccggcggaggcaattggcagcgacagaggcgccggtgttgagtccagtggcaacgcgcgcggcggcgggaggaggcattggttctcgtggcccttcggagggttgttctcgcaaagatccagcgggaactcctcgtcgtcctgatgatgcatgaacacgataataatatgcaagggaacacctcatcgtccctgatgatgctaatgaacaggataataatatgcgtcgatgtagccatgtaggggtttgtcttgtacttaggattggattttttttttttttgccagtctaaagctgcatttgtgttctttggccgctgggttttgcttcagttcaggtggacggagacgggagaatgcatgttctgactgaattgtagttttgcttcagttcagtggatgaaaatgagagaatgcatcttccgacttatttgcgtcctttggctgaattgtagttttgcttcagttcaggtggatggagggagatgggagaatgcatcttctgactgatgctcctacgatttctgctgaaaaaatcattttccc

SEQ ID NO: 156186 - DNA, 1521 bp, Zea Mays
gagctctccgctggcgttgtgcaacgaacaaagctcatgtcataatcaccaatcgataatcggctgatgataccaaacaaggagtcactaattatcccaaggcgcccatcggctttaaaatatccgagttgcgtgcgttgccatcctctcttgctcggtcgcctttcccggtctttggtgtggataaaccggctttcttgctgttctcgatccttcttcaattcgctgtagtttttccttttgtcgcttgctcttgttctctttccaagaccgaggaagacgagtcagatttggtgattgtgtagagcgtacaagtgattgttcttggagaagcataggcctctcttggctgctcttgtcttcttgagcaaggaggcggaggaaaggaaagacatggaagaggaatccgtcgcagcttcaaggtactactgccacatgtgctcgctgatcataaggcccgaactgggcatcgaggaggtgaagtgcccccactgccacaccggcttcgtggaggagatggcgggcgaccggcgaggcagcgacgacgcagccatcagaggccgtcctcccggcggcgaggcgagctctaacgcctcggacgcggcgctggagcgcgaggtttcgctctgggcgcctgtgctcatggacttcatcgccgcctcgtccggccgccacggcctcgacggccacggaggggacctcgccgctttggcgcgaaggcagtaccgcaacatcgccctcctgcagctgctcaacgcgctccaggaaggcgacaccgatgccgggcgcgagcgggtcgtgctcatgagccccgcggacgcgcgcgccatgcttatgggacaagagcgaggggacggcgccgccgccctgggccccggcggtctgacgctcggggacctgttcctcggcccggggctggacttgctgctggagtacctggccgagaccgacccaaaccggcagggcacgccgccggccaggaaggaggccgtggccgcgttgccgacggtccgggtgcgcgaggacttcacctgccccgtgtgcctggacgaggtcgcgggcggcggcgacgcgcgcgagatgccgtgcaagcaccggttccacgaccagtgcatcctgccctggctggagatgcacagctcctgccccgtgtgcaggcaccagctgcccacggaggagccggcggaggcaattggcagcgacagaggcgccggtgttgagtccagtggcaacgcgcgcggcggcgggaggaggcattggttctcgtggcccttcggagggttgttctcgcaaagatccagcgggaactcctcgtcgtcctgatgatgcatgaacacgataataatatgcaagggaacacctcatcgtccctgatgatgctaatgaacaggataataatatgcgtcgatgtagccatgtaggggtttgtcttgtacttaggattggattttttttttttttgccagtctaaagctgcatttgtgttctttggccgctgggttttgcttcagttcaggtgga

SEQ ID NO: 156187 - DNA, 1866 bp, Zea Mays
cacagcgatcaaccggacgccgcgggtgaccaacccacccgcgcttagccgcttacccccgtcagatccccagatccccctcccagctagccatggccgcgccccgctctggtcgccgcccgcactgccactgctagccatggccgccgccgccgcctgccggagcccgctggtctggctcttcgcgctcgtcaccgcactcttcttcttctcctggtacctcctcctcgactccgccgcgggcggcgctccggtcccggtaggaaatgcgaccccgcggaggcgctgctgcgagtgttcatgtacgacctgccccccgagttccacttcggactgctcgactggaagccccccggcttcggcggcggcgtgtggcccgacatcagggacggcgtgcctgactacccggggggcctcaacctgcagcacagcatcgagtattggctcaccctcgacctcctggcctccgagcagggcgcgcccacgccctgcgcagtggcgcgggtgcgccacgcggcggacgccgacgtcgtcttcgtgcccttcttcgcctcgctcagcttcaaccgccactcccgggtggtaccgcccgcgcgggacagcgaggaccgcgcgctgcagcggaggctcctcgagttcctcgccgcgcggcccgagtggcggaggactggcgggcgggaccacgtcgtgctcgcgcatcaccccaacgggatgctcgacgcgcgctacaggttctggccctgcgtcttcgtgctctgcgacttcgggaggtacccgcccagcgtcgccaacctcgacaaggacgtcatcgcgccctaccggcacctcgtcgccaacttcgctaatgacaccgccggatacgacgaccggccgacattgctctacttccaaggcgccatctacaggaaggacggtggtttcatccggcaagaactgtattaccttctgaaagacgagaaagatgtgcatttctcatttggaagcgtagccggtaatgggatcgagcaagcaacacaagggatgcggtcatccaagttctgcctcaacattgcaggtgacactccatcctccaaccgcctctttgactccatagtcagtcactgtgttcccgtcacgatcagcgatgagattgagctcccgtttgaggatgtcctcgactactcgaagttcagtgtcatagtacgtggcgcagacgcagtcaagaaggggtttctaatgaacctgatcaaagggatcagccgagaagagtggacacgcatgtggaacaggctaaaggaagtggaaaagcactttgagtaccaatacccatctcagaccgatgatgccgtgcagatgatatggaaggccattgctcggaaggtgccgtctatccggctgaagattaacagactgcaaagattttctctgtttgagactaacaggacagatgagactctacccccatcttcttcttggctacagaatcaggctccttgattttggactagcaagctcaggctttcgccatgttttcaatctcgtagaatcaagagttgatactgaagaccaaatcttaatcgcttgactgggggcagatgttagtatgttacagctgcagacattagcggatagtaaagttgaaacactttagcatagcagaattacatatccagtggcacatcattttcttcatttttttttcttttgcttgcgattcatccaaagtgtcctcggctgcagactaaggacaatgaattttgtatgtgaagctgtatattctaggcggcaatatagttactgatcagttacagttgctgagcacttccgattcatgtccactaagtctaaagtcacgtagggaagggaggttctgcagctggagaaaag

SEQ ID NO: 156188 - DNA, 1950 bp, Zea Mays
aatgggttgacagctgcagtctccagaatccagatccgaccgcctcgatcgggacgcgagcgtcaccacagtccacagtgtcacagcgatcaaccggacgccgcgggtgaccaacccacccgcgcttagccgcttacccccgtcagatccccagatccccctcccagctagccatggccgcgccccgctctggtcgccgcccgcactgccactgctagccatggccgccgccgccgcctgccggagcccgctggtctggctcttcgcgctcgtcaccgcactcttcttcttctcctggtacctcctcctcgactccgccgcgggtccagccgccgcccgccgccccaaccagtggctccgcctcggcggcggcgggcggcgctccggtcccggtaggaaatgcgaccccgcggaggcgctgctgcgagtgttcatgtacgacctgccccccgagttccacttcggactgctcgactggaagccccccggcttcggcggcggcgtgtggcccgacatcagggacggcgtgcctgactacccggggggcctcaacctgcagcacagcatcgagtattggctcaccctcgacctcctggcctccgagcagggcgcgcccacgccctgcgcagtggcgcgggtgcgccacgcggcggacgccgacgtcgtcttcgtgcccttcttcgcctcgctcagcttcaaccgccactcccgggtggtaccgcccgcgcgggacagcgaggaccgcgcgctgcagcggaggctcctcgagttcctcgccgcgcggcccgagtggcggaggactggcgggcgggaccacgtcgtgctcgcgcatcaccccaacgggatgctcgacgcgcgctacaggttctggccctgcgtcttcgtgctctgcgacttcgggaggtacccgcccagcgtcgccaacctcgacaaggacgtcatcgcgccctaccggcacctcgtcgccaacttcgctaatgacaccgccggatacgacgaccggccgacattgctctacttccaaggcgccatctacaggaaggacggtggtttcatccggcaagaactgtattaccttctgaaagacgagaaagatgtgcatttctcatttggaagcgtagccggtaatgggatcgagcaagcaacacaagggatgcggtcatccaagttctgcctcaacattgcaggtgacactccatcctccaaccgcctctttgactccatagtcagtcactgtgttcccgtcacgatcagcgatgagattgagctcccgtttgaggatgtcctcgactactcgaagttcagtgtcatagtacgtggcgcagacgcagtcaagaaggggtttctaatgaacctgatcaaagggatcagccgagaagagtggacacgcatgtggaacaggctaaaggaagtggaaaagcactttgagtaccaatacccatctcagaccgatgatgccgtgcagatgatatggaaggccattgctcggaaggtgccgtctatccggctgaagattaacagactgcaaagattttctctgtttgagactaacaggacagatgagactctacccccatcttcttcttggctacagaatcaggctccttgattttggactagcaagctcaggctttcgccatgttttcaatctcgtagaatcaagagttgatactgaagaccaaatcttaatcgcttgactgggggcagatgttagtatgttacagctgcagacattagcggatagtaaagttgaaacactttagcatagcagaattacatatccagtggcacatcattttcttcatttttttttcttttgcttgcgattcatccaaagtgtcctcggctgcagactaaggacaatgaattttgtatgtgaagctgtatattctaggcggcaatatagttactgatcagttacagttgctgagcacttccgattcatgtcca

SEQ ID NO: 156189 - DNA, 2458 bp, Zea Mays
attataaggcatttttataggtcacgttgttggagatgctcttatccccccttcctcttttctttctcctccctcttgcggcttctctctggactcgcccctccctcctctcgtctcccaggtcatggcaaagctggagcacccgtgaaaatagcaagtgggagataaacaggaagagctagggtgaatactaactacaagtagcagtagaaggaagagagtcagtctgcccgtgactgcgagtgaatttgttgggtgtggtgtttgttgagatcacgatgatgggaggcgggctgttggtggatcagagcgtggtgttccctggcgtccacaacttcgtggatctcctgcagcagaacggcgacaagaacctgggcttcgggtctctgatgccgcagacgtcctctggcgaccagtgcgtgatgggggagggcgatctcgtggacccgcctccggatagcttcccggacgccggggaggacgacagcgacgatgacgtcgaggacatcgaggagctggagcgccgcatgtggcgcgaccgtatgaagctgaagcggctcagggaactgcagcagacccgcggcaaggactcgttggctagcggtgcgggactggctgatggctcgtccaagccaaggcagtcgcaggagcaggcccggcgcaagaagatgtcgcgcgcgcaggacggcatcctcaagtacatgctcaagatgatggaggtgtgccgcgcgcaggggtttgtgtatgggatcattccggagaagggcaagccagtgagtggtgcctccgacaacctccgtgcgtggtggaaggagaaggtccgcttcgaccgcaacggaccggccgccattgccaagtaccaggccgacaacgccgtccctggcgccgagaacgagctcgcctcgggcgctgccagcccccattccttgcaggagctgcaggacactacgctgggctcactgctctcagcgcttatgcagcactgcgagcccccacagcggcgctacccgctcgagaagggcgttcctccaccgtggtggcctaccggcgacgaggagtggtggccggaactcggcattcccaaggaccagggcccacccccgtacaagaagcctcatgaccttaagaaggcctggaaggtgagcgtgctcaccgctgtcatcaagcacatgtcaccggacatagagaagatccgtcgcctggttcgccagtccaagtgcctccaggacaagatgactgccaaggagatctcaacctggctggcggtcgtcaagcaggaagaggagctgtaccagaagctgaacccgggcgcacgcccaccggcgtctactggtggcatcgcaagtgccatatccttcaacaccagctcgagcgagtatgatgtggacatcatcgatgagtgcaagggggacgaggccggtaaccagaggacggcagtcactgacccaaccgcgttcaaccttggtgccgctatcctaagcgacaagttcctcgtgccgacgccgatgaaggaggagaccgccgacgtggagttcatccagaagaggaacgcccccgctgcagccgagccagagctgatgctaaacaaccgattgtacacctgcaacaacgtccagtgcccgcgcagtgactacagctacggattcctggaccggaatgcccgcaacagccaccagtacacctgcaagcacaaggatccaacccctcagagcaccgagaacaagccgccgtcagcaccgccacagccacaagccttccagccggccttcagccaacccaaccaggcactgaacagtctggatttcagcctgcccatggacgggcagaggtccatcgccgagctgatgaacatgtacgacaacaacttcgtgccgaacaagaacccgagcagcgacagcgtcgccgtcatggagaggccaaacgcgatgccccagcagaggatccagatggacgagggtttcttcgtacagggcaacggagccttcgacgacgtcaacaacagcatgatgcagcagcagcagcagcaggcgccagtgcagcagcagcagcagttcttcatccgcgacgacacgccattcgtgagccagatgggcgacatcgccgccagcgcgccggagttcaggttcggtcctggtttcaacatgtctagcggcgtcgactacccaggcgcggcacagaggaacgacgggaccaattggttctactgaagaataaataaacctgtagggctgagaaaagagagggagagagagagagagagagaaaagcgtcgttataagctttgggtctctccatggtgctcctgctccatggttctcctaagttgtcgagtgtcgagtctatagggtcttggtcgtataggtttctgcagtagctgcaaggcggctggaacttggaaactggtttatacttgtactccctaccggaatttggctctttgctgagtgccatattcttt

SEQ ID NO: 156190 - DNA, 86 bp, Zea Mays
gagcagcagaccacgaccagcacgcccacttgcctgcgattactttgcgccagagggcagaagccttggccctgccatagctgttc

SEQ ID NO: 156191 - DNA, 100 bp, Zea Mays
ctcaggcagagacccgatgcttgtgacaccccagtgtcacctagggtttctcttaaaaagccaaaccaaggaccattattttatgtgaaccaaagtaagc

SEQ ID NO: 156192 - DNA, 92 bp, Zea Mays
accatatccagctttatctactcctacagtatagcagaagtgcagaaccctccctgcatagctctagaacataggtctctcgctgttgtctc

SEQ ID NO: 156193 - DNA, 1761 bp, Zea Mays
gccaaaccgagctaactaagaatcgaagtagctgacaagcatttcgtcccgctttgacaggtatgtcctaattcctaaacaaacgaacgcattctcctcccaaaccaccagacatattgcagtctgccgtagaagtgaaagggtttggtgaaaaattccggccgcctcagcgtcgcgaggtgggggacgagacgaagccagagcgccccaaacccaaaccccagaaccccgacatagggttacgccatcgccatgggatctgttgcctccgcagcagcgccaccttctcctcactcagcgctaccccaggagggcgcgccgccctatggccccgggctcgccgggatcctcccgcagacgtcagtgggagaggagaagaaggaggagaaggtggactacctcaacctcctctgccccgtgcccttcgaggagatccagcgcgaggctctcatgtctttgaagcctgaactttttgaaggattgaggtttgacttcacaaaagggttgaatcaaaagttttctcttagccacagcgtttttatgggctccttagaagttccagcccaggggtctgaaactattaaagttccaactgctcattatgaatttggtgccaattttttagatccaaagttaatgctcattggaagggtgatgacagatggaaggcttaatgctcgcgtgaaatgtgatttgacagacaatctgatgctgaaagtaaatgcacagcttacccaagaggcacattactcacaaggaatgtttaactttgactacaagggaagtgactatcgagcacaattccaaatagggaacaatgcattctatggtgcaaattatattcagagtgttactccgaacctatcaatgggaactgaaatgttctggcttggtcaccaaaggaagtctggaattggttttgcctgtcgctataacacggacaaaatggtgggcactctacaggtcgcaagcactggaatagttgccttaagttatgtccagaagatttctgagaaggtttcccttgcgtctgatttcatgtataaccatatgtcaagagacgtaacttccagctttggttacgattacttgcttaggcagtgccgtctaagaggcaaaattgactcgaatggtgttgttgcggcatatctggaggagaggttgaacatgggtgtcaactttcttctatctgctgagattgaccattgtaagaagaactacaagtttggtttcggaatgaccgtaggagagtaattctgctaaaacaattgctgagaagagcacatgaggactttcgcagtctgctttgcattgtatgttaagatacttcaggtctcagttttgattgatcaggttctgccccgtcgaaaaaaatactagctgttgctgctttacagggttttgtctcagtgtattggtggttgtttattttcagctacttgagcatgggggccatgattctttgttcatcttggatgtaactagctgattggtgttccaatgatgttgtatttgcagaacgattttttccttttaaatcaccaacaaccaccacactaggctttttctgtaccatcatggacgggccacaagattttacagttcaaagctttggcacttgccatatttgatgtcgtcttgtgcttttgctcatccatgtaagtcagaaatctcagttcatatcagtgcttttgctcatccatgtaagtcagaaatctctgttcatatcagtttttttattaaaaaaagtttccgctgcat

SEQ ID NO: 156194 - DNA, 2009 bp, Zea Mays
gccaaaccgagctaactaagaatcgaagtagctgacaagcatttcgtcccgctttgacaggtatgtcctaattcctaaacaaacgaacgcattctcctcccaaaccaccagacatattgcagtctgccgtagaagtgaaagggtttggtgaaaaattccggccgcctcagcgtcgcgaggtgggggacgagacgaagccagagcgccccaaacccaaaccccagaaccccgacatagggttacgccatcgccatgggatctgttgcctccgcagcagcgccaccttctcctcactcagcgctaccccaggagggcgcgccgccctatggccccgggctcgccgggatcctcccgcagacgtcagtgggagaggagaagaaggaggagaaggtggactacctcaacctcctctgccccgtgcccttcgaggagatccagcgcgaggctctcatgtctttgaagcctgaactttttgaaggattgaggtttgacttcacaaaagggttgaatcaaaagttttctcttagccacaggtaagatcattacataagggcagacccagggccagaggctcccacatgagtgtggcctggggaagggataaactgaaccaagtatccccccgcaattgcggagaggctgcttcgaacccgtgacctggtgattcagtgagacagctctcaccactgcaccaggcctgcccactaagatcattacataaatgttagcaaatatcttatgttatattttcccgagtatatcctaacaacatcttccacagcgtttttatgggctccttagaagttccagcccaggggtctgaaactattaaagttccaactgctcattatgaatttggtgccaattttttagatccaaagttaatgctcattggaagggtgatgacagatggaaggcttaatgctcgcgtgaaatgtgatttgacagacaatctgatgctgaaagtaaatgcacagcttacccaagaggcacattactcacaaggaatgtttaactttgactacaagggaagtgactatcgagcacaattccaaatagggaacaatgcattctatggtgcaaattatattcagagtgttactccgaacctatcaatgggaactgaaatgttctggcttggtcaccaaaggaagtctggaattggttttgcctgtcgctataacacggacaaaatggtgggcactctacaggtcgcaagcactggaatagttgccttaagttatgtccagaagatttctgagaaggtttcccttgcgtctgatttcatgtataaccatatgtcaagagacgtaacttccagctttggttacgattacttgcttaggcagtgccgtctaagaggcaaaattgactcgaatggtgttgttgcggcatatctggaggagaggttgaacatgggtgtcaactttcttctatctgctgagattgaccattgtaagaagaactacaagtttggtttcggaatgaccgtaggagagtaattctgctaaaacaattgctgagaagagcacatgaggactttcgcagtctgctttgcattgtatgttaagatacttcaggtctcagttttgattgatcaggttctgccccgtcgaaaaaaatactagctgttgctgctttacagggttttgtctcagtgtattggtggttgtttattttcagctacttgagcatgggggccatgattctttgttcatcttggatgtaactagctgattggtgttccaatgatgttgtatttgcagaacgattttttccttttaaatcaccaacaaccaccacactaggctttttctgtaccatcatggacgggccacaagattttacagttcaaagctttggcacttgccatatttgatgtcgtcttgtgcttttgctcatccatgtaagtcagaaatctcagttcatatcagtgcttttgctcatccatgtaagtcagaaatctctgttcatatcagtttttttattaaaaaaagtttccgctgcat

SEQ ID NO: 156195 - DNA, 1117 bp, Zea Mays
gccaaaccgagctaactaagaatcgaagtagctgacaagcatttcgtcccgctttgacaggtatgtcctaattcctaaacaaacgaacgcattctcctcccaaaccaccagacatattgcagtctgccgtagaagtgaaagggtttggtgaaaaattccggccgcctcagcgtcgcgaggtgggggacgagacgaagccagagcgccccaaacccaaaccccagaaccccgacatagggttacgccatcgccatgggatctgttgcctccgcagcagcgccaccttctcctcactcagcgctaccccaggagggcgcgccgccctatggccccgggctcgccgggatcctcccgcagacgtcagtgggagaggagaagaaggaggagaaggtggactacctcaacctcctctgccccgtgcccttcgaggagatccagcgcgaggctctcatgtctttgaagcctgaactttttgaaggattgaggtttgacttcacaaaagggttgaatcaaaagttttctcttagccacaggtaagatcattacataagggcagacccagggccagaggctcccacatgagtgtggcctggggaagggataaactgaaccaagtatccccccgcaattgcggagaggctgcttcgaacccgtgacctggtgattcagtgagacagctctcaccactgcaccaggcctgcccactaagatcattacataaatgttagcaaatatcttatgttatattttcccgagtatatcctaacaacatcttccacagcgtttttatgggctccttagaagttccagcccaggggtctgaaactattaaagttccaactgctcattatgaatttggtgccaattttttagatccaaagttaatgctcattggaagggtgatgacagatggaaggcttaatgctcgcgtgaaatgtgatttgacagacaatctgatgctgaaagtaaatgcacaggtagatggatcaaagagtttaggttcagtggttcatcctttccttcgttgatactttgctttccttattctactgatggttgttctcttcccagcttacccaagaggcacattactcacaaggaatgtttaactttgact

SEQ ID NO: 156196 - DNA, 1071 bp, Zea Mays
atgcacgcaggacgagccggcgcaaccctccacgcacttctcgacgcactggtccacccgctccgccgcacgctgctgcatcagccggtccttctcctcgaagtacaccgacgccgccttctccgccgcgcgttccttcgccgcgcgctcgtcctcgccgcccagccggacgtcgacgtgctgaccttggcccagcgtcagcttctccttgatcgcgcccgtcacgttccccagcgcccccagcagaccttgtccctgctccctgcgaatgtcgtgagtgctggccgtctccctagccttgtcagcggcggtctgtgctgtggctcgggacctgtccctggcctcctgcgcggcctccctgctggcgtcggtgtactcgcccgccttctgcctggtcacgtctctcgcctccctcgccttgtcggcggtggcgtccctcgtctcctgggccttctgcatggtcgcgtccttggcctccctcgccttgccggcggtggtgtccgcggcctcccgcgccttgccggccgccgcgtccttgtactccccgagcttgttcttggtcgcctccgcggtctcgctcgtcttctgcgccaccgcgtccttggtctccctcgccttctccacggcgctgtccttgtactcgcccagcttgttccgggtggcctccgccgtctcgcccgtcttacgcgagacgctgtcgttggcctcccgggccttgtcggcggtgtagtccctgtactcgccgagcttgtcgcccgcggtgtgcgccgtctgcgaggtcttgtccacggtcgcgtccttggcgccaccgaaggtgcggcccacggcgctggccaaggacctggcgccctcctgcacgctctccaggatgccgccgccaccggcggcaccgcggtcggcgcgggagcgcgcgatctcgtccgcggccgagcgggcgttcacctccgccttctcgaggtgctcgtcccgcgcccgagccagctcctccacggcgcgccgcgcgtcggcctcggcgcgcgcctcacgcgtgttctgcctcgatgccatagcggtcggtcagtgactctgtag

SEQ ID NO: 156197 - DNA, 303 bp, Zea Mays
gggaagaaggatgaggtggtctcagtcctgactgctggccaatgagaacgtcatgtgcagtgcagctgatggatcccttctccctgttcgcgcagaagcagcacatcacatattacatttggggtggtcttgattggtctagggatggaggtagcagagttgtgttaatcacagaaccagggacagacagtcacgttttgtactgatttgcgatggcagtacctgtagttgcagctgcatgccttgcatacctgcagtctgccgttctcttttgattaaaagaccgcagtcctcttttgattt

SEQ ID NO: 156198 - DNA, 731 bp, Zea Mays
gctcgcacactcggtccgcccgttcccaccctccagggtcgccaccgcttgcagttgcagctagcagagccgactgagcttgacacgcagtcagcgagtccgacgacgccatggacgccgtctccagcgctggcgtggcgccgcagagcgcgttcctatcccactcctccttcgccgacgcggccatcgcgcgcgcgctccactcctccctctccgatcacgccccggagccgcccgccacggcggcggcggcggcgatgctgatgcacggcgccgtggcagggacggactgtccccccgcggcagcaccgtcgccatcgcagtcctcgtccgcgcggtgccgggtgggcccggcggccgggcgcgcggggaagcggcgtcggccgcggccgtccaagcgcgcgcccaccacgtacatcagcgccgacgccgccaccttccgcgccatggtgcagcgcgtcaccggcgccgacgaggacgacctgcagccgcagcagcaggacagggacagcctcggcctcctcctgccgcacctcggcgtcgagcagttcctacaggcggcgggacccgcgtcgcccgtcgctgctgctgctgctgcaccgtacgcgacggcctcgcccgccgcggcggcgtatcagcaccagcagccgctgttcccgacgctggactcgtggaacgtcatgtacgggaagaaggatgaggtggtctcagtcctgactgctggccaatga

SEQ ID NO: 156199 - DNA, 101 bp, Zea Mays
gcgaagggttatgaactgttaaacgtatactgtaactcacagctggtgttgtcttctataatcctgtgttatttagtgaatcactggtacggaagcaaatt

SEQ ID NO: 156200 - DNA, 726 bp, Zea Mays
cacaactgaattgtcgaaaagatgtaaatccccaaccagtttatcaggagagtgcactctaaggatagagtgatgatgctgggagcgtgcatcaggaggcgacgatgataaagaaggcatcgaagactttgtgctgtctttacgggctgagctactacctgctggttcgttgaaataagcagcatcaattggcgcatcttgggcttcatgtcgtctttccttgccaggcaatgaaacagctccatactctgcagaagtacctttttccctacttttccagctactgatcttccaatgaacaagcaaaagcgcaataatcccagtaacaaatacaacaacacagataatcaatgcatatagaatcccacgcttcaagccgtgtcttgcctcatctgatttgtcagaaccatttaatgattcagagcgaggaagaacgagcaattcgttccctggatggaaagatgaatctgggaatttcagtaaattacttggaacagagccagacaggtagttgtaggaaacattaaattcgaccagatcatcagggaggccatcaggtatgctaccattgaaattgttgcttgataagtcaatgtataagagattcttaagtttggtgattgttcttgggatttcgccagtaaagttgttctgacgaaggttcagcaatgtcaacgcgctcaaatcaccaatgcccataggcagtgagccgtgcaaaaaattgct

SEQ ID NO: 156201 - DNA, 543 bp, Zea Mays
atggcgtgcaatcctcacctgccaacgggagacgtcgtagacctggccgcggatggcgatgaggatcagcttggcggggtccttgccgtcgtacgccccgagctgctcgagcgtgacctcgcccacatccacggggtcaggatacacgaaaggcatcggctcctactcttcctgtgccttctccccctcgcgctgctgctgaggcggagcgaggatggtggcggcggccccgggcttgaggcccgtgtagacctgcagggcctccgcgatctccattagggttcgctggttgccaccgcgagggcaagcctacttgggttttgggaggtgggagtggaaccgtggaagaaggcggggggtttgggatttcgcgcgcgtagagccggcgacggaattggaagggaaaggccaatccgggcggcagagagtagcactcgagaagcggcagacgacgaaaaaagtggcacgctgcggtgggcgtaactgcgtagccagccgcaactggcgccgggcccagcagcgttgttgggctgggtcatcagg

SEQ ID NO: 156202 - DNA, 768 bp, Zea Mays
atggatctggtgatgccatgttgccgacgacgaggcccttcttatgcaaatgatgtgtccgtcctctggctggctgcctggttcgcgaccgctttcgtctccgtccgcttggactacggcgtcgtggagacggccgagccagtggtggtgctggcgccccgaccgcccgtgcttgccatccatccgcaacgcagcgtggattatggcgccagggggggctaccagattgtactggaccgagccaagagaagggagagacggacgggggtccgtgctccccggaacacaccacgtgagcagacgtgcgctcccctgccttccgctctgcggctctgctccaccggagcccggactggagctggagggaggagacaaggaccacaaaaagagtttggtgcgcaatgccacgacctgggggccaaaggagccggaggattaaaacaaccatcaatcaaccgtagacgtcatatctggaaagcgagagaatctggcaaaaagaatggacgcggtgctgatgctgttttccgacaacgctacaaaaaaagctcgtcggagcttaggccgtccaaatccacagtgaggtcatttgggtcaaatgacatcaatgccagggcccgggttgcatccctcccagcaaacaaggaatatggtcccctcagggccataaaagagcctgaggggaaaaaaatatcagggaacacaatcatgactctgaagtctgaacaaggggagaaaaccacgttttatatatccgctattgacggatga

SEQ ID NO: 156203 - DNA, 264 bp, Zea Mays
agttccaacttccaagcaactctactcgttcaggttgagctgaacacattatgttcaaacttacagaaatggatagcatcccacagagcatatttgcagagcctagattcatggctactcaagtgtgtgaagtcactatatacaaaggaagaagaagagttccaggaaaaagaaggtcgaagctgatccaaataacaaagtagcgcccatatatttaaaaactgtgagagctggataagtttgttggatgatttaccaacggaa

SEQ ID NO: 156204 - DNA, 1727 bp, Zea Mays
ccttctcctggcccggctgatccgtctgcgtgtcgtcgtctatataagcccagcccttcctcctctcccgccccacctcatctatcgcactcttcttccttccttccttctcccgccttctcctcccagcactcttcttcgaacactgccacatatacttagtcatcatcgtccagcagcgcagcagcccgccgctcaacgtctcacaaggggatcgtcggtcggaatctgatggacatggcgcacgagagagacgcgagcagcgaggaggaggtggtggccggcgagctgcggcgcgggccttggacggtggaggaggacctcctgctggtcaactacgtcgccgcgcacggcgagggccgctggaactcgctcgcccgatcagcagggctgaggcgcactggcaagagctgccgcctccggtggctgaactacctccgccccgacctccggcgaggcaacatcacgccgcaggagcagctgctcatcctggagctgcactcgcgctggggcaaccgctggtccaagatcgcgcagcacctccccggccgcaccgacaacgagatcaagaactactggcgcacgcgcgtgcagaagcacgccaagcagctcaagtgcgacgtcaacagccagcagttcaaggacgtcatgcgctacctctggatgccccgcctcgtcgagcgcatccagaacgccggcgccgcgggggctccgcagcagcacaaggcgggcgccgcggacacgccgctctcgtcgccgtcgtcgtggcagcccggcggcggcggcggcgccgacgacggcctctacgcgtcgccggacctccccgccacggacgcctgctgctggcctcccgcagactgctacccagccgccgccgccgccgccgtcggtgacggtgaccatcatcatcagctactgatgaacaaccccgccgccgtgccggagctgtcggcgagcactaccacggccgggtcggcctccccgtcatcggattccggcgcgggcgcacagccctgctggcttgcgccggtgggtggcgcggagtggttcaccaccacctgcgacgcctccagcagcaccgccgccgtcctcctggccggacaccagcagcagcagcagcagcaacaatggtcgtgcctgctcggggaggcgacgtgggcgtcgtcatccgagctccctgatctgggctgcgtcgcggacttcgagatcggcagcttcgacgtggagagcatctggagcacggacgacagcttgtggttcacgcaagcgcagggcgtgtgaattgaacccacacgcgcggcgacatggaaatccacggcgtcaaattaaaccggtggtggatcggacaccgcgcacgtcggggactcctcgcctagcgaaggtgccgagagagctagcagagacacgggttagaagaaggagagagattattttggaggaaccgaagacgacgcgggacggctactctttgctcggttcaagatgcttgctgttcttgcctccaggacttttcttccgctccagttctactccgtttcctagtcttgattccctagcggcttgtagggtatatacgccaagaaaattccagaaaaggggaaaaacgtagctgttgtagtagtacatatatactagtagcgttaagtgtttgtacgtgccgtctaattttacacattctttttgagtaattaagttcaatacatatgaacagtgaagttactgatgac

SEQ ID NO: 156205 - DNA, 1470 bp, Zea Mays
ctatcctaaaccccaccgaccggataacaggacactggcactgccattcccgtttcctcgctcgaacacacaccgaagagagagacagagcgagagaggatggcgtccctggcgcagcacgtcgcgggcctaccgtgcccccctctatccggcgcgtcgcgccgtcgccccgcggcgcagaggcggcctccgtcggcgcttgtgtgcggtacctatgcgctgaccaaggacgagcgggagcgggagcggatgcgccaggtgttcgacgacgcctccgagcgctgccgcaccgcgcccatggagggcgtcgccttctcccccgacgacctcgacaccgccgtcgagtccaccgacatagacacggagatcggctcgctcattaaaggaacagtatttatgactacctcaaatggtgcatatatcgacatccaatccaagtctactgcttttttgcccttagatgaggcatgtcttcttgatatcgataatgttgaagaggctggcattcgtcctgggttagtagaagaattcatgataattgatgagaacccaggtgatgaaactttgattctaagtttgcaagcaattcagcaagaacttgcatgggaaaggtgccggcaacttcaggccgaagatgtcgttgtcacgggtaaagtaattggtggaaacaaaggaggtgtagtagctcttgtggatgggcttaagggtttcgttccattttcgcaagtgtcatcgaaaacaaccgccgaagagctgcttgagaaagaattgcctctgaagtttgtagaggtcgatgaggaacaaggcaggcttgtcctcagtaatcgcaaggcaatggcagatagtcaggcccagctaggtattggatcagttgtcttgggaactgtagagagcctaaaaccttatggcgccttcattgacatcggtggaatcaacggccttctccatgtgagccagattagtcatgaccgtgttgcagatatctcaacagttctgcaaccaggagataccctcaaggttatgatactgagccatgaccgtgaaagaggccgagtcagcctttctactaagaagcttgagccaacacctggtgacatgatccgcaatcccaagcttgtgtttgagaaggctgatgagatggctcagatattcaggcagagaatagctcaggcagaggctatggctcgtgctgacatgttgagattccagccagagagtggattgaccctcagttcagagggcatcttaggaccattgtcgtcggatgcaccttcggaggattctgaagatcgcacagatgaatagaggcagttgacgaagtgcaccgggtttgagatatgggatggcagttcgtcaagctcattttcaatcgggtgggggaggcatgacgagatcattttctgttcagatcgtgaggtccgttccagttattatccatttggattaggaaatagaaaaagtaacagggtt

SEQ ID NO: 156206 - DNA, 1206 bp, Zea Mays
atgttccgcgatggccacacacacacaagctatagcgcgcggccaccggtacggtgcgcggtgggggaaggccagagcacgggatcacgcggccgagggcgcggtgacgtacttgaccgtgccggcctccgccagggccgcgcgaagcggcttcttggccaccgcctccacctcgtcgtcgtcgtcgggcgagagcgagggcaggcccttcaagtccagcgtctcgtcgttgtagatgtcccaccacttgttcaccagggcgttgatgtcctccctgtccatgttcgcctccttgcccgtgaacctccacggcttggaccccgccgcgcagtagtgcacgaccttcaccttctccagctgcacgttctcggggtgcctccagagcatggccagcacgaggttgtacacgttggggatcggcctgtactgatccctgaagaacatgttcaggaagtcctgctctgcgaagggggtgggcggagtcacgcggagggtgtcgaggagcgccttggcggtggccacgctgggctcgtgcacgaacatgccggcgttgaagtagagcgacggcggagggcccagctcggcggtcgccgctggccacgccaccttgtccgggcactgctggcagtagccgatcctgtactgcggggtgtggctccacgtcttctcgcagaagcagtccatcaccgcgtagaagtaccccttctcgagctcgaacaggccgtcgatgttctcgaacacctggatgtccgcgtccaggtacaccatcctctcgtactccacgaactcccagatgcggagcttggagtagttgatgacgtagtacgccatggcgaactgcgtctggttctcaggcgggtacacgggctcgatctcgcggacgacgcagccctgcgagacgaggatgcggcggtgggactcgggcacgtcgggcagcaccgccaccaccagggggtaggccgagcggaccttgcgcaggcccttggccagccccaccacgcccttccagtagtcgccgtcgcccgcaaggaacgtcacgtacgccctcgtggcaggcttcaccgccgccgccgccgccgcggccttggcggtcatcttggctgtcatcagctcgggagccatctcgcgctgtcgggttctcgggggcggggctacgagcaagttctggtcgggactaggaggcctgtttgttggcggttggtttga

SEQ ID NO: 156207 - DNA, 1405 bp, Zea Mays
tgtagatgccggacatgacaaccaagaagggatggttagattaaattctaggatgtcacaaatagagggcattggtgctgcaaacagaatattctaccttgctgttccacaagaggcactccttgatgtagcattgccactggctgacggtgcccaaactaagcaaggctggaatagaataattatcgagaaaccatttggctttactggtttgtcctcactgcgggtaacacaatctatgctgtcaaggtttgaggagaagcaaatttacaggattgaccaccttctggggaaggatctgatcgaaaatcttactgtcttgagattttctaacttggtgtttgaacctttgtggagtcgaacttacatacggaatgtgcaggtcattttttctgaagaaacatcaaatgaaatacaagggaggtactttggaaattatgggataatccgtgacatagttcacagccacattcttcaaacaatagctctatttgctatggaaccacctgtaagtcttgatggagaggatatccgagatgaaaaggtgaaggttctcagatcaattcggaaagtgaaccttgatgatgttgttcttggtcaacttaaagatatgtctggtaaagttgacagatacacaaaatccatgataccaacctattttgctgctgctatgtacattgacaatgcacgctgggatggggtaccattttttatcaggacaggcatgggacttatgacgaatagagcagaaattcgaattcagtttcgccatgtccctggtaatatctaccgtgaacgctttggccatgacatagatctcgacacaaacgagctggttctacgcgatcaacctgaagaagcaatcctgttgaaagtcaacaacaaggtcccagggcttgggctccagctggatgcttcagaactgaacctgctttaccgggataggtacaacaccgaggtaccagattcgtatgaacatcttctactggacgtgctagatggagatagtcatttattcatgcgcagcgacgaactggctgccgcatggaatgtgctcactccgataatccatgagatagatcagaacagagtagttcctgagctctacgaggctggggacagagggcctatcaatgcttaccatctcgctgctaaacatggggtgcgatgggatgacgactggtgagtcgatacatggcaaagattctcgatgcgcaacgagattcattaccaatttttgtcgttgtatcgcagtcagatgtacaatatgccttctgtaatcggcctgatcaaggactttcaaggagacatgcctttcaaggagatatgcaaacatggtttctttcctgtcctgtagactgtagcactgttgattcaagttggaaaaagaaaaaaaggagaaaag

SEQ ID NO: 156208 - DNA, 1863 bp, Zea Mays
ccagctcttcctactctttgctactcgtcttcgctgatttctgccttaattccatcccttccctgcctagaacttgctttgcttcaccccatcacagcttttggtgcctcgtcatcggcgacctaaccgccggcgaccagataaactaagccaggcccttcgctccgaaagtcgtctctcgtagagagcacttgctcacctgctcctcgccctcctctgctggcagtggacttgcgcggagtggagatccatccggacctggttcgatttcttcatctcggttgcttctctgtccagtgggtggatcactggattgtgggttgtgctaactgcaggctggcttgtcagcctatcataaggaaagtgaaaaagagacaacaaagcaatttgttgtctcattcttaggagctggcgagcactcggcatggcagatgctagttcgaggactgacacctcgactgttgtagacatggatgataagaatcaaaggattattttacgaaatttcaacttctctctgtgggacatctaatggtacaggtcttggagagatgcatgtaaagtgttagaaaacggacagagtggagccatggtcccggcttctaattcatctgaccggtctgacagatctgacaaacctatggaccagaaggttttacgacggcttgcccaaaatcgtgaggcagcaagaaaaagccggctgaggaaaaaggcatatgtgcaacagctagagagcagtaagctaaaacttgcaagcctggagcaagaactccagaaagctcgacagcagggaatcttcatttctagttctggagatcaaactcatactatgagtggaaatggagctatgaccttcgatttagaatattctcgatggcaagaggaacaaaataagcagataaatgagctgaggactgcagtaaatgctcatgcaagtgatagtgacctccgtcttatagtcgatgggataatggcacattatgacgagatattcaggctgaagggcattgctgcaaaggctgatgtgttccatatactttcaggcatgtggaaaacatctgctgaaaggtgcttcttgtggcttgggggtttccgttcgtctgagcttctaaagctccttgtgaatcagcttgagcctctaactgagcagcaattgatggggctgtccaatctgcagcaatcttctcagcaggctgaggatgcattgtcacaaggaatggaagcattgcagcagtccttggcagaaacgctggctgggtcccttggtccatcaggatcttctggaaacgtggcaaactatatgggtcaaatggctatggccatgggaaaacttggcacactcgagaatttccttcgccaggctgacaatctacgacagcagaccttacatcagatgcaacgtatcctgacaatccgacaagctgctcgtgcgcttcttgcaatccatgactacttttcacgtttgcgcgcactgagttctctttggcttgctaggccacgagagtaacatcacccccgttggggtcactcgatgaactgatctgtgaatgtgggactgctggctgcaaactcgcaaagcatttgcagatgactggaggatcagtcctctctgtacaagttgtattaacatcttctggtctcatattgtgctccagtgttgtacaatttagggaaaagcttggattaacttgtaagttatcatgaatttgttattggcatattgtacaattgtattagcaataaaaatagaagtacataagtgctggaagcctggaaggatatccagaatctatattggttggaaacgagcagcagaagattgttatagattgttatgttgctttgaatattcggttgtaagtg

SEQ ID NO: 156209 - DNA, 1788 bp, Zea Mays
ccagctcttcctactctttgctactcgtcttcgctgatttctgccttaattccatcccttccctgcctagaacttgctttgcttcaccccatcacagcttttggtgcctcgtcatcggcgacctaaccgccggcgaccagataaactaagccaggcccttcgctccgaaagtcgtctctcgtagagagcacttgctcacctgctcctcgccctcctctgctggcagtggacttgcgcggagtggagatccatccggacctggttcgatttcttcatctcggttgcttctctgtccagtgggtggatcactggattgtgggttgtgctaactgcaggctggcttgtcagcctatcataaggaaagtgaaaaagagacaacaaagcaatttgttgtctcattcttaggagctggcgagcactcggcatggcagatgctagttcgaggactgacacctcgactgttgtagacatggatgataagaatcaaaggttagaaaacggacagagtggagccatggtcccggcttctaattcatctgaccggtctgacagatctgacaaacctatggaccagaaggttttacgacggcttgcccaaaatcgtgaggcagcaagaaaaagccggctgaggaaaaaggcatatgtgcaacagctagagagcagtaagctaaaacttgcaagcctggagcaagaactccagaaagctcgacagcagggaatcttcatttctagttctggagatcaaactcatactatgagtggaaatggagctatgaccttcgatttagaatattctcgatggcaagaggaacaaaataagcagataaatgagctgaggactgcagtaaatgctcatgcaagtgatagtgacctccgtcttatagtcgatgggataatggcacattatgacgagatattcaggctgaagggcattgctgcaaaggctgatgtgttccatatactttcaggcatgtggaaaacatctgctgaaaggtgcttcttgtggcttgggggtttccgttcgtctgagcttctaaagctccttgtgaatcagcttgagcctctaactgagcagcaattgatggggctgtccaatctgcagcaatcttctcagcaggctgaggatgcattgtcacaaggaatggaagcattgcagcagtccttggcagaaacgctggctgggtcccttggtccatcaggatcttctggaaacgtggcaaactatatgggtcaaatggctatggccatgggaaaacttggcacactcgagaatttccttcgccaggctgacaatctacgacagcagaccttacatcagatgcaacgtatcctgacaatccgacaagctgctcgtgcgcttcttgcaatccatgactacttttcacgtttgcgcgcactgagttctctttggcttgctaggccacgagagtaacatcacccccgttggggtcactcgatgaactgatctgtgaatgtgggactgctggctgcaaactcgcaaagcatttgcagatgactggaggatcagtcctctctgtacaagttgtattaacatcttctggtctcatattgtgctccagtgttgtacaatttagggaaaagcttggattaacttgtaagttatcatgaatttgttattggcatattgtacaattgtattagcaataaaaatagaagtacataagtgctggaagcctggaaggatatccagaatctatattggttggaaacgagcagcagaagattgttatagattgttatgttgctttgaatattcggttgtaagtg

SEQ ID NO: 156210 - DNA, 724 bp, Zea Mays
gtagctactgctattactatcttttgggtgaagtgaatcagatttttgtttaaatgaactttgtaccgtttaaattactgatgcatagttttgcaaacttaaacaatatgtatcttggatttaaatgaactttgtactgcagttttaacagacatattttggcacctggtaatgcagtttctgttttactaatagcaactcctattagtatatgaatcagtgaccaaaacatgtgatttgagcaactaatgtgatgattatagttgttgtctgcagatttccccatgttaaactaatttgcagaaaacaactatatgatacctattgtttttattgttatgatttcttcttatttgttgtccaattacaaatagaaattgtgcaggatcgaaaggaacttcaacctgaaccagcgagagtatcgatacaaagactgtttgaaatcttctagaaatgacatcgaatggaacttcaagctgaacaagcgaaagcatctatacaaagactgtctgaaatcttctaggtaacaacagccatgacttcgaacatattgtattctaccttttcagattttcttgtttttaatggtatcacaattattgtgctattgtgaataaaccacttgtaatgctgttttgctcagttttttcgtgttgtacataaatcattttatatttatactgcgtcacaataatttactgatgtgcaaatatgatattgcttt

SEQ ID NO: 156211 - DNA, 2214 bp, Zea Mays
tcgcggttctaccgctccgctcatgcccgcggccgaaccctcccccgcatcccacagccgccgacgctcaccttccatcctccccgcagcccgcagccgccaacgctcaccttccatccccgcggatcccacgctccctcgggcgctccttccgcgcccgcccacagatctcccatcgacgtcgatgctctgcgattaagcccagctaaactcgcgcggtttggctttggcgcagcgctggagctctcgagacgctcgcttggcgccgaagcggacgaggagcagttgtcggcgtccgctgccgtgtcctcagctccgccatctccttctccagctcgacgatcctctgcttcctgctcgtgaactccagcgcggcagcgtcgagctcggcgcacagccacccgttctcggcttccacccgctctgcggtgtccctgcacctctggagctcggtcttcttggccgcgagctcggcctccaggactgcgccaaagccaaactgctactgctacaactccgccgtgctctccatggaagcttctgcgcctagatcaacagcgttcggccgctggtgcccggcgctaagctccacgccgtcatcgagcgtggcacagtgattccgtcctcgacctccccttcctctgcaacatgtccaggaccgggaactagtagtgggaggatcaccgtccaccgtcgagcgtctgcaaggcaaatcagatcaaccaccacatcggagtgaaaagtctgcgccactctgcctcacacagccaaaaaatgtatcaggtgattaagaaccatcccagctcattgaagctttatgagcagaaactgctaggaacgagtgaagtcatgaaagaagatgtccagaggatccatgacaaggtgaaccgaatcttgaacgaagagtttgctaagagcaaagactacgttcccaacaagagggattggctctcagcttactggactggctttaagtcaccagagcaaatatcacgtgttcgcaacactggagtgaagcctaaaatactgaaacgtgtaggtcaggcaattactacactgcctgaaaacttcaaaccacatagagcagtgaagaagatttttgagctgcgtgcagctatgatagagagtgctcaaggaattgattgggctgttgccgaagccctggcctttgcaacacttatagtggaaggcaatcatgttaggctaagtggacaggatgtggaaagaggaactttcagccatcagcatgcagttctgcatgatcaggaaactggagcaaagtactgcccacttgaccatgttgcaatgaattaaaatgaggagctatttattgttagcaacagagactagttggagcttcattgttgatttttgcaaataagcaagacatgcaaggagctctaaaaccaactggaatcacgaaggtaagcgaacttcagtcatttattatatgcattagagacatgttttcctatctatgacatcatttttaacttgtactatgtttttccggtcctcatggttgccaagattttacttagttcgatgtgggagcaaaaggatatgccaaattgaatgtagtttcatcaattatgctcaattatggatgttcagaggcatccaatttcagtgtgtactgcaatacttgggtccacctgtacttggtagatgttctgcattttgttttcttataaattagatttggcttccattatgttgttctctttcggaacagtcactctctgatagctcatcgccgcctggttctcccgccggtacacaaggtttaagaagcgctccgcggacttccacggccgcgccgccgatctcgtccacggcctccggggcacggcgatgcccaggagacaggccctcaaggaagagcagtgcagagaagagaaaggtatctcgactattccaaagcacaagtatgcatccaaagcctgttccccaaaaggatcgaaaggaacttcaacctgaaccagcgagagtatcgatacaaagactgtttgaaatcttctagaaatgacatcgaatggaacttcaagctgaacaagcgaaagcatctatacaaagactgtctgaaatcttctaggtaacaacagccatgacttcgaacatattgtattctaccttttcagattttcttgtttttaatggtatcacaattattgtgctattgtgaataaaccacttgtaatgctgttttgctca

SEQ ID NO: 156212 - DNA, 1072 bp, Zea Mays
ccgcggctgttgacggcgacggcgccgacgtggaggacggcggaggggactcgtcggagcgcgacttcccatcgtacggtagcggaggaaagaatgtatatgttgaaggatcatgggataactggaaatcaagaaaagccatgcaaaaatctgggaaagatcattctcttttgctggtactcccagcaggagtttaccgatacagatttgttgtagatggagaaaggagatgtcttcctgatctcccctgtgaaatcgatgcaatgggcaatgcggttaaccttcttgatgttaatgattatgtccctgaaagtgttgagagcgtggcagagtttgagccacctccttctccagactctagctacagtttccaggcacctgaggacaaggacttcgccaaggagcctcctgttcttccatctcaactccatctcggtgttcttaactcacagaactcggaagaaagctgtgcgcggccgcagcacatagtcctcaatcacctcttcatagagaagggctggggcgcccaccctctggtgtctctcggcctaacccacaggttcgagtccaaatatgtaacagtcgtcctgtacaaacccatcgaacgatagcaatagcccgcgcctgaagagcggaagttgacaactcactgtgggagcagcgatgaacagcgccgaagtggtacatgcttgtaaaagcggttgaggtccaggagtatttttttcccgtgcccttagcttgcacaacctgtggtactctggtggttagctgtacatgctgcgctgtcatgatggttggtttgctgttacagagagccaaggcgtccttgattccgaagtacacgtacgtttgtcgtcgtcgttcctccccccatcccatcccaggaatgaaatgtttgtaggtgtcactgaaaaccgtggaaatccacagaaatgctaggagacagagattagaccatgtgattcctagatttttgtttgttttttttttggctggtcaagaactcaagacgatgttgttgttatgaaatgaactcaagaaaaaatacaagtgggatgctgtgggttgtctt

SEQ ID NO: 156213 - DNA, 1471 bp, Zea Mays
acgagccccgcagccccgtccctctcttcttctcccccgccccctttttcctagcggcacggcaccaggcccgccctggtggcatcttcgtaatttcgcgcctcttctccgccacggcggctgggggtgagaggaggtatgggaaacgccagcggccgcgacgaggacgccgcggctgttgacggcgacggcgccgacgtggaggacggcggaggggactcgtcggagcgcgacttcccatcgtacggtagcggaggagccaaccacgtgcggcgcgcgtgctcagtgggcgtcgtagggggcggcgccgccgccggatcgccacccgggagccccggtcactcgctctcgccgcggatgttcgtgccccagacccctgtacctccactgcaacgggctgctgatgtaaccccagtgttcaaccagatattgatggatgaacaagaagaatacgatggcccccctcaaaaagaaattcctgctttaattgtctggacccttggaggaaagaatgtatatgttgaaggatcatgggataactggaaatcaagaaaagccatgcaaaaatctgggaaagatcattctcttttgctggtactcccagcaggagtttaccgatacagatttgttgtagatggagaaaggagatgtcttcctgatctcccctgtgaaatcgatgcaatgggcaatgcggttaaccttcttgatgttaatgattatgtccctgaaagtgttgagagcgtggcagagtttgagccacctccttctccagactctagctacagtttccaggcacctgaggacaaggacttcgccaaggagcctcctgttcttccatctcaactccatctcggtgttcttaactcacagaactcggaagaaagctgtgcgcggccgcagcacatagtcctcaatcacctcttcatagagaagggctggggcgcccaccctctggtgtctctcggcctaacccacaggttcgagtccaaatatgtaacagtcgtcctgtacaaacccatcgaacgatagcaatagcccgcgcctgaagagcggaagttgacaactcactgtgggagcagcgatgaacagcgccgaagtggtacatgcttgtaaaagcggttgaggtccaggagtatttttttcccgtgcccttagcttgcacaacctgtggtactctggtggttagctgtacatgctgcgctgtcatgatggttggtttgctgttacagagagccaaggcgtccttgattccgaagtacacgtacgtttgtcgtcgtcgttcctccccccatcccatcccaggaatgaaatgtttgtaggtgtcactgaaaaccgtggaaatccacagaaatgctaggagacagagattagaccatgtgattcctagatttttgtttgttttttttttggctggtcaagaactcaagacgatgttgttgttatgaaatgaactcaagaaaaaatacaagtg

SEQ ID NO: 156214 - DNA, 458 bp, Zea Mays
ctgatgggtgtactgcagagaattgcaatagcttatctgttgaccgccctccgtgagatttggatcagaggagatgtagatgtagactatggatacgatttgtttaagcgataccgctactagctgttcgtaggcgcagtcgtggcgatcacatacaagtccctgttgtacggtatctatgttcctgactgggagtaccagacatcagctcctggctccacagagaagcatttctttgtgaaatgtggagtaagaggtgacaccagcccaggctgcaatgcggttggcatgatcgatcgtaaaatcctgggcatctagcatctctacggccgacctatttatgcatgatccaaggttctttttttgtttaatagcatttctattcctttttcttcaggagacttctctgcctcttgtccgtacgatctctgatttctgttctcctatggcagcaatgc

SEQ ID NO: 156215 - DNA, 82 bp, Zea Mays
cgtcgccgtccttatcgaagaggctgaaggcctccttgaactcggcgatttggtcgtcagtgagctggtccgccatggtctc

SEQ ID NO: 156216 - DNA, 426 bp, Zea Mays
cttggccatcatgaccttgacgaactcctcgtagttgatctggccatcgccatcaacgtcggcctcgcggatcatctcgtcgacctcctcgtcggtcagcttctcgcctaggttggtcatcacgtggcggagctccgcggcagagatgaagccgttctggtccttgtcgaacaccctgaacgcctccttgagctcctcctcggagtcggtgtccttcatcttgcgggccatgaggttgaggaactcggggaagtcgatcgtgccattgccgtcggcatccacctcattgatcatgtcctggagttcagcctccgttgggttctgacccagtgaacgcatgacagttccaagctccttggttgtgatgcaacctgtccagtgcacagcggagagcaatttcaggtcaatttatatgtaacattaaca

SEQ ID NO: 156217 - DNA, 393 bp, Zea Mays
cttggccatcatgaccttgacgaactcctcgtagttgatctggccatcgccatcaacgtcggcctcgcggatcatctcgtcgacctcctcgtcggtcagcttctcgcctaggttggtcatcacgtggcggagctccgcggcagagatgaagccgttctggtccttgtcgaacaccctgaacgcctccttgagctcctcctcggagtcggtgtccttcatcttgcgggccatgaggttgaggaactcggggaagtcgatcgtgccattgccgtcggcatccacctcattgatcatgtcctggagttcagcctccgttgggttctgacccagtgaacgcatgacagttccaagctccttggttgtgatgcaacctgtccagtgcacagcggagag

SEQ ID NO: 156218 - DNA, 977 bp, Zea Mays
ctgctatctccgtctctctctccctcccctccgtttccttggcctttttattcaccgcagccgcagcacccgtgcactaccacacaaacagacacagaggtgacctacacttttgggagaagctgggcggtttcgttctccttcctgccgctggccggccggctggtggcaagctcgatcgagctaggagtcagatggaaggcacgatgaagcacagcaacgttgtggtaagctcaagaggttcctttcatgaatggcagccttcttctcgcactcatggtatacgcatcctgttctctcatcagacggagaggagctctgtgaccaagccccgtgaacaggaggtgtccgcttggcatgatgaggctggagagcgtctggtttggacgccgagagcagcagttcagctgatgcttcatgcctagcatcagcacggcgttatcctaattgagcttttcagccaccatctttatccttcctcatattctccatatcgtgatgcttgtggtttcgcaagatcaggtcttcttgaccttgcaagaccttttcttgaccttgtaagacccaactctacgatacatcttttctttgacctaatcttctctacctcacacctttctatctgttcttacttctgttctatgtctatcccttctgagctgtgttgagctactttgataaagctaggtactatagattaagtgttttaggaggtgtttctcacatgtgtaatgttgtgagcttgccgtgtgggaaaaaaaaaatccattttgatggtagctatatagagtgaggcatgagacaaacaaaagtatgttcctgttgcgccatgagcacatgatgctcggccatgtgaagtaggcgcctacatgcaagctaagctagctagctccgtatgtatcgcctcgatggaataagctgctgctcgaaacattttggatcgtccaacatgtgttctttgtagttactattgacaa

SEQ ID NO: 156219 - DNA, 884 bp, Zea Mays
ctgctatctccgtctctctctccctcccctccgtttccttggcctttttattcaccgcagccgcagcacccgtgcactaccacacaaacagacacagaggtgacctacacttttgggagaagctgggcggtttcgttctccttcctgccgctggccggccggctggtggcaagctcgatcggtagctaggagtcagatggaaggcacgatgaagcacagcaacgttgtgacggagaggagctctgtgaccaagccccgtgaacaggaggtgtccgcttggcatgatgaggctggagagcgtctggtttggacgccgagagcagcagttcagctgatgcttcatgcctagcatcagcacggcgttatcctaattgagcttttcagccaccatctttatccttcctcatattctccatatcgtgatgcttgtggtttcgcaagatcaggtcttcttgaccttgcaagaccttttcttgaccttgtaagacccaactctacgatacatcttttctttgacctaatcttctctacctcacacctttctatctgttcttacttctgttctatgtctatcccttctgagctgtgttgagctactttgataaagctaggtactatagattaagtgttttaggaggtgtttctcacatgtgtaatgttgtgagcttgccgtgtgggaaaaaaaaaatccattttgatggtagctatatagagtgaggcatgagacaaacaaaagtatgttcctgttgcgccatgagcacatgatgctcggccatgtgaagtaggcgcctacatgcaagctaagctagctagctccgtatgtatcgcctcgatggaataagctgctgctcgaaacattttggatcgtccaacatgtgttcttt

SEQ ID NO: 156220 - DNA, 872 bp, Zea Mays
ctgctatctccgtctctctctccctcccctccgtttccttggcctttttattcaccgcagccgcagcacccgtgcactaccacacaaacagacacagaggtgacctacacttttgggagaagctgggcggtttcgttctccttcctgccgctggccggccggctggtggcaagctcgatcgagctaggagtcagatggaaggcacgatgaagcacagcaacgttgtgacggagaggagctctgtgaccaagccccgtgaacaggaggtgtccgcttggcatgatgaggctggagagcgtctggtttggacgccgagagcagcagttcagctgatgcttcatgcctagcatcagcacggcgttatcctaattgagcttttcagccaccatctttatccttcctcatattctccatatcgtgatgcttgtggtttcgcaagatcaggtcttcttgaccttgcaagaccttttcttgaccttgtaagacccaactctacgatacatcttttctttgacctaatcttctctacctcacacctttctatctgttcttacttctgttctatgtctatcccttctgagctgtgttgagctactttgataaagctaggtactatagattaagtgttttaggaggtgtttctcacatgtgtaatgttgtgagcttgccgtgtgggaaaaaaaaaatccattttgatggtagctatatagagtgaggcatgagacaaacaaaagtatgttcctgttgcgccatgagcacatgatgctcggccatgtgaagtaggcgcctacatgcaagctaagctagctagctccgtatgtatcgcctcgatggaataagctgctgctcgaaacattttggatcgtccaaca

SEQ ID NO: 156221 - DNA, 2049 bp, Zea Mays
ccgcagcgcgctgagccagctgatcatgctcacggtgtccattctggacgctcaactctcccgctgctgctccgcgcgccatctccttcaaatccacgcgcagttcctcgcgtcgggcctccttgctgacgcctacgccgccagccgtctcctcctcttcaccacctccgcgaccgccgcgcgtctcctgccgcatccgctccaccactccctccaactcttcgggctcgtgcgcagccccaatgccttcacctgcaacactctcctcaaggcggctctgcgccagggctttccccacctctgcttcccgctctacgcctccatgcccgcggcgcccgacacctacacgcacccgctcctcgccgccgcctgtgccgccagaggggacgtgagggaaggcctgcaggtccactcccactccgtcaagcacggattcagcgacaacctgtacctcaggaatgcgctgatgcacatgtactctgcgtgcggctgcgtcgcgagcgcgcgcagggtgttcgacgcgggacccgtgtgggacgccgtttcttggaacacgatcctcgccacgtacgtgcgggacggggacgtcgagcaggctgtcaaggtgtttacgaggatgccagagaggagcgccgcggcagtgagcgcgatggtggcgttgttcgcgaggagagggatggtagaggaggcgaggggggtgtttgacggagcggagcatagggatgcgttcacgtggacagctatggtctcttgcttcgagcggaatgatctgttcatggaagcactagctgtattttcagatatgcgtgaagaggggtggcctgtggacgaggcagtgatggtcagtgtggtcgctgcttgcgctaagtcaggggtgattcagaacggtgaggtgtgccatgggctggttgtcagagcaggccttggttctcgggtgaatgtccagaatgtgctgatccacatgtactcaagttgtcaggatgttgttgcagcacggagattgtttgataatggtgagagtctggaccacttctcctggaactcgatgatttctggctatctaaagaatggccgtgtcgaagatgcaaaagcgttatttgatgtgatgcctgacaaggacaacgtttcctggagtgcaatgatagctggttgtgtgcacaataaccagtcatctgaggcacttaatgtttttgacagcatgagagcccatgaaatcaaaccagatgatgttacgctcgtgagtgtcatctctgcatgtagtaatttgtctgctctggagcaaggaaagttagtgcatgagtacattaggaaataccaatataacatcactatcgtacttgggactagcctcattgacatgtacatgaagtgtggatgcatggaggctgcactagaagtctttgacatgttggaagaaaaaggaacaccttgctggaatgctgtcattgtgggactggccatgaatggtcttgttacaagatcccttgacatgttctccgagatggaagccactggcactgctgtccccaatgagataactttcactggagttctgagtgcttgcagacatggtggcctagttgaggagggccgtcaattcttcaagttgatgcagaataagtaccagattgtaccaaatatcagacactatggatgtatggttgatctccttggacgtgctgggtatgtcagagaggctgaagacatgattcagagcatgccgatgtcacctgatgtcccagcatggggtgcgttgcttggtgcctgttggaagcatggcgatagtgaggttggggaaagggttggtaagaaacttgtcaagctggatcctgaccatgatgggttccaaactatgttatctaacatatatgcttcagaggggatgtggcagtgtgtaaaggacctaaggggttccatgaagcaacaacatgtagcaaaagttgcaggctgtagtatggttgaaccatcacattcttcatgagattctagaatgtgattgtattagaatgtagaatgcatagagtgtggtttaagttgaagtatatatgg

SEQ ID NO: 156222 - DNA, 1107 bp, Zea Mays
gcaactgtcattcacctggcttcttgagctattggtcgaaatgatcatacagtttaggctgatgcagataattgctgtttgttgagttattctgacaaagcaaatggtacagtctcgcctctttgcatctgctgactaccgtggacttcgtctgttattaccatattctttctctagcacccaattgcttcctccggcctagggaagctcaaaaggctgctgatgaggccaaggctcgatttggccatattgatggggaccatctgacgcttctgaatgtataccatgcatacaagcaaaacaatgaagatccccagtggtgttatgagaactttatcaattccagagcactcaagtctgcagacaatgtcagacaacagcttgttcgcatcatgactagattcaacctcaagatgtgcagcacggatttcaatagccgtgagtactacgtcaatatcaggaaaaccctgcttgcagggtatttcatgcaggtcgctcacctggaacgaactggacattacctgactgtaaaagataaccaggtcgtccatcttcatccctccaattgcatggaccataagccagagtgggtcatctacaatgaatacgtcttgactaccaggaatttcatccgcacagtcaccgatatccgtggggaatggctaattgatattgcgccgcattactatgacctgagcaatttcccgtcatgtgaggccaagcgtgttcttgagaggctgtataacaagcgggagagggaaagagctgcaaatagaggctgaagttgatacttccacaaacctggtgcttcataattccacagcaggttatcacagatggcggacccgtttgtcatatgcatgatgtcttccacagcctgttgcctagtgtttcatcagcatgatcattatgcagacagcctcgagaaatcccttggcagctcaattagttatgatgcagattaattttgtgccattctccttatttttgtatgcgtaagatatttatattttgcgtttctatgtgattaactggttatccttcggttggaatgaaattccactgattttggtttattagcttagctggggttatgtatgcctataa

SEQ ID NO: 156223 - DNA, 2618 bp, Zea Mays
caggcctccacaacaaagctagggtttgcctcccccaccctcctggcctcctcccgctttccctcatcctcgtgcgaacctcgcgagccaaggaccgctcgtcgtctcttgtctcgccgtcgccatgggtacggagcggaagcggaaggtgagtcttttcgacgtggtcgacgagacctccgtctccggcaagctgggccgcgccgcctccaacggcgccgccgccactgcggcggggaccaatccgtctgtcaaccggtggaacggccggccctacacggcacggtacttcgagatcctcgagaagcgccgcacactgcccgtgtggcagcagaaggaggagttcctccgccgcctccgcgacaaccagaccctcatcctcgtcggcgaaacgggaagcggaaagacaactcagattccacaatttgttcttgagactgaaggcttgggtaaccgttccatggttgcctgcactcagcctcggagggtcgcggcaatgtcagtctccaggcgtgtggcagaggagatggatgttactattggggaagaagtgggttacagtattcggtttgaagattgcagcagccacaaaactgttctcaaatatttgacagatggtatgcttctgagagaagcaatggcagacccacttttagagaagtacaaggtgattgttcttgatgaggctcatgagaggactttggcaacagatgttttgtttgggcttctgaaggaggttctaaaaaatagaccggatttgaagcttgttgttatgagtgctactctcgaagcagagaaattccagggttactttagtgatgcaccgttgatgaaggtgcctgggagacttcatccagttgagatattttacacccaagaaccagagagggactatctagaggctgctatcaggacagttgtgcaaatacatatgtgtgaacctgctggtgatatccttgtattccttactggagaagaggagattgaggacgcatgtcggaaaatcaataaggaaatcaataatatgggagatcaggttggcccagttaaagtcgtgcctttatactctacactgcccccagccatgcagcagaagatttttgaacctgctcctgccccattgaaggaacgaggtcctcctggaaggaaaattgttgtgtccaccaacattgctgaaacatccttaactatagatggcatagtttatgtgatagacccggggttttctaaacagaaagtttacaacccaagaataagggtggaatccctcctggtgtcaccaatttctaaggcaagtgctcatcagagagctggtcgtgctggacgaacgcaacctgggaagtgctttaggctatacacagagaagagctttaatgaggatttgcaaccacagacatacccagaaattcttcggtcgaacctggcaaatacagttcttaccttgaagaaacttggaattgatgatttagtgcattttgactttatggatcctccagcaccagaaactctaatgagggccttagaagttttgaactatttggctgcactagatgatgaaggtaatctaacacagttaggtgagatgatgagtgagtttcccctggatccacaaatgtcaaagatgcttgtcatcagtccaaagtacaactgttcgaatgagatcttatcaatatctgccatgctgtcagcacccaattgcttcctccggcctagggaagctcaaaaggctgctgatgaggccaaggctcgatttggccatattgatggggaccatctgacgcttctgaatgtataccatgcatacaagcaaaacaatgaagatccccagtggtgttatgagaactttatcaattccagagcactcaagtctgcagacaatgtcagacaacagcttgttcgcatcatgactagattcaacctcaagatgtgcagcacggatttcaatagccgtgagtactacgtcaatatcaggaaaaccctgcttgcagggtatttcatgcaggtcgctcacctggaacgaactggacattacctgactgtaaaagataaccaggtcgtccatcttcatccctccaattgcatggaccataagccagagtgggtcatctacaatgaatacgtcttgactaccaggaatttcatccgcacagtcaccgatatccgtggggaatggctaattgatattgcgccgcattactatgacctgagcaatttcccgtcatgtgaggccaagcgtgttcttgagaggctgtataacaagcgggagagggaaagagctgcaaatagaggctgaagttgatacttccacaaacctggtgcttcataattccacagcaggttatcacagatggcggacccgtttgtcatatgcatgatgtcttccacagcctgttgcctagtgtttcatcagcatgatcattatgcagacagcctcgagaaatcccttggcagctcaattagttatgatgcagattaattttgtgccattctccttatttttgtatgcgtaagatatttatattttgcgtttctatgtgattaactggttatccttcggttggaatgaaattccactgattttggtttattagcttagctggggttatgtatgcctataa

SEQ ID NO: 156224 - DNA, 1841 bp, Zea Mays
caggcctccacaacaaagctagggtttgcctcccccaccctcctggcctcctcccgctttccctcatcctcgtgcgaacctcgcgagccaaggaccgctcgtcgtctcttgtctcgccgtcgccatgggtacggagcggaagcggaaggtgagtcttttcgacgtggtcgacgagacctccgtctccggcaagctgggccgcgccgcctccaacggcgccgccgccactgcggcggggaccaatccgtctgtcaaccggtggaacggccggccctacacggcacggtacttcgagatcctcgagaagcgccgcacactgcccgtgtggcagcagaaggaggagttcctccgccgcctccgcgacaaccagaccctcatcctcgtcggcgaaacgggaagcggaaagacaactcagattccacaatttgttcttgagactgaaggcttgggtaaccgttccatggttgcctgcactcagcctcggagggtcgcggcaatgtcagtctccaggcgtgtggcagaggagatggatgttactattggggaagaagtgggttacagtattcggtttgaagattgcagcagccacaaaactgttctcaagtaagccttttacaagtgtttatgtttcattgaagaacatgattagatgcactatccttttggcagattgatatggagtgtatgtttcttttctttttaggtattctgatctaatcctgttgtgttgaacactattgcttcctatcagatatttgacagatggtatgcttctgagagaagcaatggcagacccacttttagagaagtacaaggtgattgttcttgatgaggctcatgagaggactttggcaacagatgttttgtttgggcttctgaaggaggttctaaaaaatagaccggatttgaagcttgttgttatgagtgctactctcgaagcagagaaattccagggttactttagtgatgcaccgttgatgaaggtgcctgggagacttcatccagttgagatattttacacccaagaaccagagagggactatctagaggctgctatcaggacagttgtgcaaatacatatgtgtgaacctgctggtgatatccttgtattccttactggagaagaggagattgaggacgcatgtcggaaaatcaataaggaaatcaataatatgggagatcaggttggcccagttaaagtcgtgcctttatactctacactgcccccagccatgcagcagaagatttttgaacctgctcctgccccattgaaggaacgaggtcctcctggaaggaaaattgttgtgtccaccaacattgctgaaacatccttaactatagatggcatagtttatgtgatagacccggggttttctaaacagaaagtttacaacccaagaataagggtggaatccctcctggtgtcaccaatttctaaggcaagtgctcatcagagagctggtcgtgctggacgaacgcaacctgggaagtgctttaggctatacacagagaagagctttaatgaggatttgcaaccacagacatacccagaaattcttcggtcgaacctggcaaatacagttcttaccttgaagaaacttggaattgatgatttagtgcattttgactttatggatcctccagcaccagaaactctaatgagggccttagaagttttgaactatttggctgcactagatgatgaaggtaatctaacacagttaggtgagatgatgagtgagtttcccctggatccacaaatgtcaaagatgcttgtcatcagtccaaagtacaactgttcgaatgagatcttatcaatatctgccatgctgtcaggtatg

SEQ ID NO: 156225 - DNA, 284 bp, Zea Mays
taatggagtcttcacgagggaagctgtctgccgccggcgtcctcctgctgctgctgatgacactcctcgtggtggccgccatgcaggcggttgaggcacgcgactgcctgacacagagcacccggttaccggggcatctgtgcgtgcggtcggactactgcgcgatcgggtgcagggaggagggcaagggctacacgggcggcaggtgccgcatctctcccgtcccgctcgacgggattctctgctactgcgtcaagccttgcccatccaccacgacagaatga

SEQ ID NO: 156226 - DNA, 2075 bp, Zea Mays
ggtgtccatttgtggtttttatgcccagccatctccgcccactccccgcactcccaccgtatcctcccctgcgtagggtttaaccactcgcagcagccgccgtgactcgagaatcatgtcagcgccgccgtcgctcaagaccccggcaaccgccgtagcggtctctcggcgctcggtcgccaccccgagagccaccgggcttcgcggcgcctgtgctcccccgactcggcgcctccggtgctcagcctccgccgccgtggccggggcttccaccgagatggctgatgctccgctggactgggcagagaggtcgctggaggagttacacagcttgccggaccacgacacgttctgcttgatggcgctctcgccgctggacgggcggtacgatcgcttcgtcaaggagctgatgccctttttcagcgagttcggcctaatcagataccgcgttctcatcgagatcaagtggctactgaaactttctcaaattcctgagatcactgaggtgcctcagttcagcaaggaagctcagtccttgttgaatgccattattgagaatttttgcatagatgatgcaaaagaagttaagaaaatcgagaaagtaaccaaccatgacgtgaaagccgtggagtactttctgaagcaaaggtgcagctcaaatccagagattgcaaaggtgtcggaattcttccattttggttgtacctctgaagatattaacaatctatcacatgcattggctttgaaagagggggtaaataaagttatgttccctgccatgatcgatctatgcagagcaatgtgttccttggcaacacaaaattcaggctaccctatgttggctcgaactcatgggcagccagcatcaccaacaactgtgggaaaggagatggcaaacttcgcggccagattatctgatataggaaagagtttctcagaggtgaagatactagggaaatttgctggcgctgttggcaattacaatgctgatgtggttgcatatcctgaagttgactggcctaaggtggcagaagagtttgttagatccttgggtttgcagtttaatccctatgttactcagattgagcctcatgactacatatcaaagctcttcaatctattcacccagtttaacaatgtgttgactgattttgatagagacatgtggtcctatatatcattaggctacttcaagcagataccaaaggctggtgaagttggttcttccactatgcctcataaaatcaaccccattgattttgaaaatagtgatggcaatttatgtcaagcgaattctatattgtctggtataagcatgaaactaccaatatcccggttgcagcgtgacctaacagactcgactgttttgagaaacctgggtatgggattaggtcattctctattggcttacaaagctaccatgcgtggaatcagcaaggttcagttgaatgaatcacgtttagctgaagacctggagcaaacttgggaggtccttgctgagccaatacagacagtgatgcgaagatatgggatacctgaaccttatgagaagctgaaggaactgacgagaggccaagctgtcaccaaggacagcatgcagcaattcattaatggtctagacataccggaggaggttcgatcgaagctttcgaagctaaccccgcattcctacactgggctagcggaggatttggccagagacatcgagaagtgggttgatcttgaatctggatttcagatcaagtgagctcccatttgacaacaatggagaaaataaataacagacgggaaccctaggaaacgagaatccaatgctggaaccaaggtgccgtttggttcacaaatttgtaacgtaatgggtaacgaataacgttaaatcatgtttgttttagtccaactgtaatcgaatactacactaaaaattgataccagcctattcaaatttgttaccgccagtaatcgaacgtaaaccattaccatttgcgttacatttcttgaaccaaacagcacccaaatgcgaattactgctacaataaacatcctacaagtaatggtcggtcggagcgttatgtttc

SEQ ID NO: 156227 - DNA, 2393 bp, Zea Mays
ggtttttatgcccagccatctccgcccactccccgcactcccaccgtatcctcccctgcgtagggtttaaccactcgcagcagccgccgtgactcgagaatcatgtcagcgccgccgtcgctcaagaccccggcaaccgccgtagcggtctctcggcgctcggtcgccaccccgagagccaccgggcttcgcggcgcctgtgctcccccgactcggcgcctccggtgctcagcctccgccgccgtggccggggcttccaccgagatggctgatgctccgctggactgggcagagaggtcgctggaggagttacacagcttgccggaccacgacacgttctgcttgatggcgctctcgccgctggacgggcggtacgatcgcttcgtcaaggagctgatgccctttttcagcgagttcggcctaatcagataccgcgttctcatcgagatcaagtggctactgaaactttctcaaattcctgagatcactgaggtgcctcagttcagcaaggaagctcagtccttgttgaatgccattattgagaatttttgcatagatgatgcaaaagaagttaagaaaatcgagaaagtaaccaaccatgacgtgaaagccgtggagtactttctgaagcaaaggtgtcggaattcttccattttggttgtacctctgaagatattaacaatctatcacatgcattggctttgaaagagggggtaaataaagttatgttccctgccatgatcgatctatgcagagcaatgtgttccttggcaacacaaaattcaggctaccctatgttggctcgaactcatgggcagccagcatcaccaacaactgtgggaaaggagatggcaaacttcgcggccagattatctgatataggaaagagtttctcagaggtgaagatactagggaaatttgctggcgctgttggcaattacaatgctgatgtggttgcatatcctgaagttgactggcctaaggtggcagaagagtttgttagatccttgggtttgcagtttaatccctatgttactcagattgagcctcatgactacatatcaaagctcttcaatctattcacccagtttaacaatgtgttgactgattttgatagagacatgtggtcctatatatcattaggctacttcaagcagataccaaaggctggtgaagttggttcttccactatgcctcataaaatcaaccccattgattttgaaaatagtgatggcaatttatgtcaagcgaattctatattgtctggtataagcatgaaactaccaatatcccggttgcagcgtgacctaacagactcgactgttttgagaaacctgggtatgggattaggtcattctctattggcttacaaagctaccatgcgtggaatcagcaaggttcaggtaggtgacccagagcttgtcctttgtctcgttacagatgatatagttggttacagatgatatattcgtatcttcaatatagttgatgcatacttaatttttagcttatggttattaaatacttgcagaatgcttgatgatcaaagcagatagatgtacctcaccacttgctcttttcataagtgttggcctaacaggggaaaaatacactataaattagtggtgactgctaggcgtaggtatttacccaactaaaagatcacaccactcaaaccagctgaggattactgacttggtaggataaggaagttcctttgtgcagtgctcgactgcacacacttgcattcttggacaattgcatgggaatgtcagacgtttgctcttctttactattgacctgaaacatgcgttgtatgtaattatgatcaggctagaactactatgctgaattggtgcctttacagttgaatgaatcacgtttagctgaagacctggagcaaacttgggaggtccttgctgagccaatacagacagtgatgcgaagatatgggatacctgaaccttatgagaagctgaaggaactgacgagaggccaagctgtcaccaaggacagcatgcagcaattcattaatggtctagacataccggaggaggttcgatcgaagctttcgaagctaaccccgcattcctacactgggctagcggaggatttggccagagacatcgagaagtgggttgatcttgaatctggatttcagatcaagtgagctcccatttgacaacaatggagaaaataaataacagacgggaaccctaggaaacgagaatccaatgctggaaccaaggtgccgtttggttcacaaatttgtaacgtaatgggtaacgaataacgttaaatcatgtttgttttagtccaactgtaatcgaatactacactaaaaattgataccagcctattcaaatttgttaccgccagtaatcgaacgtaaa

SEQ ID NO: 156228 - DNA, 1942 bp, Zea Mays
ggtgtccatttgtggtttttatgcccagccatctccgcccactccccgcactcccaccgtatcctcccctgcgtagggtttaaccactcgcagcagccgccgtgactcgagaatcatgtcagcgccgccgtcgctcaagaccccggcaaccgccgtagcggtctctcggcgctcggtcgccaccccgagagccaccgggcttcgcggcgcctgtgctcccccgactcggcgcctccggtgctcagcctccgccgccgtggccggggcttccaccgagatggctgatgctccgctggactgggcagagaggtcgctggaggagttacacagcttgccggaccacgacacgttctgcttgatggcgctctcgccgctggacgggcggtacgatcgcttcgtcaaggagctgatgccctttttcagcgagttcggcctaatcagataccgcgttctcatcgagatcaagtggctactgaaactttctcaaattcctgagatcactgaggtgcctcagttcagcaaggaagctcagtccttgttgaatgccattattgagaatttttgcatagatgatgcaaaagaagttaagaaaatcgagaaagtaaccaaccatgacgtgaaagccgtggagtactttctgaagcaaaggtgtcggaattcttccattttggttgtacctctgaagatattaacaatctatcacatgcattggctttgaaagagggggtaaataaagttatgttccctgccatgatcgatctatgcagagcaatgtgttccttggcaacacaaaattcaggctaccctatgttggctcgaactcatgggcagccagcatcaccaacaactgtgggaaaggagatggcaaacttcgcggccagattatctgatataggaaagagtttctcagaggtgaagatactagggaaatttgctggcgctgttggcaattacaatgctgatgtggttgcatatcctgaagttgactggcctaaggtggcagaagagtttgttagatccttgggtttgcagtttaatccctatgttactcagattgagcctcatgactacatatcaaagctcttcaatctattcacccagtttaacaatgtgttgactgattttgatagagacatgtggtcctatatatcattaggctacttcaagcagataccaaaggctggtgaagttggttcttccactatgcctcataaaatcaaccccattgattttgaaaatagtgatggcaatttatgtcaagcgaattctatattgtctggtataagcatgaaactaccaatatcccggttgcagcgtgacctaacagactcgactgttttgagaaacctgggtatgggattaggtcattctctattggcttacaaagctaccatgcgtggaatcagcaaggttcagttgaatgaatcacgtttagctgaagacctggagcaaacttgggaggtccttgctgagccaatacagacagtgatgcgaagatatgggatacctgaaccttatgagaagctgaaggaactgacgagaggccaagctgtcaccaaggacagcatgcagcaattcattaatggtctagacataccggaggaggttcgatcgaagctttcgaagctaaccccgcattcctacactgggctagcggaggatttggccagagacatcgagaagtgggttgatcttgaatctggatttcagatcaagtgagctcccatttgacaacaatggagaaaataaataacagacgggaaccctaggaaacgagaatccaatgctggaaccaaggtgccgtttggttcacaaatttgtaacgtaatgggtaacgaataacgttaaatcatgtttgttttagtccaactgtaatcgaatactacactaaaaattgataccagcctattcaaatttgttaccgccagtaatcgaacgtaaa

SEQ ID NO: 156229 - DNA, 92 bp, Zea Mays
ggatctttctggccgcgtgcttgactcagatcgatggtgatccaggactccctcgcagtggcccagctctattttctctcttcttgcatctc

SEQ ID NO: 156230 - DNA, 780 bp, Zea Mays
gagtgcatgggtttgaggatatcttcaacttatcgcttgcaaattattgttactgtaacacgggtaatacttacactggttcacttctcatctattccttttgattatgaacaacacatctgatgctatattgcaatgctgcttatctgcaaactgatgttctaggttttcaattccagcgtaatatgtttgcatgtactatttgtttgctgatgcaaattttgtgcttcagttcgttttaatgtgattctttgtttgaatgaatggcagaatgggatccgtggggtgtccctgatgactacgaatgtgaggtgattgaagacgacaccccaattcctaagcatgttcctcagcaccggcccgttgctcttcctgaggagttcttcaagacactagatgccgtcaaatcagatcccgccctccaaggcgatgctcctcctcaagtgaaggcgtaaagatgagtcttcccggttatgtcttatgtcatttcacactttgctgcgctgggtagggactagtttcttgtgccatttgccagcaatgtgcttgttccgagcagaataaatttctggcgagtaccatcgaagagtgactttgaacgaagtgattcgacacagtaaatttgttgttgtccatgaatacttgctctgaacatcgcttgccgatgaaatattgaatgctaggtagagttcattgcctggtgctgccggcaccggagacgcaacggccatgggagccgtggctagcgtaacctggctcgccataaaatatcgttatgct

SEQ ID NO: 156231 - DNA, 1001 bp, Zea Mays
gctacctgaacctacgaagagccgactcaaccgctagtacagtccacacatgacacaacgacaccaactgtcctcaatccagcagccctcgagtctcgtccccgcacatcagcagagagacgccactaccaccaccgcaagcgacgacggggagatgtttctgcgacggatcctgaccggcggaggtggcctggcggcgctgagggcggcgcgcgccgtgaaggagacgacggggatcgtcggccttgaggtggcgcccaacgcgcgggaggttctcatcgggctctacacgcgtacgctcaaggagatcgaggccgtccccaaagacgagggctaccgcaaggccgttgagtccttcaccaatcaccgcctccagatctgccaggaggaggacgactggaagcgcatcgaggaccgaatcggatgcgggcaagtcgaggagctcatcgaggaggccgaggacgagctcaagctcatcgccaaaatgattgaatgggatccgtggggtgtccctgatgactacgaatgtgaggtgattgaagacgacaccccaattcctaagcatgttcctcagcaccggcccgttgctcttcctgaggagttcttcaagacactagatgccgtcaaatcagatcccgccctccaaggcgatgctcctcctcaagtgaaggcgtaaagatgagtcttcccggttatgtcttatgtcatttcacactttgctgcgctgggtagggactagtttcttgtgccatttgccagcaatgtgcttgttccgagcagaataaatttctggcgagtaccatcgaagagtgactttgaacgaagtgattcgacacagtaaatttgttgttgtccatgaatacttgctctgaacatcgcttgccgatgaaatattgaatgctaggtagagttcattgcctggtgctgccggcaccggagacgcaacggccatgggagccgtggctagcgtaacctggctcgccataaaatatcgttatgct

SEQ ID NO: 156232 - DNA, 1443 bp, Zea Mays
gtcctctcccccgcgcttcccttcaacgccgcctccctaaagatccaccgcttctctgccctctgctcgtcgattcggcgcctcctctccttcacgcgcccacgctgtcgtcgcctcctcctcactgttgtccatgccgctgtagccgcctacggccatggccgctggagccagcgactatttgacggtggagtaccactccagagactcccctctttcccctccgacgacgagagagccaccggcggcagcggcgtcctcgtacaccacggtgggcacggtgggcgatcttctcatgaagtggtggtagtgcctcgtggacgtcgacggagacgcggcgtgcctgcccctcgtcctcctgctccttgtcttctccgccgccccgtctccggctgacggctgcgatcgctgcgtgcgccggtccaaggccacctattaccaggcctcctcgctcgccctcaacgccgggtcgtgcggggtacggctccttggccgcgtccttcaacggcggcctgctcgccgcagccagccccgagctgtacaggggcgccgtcggctgcggcgcctgcttccaggtgcggtgcagggacagcgagctgtgcatgtgacggaccaggcgcggacgtcaaaccgcacgaccctggtgctgagcgccgcggcgtacgcggccatggccagcgccggcaaggccgcacgcctcagggaccggcgcgttgtcgatgtcgagtacaagagggtaccttgcgggtacatgaaggaccgcaacctatcgatacgcgtggaggagaagagccggccgccaagcaacctatccatcaggttcctgtaccagggcggccagaccgacaccgtcgccgtcgacatcgccactgtggggtcgtccaactggcggttcatggcgcgggaccatgggccggcgtggagcacgacgcaggcgccgccggggccgctgcagttccggctggtggtgacaggttgctatgacggcaagtgggtgtgggcggagttggaggtgctgccgcgccggtgggaggccggccgcgtctacgacgccggggtgcaggtctccgacgtctcgcgggaagggtgctacctctgcgacacgcacaagtggcagtgacgcgcgcacgagctggattgtacagttttttgttttggtcgggaatgggacgaaagatatgaaatgatgatgagcggagccggagagccgaatcaaatctattaatcggtggcgctggaagggtgctgccgtcgattcctctaccggtggcactggaacacaagtaaccggcagttgccgaccattaccaagatctctaaagggcttagattaattagataatccagcataagcacaaaacgttaatctcaaatctattagcagatataatattgtttgtgtgacattgtactgttttgtttcttaaacaaacgtcattctac

SEQ ID NO: 156233 - DNA, 1560 bp, Zea Mays
cgtgtcctctcccccgcgcttcccttcaacgccgcctccctaaagatccaccgcttctctgccctctgctcgtcgattcggcgcctcctctccttcacgcgcccacgctgtcgtcgcctcctcctcactgttgtccatgccgctgtagccgcctacggccatggccgctggagccagcgactatttgacggtggagtaccactccagagactcccctctttcccctccgacgacgagagagccaccggcggcagcggcgtcctcgtacaccacggtgggcacggtgggcgatcttctcatgaagtggtggtagtgcctcgtggacgtcgacggagacgcggcgtgcctgcccctcgtcctcctgctccttgtcttctccgccgccccgtctccggctgacggctgcgatcgctgcgtgcgccggtccaaggccacctattaccaggcctcctcgctcgccctcaacgccgggtcgtgcggggtacggctccttggccgcgtccttcaacggcggcctgctcgccgcagccagccccgagctgtacaggggcgccgtcggctgcggcgcctgcttccaggtgcggtgcagggacagcgagctgtgcatgtgacggaccaggcgcggacgtcaaaccgcacgaccctggtgctgagcgccgcggcgtacgcggccatggccagcgccggcaaggccgcacgcctcagggaccggcgcgttgtcgatgtcgagtacaagaggtacttgggcgcagcgacaccgacactctgcttcggtcccgcgggccgatgatgcagagttctttactggtgggagaaggatcgagagattgattttgtgtatactgcgctcagggtaccttgcgggtacatgaaggaccgcaacctatcgatacgcgtggaggagaagagccggccgccaagcaacctatccatcaggttcctgtaccagggcggccagaccgacaccgtcgccgtcgacatcgccactgtggggtcgtccaactggcggttcatggcgcgggaccatgggccggcgtggagcacgacgcaggcgccgccggggccgctgcagttccggctggtggtgacaggttgctatgacggcaagtgggtgtgggcggagttggaggtgctgccgcgccggtgggaggccggccgcgtctacgacgccggggtgcaggtctccgacgtctcgcgggaagggtgctacctctgcgacacgcacaagtggcagtgacgcgcgcacgagctggattgtacagttttttgttttggtcgggaatgggacgaaagatatgaaatgatgatgagcggagccggagagccgaatcaaatctattaatcggtggcgctggaagggtgctgccgtcgattcctctaccggtggcactggaacacaagtaaccggcagttgccgaccattaccaagatctctaaagggcttagattaattagataatccagcataagcacaaaacgttaatctcaaatctattagcagatataatattgtttgtgtgacattgtactgttttgtttcttaaacaaacgtcattctac

SEQ ID NO: 156234 - DNA, 461 bp, Zea Mays
ggaactatcctctactgatggctacatggaaggtagcccctgcattggctgctggttgtacagctgtgctgaagccatctgaactggcttctgtgacttgcttagagcttgctgatatctgtaaagaagtcggtctcccttctggtgtcttgaacattgtgacaggattaggtcctgatgctggcgctcctttgtcagcacacccagatgttgacaaggtcacttttactgggagttttgaaactggcaagaaaattatggcatcgacagctcctatggtcaagcctgttacactggaacttggtggaaaaagtcctatagtagtatttgatgatgttgacattgacaaagagaatttaaccgatgagaatgctaaatgcctaaacccttcaaagcccttcatcggtttctgggattttcatagaaatactcagctgagcctgatcaggctactacaataa

SEQ ID NO: 156235 - DNA, 2174 bp, Zea Mays
ccaacagaagatacatgaattttgttttatgatctatacttgctagtgactataggacttttgcaatttttgccgcaagttaaggcctttgtctgagggtttgaaaaccgaaaaataaaaactcgaaatagcctaataccagaaccagtatgggctggatcagctcacacagacaatctcgtagtggcatgggcctaacttaccacacggtggttagcccactgctctaataagtcggtaagttcgaacgaaggactcgaagccacgtgtaacaacagcccaacacatcctgattccaccaaccccttgttcatttcctttcctccagttcctcgtcttctacgcagacccccgttgaagcctagggtttagcggctacacttctcttctagctagttggcgaccaccgtttacgctaaaccacccgcgcggccgatggacgtcgactcggacccggccgcctcgagcaagcccacgcagatggacctcgaggaccagacggacacaaaggggaagggaaaggcggaggaggggaacgggaagggcgaggagctcgcggactccatcggtagcctctctatcggcccggggcgcaccaatttcaagaagaagcctgtgattatcatcgtcatcggcatggccgggacggggaagacgaccttgatgcaccggctggtatgcgatacacaagcatcaaataagaggggctacgtcgtcaacctggaccctgcagtgatgaccctgccattcggtgccaacattgatattcgtgacactgtgcggtataaggatgtgatgaaggagtacagccttggtcccaatggcggcatcctcacctcgcttaacttgtttgccaccaagttcgatgaggttgtatctgtcattgaaagacgtgcagaacaattggattatgtactggtggacactcctggtcagattgagatcttcacttggtcagcttcaggagctatcattacggaagcttttgcatcgacgtttccaacagttgtagcatatgttgttgacactccgagatcaacaaaccctgttacttttatgagcaacatgctttatgcctgtagtattctctacaaaactcgccttcctctagtcctgacattcaacaaggttgatgttgccaagcatgagtttgccattgaatggatgcaggactttgaggcatttcagacagctgtggaatctgacaaatcatactccgctacatatacccgaagcctctctctggttcttgacgaattctacaataatttgcgctctgttggagtatctgcgatttctggttctggagtcaatacattttttgaagctatagaagccagcgccaaggaatacatggaaacctacagggctgatcttgacaagaggattgctgaaaaggaaagattggaggaagagcgcaggaaggagaatatggaaaaattgcagaaagatatgatgaaatccaaaggacaaactgtggtgctcaccactggtttgaaggaaaaaaattctgtttcagacatgatggatggtgctgatgaggaggaagaagaggaagcattggaagattttgggttttctgaggatgatgaagacgaagacgaaggagaagatgaggaggtggctcattttggcttttgaggggatccaatagttacttgttggtgtgtcttactgagagtccatatggggctacttgctgaagtggaatgaagaactgtcaatatcagtaggttgttgactttgctattagtctactcttttaaattctggtgccccactgctggctatttatgctatatatttgggacctcatgtcaaagtttatctcgtcgctgagctgtactaatcatattaattgtacgtgcgagtaagaagttgatgggtcaagttgtgtgtgtaatcggttgtgccacaacctgtacctaatccttcgcttcgcttaccacttaccaacatcccaccagtctttttgctgatgaactcggaaggaaagagtcacgaggatatgagtatggtagaaattctagagtacgaataatactatgtttaaggggaagcgaatatgtttggtataaatgtaatctacaatcgaactggctatcactcgactttttatgtggtggcggcatcactgtcacttcaatgaaatgcatgagttaacacatcaagcc

SEQ ID NO: 156236 - DNA, 1693 bp, Zea Mays
caacagcccaacacatcctgattccaccaaccccttgttcatttcctttcctccagttcctcgtcttctacgcagacccccgttgaagcctagggtttagcggctacacttctcttctagctagttggcgaccaccgtttacgctaaaccacccgcgcggccgatggacgtcgactcggacccggccgcctcgagcaagcccacgcagatggacctcgaggaccaggcacgccgccgccgccgccaccaccaccaccctcccctttcggattttttcttttgtcaatttgggtttaggactttagggctatggtagtgactgttgtgcgcccttgctgtcgagcacacgcagacggacacaaaggggaagggaaaggcggaggaggggaacgggaagggcgaggagctcgcggactccatcggtagcctctctatcggcccggggcgcaccaatttcaagaagaagcctgtgattatcatcgtcatcggcatggccgggacggggaagacgaccttgatgcaccggctggtatgcgatacacaagcatcaaataagaggggctacgtcgtcaacctggaccctgcagtgatgaccctgccattcggtgccaacattgatattcgtgacactgtgcggtataaggatgtgatgaaggagtacagccttggtcccaatggcggcatcctcacctcgcttaacttgtttgccaccaagttcgatgaggttgtatctgtcattgaaagacgtgcagaacaattggattatgtactggtggacactcctggtcagattgagatcttcacttggtcagcttcaggagctatcattacggaagcttttgcatcgacgtttccaacagttgtagcatatgttgttgacactccgagatcaacaaaccctgttacttttatgagcaacatgctttatgcctgtagtattctctacaaaactcgccttcctctagtcctgacattcaacaaggttgatgttgccaagcatgagtttgccattgaatggatgcaggactttgaggcatttcagacagctgtggaatctgacaaatcatactccgctacatatacccgaagcctctctctggttcttgacgaattctacaataatttgcgctctgttggagtatctgcgatttctggttctggagtcaatacattttttgaagctatagaagccagcgccaaggaatacatggaaacctacagggctgatcttgacaagaggattgctgaaaaggaaagattggaggaagagcgcaggaaggagaatatggaaaaattgcagaaagatatgatgaaatccaaaggacaaactgtggtgctcaccactggtttgaaggaaaaaaattctgtttcagacatgatggatggtgctgatgaggaggaagaagaggaagcattggaagattttgggttttctgaggatgatgaagacgaagacgaaggagaagatgaggaggtggctcattttggcttttgaggtactgtagaattgctccatttaaatttgtaatgtagtcagttgttttggaatattaggaagttgttaatgatgcttgcacactagcttgcattggatgtgaatatgtgtttctggcactaatgctaaccaacatatatctgcagttgttacttgacctagaggcatattatatgttgcattagcaacactgacatc

SEQ ID NO: 156237 - DNA, 1353 bp, Zea Mays
gttggcgttgcggcagaaaatccaagcggatcacaggagggaggagaggagggaaccgagcagtggagcaccatcggcatcggcgtcgccatttgccggtgccgcaccgcaccccctttatatcccccgtctcccacctctttcgcctcccctatttcccatcccaccacccaccctgccccgaccccgagcgcaaagccagcgcagcgcccatctccttcttcctcctcgttggatcgcagctccttgttcctcgcgtccgatacgccaggttttccttctgcgagcaacaattcttggcgcgcgcgcgcactcgcaatggcgtccacgtccagctcgacgccagcggcggaggtggaggagaggggccggaagcggaagcgcgcggccggggcggcgccgacgcagccgtccgagtggcggacgcggcgcgagcacgagatctactcgtccaggctcctcgaggcgatccgcctcgtgcgcgcggggccctcctccgccgccgccgccaaggcggccccgacgcgcagcagggccgtgcgcgaggcggccgaccgcgcgctcgcggtcgcggcgcgcgggcgcacgcactggagccgcgccatcctcgcgtcccaccgccgccgcctccaggccgcgcaccgcgcgcgccttcgcgcccccgcgtccccgcctccgcgccacggcgcctccgcggcgaagggcaccgccgcgctgcctccggtggcgaggaaggccatggtgctgggccggctggtgcccggctgccggaagctgtcgtttccgacgctcctcgccgagaccacggactacatcgcggcgctccagatgcaggtccgcgccatgacggccctcgccgaggcgctgtccgccgtctcctcatcatcttccggcgccggctcttccccttcctcctcgccggcgtgaccaacattcgtggattcgttgtaaattttttttccgtctattttttccctcgccccgaatttttcctcgggattagttaaccgctagctttccctctttctagtttcctttgtcgtcttgtttctcccagttcggtgagcggttagtgttatgatgaagacgacgacgacgacgatggcgtcccagcgattaacccgtgctgtaatatgtgatagaagaagccgtagcccacagtggttttgctgtctctatcctctcctccctccggctcaggattcttttgtagcttggtttgttctcacctgcttcgattcgctctccgatgaatgcagcttgaaatgttggttcagatcacgtcatcgtgtatgatgcatcctttcatgtgcttcttgctcaacatcctgtagcattttctccatggcttgc

SEQ ID NO: 156238 - DNA, 1023 bp, Zea Mays
atggccgccctcatttccgctctcctcttcgccgccctgctcgtggctgcccagtacatgctccgcttgctccactccttcctgtgggtccctctccgcttggaacgccgcttccggcggcagggaattcggtggccaccacgaagcctggtctccggtaacgtagctgactaccgcgacttgctagccgccgccaggtccccgcccctctcctccttccgccacgacggcgtcgtcgcccgcgccacgccgcagtacgcgctggtgatctccgacccggagctcgtgaaggccgtgatgactgactccacgggggcctttgataaggcggcctcgggcggcaacaacccgctcgccaggcagctcatcggcgaggggctcgtcgggctctccggggagacgcgggcgcgccaccgccgcgtgatttcgccgacgtttaacatggagagggtgaaggcttggataccaggaatagcagctgtgacatcatctgttctggataagtgggaggccgaagagtggcaggtcaaggcccgtgatgaggtccttaaagtgtgcggaaagcatgagcaccctaatgcagaaaacctgagcgatctcaagattgtaactatggtgttaaaagaaaccctcaggctgtatcctccaactacatttatcaatcggactgccaccaggaatatcaagctgggtaaactagacatcccgactggcacacggctggacttccctatcattcacatccatcgtgaccatgaagtctggggcatggatgcagaggagtttaatccatcaaggtttgcagatggcagcagctatcacctaggtgcttacttcccctttaggatcggccctacaatttgcgttggccagaatcttgcaatggtcgaggctaaggtggcgcttgcaatgacccttcagcggtttgcgttcaccgtttcggcgtcttatgctcatgcaccgatgttggtgttcaccctccagcctcagttcggtgctcaggttcttgtccagaagatatga

SEQ ID NO: 156239 - DNA, 604 bp, Zea Mays
tttcatcatgtcccctcactgcacaacaggtattattaattgtagtagtttattattgtcagtccattagttgcttggaacaccgtatggagtccatttgttggaaccctgttaaccctaatcattgatgagtgctagtttgaatcgaacaattttatacttttattccaagcaaagggttctggtgccttgcatgtgatacgaaacactgcctgcagctcaaattctctgacagtggaagcttgttttttttcccaaaccatggttgcacatgctcctcgttcaaagaataaaacaagatgattgatgagtgcaggcatgtgccatgaagaactcagttctggccatggtatccgtgcactactgtgatcttcgaacatctgtgaatggcgcaggaaaatgttgtgctggtctcaataaaatggtgacacggtttatcagtttgcattgcggcaggcctgtcggttttgtttgtttgtttgttcggagacagacaataagagcaagattagctggcgttctttttacaaccaacactagtggtagctcctccctggatcgcggtgatggtttctgttgctgatacatgaatgatttgattgtg

SEQ ID NO: 156240 - DNA, 2487 bp, Zea Mays
atgcgccgcaagaagcacttggaccgggttgggggcggcggcggaggtggcacggagctcttcatttgcttcacctcgcgttcctccgctgcctcagccacttccgtcgccggcgtcagcgcgcactcttccctccgcccctccagctcctccaagctcctcagccccggccgcggcagtgccagcgcaagcggagctgaggcagtgccggccccgcctctgcacccctcactcagccgccgcctccgcaacagcggcagcctcaagggcggccagtccccaatgttcccctccgggtccaccggcggtggccgccgcggccggggcggattcgaacctgccgaaccctcgtctcccaaggtcacctgcatcggccaggtccgcgtcaagggcggtaagcgcaagcccaagcacgcctccgccgccgcgctgcgctcccgctccaggcgcggcggaggcgggagcgcagaggccagcttccgccgcgctggcgacgaccgggaaggaccccagggcaagaaccagggctgggtgcaccagatcccggtcaacatctgcgaggcactcaagacatttggctcctgcgggggccgctctctctgctcatcgtctcggcctggcgaagccggcgagtggggtgcgctgtccaccgacgcacaccgtggtaagaagcgggggcagcgcgctcctgctgggggtagctggctgtgcggtgctgctgtggcgaggtgcctcctggcgatccaggaggaggaggacgacgacgaggtcggcaagggagccgcggttgtgccggcagaagagatgagggcatcggacgggtgggatgtcgaggaggagaagactgtgatggtaggggaagtggaggtggagaagaaagatgagatcttggtggtggggaaggaagaagaggggagggtgagcgtctgcatccccccgaggaatgcactgctgctaatgcgctgccggtcagacccagttcgcatggctgctcttgccacccgcttctgcgggtctccagctgcagctaccgtggaacaggtggataatgaggtgtctgggtgcctcaacgacaatgaggaagaggggaaagaggaagctggggctgaggctgagccagtggagtgcaaagacgaagctcacggttcagttgtttctgtcacagacttgaaatgtgaagagtgtggttgtgatgaaaatggtggcgctgaaacagatgagatagatcaagcaaaaacagaagctgaagagagttctaaatgtggagatctaatggaagaaaaggaggatgcatcctgcagagatctagtaggagtagaggaagcacaaattgttcggaaaaatgctgggttggaggtttctttgggtgaagttacagagacggaaaaccaagggctggacatggtggtcagtgaggaagaagttccagcacaagaggaagttgaagataagatgaaggggaggaggtcaatcagcagttattctccctcagcagctctgaaggaggaccgcaccaaattgcgacggtggagtagcaggaggcgtggtaacactagcagcagggcctcatcgtccagtgatagggttggcaggcggcacagcttctcggccgagacagaggcacggcgttctagcttctcgagcttcaaggattcaaggagagctagtttcaccattgatagagatggccggaggtggagcttctcgattgaacaggagcatctcgttgcggagcctaaggtgctgatggcatccagaaaggggaagaagacttcttctgagccagagtcagagaaagattgtgttgttgttgctccaaacagtgtagaggaaggacaagaatcctgtgatgatggaaaggaagaagaaactaccgagaatgcagagggagaaggaaaaacacattattcggaaatcaaccaagaagtagagaaagtagaaactagagcagaagagtgtgaaggtggggccggaccagtgatacagaggaggaagaagagtggcgagttaccagattgcctcatgttgatgatgtatgagccaaagctctccatggaggtctccaaggagacatgggtctgcagcactgacttcgtccattggaagtcttaccagggcaagaataactacaaccacaggcaacagaaggcttttgctactggaacagtggagactgtaaaaaaggagaatgctgatggcagcaccgttgtgaaagatgtacaagagagcaaagatccatcgacggtgaactcagctgtgcccatgccatgtccagttgtccagaatacactggcactcaaaccagcaacaacagaacagacgccgaagctggagttgccgccggtcaccaatgcggcagcctacgccccgttcgttctgaaaaggtgcaagtcagagccgatgcgatcatcagcacggttggcacccgatgcttgcttctggaaggaccgccatctgccactgaacgcaactggagtcgggttctga

SEQ ID NO: 156241 - DNA, 444 bp, Zea Mays
atggctgggcgctgcggcgttgacccgatccctgctgctggacgtttgggacaaagagaaggcagggaaggcgccatgagcacatgggctcgccggcgagcaggagcccggcgaggccacgacagcgctcagcaggggatccccggcgagcagcgccatggcaaggtggaggtcagcatagggagcagaggctcatccaaagcacagagaaaggaagggctcggcaagggggaaacagccatggacggaaaagctcctgcgccgcactgctgcgtccaagccatagaaaaggggctaggcgccgagctccctgctgctgccgtgggacaccagggagaagatggcgtcgtgggatggggctccctgcgttccagaagagagagaggctggggagagaaagggacatcgacctccatggctggtggcgagaggaaaagaagctag

SEQ ID NO: 156242 - DNA, 891 bp, Zea Mays
agcacaagccgcaccgcaattagccgcgaccctccgcagaatcggctcacgtttccgatccagaggtccagactgttccccgagttttcccactgtgtcctctcctcgcgagtcccggcgaagcaggcgaaccgcgaacatgtgccccaccggcaggtacctggggctcgacctctccggcgctggcggcgacctgaggccggcgttcgacgtgcttgacgcggaccgggacggccggatcagccgggacgacctcaagtccttctacgccgccgcggggcccgccgccggcgaccggttcgacgacgacgacctcgcggccatgatcgcggccgccgacgccgaccgcgacggcttcgtgcagtacgacgagttcgagcgcctgctggccggccgcgccgcggcggccgccgccgccgcgggaggcgctgggcgccgctccgccatggagggcgccttccggctcatggaccgggacggggacggtatggtcggcttcgaggacctcaaggcctacctcgactgggccgggatgcccgcggcggacgaggaggtccgcgccatgatccgcgtcgctggcggaggggacggcggtgaaggcgtggggctcgaggcgctagccggagtgctcgcggtcgacctggaaggcatcgccttttgattttgagagatccatgggctgttgtgcggagtactgtattctttttcttggggttttcggttggtgagcgtggtgcgttgtctgtcgattgtctgtggttgactggggttcacggaggaccattcaaaacgagataaaaagttcgcatgatggccgtttgagatgctttctctggacccgacaatcatatatcagacattgcaaagtccaatgggagtttatatcgaaaa

SEQ ID NO: 156243 - DNA, 684 bp, Zea Mays
caagccgcaccgcaattagccgcgaccctccgcagaatcggctcacgtttccgatccagaggtccagactgttccccgagttttcccactgtgtcctctcctcgcgagtcccggcgaagcaggcgaaccgcgaacatgtgccccaccggcaggtacctggggctcgacctctccggcgctggcggcgacctgaggccggcgttcgacgtgcttgacgcggaccgcgacggcttcgtgcagtacgacgagttcgagcgcctgctggccggccgcgccgcggcggccgccgccgccgcgggaggcgctgggcgccgctccgccatggagggcgccttccggctcatggaccgggacggggacggtatggtcggcttcgaggacctcaaggcctacctcgactgggccgggatgcccgcggcggacgaggaggtccgcgccatgatccgcgtcgctggcggaggggacggcggtgaaggcgtggggctcgaggcgctagccggagtgctcgcggtcgacctggaaggcatcgccttttgattttgagagatccatgggctgttgtgcggagtactgtattctttttcttggggttttcggttggtgagcgtggtgcgttgtctgtcgattgtctgtggttgactggggttcacggaggaccattcaaaacgagataaaaagttcgca

SEQ ID NO: 156244 - DNA, 684 bp, Zea Mays; identical to SEQ ID NO: 156243

SEQ ID NO: 156245 - DNA, 361 bp, Zea Mays
actagtaaaaaacaaaaccctaaaataaccagccatatgctacgccctgcccagacgacggtgacgaccatggattctcaggcgccaacgaactcagatggtgacgaaggaaggcgagaaaactccatttctccatttcttctatcggtcccgaagtacttatgtcttttctgatggatggatgaatggatcatggttcatggatgagtgcttgtcgttgtagtgatgtctgaaatctagattgtttgtgctacatgttagtacctagttatcccttaattggggatggggacccattggggacccgaaacccgaatggggatgggtatgggatgagttttgtacccatgatgggtatggg

SEQ ID NO: 156246 - DNA, 1092 bp, Zea Mays
atggggagggcgccgaggggtgtgtggaacatggagcttctggggcttgccgtcttggtggttcttgcggtggtcgccgagacgcggtccttggagaagcagaatctgtgcggtgggtgtggggttggtggcgggggaggatatggcggaggcggtggcggtggcggtgaccttgggcttggtggtggccttgggcacggtgtaggggttggaattgggattggaggagggaatggtgggggtgcaggtggtggaggcggcctcggtggtggagctggaggtggcttaggcggaggcggagggcttggtggcggtggaggaggtggttatggcggaggtgctggcggaggcggcggccttgggggtggttccggtggaggtctcggcggtggtgaaggcggaggaggcgggcttggtggtggtgccggtggaggcggtggtcttggtggcggaggaggagctggtgggggagcaggtgcgggtggcggctctggcggaggcgccggtgcaggaggtggcgctggaggcggctatggcggaggtgccggtgcaggaggcggctatggtggaggagctggtggtggatacggtggaggtgcaggaggtggcgccggaggcggctacggcggaggagctggtggtggtgccggtggtggctacggcggaggcgctggtggaggctacggtggtggtgcaggtgctggctctggcggcggcggtggttatggtgctggtggcggaggtggaggtggcatcggcggcggtgtctgaatcagcgtctcacatgcatgcatggtggtgcaagctgcaagcagaagcaagtgctcgaactcgctcggtattcccttcgcaggggtgcgtggacgtggagtcgagctataccgatcgatatccgggatcatactctctgcgtagcgaatagcgatcatagtaataacagaataaggatgctgcaatacgtctaatcagtcatcattatacgatggtttatacggtatatatacactgcgttggtagcaagctgaaagattactttgtatcgtactattttaattatattttgtggagataaagaaattattatgagctaca

SEQ ID NO: 156247 - DNA, 1124 bp, Zea Mays
tggggtccggtgcggccacacgctcacggcagtgccggcagccggggaggaggactcacccgggtacatgggcccacggccgtggggaccccgtgcttagctcgcgaaaccctaggagcagcgggaggtgaggcttggctggcggcgatggacgtggactcacgcatggcgacggagtccgactccgacgcgtgcggtggcagcggatccgggagcgagacccccacggcgtccccgtccccatccgtggttagcttggcgtcgacagcttcctcatctccttctccttccacacgcccaatgccaaggaggacgacagcaaggtccaggccttcctcgtggagatggagagcgccatcagggaccacccgctctaggccaacgccaccgaccaggagatcgaccatgcgctcgagggcctagagaagtatgtcatgaccaaattgttcgaccgcacgtttgggacttccactgaggatgttgtttccgacatggacatctcggagaagattggtctcttgcagcaatttgttaagcctcgtcacttggatatacccaaggtccagcataacgaggcattgtggctgcttgcagtgaaagagctgcagaagattaattcctttaaagcaccacgtgagaagcttctgtgcatcatgagctgctgtcaagtcatcaataacttgcttctgaacatatcaatgtcaaatgatcgaacattatctggagctgatgagttccttcctattcttatctatgttactatcaaggccaatcctcctcagctgcactcaaatctgaagttcgttcagctctttagaagagaaacaaagctaattttagaagtcgaatattacctgactaacctcatttcagcaaagatgtttataatagatgtcagtgctcactcgctctcaatggaggaaagcgagtttcagaaacatatggaatcggtaagacttgctactcaagtatctgttgcaagcccaagtagctcacaggggcttcccacatctacaagggcaaatcaggaggaaactcatatggcaggttctagattccctttcatggactcagaaactgaaagcttggctccaggggaagtcaagcagctgcatcaataatac

SEQ ID NO: 156248 - DNA, 1752 bp, Zea Mays
cctgctggcttttccacactgcccactcgttccaattgatccatcggccgggctagcctggctccgctatataagcatgcagcgttcttcttcgccgcaagcatcacagccgcagcaacacagctcaatttactccactgtctcatggccatggggagggcggcgaggggtgggagggccttggagctcgcggcattggccttggtgctggctctcggagtgtccgttgaggcgcggttccttgagacgcagaacttgggtggcggtggcggtttcggcggaggcgctggcttcggtggtggtgctgggcttggtgggctcgggcatggtggaggtcttggtggcgggtttggaggtggaaaaggtggaggtctcggtgcgggcagtggtcttggtggagggggcgggtttggcgcgggtggtggagcaggaggtgggctcggtggtggccttgggaatggcggtggccttggaggtggcggaggttttggtgatggaggcggcctaggtggaggagcaggtggtggactaggcagtggcgctggaggtgggcttggcggtggtctcggcggtggtgctggtgaaggtcttggtggcgcaggaggagggtttggaggtggtggtggtgccggaggtggcctcggtggcggtacaggtggtggagttggaggtggtcttggcggaggtgccggtggcggcggtggtttgggtggtggtcttggaggtggcagcggttctggaataggtggtggcttcggaggaggcaaaggtttcggcggaggtcttggtggaggtagcggtggtgggtttggcggcggtggtggtgctggcttgggcagtggaggtggtgtaggaggagggtttggtggtggtgcaggaggtggtgctggcttcggcggcggcggcgggttcggtggtggcggtggcattggtggtggtcattggtaatgaagttatgagcttgtggacattttctgatgtagatgaatgctagtacatatgatcaaccagatcttatgtttgtaattttatttgaacttcgccatcttcgttattgtaaggttacaattacttattcatcatcttcataaaggaataagatactgagatgttatgtttgcaatgataagttcttttctttgtgattaatttcatatcggggttcatcggtgtttttgtgcaatgataagttcatttgtacaaacttgttaacatattcgaccattgtacaacatgttccggtcatctagtgatataaacatgtcaacaagagttacttttccttaaattcccattgcaattgctcaaaatattgagggatgacacaagtttgagcttaactagtagatcaacattaggaagcttctattttagaagaaatcctctaaattagatcatctatcattgttctttttattttataacacaatatccatatatactttactataactaatttaaaactactttcgaatcctctacaagtccatcctcgcatgatactaaacaaatcttagaaaatatcgcaagaatccgatatgcatccattaaaccaatagcatcgaattattagagaaaaataatagacattatatccctttcatttttcaaacattatcgacctcttatgttatgaaaataacctagagtaataccttatatttatagttaaattatctagcctctcgttataaaaaacctaaagtaactcattctactaataaggtagcacatgctctccactcctacatt

SEQ ID NO: 156249 - DNA, 150 bp, Zea Mays
atgcaaagaacagtttccaaatcgcgatcaattcccttttcaaagtctgttgcagcagctcgggctcttcctgcatgccacaaatggcccacaaaaaagaatcctagaacaaaatgggaggtcgctaaccaacttctaggggagacataa

SEQ ID NO: 156250 - DNA, 477 bp, Zea Mays
atgccgctaccagagatctatcttagtggcatatgcctgatggttagcagttttgcagatgataagaaacccgtggttagaaatcacatccaaaacaacacggggtactccatacaaaacatagtacctatgatcagtagacccactgggagttgcagagatggtgaagatgtaagtgtgaaccaagaagggggtagtattcagtttgatatatcattgaaccaagagtttgatagttttgcgcataactttggtcaaacatacaatacagaggataggcaacaagagccacaacataatgctgcagatgtcattgttcttagtgattctgatgaagaaaatgacccgattgttctccttccagctgtctatgcaaatactcctacaaatggtgacagtttccctttcgtcactgatgctgccgtatctggatatcctgaagggtaccaggaggaatttaatgcttctcttttgtga

SEQ ID NO: 156251 - DNA, 296 bp, Zea Mays
agcaggaaaacaatggagtggtgggctgctgatggtttgtactacttccggacctgaaaggagctttttacaatggcaccgggaagcagcattgtgactgtagtccccgagtcggactgtggagatgacaatgggctttctgagtcgattgggggtatcaggcttgacgtagactctgcaagtaaaccgtggtctacatcggcatcgctagccaatgttgcattgtcatcgatgtgtggcttgaatgatttgctcgaatgcccagtgtgtaccaactcgatgcgcccacctatact

SEQ ID NO: 156252 - DNA, 3690 bp, Zea Mays
cctcgtgaatcaatgagcgcagcgaggaacggtgaagcaaagctaaggtatcggacgaacacatagggggcgagcgagccgactgacgagcacaagaccggcggacggggccgcctaatccagtgagagctcccccaagcgccatggcgtcggacagtcgcccccccaagcgctccccctccgcgcgacgcgtggcgccgcgtcacgcgcaccaccaccactcgcagtcgtcgggcgggagcacgtcccgcgcaggcgcgggaggaggtggcgggggcgctgcggccacggagtcggtctccaaggccgtcgctcagtacaacctagacgcgcggctccacgcggtgttcgagcagtcgggcgcgtcgggccgcagcttcgactactcccagtcgctgcgcgcgccgcccacgccgtcctccgagcagcagatcgccgcctacctctcacgcatccagcgcggcggccacatccagcccttgggctgcacgctcgccgtcgccgacgactcctccttccgcctcctcgccttctctgagaacgccgccgacctgctcgacctgtcgccgcaccactccgttccctcgctcgactccgtggcgctgccccctgtttcccttggtgccgacgcacgcctctacttctccccctcgtccgcggtcctgctggagcgcgccttcgccgcgcgcgagatatcgctgctcaacccgctatggatccactccagggcctcctccaagccgttctacgccatcctccaccgcatcgacgtcggcgtcgtcatcgacctcgagcccgcacgcaccgaggaccccgctctctccatcgccggcgcagtccagtcccagaaactcgcggtccgcgccatctcccgcctccaggcgctacccggcggggacgtcaagctcctatgcgacacagtcgtggagcatgttcgcgagctcactggttacgaccgtgtcatggtgtacaagttccatgaagacgagcacggggaagttgtcgcagagagccggcgcgataaccttgagccttacctcggattgcattatcccgccacagatatcccccaggcgtcgcggttcctgttccagcagaaccgcgtgcgaatgatcgcagactgccatgccatcccggtgagagtcatacaagatcctgggctgtcgcagcagctgtgtttggtaggctccacgctacgcgctccgcacgggtgccatgcacagtacatggcgaacatggggtcaattgcgtcgcttgttatggcagtcatcattagcagtggtggtgacgacgagcgaacaggtcggggtgccatctcctcatcaatgaagttgtgggggttagtggtgtgccaccatacatcaccacggtgtatcccttttccattgaggtatgcttgcgagtttctcatgcaggcatttgggctgcagctcaacatggagttgcagcttgcgcaccagctgtcagagaagcacattttgcgaactcagacgctattgtgtgacatgctactgcgagattcaccagctggcatcatcacgcagagccccagcgtcatggaccttgtgaagtgcgatggggctgcactgtattatcgtgggaagtactacccattgggtgtcactcccaccgagtctcagattaaggatattatcgagtggttgacggtgtgtcatggggactcaacagggctcagcacagatagccttgctgatgcaggctaccttggtgctgttgcattaggggatgctgtgtgtggaatggcggtggcttatataacaccaagtgattacttgttttggtttaggtcacacacagctaaagagatcaaatggggtggcgcaaaacatcaccctgaggataaggatgatggtcagaggatgcacccacggtcatcattcaaggcatttcttgaagtggttaaaagcagaagcctgtcctgggagaatgcagaaatggacgcaatacattccttgcagctcatattgcgtgactccttcagagatgctgcagagggcactagcaactcaaaagccattgtcaatggacaacgtcaacttggggagctagaattgcgggggataaatgagcttagctctgtagcaagagagatggttcgattgatagagacagcaacagtacccatatttgcagtagatactgatggatgcataaatgggtggaatgcaaagattgccgagttgacaggcctttcagttgaggaggcaatgggcaaatctctggtaaatgatcttatcttcaaggaatgtgatgatatagtcgaaaagctactctcgcgagctttaagaggtgaggaagacaaaaatgtggagataaagctgaagacatttgggtcagagcaatctaagggtgcaatatttgttattgtcaatgcttgttccagcagagattacacacaaaatattgttggtgtctgttttgttggacaagatgttacaggacaaaaggtggtcatggataaatttatcaacatacaaggggactacaaagctattgtacacaatcctaatcctctgctacccccaattttcgcatcagatgagaacacttcttgttcagaatggaacacagccatggaaaaacttacaggatggtctagagaggaagttgtcggtaagtttcttattggagaagtgtttggaaattgttgccgactcaagggcccagatgcattgacaaagttcatggttgtcattcacaatgctatagaaggacatgattctgagaagttccctttttcatttttcgacaagaatggaaagtatgtgcaggccttattgacggccaacacaaggagcaaaatggatggtaaatctattggagccttttgtttcttgcagattgcaagcgctgaaatacagcaggcatttgagattcagagacaacaagaaaagaagtgttatgcaaggatgaaagaattggcctatatttgccaggagataaagaatcctcttagtggcatccggtttaccaactctctattgcagatgactgatttaaatgatgaccagaggcagttccttgaaactagctctgcttgtgagaaacagatgtccaagattgttaaggatgccagtctcaaaagtattgaggatggctctttggtgcttgagaaaagtgagttttctcttggagacgttatgaatgctgttgtcagccaaacaatgtcattgttgagggagagggatttacaacttattcgagatatccctgatgaaatcaaggatgcatcagcatatggtgatcaatttagaatccaacaagttttggctgacttcttgctaagcatggcacagtctgctccatccgagaatggctgggtagaaatacaagtcagaccaaatgtaaaacagaattatgacggaacagatacagagcttttcatcttcaggtttgcctgccctggtgagggcctccccgctgacattgtccaggatatgttcagcaattcccaatggtcaacccaagaaggcgtaggactaagcacatgcaggaaaatcctcaaattgatgggcggcgaggtccaatacatcagggagtcagagcggagtttcttcctcatcgtccttgagctgccccaacctcgtctagcagctggtagagaaaatcagctgatatgttaagatctgcgctgacaccacctaacttctaggtcgattaggtaactta

SEQ ID NO: 156253 - DNA, 2674 bp, Zea Mays
gaggaggcggcgccaattctaggcgtcttcctccgtcacacccggccccgcaaaccctagctcgccccggccctgcctccggctccgcccatcgctgccatgtcgaagcggccgaagcttgagggtttcagcatcccgcggccaacctcctacaacttcgagcgctctcagcccgtgcagcggctctaccgtccgaccgatgacccggacctcgacgacatcgccttctccgacgacgctccgtcagatgccccagccggcaccgcggtggatggaaaggcggagcatgacgaggagatcgacccgctcgacgccttcatggcggagatccaggaggagatccgcgcgccgcccccgccgcccaaggccgaggcgcttcgccgcgcggactccggcgacgatgaagatgaccccgttgagagctttctgcgggccaagaaggatgccgggctcacgctggccgccgacgccatgcgcgctggttatgactccgacgaggaggtctacgccgctgccaaggccgtcgacgccggcatgatggagtacgactccgatgacaatcctatagtcgtcgacaagaagacaatagagcccatacctgcactcgatcactcgaccatcgagtatgacaccttcaccaaagatttctacgaggagaagccgtcgatttcaggtatgagtgaccaagaggtagcagattatatgaaaagtttggcaattcgggtttctggttttgatgtgccaaggccaataaaaaactttgaggattgtgggtttcctgtaccgctgatgaatgctattgccaagcaagcctatcaaaaaccaactacgattcagtgccaggctttacctattgtactttcaggcagagatatcattggtattgcaaagactggttctggcaaaactgcagcttttgtgctccctatgattgttcatattatggatcagcctgagcttgagaaagaagaaggtccaataggagtcatttgtgctccaacaagagaattggcacatcagatatatctcgaagctaagaagtttgcaaagccgtacaaccttcgagttgctgctgtatatggtggtgtttccaagtttgaccagtttaaagaactgaaagcaggttgtgaagtagtcattgcaaccccagggagattaatagacttgctgaagatgaaggcattgaagatgtttagagcaacttatctggtccttgatgaagctgatcgaatgttcgatcttggatttgagccacaaatacgatccattgttggtcaaattagaccaggtcgacaaacattacttttttctgccacaatgccatacaaagtagagcgtttggcaagagaaatattgactgatcctattagagttacagttggtcaagttggtggtgctaatgaagacattaaacaagttgttaatgtaatcccttctgatgctgagaaaatgccttggcttttggagaaattacctggaatgattgatgatggagatgttcttgtattcgcttctaagaaggctagagtggatgagatagagagagagttgaatcagagaggattcaggattgcagcacttcatggtgacaaggatcaagcttctcgtatggagaccctgcagaagttcaaatctgggacctaccatgttctggttgcaactgatgttgccgcacgaggtcttgacatcaaatcgattaaaacagttgtcaactttgatatcgcaaaagagatggatatgcatattcaccgaattggaagaactggtcgtgctggtgacaaagatggcactgcatacactctgattactcagaaggaggcacgctttgccggtgaactggttcaaagtttgattgctgctggccaggatgtacccaatgaactcatggatctggctatgaaggatgtaagattcagagcaaaacgggactccaggaaaggtgggaagaaaggtggcaaaggaaaaggtggcgtcggtggtggtgctgggcgcggtcgtggtgtgcgtggagttgattttggcctcggcataggttacaatgccgaatctggttcacaggtgcctgctccaagatctgctgctataaattcgttgaagacaggggtgatgcaacaatttaagagcagctttgtgtctggatcttcaaacacgccaagcagcagtgcaccttccttggtaagaccagcactacgtggctttgtgtctgggggcaccattggaggagacacacggcctgcacagcctgcccccactttcgtaactgcatcctggccagcacaggctgccccctccgtccctgcatcccgccctgctgctggaaataacaatgaaaatgggaacccaaatcccaaaagttcacgggatcggcccagggagagaaaacgaccatcaggttgggatcgttagtccctgctaaccggtgtcttgaattgcgactccttttcctctttgttacattgatgtagtctcttgggggacatcctatataaagcatattgatgtacactgtagattacatgatgtcaggttgtgaatgggaagtgtttttagtgaagtttggcctctccgtcatcttccaactactattgtatctggccgttggttcacatttttcactggagtaaaatcgaccagttgtcctagaacttgtcactaagagcatttccactagatt

SEQ ID NO: 156254 - DNA, 488 bp, Zea Mays
tattgcatgttgagggatgcactacattatatggctacttttgaaaggcttgtgtcatatgaacgtcgcaggtatgagaaaattgcaccttcctttgaagaatgggatttggcaaagactcttttaccatgtttgagaaagttctttgacttgactgagttattttctggtacattatatcccactgccaacttgtttttaaagtgttttgtgagattaagtttttagttgttgattggtgtgattgcatccatcccactattattaacatggaaacactatgatggtcaagtttgacaaatactggaataagtcaaatattgctcttgctgtagctagtgtccttgatcctagatacaagaggaaaattgtagaattttacttgaagaaggtgtatccatatacatatcaaactgaactggataaatttaacggtggcatgaaaaaatatgtatcgatattatgtttgtattacaccctcaacatca

SEQ ID NO: 156255 - DNA, 1504 bp, Zea Mays
gccacgcctcacgcgcttccggccttccgctacatgtcgtctcttttcgtttctcactttctctcttcgttcccaatttgaaggctgcccaacccttgcgccggtaggtggtggcggtgaggatagagggttacctgaggaggcagtgatggcggccacgattcagtacaaccggagcaacccggcggtgaagcggatcctgcaggaggtcaaggagatgcagtccaacccctcacccgacttcatgtccctccccctcgaggaggacatcttcgagtggcaatttgctatccttggtccgagagacagcgagtttgagggtggaatttatcatgacaaggtagatgaaggtggcaacacatccaagtccatgtcaggctcgtcgagtggccatcctgtgcctgaagctgaatcgctggctgcagaaaacacgggtgaagcatcagcagttgaggttgccaaccatcaagtgcctgaagcgagccgtagagaaagcattccaagagttccttcgtctctgcagaatgctgctattgcaacccagaagccaaagcatgacaggctattgaccttggccgcacttgggttgactcttgctattatggcactagtgatcaagaagttcttaaaaatcaatggcttgggcggtttcattgagggcaagttctgagtaggattgtgcataagttggatgtacgagatgactcattcctcgtactcagcatatgctataagctatataaccccgtaagatttgtaattgtttagttatagatgaaatcaaaatggaacggtactatcaataccccattgtatatgtacactggattgaaaattgctgagtatttaagcatctgatgtatatattgtgctacagcatgcactttgtttggctgccgtttaggactgtttagggttaggagaccagaatcgtcaattcccaattttccctcgagggcacatgattaagaaattcatgaaacctggtgttgcagaacctgagttggcactcggaacagtggtgaataggcatggttttccaaacataactgattccatccgtattttttttccttttaagggcatgtacgaatatgagctcttcgattttcaaaatataaaagacagcatatttgaatatcgtatgctaaactttaatataatgctaaaactagccggttgcccgttcgttgcgacggtccacaacaatatttatataaattatccactaaaaagatcttaagattttttattggttgtctccgctccccgcataatatttttgatttgactaactgatgttgttgtttattttatccaatatgtcttggtacaacacgaccaatgaaggcaacgattagaataaagttcacaacgactgactgaacgaaccgagattatagaatgacataattccaccatacagagaccaaataagaggaagtttgtgagctcaagtttctaaaataaatcacatgaacttaaacttataaaaaaagataga

SEQ ID NO: 156256 - DNA, 1556 bp, Zea Mays
gtcccacgcggcagagacctggccacgcctcacgcgcttccggccttccgctacatgtcgtctcttttcgtttctcactttctctcttcgttcccaatttgaaggctgcccaacccttgcgccggtaggtggtggcggtgaggatagagggttacctgaggaggcagtgatggcggccacgattcagtacaaccggagcaacccggcggtgaagcggatcctgcaggaggtcaaggagatgcagtccaacccctcacccgacttcatgtccctccccctcgaggaggacatcttcgagtggcaatttgctatccttggtccgagagacagcgagtttgagggtggaatttatcatggcaggatccagctaccttcggattatccattcaagccaccgtccttcatgctacttacgccaagtggacgctttgagattcagaagaagatttgcttgagcatatccaattaccaccctgagcactggcagccttcatggagtgtccgcacagctttggtagccttgattgccttcatgccgacgaacccaggtggggcattgggctcactggattacaaaccagaagacagacgagcacttgctataaaatcacgtgaggtgccgccgaaatttggctccccacaacgtcagaaactaattgatgagatccatgagcaaatgctcagtaaggctcctcctatcccccaaacgctgccaaatgtgccaaacgaggagctcgcacctgactcttgtgatgagcatgcagacaaggtagatgaaggtggcaacacatccaagtccatgtcaggctcgtcgagtggccatcctgtgcctgaagctgaatcgctggctgcagaaaacacgggtgaagcatcagcagttgaggttgccaaccatcaagtgcctgaagcgagccgtagagaaagcattccaagagttccttcgtctctgcagaatgctgctattgcaacccagaagccaaagcatgacaggctattgaccttggccgcacttgggttgactcttgctattatggcactagtgatcaagaagttcttaaaaatcaatggcttgggcggtttcattgagggcaagttctgagtaggattgtgcataagttggatgtacgagatgactcattcctcgtactcagcatatgctataagctatataaccccgtaagatttgtaattgtttagttatagatgaaatcaaaatggaacggtactatcaataccccattgtatatgtacactggattgaaaattgctgagtatttaagcatctgatgtatatattgtgctacagcatgcactttgtttggctgccgtttaggactgtttagggttaggagaccagaatcgtcaattcccaattttccctcgagggcacatgattaagaaattcatgaaacctggtgttgcagaacctgagttggcactcggaacagtggtgaataggcatggttttccaaacataactgattccatccgtattttttttccttttaagggcatgtacgaatatgagctcttcgattttcaaaatataaaagaca

SEQ ID NO: 156257 - DNA, 1017 bp, Zea Mays
gcaaatcatcagatggtgactatatgggaatgtatttggttacccaatgtggaatggtttattttcatgattttgtgttaacagaagttttaacctttaagggtctgtttggttgggctgtggctgtgaaaaaagttgctgtgggctgtgagctgtgaaaaaagctgctgtaggctgtaagctgttaaaaagtccgcacagctttggtagccttgattgccttcatgccgacgaacccaggtggggcattgggctcactggattacaaaccagaagacagacgagcacttgctataaaatcacgtgaggtgccgccgaaatttggctccccacaacgtcagaaactaattgatgagatccatgagcaaatgctcagtaaggctcctcctatcccccaaacgctgccaaatgtgccaaacgaggagctcgcacctgactcttgtgatgagcatgcagacaaggtagatgaaggtggcaacacatccaagtccatgtcaggctcgtcgagtggccatcctgtgcctgaagctgaatcgctggctgcagaaaacacgggtgaagcatcagcagttgaggttgccaaccatcaagtgcctgaagcgagccgtagagaaagcattccaagagttccttcgtctctgcagaatgctgctattgcaacccagaagccaaagcatgacaggctattgaccttggccgcacttgggttgactcttgctattatggcactagtgatcaagaagttcttaaaaatcaatggcttgggcggtttcattgagggcaagttctgagtaggattgtgcataagttggatgtacgagatgactcattcctcgtactcagcatatgctataagctatataaccccgtaagatttgtaattgtttagttatagatgaaatcaaaatggaacggtactatcaataccccattgtatatgtacactggattgaaaattgctgagtatttaagcatctgatgtatatattgtgctacagcatgcactttgtttggctg

SEQ ID NO: 156258 - DNA, 771 bp, Zea Mays
gtcccacgcggcagagacctggccacgcctcacgcgcttccggccttccgctacatgtcgtctcttttcgtttctcactttctctcttcgttcccaatttgaaggctgcccaacccttgcgccggtaggtggtggcggtgaggatagagggttacctgaggaggcagtgatggcggccacgattcagtacaaccggagcaacccggcggtgaagcggatcctgcaggaggtcaaggagatgcagtccaacccctcacccgacttcatgtccctccccctcgaggaggacatcttcgagtggcaatttgctatccttggtccgagagacagcgagtttgagggtggaatttatcatggcaggatccagctaccttcggattatccattcaagccaccgtccttcatgctacttacgccaagtggacgctttgagattcagaagaagatttgcttgagcatatccaattaccaccctgagcactggcagccttcatggagtgtccgcacagctttggtagccttgattgccttcatgccgacgaacccaggtggggcattgggctcactggattacaaaccagaagacagacgagcacttgctataaaatcacgtgaggtgccgccgaaatttggctccccacaacgtcagaaactaattgatgagatccatgagcaaatgctcaacaaggtagatgaaggtggcaacacatccaagtccatgtcaggctcgtcgagtggccatcctgtgcctgaagctgaatcgctggctgc

SEQ ID NO: 156259 - DNA, 887 bp, Zea Mays
gccacgcctcacgcgcttccggccttccgctacatgtcgtctcttttcgtttctcactttctctcttcgttcccaatttgaaggctgcccaacccttgcgccggtaggtggtggcggtgaggatagagggttacctgaggaggcagtgatggcggccacgattcagtacaaccggagcaacccggcggtgaagcggatcctgcaggaggtcaaggagatgcagtccaacccctcacccgacttcatgtccctccccctcgaggaggacatcttcgagtggcaatttgctatccttggtccgagagacagcgagtttgagggtggaatttatcatggcaggatccagctaccttcggattatccattcaagccaccgtccttcatgctacttacgccaagtggacgctttgagattcagaagaagatttgcttgagcatatccaattaccaccctgagcactggcagccttcatggagtggtgagtaggggtggtaatggatcaagatccaaatgttttttcacaatacgttagggcccttaattaattttagttcaaaaatgaatagtaatagagctccatcctaatccgatttgatccttaaaatttatagtgtaaaatctagagcccattaccacccctattggtgagtaatctttagtcatttgtttataaggctattctcaatggggagtttatgttgtttctaagactgccgcatcatgtaaaaaataaaacatggataaagcatccatcctcactgcatagtttcattctatggtttcaaatacatttacttcacgacttatagagtttgtaattgtgcccagagagttctctcttaaaaatgttgccacgtcattaaaaacgcttatgtggcaccctatt

SEQ ID NO: 156260 - DNA, 2022 bp, Zea Mays
atgccgactgccttgactgtcttcgaatgtccaaggaaagtggtttggctggggagtgggggcagacaattacacttactccacaacacccgaagttcccgttccgtttccgttacacagactcccgactccaactccttcattcacctttattattacacggaagccgcaagcacggctagccattgccgcactagccgtcccattgcttcctccccgccgcacagagcaatggagaggcagaggagctcctcctcctcctccccgtatcagtttcttagtcccaagagcctcctcctactgtccttcgcctcctcctccctcctcttctccttcctcttcgcgctcttcgccatccgccacggccgccccctcaacctcccattcaccacgcccaacacctcatactcattcgccatgcccaacacctcatcctcgttcgccatgcccaacacctccaccgcggcccttgcaccgttgccgcctcctgggaacggtgggggttccatgggcggcgcggtggcgctggcagcagaggccggttatgcggtccgtgggcacgggagtggagattcagtggcggatggagcccgccgcgcggttaccggagacctgtccgctcggggcgtgggcccgccaatggaggtggaaggagcggttactggaggaggaaatggtggagcaccggcgactggtaaggttttggaggcgcaagaggttgcaggagctgggaataactctactggaacctcggatttggctatgcatgctaaagaaaaagaagtaaccggtgtgggaggagatgccgacaagttggggaaatttcctgttcggaaggaaaacttggccgagggtagcaggcaacacgttggttgggaaacaaagacgcagctaaatgctggcagtgcttcttcgtcacaggaagtagatgcgtcaatggtgagaccggagggagcagagtctttgacagccgtcaatttgtccatggatgatgaagctgcaatgcaggtgagaggtgaatccgtcgtgcaagacgatgttgtggttgtgggggataagcgctattcctctgtacaagcagcagcttatgcttctgagcaagtggagcagctggaaagctcgcatctttcagcggggaacaatagttccttggcagctccagctccagccaatcaaaataagcaagatcctaatctgattgaggaagaagcggtcacgagcaaaatggattctacacgaagcgataccaaacgttgtgatgtttatgatggaagttgggtgtttgatgacgagacctatccactctacacgagtgactcatgcccttttatagacgaaggattcagctgtggagcaaatgggagaacggatcaaagatacatgaagtggaggtggcgacctaaccattgcaatataccaaggtttgatgctaggaaaatgcttgagacgctgcgaggaaagcgactggtgtttgtcggggactccatcaacaggaaccagtgggagtccatgatgtgcttgctgagaacggctgtcccagatcctggaaggattcatgaaacccgtggccgcaggatcactaaagagaagggtgactacaacttcaagttcttggactacaactgtagtgtggagtatcatgtgacgcacttcttggtgcacgaaagcaaggcgagaattgggcagaagcgcatgaagacgctacggatcgataccatccatcggagctcatcgagatggaaaggtgctgacgtgcttgtgttcaacactgcccattggtggtcacatcacaaaacacagtctggtggtggggagtggaattcagggggacactgcagggagagcatgctgcccctcaatgacacccgtgctaggccggtgcctgagagaaacttgatcttggaacaggatagatggtcacccatctgtatatggccggaagacggtaggtttaaccgcgtcgagcgtccagcaggactgcagccactggtgccttcctggagtcccagatacatggaatga

SEQ ID NO: 156261 - DNA, 1146 bp, Zea Mays
atgtgctgccgccgccaacgcggccccgacgggacgcccgtcgacggcggccgccgccgccgcaggggctgcggggccgtgctcgccgtgctggccctggcggccgccgcggtggtcgcgttcctggagagcacggccggcggggtctcgtacacgggggacggctggctgcacgagtgcgccaagtgggacgccgagggcggccggttcctggcgtccaccttcttcggcggcggcgtggcggaggtgcgcgccggcgagggcgaggagcgggtggtcgtggcggaccccgacgcggccggccgggtcgcgctggggctcgcggtcgacgcgcccaggcgccgcctgctcctggtgtactgcgatcgcccaccgcgcttcggatacgccgcgctcgccgcctacgacctcggatcgtggcgccgcctcttcctcacacgcctcgacgtgccagataagcaacctgtaacagctctccctagccaccgcagaatcctagtaaaaatttggctgtttgattcagcctgcacggacttacaaattgcttccgttccgtcactcacctgccttcacgagcggttcgcaggcgagtcaacgttccccgacgacgtcgccgccgacgaggaaggcaacgcctacgtgaccgacgccagtggaaacaagatctggaaggtcagcccgagcggcgtgctgctgggcgtcatcaagaactccacgttcgtgcagcgaccagggctgcggcacaacctcgtcggcctcaacggcatcgtgtaccacccgaacggctacctcctcgtcgtccacaccttcggcggcgacctcttcaaggtcgacccgaagacggaggccgtgcacgccgtcaaggtgcaggggtcgctgggccgaggggacgggatggagctgctctccccgacgaggctggtcgtcgccggcacgccgagtagccggctggtggagagctccgacgactgggagaccgcgcgcgtcaccgggcagtacgtcgggccggtccaccgggtcgggtcgtcggcgacggtgaaggacggggacgtgtacatcaaccacattgtcgggtttgggctcggcaagaagaagacgcatgtccttgcgagggcggtgttctcgccgttggccgcagagagttga

SEQ ID NO: 156262 - DNA, 1176 bp, Zea Mays
gagacactgatgagcgaactgccgtaacattctattctatatataccctcagtccctgttccagttctcgtcaagcttgcagcaccaagttgtcgaacacttgcctgctcttgagctcgatcaagctatcatcagctgcgtcttgcgcacagcaacagcttcccaactgcaaccgtagcaaccacaacttccatggaggcacagaacggggaggttgctgccctggtgcagaagatcgcgggcctccacgccgccatcgccaagctgccgtcgctgagcccgtcccccgacgtcaacgcgctgttcaccagcctcgtcatggcctgcgtcccgccgagccctgtcgacgtgaccaagctcagcccagatggccagaggatgcgggaggagctcatccgcctctgctccgacgccgagggccacctcgaggcgcactacgccgacatgcttgccgcgttcgacaacccgctcgaccacctcggccgctttccctacttcagcaactacatcgacctgagcaagctggagttcgacctcctggtccgctacatcccagggctcgcgccttcccgtgtcgccttcgtcgggtccggtcccttgccgttcagctcgctcgtgctcgccgcacgccacctgcccaacacactgttcgacaactacgatcggtgcggcgccgccaacgaccgtgcgcgaaagctggtccatgcggacaaggacctgaacgcacgcatgtccttccatacggtcgatgtcgccaacatgacggacgagctcggcaagtacgacgtggtcttccttgccgcgctcgtaggcatggcagccgaggacaaggccaaggtggtggcgcatcttggcaggcacatggctgacggagcggctctcgtcgtgcgcagcgcccacggggctcgtgcctttctctacccgatcgtcgatcctgaggacatccgtcgcggcggcttcgacgtgcttgccgtgtaccacccagacaacgaggtcgtcaactccgtcatcatcgcgcgtaagatggacgcccacgctaaggggcttcagaatggacacgcgcatgcacgcggcacggtgccgatagtgagtccgccgtgcaagtgctgcaagatggaggccaacaccctccaaaagagggaggagatggcgacgatgacggagctgtccatctga

SEQ ID NO: 156263 - DNA, 984 bp, Zea Mays
atggaggcacagaacgtggaggttgctgccctggtgcagaagatcgcggccctccacgccgccatcgctaagctgccgtcgttgagcccgtcccctgacgtcaacgcgctgttcaccagcctcgtcatggcctgcgtcccgccgagccctgtcgacgtgaccaagctcagcccagacggccagaggatgcgggaggagctcatccgcctctgctccgatgctgagggccacctcgaggcgcactacgccgacatgcttgccgcgttcgacaacccgctcgatcacctcggccgctttccatacttcagcaactacatcgacctgagcaagctggagttcgacctcctggtccgctacatcctagggctcgcaccttcccgtgtcgccttcgttgggtccggtcccttaccgttcagctcgctcgtgctcgccgcacgccacctgcccaacacactgttcgacaactacgatcggtgcggcgccgctaacgaccgtgcgcggaagctggtccgtgcggacaaggacctgaacgcacgcatgtccttccatacggtcgatgtcgccaacatgacggacgagctcgacaagtacgacgtggtcttccttgccgcgctcgtaggcatggcggccgaggacaaggctaaggtggtggcgcatcttggcaggcacatgactgatggagcggctctcgtcgtgcgcagcgcccacggggctcgcgccttcctctacccgatcgtcgatcctgaggacatccgtcgcggcgggttcgacgtgcttgccgtgtaccacccggacaacgaggtcgtcaactccgtcatcatcgcgcgtaagatggacgcccacgccaaggggcttcagaatggacacgcgcatgcacgcggcacggtgccgatagtgagcccgccgtgcaagtgctgcaagatggaggccaatacgctccagaagaggcaggagatgacgaccacgaccgagttgtccatctga

SEQ ID NO: 156264 - DNA, 1186 bp, Zea Mays
ctctttatttctccctcgcttccggcctcccctattcctccggtcgacgtgagagagcggaaggttggtctgtaggcagggttagatcctcgcgacgctcgatcctgacggtggtgggcgaagatgttggacatgcagaagcggcgcgtgcggctgctgctcttcatcacgggcattctggcgctcagcatgaccgctgagaagtccagagaacttgttggaaaggaggctgcatcaaagagtggtcaatccacattcatgaactgctttgacaagggctctggcagccttgcatgcacatcaaaggagggtgtcaagttgtacgtcaacaacattcgaagtgcacacttggaaatggtgcgacagcgagccatggggaaagctttagctgatgctgtggcagaaggcctaacacctagcgaagcagccaaacaagctcagaaggttagtgcaaaagcgacaaaaattgccgctcgtcaagcaaataggatattggggccaataatttcttgtggttgggacttcttcgaagcaatgtactctggcggaagcatgatggaaggttttcttcggggcactggcaccttgtttggaacttatgtgggtggtttccatggtgaggagcggtttgggaagctggggtatcttgcaggaagccatgtcggaagctggggtggaggaagaattggattgatgatttatgatgtcataagcggactgaaatatatgttcatgtctgtccaacctaagtatgaatcatcgtcatatgcatcagaagatggtccagaatacgcaaaaagatatacaaatcaagaggagccaacatactatgaaccatcaaaggaaaagcaagaagaatcaaaatggtttggtttgttctaaatctatgaaccgaagtgttccgtcttaaactcaagggcggagctaggtagtagctagattgttgcacccccccccccccctaaaaatgtgaaaatggtgtctttcaccaaaagtccaccatatatgcacccatgaggcaattgtactcatcactgcttcgctactggagcatgaaacaattagcttgttttgttgtacatttctgaatgttcagcttcattttgtatggttacctagattaggtgtgattcttcattgtaattcttgttttggctaccatgtatataaaacatatgtatcgact

SEQ ID NO: 156265 - DNA, 108 bp, Zea Mays
ggtactgttctatatatagtctgtattatctgcaaagagttgcacttttttctttgggccaaaatgtgttactacctctgctcacttttacatgatgtttcagaaaac

SEQ ID NO: 156266 - DNA, 233 bp, Zea Mays
atcatggccattttcagtataattgcattagccttggacttacgcttggagcaattgctggtgttctgtcgaggaatgagctcatcgctgcagctctcttcactcttgcaatcaatcacaaacaggtgcatacaattctggacaaagaaaattttacattgaaagaacttcttgatgaggatgaaattattcaggagtgcaaagcactgaactcaatactcataaacttgtaa

SEQ ID NO: 156267 - DNA, 942 bp, Zea Mays
ttctcgcccctagttgagactaggagagcacacagctcttggttctttgggaagggccgcccccatgcctcctcctctcctcccccccggatgcctcacttcagctagctaacttccttccttcgaggttttgctaccacctgctgcaacaatctctgctctcgtccgccaagctctgtgctatgtcgctcacggaggtcagcctccacttctgctacctccactccctctccatcgtgcttctccacttcctctacgtgatctcctgatcggccgcctaccgccaagttccgatcgaacaaagctttggtttgattcagagccgaagctttggtcgttccagttccagcaaaaaattacttagtattaattaattactcggtgattgttcctcttcgttccatgatcttgtcccgttcctctcttgctttgctgctaagttccgtgcgtctcctaacgcgaactcctgcactcgaccaatcaatacgactaggagcagctagcggcagtgttccaagcagctggtaagtgcttcacttctcaagtagtaggatggctccaccggcggccgcccagagagcgcgccgcgccgcggcgatcacggaggaggagcggcggcgcaaccgcatggcctccaacaggctgtcggcgcgcaagtcccgcatgaagcagcagcagcacgtcgacgacctgaccgcggtggcggagcgccttcggcgcgagaacgaggcgatgcgcgccggcgtcggcggcgtcgtgcggcagagcatagagctcgagcaggagaatcgggtgctcgccgcgcacgcgcgccagctgtgcgccacgctcctactgcggaactcccagctccgcctgctcggtgacgtggccggcctaccgctcgacgtgccgctcgtgcccgaccacctcgtgcaactctacggtatgctcgagttctga

SEQ ID NO: 156268 - DNA, 383 bp, Zea Mays
atcagaattcacaaaatcataccatagcatttgtatttattatacagtggtttccaagcaacaagttgaattattgaatgaaccagtaaaagagagtaattctacgcaaataaaaatccatgggtgctgctacaaaggggggaacaaaaatttctacacagtaacttcatcctcatttgatcttgctctattccagtgcatcttgggaacacaatcagcaccacagatgactgtattagtgataaccagggggcaggctggagcatggtgtaccgtgagctaacagggaagttgttgatggcaccatgctggcatgttcatgctagaaacatggtcttcttccagtttttaacattagccagataagctacttagtaaataat

SEQ ID NO: 156269 - DNA, 196 bp, Zea Mays
ttttgtggatagatggtgttggaaggcagttgagattaacgatttggtcactcaaacgaatccaccattttctatgcacatgttatgtattagtaatatataatgatagagagccgacagtctatcttttctacacactagattttagggttttatgaggctgtgaaaaaacactttatgtgaggaaaaaatattt

SEQ ID NO: 156270 - DNA, 683 bp, Zea Mays
ctcccggccacccgaggtcgggcaagcttccctagtttggaagggacacgagcggatccgagcgaagcgaccgcgcgtccgcgccctccgtcgccaccaccatccgctccgccgccgctccatcgtcgtccacattgctgccatccgctctgccgctactccatcgtcgtccttccccgaagcagtcgtgagcgagacgtgaggcgacggtgccctccaccaccgccaccgtctcggatttgtcgtcattcaccgccatctctgcctcagtttgctgtcctccaccaccgtcttccgcggcactatgtacaatacaatgttgtctccaagacccagtacatggtcttctccaagatccagtacaagatcgtctcctccaagatttgaaccccaacgctagtgagagtggaggcaacacatgaaaccaacatggagaagaaaaatgaaatggcattccacatgaagcttgtgaaaaagagttaaactcgtaatttattctagtgcagaagttcctaaccaagagatttgtattccattttttatattatattgtctatctatatgtgtgaataaaggtgaccttatatgatgtgatgatgtatgaattagcttcaatggatattatatggtattcaaattaaactttacatgaattatatgtggtgcattatttttggatgttt

SEQ ID NO: 156271 - DNA, 751 bp, Zea Mays
cacacgtaaaagtgctagcaacttggcatatatcatcacataggaagaacacattcttattaaacacttcacaatgcatagcatcgaataaagaagtgcatgagaaattcagcagcagcgatttgtaactattattgttaccacgcacgcataggtgctcaaaagttccttgcatcagatggacagctctgtcgtggtcgccatctcctctctcttctggagcgcgttggcctccatcttgcagcacttgcacggcgggctcactatcggcaccgtgccgcgtgcatgcgcgtgtccattctgaagccccttggtgtgggcgtccattttacgcgcgatgatgacggagttgatgacctcgttgtccgggtggtacacggcaagcacgtcgaacccaccgcgacgaatgtcctcaggatcgacgatcgggtagaggaagccgcgagccccgtgggcgctgcgcacgacgagagccgctccgtccgccatgtgcctgccaagatgcgcaaccaccttggccttgtcctcagccgccatgcctactagcgcggcaaggaagaccacgtcgtacttggcgagctcgtccgtgaggttggcgacgtcgaccgtgtggaaggacatgcgcgcgttcaggtccttgtccgcacggaccagcttccgagcacggtcgttggcggcggcacaccgatcgtagttgtcgaacagtgtgctggtgaacagcgcgttggcgtcgggggacgggctcagcgac

SEQ ID NO: 156272 - DNA, 756 bp, Zea Mays
cacatcacacgtaaaagtgctagcaacttggcatatatcattacataggaagaacacattcttattaaacacttcacaatgcatagcatcaaataaagaagtgcatgagaaattcagcagcagcgatttgtaactattattgttaccacgcacgcataggtgctcaaaagttccttgcatcagatggacagctctgtcgtggtcgccatctcctctctcttctggagcgcgttggcctccatcttgcagcacttgcacggcgggctcactatcggcaccgtgccgcgtgcatgcgcttgtccattctgaagccccttggtgtgggcgtccattttacgcgtgatgatgacggagttgatgacctcgttgtccgggtggtacacggcaagcacgtcgaacccaccgtgacgaatgtcctcaggatcgacgatcgggtagaggaagccgcgagccccgtgggcgctgcgcatgacgagagccgctccgtccgccatgtgcctgccaagatgcgcaaccaccttggccttgtcctcagccgccatgcctactagcgcggcaaggaagactatgtcgtacttggcgagctcgtccgtgaggttggcgacgtcgaccgtgtggaaggacatgcgcgcgttcaggtccttgtccgcacggaccagcttccgagcacggtcgttggcggcggcacaccgatcgtagttgtcgaacagtgtgctggtgaacagcgcgttggcgtcgggggacgggctcagcgac

SEQ ID NO: 156273 - DNA, 2050 bp, Zea Mays
gctttgccttccccgcgtcaaacaaatcttgggttccaagcgagcgaataccttctcgagctaagacgattcgaggcacgagcgaagatgccgcagcggcatttcctatataacaaagccggtacaaaatctgcccccacattgatccacgtcaacatgttttgtcccagccgcaagatgctgcatcaacggccacggatgcagctcatccacaccagcgttctctgtgtctgttcgattcctccggcgtccggagcattctagaattgacgaaggtggctgtgccgagttctccacaccgctggagacttccaggtgcttcaggaaaccgagggggcgttgagataggtaaaaaaaaggaactccggcgaggtcgcccccggtagtggccggtgatgagttcgctcgggctccggctccggcttcggcgacctggagcgaggagttcggagatgcagtcttccagcgctcaagcagttttcgacttcgtctcaccgcttcccgcagactcctgagaggaaatttgtgacaaaaatatctgctctggaaatttgtaatgagattgtgaatggccttctacaatctgactctgctccccttcggttattagatgatcctgagaaatgaaccattgtggagaagttgcaagaagaaattgcttaggacaactaacatctgaggcatccaagcaggatttgtgaagcaacgaacacaacgcgcgccaaggcgcgcataagttactagttcgaaaaacaacaacgacctcgccttcttcacgtacgaggagaagcggaagctcgggtacggcacgcagcgggagcgcctgggaaaggactccatcaagcccttcgacgcctgctgcctctgcctcaagccgctcatcggcccgctctgctgccccaagggccacacattctgtaaggagtgcatcctcgagtgcctcctctaccagaagaaggacatcaagcgcaagctagctgcacatgaggtccagaaaaagcaagagaaggaagaggaagaggagaagctaattctgcagaaggctaaggagttggatgcctttgaccagcagaatcatggacctgttccccagtaccatgatcgcagtggttcgcaagacaagaatgggtttcatggagcaaataatgtgaaggtcacttcttttgaagacgaagcccttcgcaatatgaaggcattctggctcccttcagctactcctgaagctacggtcaaggtagacgtgccctccatccacactgtttgcccggaggggcaggagaagctcaagttgaaatcgctcttccctatctcgttcacggaagaaactgctgatcagaagagcagtaaggcagtggaaaaaaagagctacatgtgccctagttgcaagtccactatcacaaataccatgtcccttgtggcggtcagcacctgtggccatgtcttctgcaagaaatgttatgacaagtttctagtgaaggataaagcttgcttggagtgcagcaaaccattcagggagaggaatctggttccattggagaaaggaggaaccgggtttgctgcacatgatgaacgcctagaggcaagatatttcaagcatttgggtagtggctctgggttaggactagtgaagcctgcaccaaaaacttactaaccttgaataattatagccgttgttgtattgtttaccttggtgtcatgaaattatataacctagaaatgagaactccatcaagttcccaattgccgctgtaacttctatatacatgtatgcagatgttgattttaggtatctttaagaccttaacgacaccactacattaaacggttgccatgtatttgtttatgttgacctatcaacagtcttgttggttaacaaagaatattgaaaactaaagcctacaaaaagaatatgattaaagattttaatactcttctcgttttaaattaatagacgttttgaatattctaaatatattatttttattatatatctagatatagtttatttttaagtttatagaaaaatctatgcattagaaaagataaaata

SEQ ID NO: 156274 - DNA, 782 bp, Zea Mays
gctttgccttccccgcgtcaaacaaatcttgggttccaagcgagcgaataccttctcgagctaagacgattcgaggcacgagcgaagatgccgcagcggcatttcctatataacaaagccggtacaaaatctgcccccacattgatccacgtcaacatgttttgtcccagccgcaagatgctgcatcaacggccacggatgcagctcatccacaccagcgttctctgtgtctgttcgattcctccggcgtccggagcattctagaattgacgaaggtggctgtgccgagttctccacaccgctggagacttccaggtgcttcaggaaaccgagggggcgttgagataggtaaaaaaaaggaactccggcgaggtcgcccccggtagtggccggtgatgagttcgctcgggctccggctccggcttcggcgacctggagcgaggagttcggagatgcagtcttccagcgctcaagcagttttcgacttcgtctcaccgcttcccgcaggtacgaactgttctcttccgctggctctgagcacgaggtggatgtgttccgggaggtggtacagccccgatgcacgacgaggtgctttttgtgagcgtcacaaacagcacctatggtgcccccacgggcgggacgaatgctgtaattgcttcctcgaatgaatgctgaagttttagaataagcgaagggaagaataatacagaggaaagaatcaaagtgcagaatctatattcatccgatggtggcttcttgggatgaatatatattctttcctt

SEQ ID NO: 156275 - DNA, 2094 bp, Zea Mays
gcttatgaaaatagagtaccccgggagagaggcgatagatttgggagctagtaatggccccatatatataacctcctccctcttcacgccatctcttgccttcgattgcccttccggcgttcctacctcctccccctccccatctcctcccaatccgtgtcctcccctcgtttggggatcgacacaggctacgcgtgggttgcgtcgattgatgcgagggaggcaatggcggtttcttctgctccggagaagaagaggaagtggctactcagctacaggaaggtgatcgacaagtacctgcgggaggcgaggaggattcttgcggcggcgccagagggtggcggaggcggcgatgcggcggcggcactcggcctggtcgacgcggcgctggagctgtcgccgcggatggaggccgccctggagctgcgggcgcgcgcgctcctcgcgctgcgacgctacagggaggtggcggagatgctccgggattacatccccagctgcggcaagtcgtgctctggggaggacacctcgtcgtcctcttcggcgtccctcctgtccaccggctccggtgacctcggcacgatttcccgtgccaagctcctctcgcccgaccgccaccgctctgacgacgcggaacctgacgctcgccctgtccgcttcttccgctgcttcgacgtctccgagctcaagcgccgcgtccttgccggcctctccaagaacccgaacacggacacccagtggaggtacttggtcctcggccaagcttgcttccacctcgggctcatcgaggacgctatggtgctgctccagaccgggcgccgcctcgcttcggcggctttccgccgcgagagcgtgtgctggtcggacgacagcttctcgtcgtcgtccgccaccgctgccgcggctccctccgtcccgtccggcaaaacatccaagtcgagttcggcgtttttcataatcccggcgacggagtcggaggccgtgtcccagctcctggcgcacgtgaagctcctgctccggcgccgcgcggctgccatggcggcgctggacgccggcctgcctgccgaggccgtgcgccatttcaccaagatcctggaggcgcgccgcggcgtgctgccgcacccgttcgccgccgcctgcctcgtgggccgcgccgccgcgttccaggccggtggccgtccggccgacgccatcgcggactgcaaccgctcgctggctctggaccctgcctacatcccggcgctccgtgcccgcgccgacctcctccagtccgtgggcgcggtcgccgactgcctccgtgacctcgaccacctgaagctcctgtacgacgccgcgctgcgggacggcaagctcccggggccccggtggcggccgcagggcggcgtgcggtactgcgagatcgccggcgcgcaccgcaagctgacggcccgcatccaggggctgcgcggccgcgtcgccgccggggaggcgtgcaacatcgactactacctgctgctgggcgtgcggcacgggtgcccgcgctcggagctggagcgcgcgcacctgctgctctccctgaagctcaagcccgaccgtgccgtggtgttcggggagcgcctggagctcgtggacgagcaccgcgacctcgaggcggtgcgcgaccaggcgcgcatgtccgcgctgctgctgtacaggatgctgcagaagggttactcgttcgtcatgtcagccgttctggacgaggaggccgccgagaggcagagggcaaaggacgctgccgccgcggcggccgcgctggcggccaagcaggaagccgcgacgcaggagccaccacagccggtgcccgggaaatccaagaacaccgagagcggcagcggccgtccaagaagcccgccaggccgcgcgcagacggcgaaaccgaaacccaagtccaaggccaaggccaagtccgcgaccgcggcgacaatgccgaaggcaccggcagccgtgaattccacagcccccgtctaccagggggtgttctgccgcgacatggcagtggtgggaaccctgctgtcccgcggcggcgcgttcgaccgcgctctccctgtgaagtgcgaggctatgagctgctga

SEQ ID NO: 156276 - DNA, 1071 bp, Zea Mays
acgaccttctctaggaagttagctgccccagctaacttcctacgacctactctaggaagttatcttttagcttttgaccagtcaaacgagccgctaactttctagagtatatgtacaacctctaggaagttaagtaacttcctatgaatttactctaggaagtaatattttttatcctaatctacgaatttaacgttatctttccatcgttcatcctttcttctccaacacccgtcgctctcttctccaactcgaagatgtcggccgccaccgccctgcttcatcgaggcccaagacccaatctccgtttttgataaagaaaccaaacagcaacctagcagtcttccttcacttctctgctcccgacctcgtagcgaatcagatcggggggctagggttccggtgcgcctctacagccggacgcgaggctaggctgggcatggagggaatcgtcacggcctgaaagaggtcctggccggagacgacgaacggggctgcagccgccgggaagcgctacaaagtttggacgcctctctggccggtggcataatcgacaagggtggggtcaacactaagcagagttacaagcgtcaagctatccatccgcgaccacgagtctaaccacaacctaaagaacatcgagctggaaggcaattttgaccagatcaagcaagccagcgacttgttgcgtgatctcatcgcaaccatcagcgcaagcatgccagcgaaaaatccatcttctgctgtggcgccagcaggaggaggccgaggcagtggtccggggggcacgagcagcaactacaagacgaagctgtgcgagaacttcttgaagctatgcgagaacttccaacacgactatgtatgagatattatctcttattatgactggatgagatgtgtcttatggctatagatgagacttttgtggtgtaattgatgagactatagatttaaatattgttatgtgattgtgtgtgagatgttttatgtgaaaatatgttgtgatatagttgtttatatatttgttatgttgtggaatgtggtgtaaaataaaaataaaaacatttttaa

SEQ ID NO: 156277 - DNA, 1011 bp, Zea Mays
acgaccttctctaggaagttagctgccccagctaacttcctacgacctactctaggaagttatcttttagcttttgaccagtcaaacgagccgctaactttctagagtatatgtacaacctctaggaagttaagtaacttcctatgaatttactctaggaagtaatattttttatcctaatctacgaatttaacgttatctttccatcgttcatcctttcttctccaacacccgtcgctctcttctccaactcgaagatgtcggccgccaccgccctgcttcatcgaggcccaagacccaatctccgtttttgataaagaaaccaaacagcaacctagcagtcttccttcacttctctgctcccgacctcgtagcgaatcagatcggggggctagggttccggtgcgcctctacagccggacgcgaggctaggctgggcatggagggaatcgtcacggcctgaaagaggtcctggccggagacgacgaacggggctgcagccgccgggaagcgctacaaagatcagtttggacgcctctctggccggtggcataatcgacaagggtggggtcaacactaagcagagttacaagcgtcaagctatccatccgcgaccacgagtctaaccacaacctaaagaacatcgagctggaaggcaattttgaccagatcaagcaagccagcgacttgttgcgtgatctcatcgcaaccatcagcgcaagcatgccagcgaaaaatccatcttctgctgtggcgccagcaggaggaggccgaggcagtggtccggggggcacgagcagcaactacaagacgaagctgtgcgagaacttcttgaagctatgcgagaacttccaacacgactatgtatgagatattatctcttattatgactggatgagatgtgtcttatggctatagatgagacttttgtggtgtaattgatgagactatagatttaaatattgttatgtgattgtgtgtgagatgttttatgtgaaaatatgttgtgat

SEQ ID NO: 156278 - DNA, 1070 bp, Zea Mays
acgaccttctctaggaagttagctgccccagctaacttcctacgacctactctaggaagttatcttttagcttttgaccagtcaaacgagccgctaactttctagagtatatgtacaacctctaggaagttaagtaacttcctatgaatttactctaggaagtaatattttttatcctaatctacgaatttaacgttatctttccatcgttcatcctttcttctccaacacccgtcgctctcttctccaactcgaagatgtcggccgccaccgccctgcttcatcgaggcccaagacccaatctccgtttttgataaagaaaccaaacagcaacctagcagtcttccttcacttctctgctcccgacctcgtagcgaatcagatcggggggctagggttccggtgcgcctctacagccggacgcgaggctaggctgggcatggagggaatcgtcacggcctgaaagaggtcctggccggagacgacgaacggggctgcagccgccgggaagcgctacaaaggtgaggcatcgctatcccactagtcctgtccgctatccgcctcgattgttttggttctacttgatgttggttgccctcgctccttgcgagaagtgtttcgtcgactggatttacatgtgtaccatgggagcagagcgagagtgttctggttggtcgtttgattatgcttatgcgcgcaatgagatgcacatccggggtgtttgtggtaggggactggtagtggggcctggagggttagagattttcttgcttgcttcaagtgatgcgtggattggtggaatgatagcttactgccaccaaaattgaaccccctctatacttaggctgttagtctgttactctcttaactttgactactcacttggaccttaaaggctagcgttgtatgtggcttgaagatggatcaaaagaatacaatgaaatctgaaggaatgtatcacaattatatctgctacctatgcagaagctatacacattttttctagctactgataaaaaacttcaccagtgctaacaggtaaggagcacaataacatattcttatttgag

SEQ ID NO: 156279 - DNA, 889 bp, Zea Mays
acgcgcctggattctcctcgcccctcgcctccctccacctgcagagagcgccacaagagcgcttcgttctagcagcagcggacgagggagacaagaggaggaagagatggcaggccgtgatggagccaagtcatcggcgtccatggaggaagaggcatgcggggagaagaagtacggaggaatcgcacccaagaagaagcctttgatatccaaggtggctgatgatgtttggaccaaagaacacgaatgcctagctagattgttagaagctctgatgatcactcccactcactcacgtcgctcctgcgtgtgtgctgtgcgaatgcaggaccacgagcgcgcctacttcgactctgcagactgggtgctgggcaagcaggctgcgaacagtagcacgagggccaccgtcgagtctctgaagcccaagctgaagagaacgcctcaccaccagctgccccctcgcaagcccacctgcgcttccggttgagacgaccggacccatggtaagcttgaagctgcacctgaaacctgcacagctcaacggcatcagcagagctatgtgcaagtgcaaaagacgccgcaccgacatgaccgtgtccgtccttgcgtgtaataaacgtgtgcaggctacgcgttgcagctgctcggaggtgagggagggaggacgccgaggccgagctcacataaatgtctagctggtcggaaaccgtggtagggacgaatccgagatgcaatctggcttgttggccgttgcattgcagcacctattgtgtctttatcagttcgttatcaattatctggctttaagtttggcatggcacttggtgttcgaatgaactacacaagagagtggacgagagattttgcctcccaaaaatgcgggcattag

SEQ ID NO: 156280 - DNA, 759 bp, Zea Mays
acacgcgcctggattctcctcgcccctcgcctccctccacctgcagagagcgccacaagcagcggacgagggagacaagaggaggaagagatggcaggccgtgatggagccaagtcatcggcgtccatggaggaagaggcatgcggggagaagaagtacggaggaatcgcacccaagaagaagcctttgatatccaaggaccacgagcgcgcctacttcgactctgcagactgggtgctgggcaagcaggctgcgaacagtagcacgagggccaccgtcgagtctctgaagcccaagctgaagagaacgcctcaccaccagctgccccctcgcaagcccacctgcgcttccggttgagacgaccggacccatggtaagcttgaagctgcacctgaaacctgcacagctcaacggcatcagcagagctatgtgcaagtgcaaaagacgccgcaccgacatgaccgtgtccgtccttgcgtgtaataaacgtgtgcaggctacgcgttgcagctgctcggaggtgagggagggaggacgccgaggccgagctcacataaatgtctagctggtcggaaaccgtggtagggacgaatccgagatgcaatctggcttgttggccgttgcattgcagcacctattgtgtctttatcagttcgttatcaattatctggctttaagtttggcatggcacttggtgttcgaatgaactacacaagagagtggacgagagattttgcctcccaaaaatgcgggcattag

SEQ ID NO: 156281 - DNA, 651 bp, Zea Mays
acacgcgcctggattctcctcgcccctcgcctccctccacctgcagagagcgccacaagagcgcttcgttctagcagcagcggacgagggagacaagaggaggaagagatggcaggccgtgatggagccaagtcatcggcgtccatggaggaagaggcatgcggggagaagaagtacggaggaatcgcacccaagaagaagcctttgatatccaaggaccacgagcgcgcctacttcgactctgcagactgggtgctgggcaaggctgcgaacagtagcacgagggccaccgtcgagtctctgaagcccaagctgaagagaacgcctcaccaccagctgccccctcgcaagcccacctgcgcttccggttgagacgaccggacccatggctacgcgttgcagctgctcggaggtgagggagggaggacgccgaggccgagctcacataaatgtctagctggtcggaaaccgtggtagggacgaatccgagatgcaatctggcttgttggccgttgcattgcagcacctattgtgtctttatcagttcgttatcaattatctggctttaagtttggcatggcacttggtgttcgaatgaactacacaagagagtggacgagagattttgcctcccaaaaatgcgggcattag

SEQ ID NO: 156282 - DNA, 417 bp, Zea Mays
acacgcgcctggattctcctcgcccctcgcctccctccacctgcagagagcgccacaagcagcggacgagggagacaagaggaggaagagatggcaggccgtgatggagccaagtcatcggcgtccatggaggaagaggcatgcggggagaagaagtacggaggaatcgcacccaagaagaagcctttgatatccaaggaccacgagcgcgcctacttcgactctgcagactgggtgctgggcaaggctgcgaacagtagcacgagggccaccgtcgagtctctgaagcccaagctgaagagaacgcctcaccaccagctgccccctcgcaagcccacctgcgcttccggttgagacgaccggacccatggtaagcttgaagctgcacctgaaacctgcacagctcaacggcatcag

SEQ ID NO: 156283 - DNA, 100 bp, Zea Mays
gcaacaaccgctaacaggtcctgtaaaatagagtatgcctctagcaaccgccaaatctggagcatacgctatccgcgtcaaactggcctctcgcgctcac

SEQ ID NO: 156284 - DNA, 227 bp, Zea Mays
cggggtactgggtgcccaagtcggtcatcttcgggccgctgcccaagatggccatggggaagatcaagaagcacgagctgagggccagggccaaagagctcggccctgtgaagaagagcaggataagttcagaccaggaaacagatgcggaggtgacgacgtttcttgacaaagaattaacgccaaccggcaaccgtcgcacgcgcgtgcagaagtcggaatcctga

SEQ ID NO: 156285 - DNA, 2387 bp, Zea Mays
atcctcctcttcccattccactctctcactctctctaatcacaatttcgacactgatcggtactctctagtgtccgactcgtcacagttttagcgagagagacagagagcgagcgagggagaggaggatgggttccacttccacgggaccggtgagcgggttcgcggcgccggagcgggacatcgacgatctgccgcggaacgacgccaactacacggcgctcactccgctctggttcctcgagcgcgcggcgctggcgcatccgggcagggcctccgtcgtgcacggccccgtgcgctacacctgggctgacacctatcgccgctgccgccgcctcgcatccgccctcgcgcgcctatccgtcggccacggaagcacggttgctgtgatagctcctaatgtcccggctgtctatgaagctcacttcggtgtcccaatgtcaggagctgttgtgaactgcgtcaatattcggctaaacgccgagacaatagcattcctccttgaacactccgtggcagaagttgtgatggtggaccaagaattctgcaccctagccgaagaatcgctgaaaataattggcaagaagaagacatcggctttcaggcggcctccaatcttgatcgtcatcggcgacccaacctgtgatcccaagtctctacagcatgctctgggaaagggagccatagagtatgaagagtttctgaaaaccggtgacccggagttcagttggaagccaccgaaggacgagtggcagagcatcgccctaggctacacttctgggactacttccagcccaaagggcgtcgtgttgcatcaccgcggtgcttatctcatggcactcagcgttgccatcgtgtgggggatgcctgaaggggctgtctacttgtggactctgcccatgttccattgcaatggttggtgctacacttgggcgctggcagcgttctgcggaacaagcatatgtcttcgccaggtgagcacaaaagccatatacgaaggcatcacgaagcaaggagtgacgcacttctgtgccgcacctgtcgtccttaacaacctgatcaacgctccggcaagcgagaccttcctgccgctgccccgcgtcgtcagtgtcaacgtggccggagccgccccgacgccgtccctgctgggcgcgctgtccatccgtgggttccgcgtcacgcacacgtacggcctgtcagagacgtacggtccctcgacggtgtgcgcgtggaagcccgagtgggacgagctgccgctggaggagcggtcccgcctgcactgccgacagggcgtcaggtacatcgcgatggagggcctggacgtcgtggaccccaagacgatggcgcccgtcccggccgacggcaagtcgtacggcgagatcgtgctgcggggcaacgccgtgatgaaggggtacctcaagaaccccagggcgaacgcggaggcgttcgcgggagggtggtaccactcgggcgacctcggcgtgaagcaccccgacgggtacgtcgaggtgagggaccggatgaaggacgtgatcatctccggaggggagaacatcagcagcctggaggtggagaaggtgctgtgcgcgcacccggcggtgctcgaggtctcggtggtcgccagggccgacgagcggtggggcgagtcgccgtgcgcgttcgtgacgctcaaggacggagcagcagccgacgggtcggacgaggcggcgctggccaacgacatcatgcgcttctgccgggagaggatgccggggtactgggtgcccaagtcggtcatcttcgggccgctgcccaagacggccacggggaagatcaagaagcacgagctgagggccagagccaaagagctcggccctgtgaagaagagcaggatgtgagagatctgggggccgacggcgatagcgtgtgatgccatggcaacaactcagaatcttgctccaagtcgcgcatataaaattcatgagttctgaagatgcctaataacttgagtgctttgcttgtatcgttctgaaaccagaagttcagaccagatccgatatataagtaagaactgtatcagattgtccggtttgcaggaaacagatgcggaggtgatgacgtttcttgacaagaattaacgccaaccgtcgcacgcgcgtgaagaagtcggaatcctgatgctctctccgtcttccttggcttctccccgtgttggaacaggtcacacacaggggcacaaggcgcatcgtttgggtttcgtctcgtgaaggcgaccgatagatccttcccaattttcatgtttgcaattaagtgccttttggttcacgaaatgtaacgtaaatggtaatgataacgattcacactcgaataccagcggtaacaaatttgaataagcagatatccatttat

SEQ ID NO: 156286 - DNA, 105 bp, Zea Mays
actacatctctattacagttctttttaaacctactcgtatttgtgatattgccggcttgccgcacctagctttaatttgatcttgtctttaactgtgtcagacat

SEQ ID NO: 156287 - DNA, 387 bp, Zea Mays
agaatcaactattagcaccatgcagttcgctttaagttcaatcttggtacatcaataaggaatagacttcttttgatgagttagacagatgcttaaaagctttacaaccaacttattattttttgcacaatctagcaacaattctaagacctaaagccagtagcagtatatatccaacatgggtagaaacggcctgattttgaatggagccacagtcatatccttctacccaccctgcctacaaaaacacaacttcccaaaacctataaaaatagaaattgaaaatgaccaatactaccctcgtcggttccttgatcagtctgatattctaatctctactcctagcacatcctttacacaacctcgtaagtcacaaatgcaatggca

SEQ ID NO: 156288 - DNA, 1485 bp, Zea Mays
tcacacgtcaacccggcacaaggaggcaaggagcacgaacagcccacggaggaagcgcagccgcagttgcccgcaggctatggacgatgacatcgacagctcctgctccaccccgttcgccagcgcgccgtccagtcccggacgtccccacgccatcggcggcggaggctacttcttcagcgcgccggccagccccatccaccacctcctcctctcgacctcgtgctcggcctccgcgactcccagcaccggtgggcgtgggtgcgtgggcgacgcggagttcgagttcggcgggcctggcgggcccatgatctccgccgacgagctcttccacaacggccagatccggcctctcaccctgcccccgctcccggatctcgaccccgggagcgatgacgacgaggactgcggccgcgcgccgacccgcggccgcgacctcacgccccgaagcgcgtccgtgcaccgccgcgcgcggtccatgtctccgctccgcagcgcgtcgccgcggctcaagctgatgaatgcgctcgtcccggcgccggatctcggccccgcccccgacgcgaccggggaggctgcgccgccggtcaccgcctcgtcccgctcgtcctcgtcctcgtccacctcctcgtcgggtacgtcgtgggtgcgcgggtcccggcggtgggtgttcatcagggacatgctcctccaccgcagcaagagcgagccaggcagcagcgcccactcgcgtgacgccctcggggcgcccgccgctggcgctaacaagcccgaacgaacctcctggccgttctccccttcctgggtagccagggacaggctcgccgcgaggctccgcccctctcgctcaccgccggcgaccgaggccgctggcgaggatgcccggccgcgggggcagcgcaggggccgccggcgacgttccactacggtggcggcggcgcacgagaggctctacgcggcgccgaaccgtgcgcaggccgaggggatgcggcggcgcacgttccttccctaccggcagggcctcctgggctgcctgggcttcagctcccgcggctacggcgcgctccacgggttcaccaaaaccctcaaccctgtattctcccggtgaaacgttgccgtcaaaaggctccccaaccaaaaagtaaaaaaaaattgtaagaagcttcagtaaagttgttgggcgacttgattagccaccttttcgtacgttcatgtatgcgaacatttttgtttgtgtgcgttctgtacatagtcccgtcaagcagtgtcagttttgagtttgtagtttgccgatgatcacgtcaagcagagcagctgatagaatagagatatgcagacatgcaatgcaaatatgcaatcgataaatatggcgcaaaaaaaaaacagtcgctggcgccttttctgtgtgcgtggttggtagtgcgcccatgtatataaaagcgtgtactgctgcagaagcagaatcttgaaagcagtttcgccgca

SEQ ID NO: 156289 - DNA, 3275 bp, Zea Mays
cctggccgcctccctgcctcctcgccgccgccaccgcttgtagcctccgctacgtagaccacgtgtattttcttgtttgatctggagcatgctgtatcggtgattttctccttcttttgccgacgctgcggagcggcgaggagttttgattcagctgtagagagattctaggatctatggggtccgagaagggtggagccaaggttattggcggcggtggaggaggaggcgggatcttcaacctatttgattggaagcgaaagtcacgcaagaagctgttctccaactcgccagaggcgtctaagcttgtcaagaggagcgaagaaaccttgctgtcagtgcgtctccacttgggtgatgaagatgaggggattggtgtatcaagcttcaagggaagcagcgactacagctgtgcgtcttcagtgaccgatgaggaagggcgtgagatgaaggcgccaggtgttgtggccaggctcatgggcctggacgccatgcccaccttgggtgttccagaaccgtactgcacaccgttccgagacacaatatcattcagggacagccacagcctcaagaggagccctgagtactcaacgaatgaccaattcggtcatgttcctcgaagagttgatggatatatcaggaagccattggatttcagagcaccaaagatgccaagcagcccgattgaaaggttccagatggaagcattgccaccaaggtccgcaaagcctctaccaatgtctcaccatagattgttgtcccccatcaagaatccaggtttcacttcagcgaggaatgctgtccagatcatggaggaagcagccaagattcttcagccaagggcacaaacaagctctagggagaaagtatgttcttttagcccggcgcggattcctttgagagtttcggagccaagagagaacatccctttttctcagagggctgtgcctctgaaaccgcaatcatccaggactgctcctgagctgccaaatgtgagaatctctagagcacagcagatgaaccgaagctggaatagtgaggaggatattgtcatattcagaccatcggttgattcttatgagattaataatcctagttgttctaagaacaacaagggaaagtctgtttcattggcagtccaggcaaagaacaacgtccagaagagggaaggcgcaactggttctgggaggaattcacgagtacaaaaagaacatgatgagaaaagggtaaaccaaccatttaggagtcagtctaatctccagagaaacaagcagcaaaagaagccatcatcatctggcacttcttcccctgttctttggcaaaataatcagaaacagaattctttggtgaccaaaggcaaggtggcactaaacaaaaccgtctcaacacagcaaggcagaaaggtgatggccggagattcatcttctgggaagatcaagagtggaagcaagaactctaaagttggcagaaaagacattgtggaaagcattagtggtgatagagaaggatcatcgtcgaacaacaaggacttcccgcagaagaaacggttgatagagagaaactccaccaacgagaagggtacatttgtgcctgaaaacccagtgggtaaacttctgaagcaggttcaacctaatgttgttatggacgagcacattaaatggaacaaggaatgtaaagataccacagatgttgtgtcatttaccttcacctcacccttggtcaaaccatcggcaggaccgtccagactggcgggtaagtgggatacaagaagcaatcttgatatggacgcaggatgtgataaagatgattcagataacaaggctcaagggttgtcatcagtggggctgaactttgtaaatggtgatgcattgagccttcttctagaaaagaagctgaaggagctaacatcaaaaattgatccatcaatcacctttacgaggggtgacacatttgcgcctgctacttttaccttggaggaaccaccaacctcttcatgcagtaattggggctcagaaagtggagcatttgactgtagcccttctgaactaaaaccttctcagtatgattattgcccttcagcccagtcatctacaaaaggccaaaattttcgaggcagtaaaataaaggtggaagaacaagaagaatgcagcagcataagcaatgcaaggaaggaacaggaaaatgaagatctaagtcccctatctgtgcttgaacccaccacctctctaagcgagagttgctggtcttctgagtgttcggacagcagcggtggtaatttgcctaataacatgaattctgctacttcttcttgaactgttgacagtttttttttttacccctgacaaataatcatttttgttcttttgtattatgacagggggtaaggtttatccatcactttttgatgttaaaaatggtcaggggaatttcttgattaacccagcatcagttgatatcgaggcaaagacaacagactcagcctcttcggcatcagcagatacatcggatgtttcagatatcacccaatgctctaaaagatcaagacacacagagctggagtacatcgcagatgtgctaagcagtgtgaacttgacaacagatgaactgggatcactcttcgtcaatcaggatagatcagctctgcaccccctcctcttcgagaaactggagaatacgcatgcgtacacacaagggaaagagcccttttgccatcgagggtacaggcggctgttgttcgactgcgtgaatgagtgcctggagacaagacgcacgacctacttccgggcaggatatgcggcatggagcaaaggagcagcgacgctgggcatggaggaggcccaagtctgcagtgaggtaaccagctggaagcgcatgggagactggacggaggacgagctcgtcgacaaggacatgagcggcgggctgggcacatgggtcgatttccgggtggaggagttcgaggccggtgaggaggtggagaaccacgtactgagctcactgctcgatgaggtggtgggcgacatggtcgcgagacggcggcggccaggagtatttgtgatttgagaatgggccctgtaattttgtttcgttttgctgttacatatctccccaatttattttgtcaccccagaagtgtgctgttcaaatcagtgataaatgttcatcgatcgttttcagctcggctactgaatgccctgcttgacacggtttctgaagtctttttacctctgtgataggcaaaacaactctggccatttctactcgtaattcgatcc

SEQ ID NO: 156290 - DNA, 1114 bp, Zea Mays
cccaatcatgtcatgtgcacactgcctccagcttaacgccaactgccaagtataagcgggcgggcgggcgggcgggcagctgctaaacgcgttcgcttcctcctcccgcgcccgcgcccgcgcaagcaacgccccgccagctcctatttatattctgcctctttctgccccaactcatatctcaatcccctctcgccaaccttcgaagcaagcaagcaagcagtcacctgagcaaagcaaagcaaagcaaagcagggccagagcaaagcaacgatccagcgcccgcatttccccccattcaacgcgcagcgcgcgcacgcaatggcggcgctgaggaagccgtcgttcgggacgcgggcgtggcggctgctgcggctggcggtgctgtgggcgcggaagggcggcgcggcgcacagcctgcgcctgctccgcacgctccgccgccacggcgcgcgcggcgaccggctccgccacggcggcgagcgcgagtactccatcgacgagacgccggcgttccggttccgcaccccgtccgcgcgcgtgctccgcctcatcccctgcatcgcgccggccaccccgggcctctgcgccgacgaccgctacttcttcagcagcgccgccgcacgcgaggtggacgaggccgctggcgggtactgctacgccgacgacccacggagcgcgcgccacgtcgaggaggaggaggaggacgagctgagctgctgtggcgatgacgagcagctgctggagcgggtggtggcggaggcgtgccacgcgagcaccgcagggtcggtggcaggggagggtggcgaggacgccggggtggacgtcaaggcggaggagttcatcgccaggttctatgcgcagatgaagctgcagcgccagatctcctggctgcagtacaacgagatgatggagaggagcatcagctagattgctgatccttgattacggctagttgtagcggttgaactttgagcgctggttcgtcgatagtaacgcgtacatgtacataaaagtattattttatacagtacgagtatatttaagaatcttgttctatctccggtttataaaaactggtttataaaaaataggttaatggtgtttgaaaaca

SEQ ID NO: 156291 - DNA, 727 bp, Zea Mays
caaacgccacgccgcgagactcccacgcggtccgcccccgcgtcgtctggcctcgcgatggccgccgccgccgactacgaccgcgcgcaccgcccgtacgcggctcccgcccccgccggtgagtacgaccgcccctaccgcaacgaggtcgtgccctacggtgaccgccgcatcgacatcatcgtcaagccgcccgcgaggtcgccgccgccggtatccaacaggggcggcgggggaggggtggggtcggcgtggtgcttcagcgatccggagatgaagaggcggcggcgggtggccagctacaaggcttactcggcggagggcaaagtcaaggcatcgttccgcaggggattccgctggatcaaggccaagtgctccgagctcatccatggctgaacccggtacctcggtgaaattctattgtattgtattggcatggtgcaagatgcggctacaaagcgcgagagatggttgtctgttgttatttcgctgattcgctctcaaaatgtggaagagaatttgttctgagattgtgtagagaactttgttgcccccctggttataggaaaagaactcgatggagatctgctgagattgcttgtcgctacctgccaattgccccctaattctgttcaaaaaatgtttgaagaagacttgaatcccggagaagaaaaattctttgcacgatagtacttttctaatattatccccctgtgctcatatgcaa

SEQ ID NO: 156292 - DNA, 630 bp, Zea Mays
caaacgccacgccgcgagactcccacgcggtccgcccccgcgtcgtctggcctcgcgatggccgccgccgccgactacgaccgcgcgcaccgcccgtacgcggctcccgcccccgccggtgagtacgaccgcccctaccgcaacgaggtcgtgccctacggtgaccgccgcatcgacatcatcgtcaagccgcccgcgaggtcgccgccgccggtatccaacaggggcggcgggggaggggtggggtcggcgtggtgcttcagcgatccggagatgaagaggcggcggcgggtggccagctacaaggcttactcggcggagggcaaagtcaaggcatcgttccgcaggggattccgctggatcaaggccaagtgctccgagctcatccatggctggtacggatcacgccttcttcttcttcttcttctcctcctcctccttcccctttccccttttatcggggtatccgttcttcttctcgatattttcggacataacggcgatggctgctttggttcccaagcatcggacctgtccttccgctgggtaatgggactctgcacaacaagtacagacgttttaatcttcattgtactgtttgtatggattattggtacgactgaatgctag

SEQ ID NO: 156293 - DNA, 3533 bp, Zea Mays
cgacgatgcttccccacaactcgagcccctcgtagcttccacccggcccccatccgcggcctccctcctccgttcccctttcccgttttcctcctccgcttcccgattcaactcgcaacgccgccgccttcgctgacccatgagcgggcgcgagccgatttaggcccgccgctacagagatttcgagagaatttttgggctagcggggtgtgaacagaaacttggtgccccgctgctctgccttttgtcgtccactgtttcgcgtcaattctcgcgcgaaaagggatgggcactggagaggggtcgccgccggcgaggcggggcatcagcggtaggcgccgtcgatggccggacgaggacgacgacgagtatgtgctggaggaggaagaagaagaggattatgtggaggagctctccgcctcgagcgccggcgaggagggggtggattcagacgccgagtaccaggaggcagaggaggaggacgagatcgagaagccgcgcccaaagcgaccagcgaagggcatcacatcgagcgccggcgagaggggattggattcagacgccgaataccaggaggcagaggaggacgacgagatcgagccgccgcgcctgaagcgaccggccaagggcagcacatcgagcgcgggtgaggaggggttggattcagacgccgaataccaggaggcagaggaggacgagatggagacgccgcgcccaaagcgaccggcgaaggacagcacatcgagcgccggcgaggatgggttggattcagacgccgaataccaggaggcagaggaggaggacgacgacgaaatcgagacgccgcgcccgaagcgacgggcaaagggcagcaacagagtacggaaaggaaaggtggatctggccgccgcacgatctcgacgccggaagtatgaggaggacgaggactacgaggaggaggttgacgaagacgacgaggtggaggaggagtaccatgatgaccttgaggaggtcgaggaggaggaagaagtggcaccacagcggccgaagagcattgtgaaatgcggtgcccgtggccggaatgtgaagctgtctctggcagcgaagcgatctcatcagcggaagcaggaggatgatgaggatatggattttgacccagagttggatgacgaggaggtcgagatagatgaggatattgattttgatcccgatgtcgatggtgacgaggaggatgagtatcaagacgaggaggaagaggaactggttcctgcccgtgccagaaaggtaactgtaaagaatccggtgaagcgaaagtccatttcaaagaggcgaacaccaaagaagaagaagaaaaataggggatctaaggtttctaggcggaagggggcttcagctaaagtgaagaaatcagcacctgttaggaggcggagaaagcgttcagtgatagatgattacgaggatgaggatgtggatgatgacgatgacgacgacttcattgtcgacgatgaggtcattgtgaatcggcaccccaagaagaaggccaggatagggagtgggagggagacagtggtggaccctcaagtatctattgaggaagagacatggccagaccttgagtcagactcatcggactttgagtttgcgacgtccgatgaagaacctaacaatgttgaaacacctgtagctgagcagactacagtcagaaaagggaggaagaagaggatatctgagtcagagtcatcctcagattctgaatttgttgtatcaggtaaggaattggaagaattgagggagcctgagcctccaaaggctgcaccaaatctgcatgtgtccttgagaaggatttgtattacaaggcatggagaaggcaagggaaaggagaaacaggaacaggaggaggctgggaagccaatatgcgggatctgtctctcggaggagctgagagctactgtacaaggtgtcctcaattgttgctcacactatttttgcttcgcatgcatcatggaatggtctagggttgagtcgagatgcccattgtgcaagcagcggttcactacaatcaccaagtcatcaaaggtagatcttggtcttggagtgagaaaagctgtagtcaaggtcgaagagcgtgatcaggtttatcagcccactgaagaagaaataaggcgttggctagacccatatgaaaatgttgtttgtatagagtgcaatcaaggtggcgatgataatctcatgctactatgtgacatttgtgattcctcagcacatacttattgtgttggcttgggtagagaagtgcccgaaggaaactggtactgtggaggatgtagactcggtgacgagggaccatcatatactggaattcagcgtacagtagcttatgaaagacaaaattacagaagtcatgtcggtagttctgtaagttttggcatggctgtaccaggcggtacatttgaaaggccgtcatcaatcaatcctcgccattcttttcaagggattgatctaaatctatctccaagagagtttcccggagaatcacatcctgctgaatcacaagtttcaactgatagcgtatcaactcccactggaagagctggaagaactatttcaggaaggcgtgaattacaacggtacattcagagtttgttcagaccaagtctacctagtagaccagacacgtaccacaatattgcgcagaacagtggtggtgtatcaagaaatgaaccgaaccgctggaacttcccttcttcatcagaagcaaacacatcacagaatctgcctgatggcattcagaaccatcacagtgaccttccatttgttcaagctcacagcaattttgctccatttatgtccccagatggggatgatttccagcaaattgagggtgtcaagagcaacctcaggaacatgcagtagagcccttacggcgttactagaagctcgattctaccctgtgaagcttaccaagggggcaacatgtgccgttttaatggcttgtggaactgaacataacaaaagcttgtgcctgttgcattctcccagaaattgatgtggttcggctcatttgcggagatgtgatgtggtcaacgatataagatacatgctctctttgtttaagtttaggcattttttgttgtcgtcattcttattcattcagtcattaagcacaacctcagattacacagcgaaggcatttctgaatgtcttgatagcttcaaatttatacattgtaatattgtggtaacaccaatttcattaggctgaccattcttttcctcgcgagatgctcttttgcctactaggaatgctgataactgagcttcccagcctcttctataatcatataccgcgcggtggcaaactagcctcgttcgggtactggctttctgttctattagcatactggtctagtggatcaaccgagaaaagctatcaacaatcttagtactaacaatctatggtctgaagactcgtcttctttaagtgttttgttgtatagcgcagctgctttttgtacagatgaatgtttgttccatattgcttaagtttgtatccag

SEQ ID NO: 156294 - DNA, 833 bp, Zea Mays
cacagtacattcacacttcctaatcttaataaggaatagtttgcaaattgggtaacaaaaccctggagcttatgtaatcacagtctggcacatcatcatgaaataaaatatctatatgcccaagtgcaagtaaggtataaaaatgatgaaggattgcttaaaactaaatcagtgacatagacttgccagtagtaggaggtccaatcttgaataatcgaaacatcattcagctattggctcttattatttcaggtcaaaatagaaattaaattttgtttgtatgggcgattgccatctattgagttaggctacttcaatgacctggaaagaatggtgatcagcgaaaaaaagaacttcaggagttgtctaattgcaatcaatcaatgtagggcagtatttgttcattacatggtttttaaggcatcacctaggcgtccaggctctcaaaaactctgggcattcaccgtcgccatgcagaatgagacacagaggaaggaaggatggagaggaagatgagggaaagcgttccggagttgatttcgtgggagagcgggcgtcgatctggatggggaaacagcggcggtgctggagggagcttgaaggagagggtggcggcgctggatgagcggcggcgacggctttggagggagctcgaagggtaggggaagcgctggagggagatcgaaggcgtgggcggcggcgcttgagctggaagcagggcagcgcatgagggagcaaggcgacgacttgaaggagcagcagagcagggcggcggcgtgagggatagatgagaagtaggtcaagacatggataggagggatgggcatatgtgc

SEQ ID NO: 156295 - DNA, 826 bp, Zea Mays
atgaatgaaaaacgattcgtcgtcgctctctcccaaacgttggttcgaaccgggacgaaaccccagtcccctatgcgaccgcggcaaaggttcgaccgccgcatcaaacacgcaatcgccgccagctcggtctgcggccccgcaccggtgttctaccgtttggatgccaaggtgaacgccggccgccatggcctccatcgagccccgcaatcctacgccggcagaacaccggtgcggggccgcggccgccgctcaccaaccggcccgcgacttcctcgcccaccgcgacggcgtcgacaagctcctcaagatcttccgctacgccacgcccctcgcactcgccgctggggccccggcgcctccgcccgcctcaagtctttcgagtccagcgtcgtcctcagccgcaagggtttccgtctcggcaagttcgtgcagtccctccgcgcccacccgcaccttcccccggcgcttgcgctactcgcctacggcagtgagggcgtctactacttcgtcgagcagttcgtctggctcgccaaggccgggatcctgcctgcgcacctgctcgccaagttattgttgaagcctgaaggtacacaagttgtagataacacatcatatgatgaagtaaagctctgattaaagcgataaagtatatctgctgctgctgtgtatgattgcgttcagataaatggtcttgcttttctccaactcttcatcttcatagttctcaaatcaaaagcattgtgcctgaggctcacctgcaaccttgagctatccatgtcaatttaatttggagcaccaagatgcacgttggttctccaaatat

SEQ ID NO: 156296 - DNA, 2159 bp, Zea Mays
cggtgcaagccgtcgtttcaggtgaattcgagtgagccaagtggtctcgactctcgactctctcgagtgagtgagtgatcgccgcctcggcttgcacgtggccactctcaatggacctgaagaggacgcttgacgtggaggaggaggtggtggacggcgacgaggacgagctcgcctgctgtcccgacgccaagcgccgccggacgttcgtcgatagctcgatgcaggaggccattggcgcgcagtacatgcagaggcatctgcccaagctggagccatttctgcgcagagtcgtgcaggaggaggtgcacaatgttcttatccgacacatcgattccgcacacaggctcccgctccagctaaagacaagcagcaagcggtacaagctgcagttccagggaaacctgccgcagacgcttttcacgggcaacagggtggaggcggagagcaagcagccgctccggctagtcctgaccgacgctaccaccggccagacggtcgcctccgggcccatgtcctcgatgaaggtcgagctcctcgtcctcgacggcgacttcaacgccgacgagcggctggtggagcacagcgagaaggagttcagcgagagcgtcgtgttcgagagggaaggcaagaggccgctcttgtccggcgaggtggtggtcgtgctcgagaagggcgctgcctccatccgcgacatctccttcacggataactccagctggatacggagccgcaagttcaggctcggcgccaggatgtccagggctagctccatcgaagagcgggtgctggaagccgtgagcaacccgttcctagtgaaggatcaccgtggagaagtgtacaagaagcaccatccacctgcattagccgacgacgtgtggcgtctggagaagatcgggaaagacggcgtgttccacaagaagctggcggacttcggaatccacactgttcaagacttcctcaggaacctggtgatggatcagtacggactgcgcagcttgcttggcagcggcatgtcgaacaagatgtgggagtccacggtggagcacgcccgggagtgcgtgctggacgacaggctctactcctactgcagcgggcacgggaccgtcctcctgttcaactgcgtctacgaagtcgtcggcgtgctcgtcgggggccactgcttcaccttgagcgctctcaccccgacacagaaggcgctggttgggcagctgcagcaggacgcgtacaagttcccggaccgcatagccgagttcaaggtgcagtcgcagagcgccggcgtggagcagccacccgccgcggtcgagtccccgccgtccgtgcccggggcgcaggtgctcggcctcccgcacggtgtcgtccaggtccagccctcagcaggcgcgccgagtgcccatgacctgctgctgagcccgcggctcctccagcaccagcagcagccgctcagcgaggcggccctggaggacgtgctgcagtcggccagcgccgcgcaccagctcgacgccgccgagccttggttcccttcgtttggggcgggcgggttcgatgcgcgggacccgttcgacgtgcagttcggcggcgggtcgcagccgtgcgggctgctgctctccagcaccggcgccaggttgtgacttgcgagggacgtacgtacgcctctcgccgggcacgctgtcttttccatgtggtccgtggcgtcgtcgcgcggaacgagagaggacccggccgggcaaccggcgccggcgttttcggttggatatatgacgaaatctgcaggccgcagcggagcatgcatgggtcgggtcggtgcactgactgattttctgtctgtccgctaacagtcacaggtcggtgctgtttgtctgaggatgcctgtgttgcccagaggaaaggcaaagctggtgcagagagaagatacagtacagtggtgactggtagtgcagctggtggtaggatcagatgtcatcttttgtcattttggcatgtaacgtgagtgatgagtaatgagaagagcacagttctggccgttcaccagagactcccttcccatgtctgtaaaagcatagaagcgtgccttttgttttctcccttttcttttgcttgttcatcgtaaagatattgtacgtagtgcttggtattacacacttctcttcggtttgtac

SEQ ID NO: 156297 - DNA, 2040 bp, Zea Mays
tttcagaagcttgtttgcaatatgtcttacacgaactgtttgaagaagcatccctatagaattttctttcgatatggcaactccatcctcagagcttctttagagaaaggctcaccacaaaagttacttatggactatagcactttgctccatttcactgctttctgccctgattacagaacctacgctttccttctcagagcttgtgcaaaatgctcagacctctatgctgccatggaaatccattgtcatctcactaaagttgggttgctatctaaacagcatataacacctcctctgttcaagttatatatttctcatggttacatgttggaagcatgtgaattactttggtcaatgctggagtggaataccgatcccttccatggcaatctgatgcttatgggattcctgaagagcggacggctagataaggcatatcagattttcaagaggatgcctgtcaaggacttgatctcatggaattcaatgattgcaggtgcagtaaggagctcgcacctaaaagaagcaatgaatatttttagcaggttggttagttcaggccttgtgcctgattgcttctcgttctcctcagttctgtcagcatgtgctcgagctggtgctcgacgatatggagtgtgggtgcatcacctgatgactgaactgggggtggaaatgaatcatatcttgagctcagcacttgttgacatgtatgccaaatgcggaagaattgatgtagcaactgagatattcaataaagtcaagggaaaccatatttctgtctggaatactatgattagtggcttggcatcgcatggtcttggatccgatgtagtcattttgttccacaagatgaaaagtgaagagctggttcctgatggggttacgtttgttgcactcttgacagcatgcagtcgctgtggcatggttgaagaggctcggcattacttcagatcaatgactacagagtattctatcacgccagaggttgagcactacggtgccttggtggatacgttgtcgcgagctgggttgctggatgaagcatacgagttggtaatgtcgatgaatgtaaagcctgatgttgtgatatggagggcattacttagcgcctgtcgcagatatcgccacacaaaactaggtgaggccactattgagcatatggcatgccatggcagtggggattatacccttctttcaaacatctattcatcagcaaatagatggaatgattcagaggaagtatggaaacagaggaaacaaaagaaagttaggaagaccaaaggcttgagttgggttgagttagggggaagcacccatgaatttaaagctggtgatagatctcatcctgacaccgaggatatatacgtagtgctgcatggattatgcagaagagctaaggttgaaggttatgctccattgactgaactagtaacaaaagatgtctccgaagaggaaagagaagaaaaccttaccttccatagtgagaagctagcagtggcttatagtgtcctgaagactggtccagggacagaaataatggtttcaaagaatttgcaggtttgcagtgactgtcatgaatggatgaagataatctcaaaggtactttgccgtgttattattctgagggatagagttcggtttcaccggtttgaaagtggatggtgctcctgcaaggattactggtaggcctttcctggagcaatacagatgtaatccagctaatacaaaacgagcagttcctaggggatacatctgacctaattactttctccatctggagaatttggtgctggttctgctgctgcatagcaatgaaatgaaatatttggacatttggttactatatagtttagctctttggcacagcacagggaaccaaggaaaggactagatgaccgacacatgcacgtgtattgtacactccaaagcaatgcaagtgattagtgagataaatcaagagatcaaaatctctacgttggatttgtgttttatgattcattcagcacccttatgttttcagatgcttgacatgtgatg

SEQ ID NO: 156298 - DNA, 639 bp, Zea Mays
atggcgtgggctgagctgaagcattacaatgcttctgattggtttactgcgcccggacaggtacgaccatttctggcgtatgtgccgatgcaggcactgttactcgcgtacaggcaaccaaacagacgttcagccaaagtcaacgcgcgcgatgattcaggatggggtaaccaatcagactacaacaagggctggagcgctcggctggcattgttcatctgggaggatgttgacatggcgaattggtttgctgccatcgtcatggacaaggcgtatgcatggcggcttcgagaaggtgtactcgttcagctccatcgcagtgggcaagaacacaatctttatgcagggtttggaggggctcaattacttggtgaagcataccaacatgagtggatccgactacctcgtgccggtaagcaagagtcagttctctcgttcaccaagaagttgaccccggggataaatgttgttgttggagatggcttcccaacaagggtcttcttcaatggcgatgaatgtgctatgccgcagaggatttcgatgagcagtggatccagcacccgtctcagcagtggccttgcttttggtcttgttccttgctgcctccgtgcctcgcctttcctattgcttcagctatga

SEQ ID NO: 156299 - DNA, 181 bp, Zea Mays
gtgtgcaacattaccacaacaaagggggccaagcccaagtgttgtgtgaccttctcggtgtactacaacgacccaatgatccctgcaacacctgcgcatgtgggtgccctgcaaacaggcgaggggcaacatgcagcacggctgcataatccatgctcctgccaccggaggcactgcttgt

SEQ ID NO: 156300 - DNA, 450 bp, Zea Mays
cttgggtcgtgtttggggaactcgtcctcacacggcaagcttccatcatcgcgtcggcccgttgaagctggctcagagatggaaagaaagacgatggagctaggaaggaagttcatcagaaggacgacaagtgaggcgatgagtcgcgcttatggatggagaccagtggctagacgtattgccggctgattcgtgtgttctggtttcgcttgtctggtctacctggtggtgttccttttggctgcttcgcgtttgctttatggttgtaatgatgcttgtactccttgtgttgtgtgtggtttttctcgtttcctgtctggagagatgttgtaataagtggtatttgtgtgctgtgcgttcttccagtaggctgtgcctctctgtgcttatgagagtgcctggtttggtatgatgtcaagtgtgttgccagtagtacaggcagtttgttgg

SEQ ID NO: 156301 - DNA, 1499 bp, Zea Mays
gacaattccagctatttgcctagaggtggtattttgtttcacggcacccgagcaatctggatagttaatgctcatttgtactttgtatacaaaacttagatgaatttgatagtactccgattcccaactccaaagctgactgtggtgtgtgtattcctgcagttttctcgccatgaacctggtgttacccacgtcttagtaacaggaggagctggttatattggttcacatgccgctttaaggctcttacaggatagctatcgagttaccattgtggataatctatctagaggaaatatgggagcagtaaaggttctgcagggcttatttccgcagcctggtagactacaattcatctttgctgatctgggggaccagaaatctgtcaacaagatatttgctgaaaatgcatttgatgctgtgatgcactttgcagctgttgcttatgtgggagagagcacattggaaccccttaggtactatcacaatattacatcgaacactttactgattttggaggctatggcatctcatggagtcaaaacccttatctactccagtacatgtgctacctacggagaaccagagaagatgcctattacagaagccacacctcagttccctatcaatccatatggaaaagctaagaaaatggcagaggatatcatattagatttctcaaagtcgaagggagctgacatggctgtcatgattttaagatatttcaatgttattggctctgaccctgagggaagattaggtgaggctcctaggccagaactccgagagcatggtcggatatctggggcatgcttcgatgcagcattaggagtcattacaggattaaaggttaaaggaacagattatcccacaactgatggaacctgcataagagattatattgatgtcacagatttagttgatgctcatgtgaaagcactcaacaaggcagagcctagaaaagtcagcatttacaatgttggaacaggaagaggtcgctcggttaatgagttcgtcgatgcctgcaagaaggcaactggggttaacatcaaaattgagtacctcagcagaaggccaggagattatgcagaagtatatagcgacccaacaaaaatcaacaaggagctcaactggacagctcgatatactgatcttaaagagagtctgtcagtcgcatggaggtggcaaaagtcgcatcccagtggctacgggccaaatcgaatatagcctgctgatttataattcactgaatcaatacatattaattctttagttagcgataaaaaaatcttgctatgacactcctctcaaaatcactccgtattcttctcgttctttttatttcaaaggtttgctgtttttttactagtagaaacatgaacggtgatttggatacaaaaaacttgtgatgacaatttcattgtttttgacacaaattgttgatagaaaaaatgtacatttttcagccagtgagctgcaaggtttggttgcatcgagtt

SEQ ID NO: 156302 - DNA, 1979 bp, Zea Mays
cgccgcccgtcaccacccgcagcgagccttgctcgtcaccaactcaccatcacgcgcgagcgcgacgcttcagctctctctcgttgaagagctgcatctccagccagtgcctagcccgtcgagggaccggtcgccttggcggactcccgctggtgctcctccacgcccatctctctcttttcctcgctgcagccacggatcttggtagcagggacgccaccgcatttccagaatccaaacggaattttacaggaatcgcgctggaatttcacaggaatcagttcaatttcacggaacaaacgcaggagcaaggaaattttgtcacgttcccctcatttgtttccttcggcgacgactaggcgagtgctgcccgctcttcacgaggttttcacctgcgagtctgcgacgaacatcctccagggatggagtactttgatgcaaggcggaagcctcgtaatgttggaaaaatcattgcagccctggtcctcacaacactctgtatatttgctctgaagcaatctcctggttttggtggcaatagtgtgttttctcgccatgaacctggtgttacccacgtcttagtaacaggaggagctggttatattggttcacatgccgctttaaggctcttacaggatagctatcgagttaccattgtggataatctatctagaggaaatatgggagcagtaaaggttctgcagggcttatttccgcagcctggtagactacaattcatctttgctgatctgggggaccagaaatctgtatcctcatctatgcttctaaagctgttctgcttgtgtcttttctgcttatggagagttacacccgaagtcttcttttcacttaactgcctcccaggtcaacaagatatttgctgaaaatgcatttgatgctgtgatgcactttgcagctgttgcttatgtgggagagagcacattggaaccccttaggtactatcacaatattacatcgaacactttactgattttggaggctatggcatctcatggagtcaaaacccttatctactccagtacatgtgctacctacggagaaccagagaagatgcctattacagaagccacacctcagttccctatcaatccatatggaaaagctaagaaaatggcagaggatatcatattagatttctcaaagtcgaagggagctgacatggctgtcatgattttaagatatttcaatgttattggctctgaccctgagggaagattaggtgaggctcctaggccagaactccgagagcatggtcggatatctggggcatgcttcgatgcagcattaggagtcattacaggattaaaggttaaaggaacagattatcccacaactgatggaacctgcataagagattatattgatgtcacagatttagttgatgctcatgtgaaagcactcaacaaggcagagcctagaaaagtcagcatttacaatgttggaacaggaagaggtcgctcggttaatgagttcgtcgatgcctgcaagaaggcaactggggttaacatcaaaattgagtacctcagcagaaggccaggagattatgcagaagtatatagcgacccaacaaaaatcaacaaggagctcaactggacagctcgatatactgatcttaaagagagtctgtcagtcgcatggaggtggcaaaagtcgcatcccagtggctacgggccaaatcgaatatagcctgctgatttataattcactgaatcaatacatattaattctttagttagcgataaaaaaatcttgctatgacactcctctcaaaatcactccgtattcttctcgttctttttatttcaaaggtttgctgtttttttactagtagaaacatgaacggtgatttggatacaaaaaacttgtgatgacaatttcattgtttttgacacaaattgttgatagaaaaaatgtacatttttcagccagtgagctgcaaggtttggttgcatcgagtt

SEQ ID NO: 156303 - DNA, 2196 bp, Zea Mays
cgccgcccgtcaccacccgcagcgagccttgctcgtcaccaactcaccatcacgcgcgagcgcgacgcttcagctctctctcgttgaagagctgcatctccagccagtgcctagcccgtcgagggaccggtcgccttggcggactcccgctggtgctcctccacgcccatctctctcttttcctcgctgcagccacggatcttggtagcagggacgccaccgcatttccagaatccaaacggcacggaagagcactttgctcttttcttcttctttctttcgttcacccgtttctccccaatctctctcacacagcgcctgtttggaacgcaggaattttacaggaatcgcgctggaatttcacaggaatcagttcaatttcacggaacaaacgcaggagcaaggaaattttgtcacgttcccctcatttgtttccttcggcgacgactaggcgagtgctgcccgctcttcacgaggttttcacctgcgagtctgcgacgaacatcctccagttgatcttctggctggaaaatcacgttgacggtggcaagtaggggttctatcatccgcagcctcatctcaagaagcaaaattctttcatgatccctttgaaccggagggcaagcctgcccagggctgggatggagtactttgatgcaaggcggaagcctcgtaatgttggaaaaatcattgcagccctggtcctcacaacactctgtatatttgctctgaagcaatctcctggttttggtggcaatagtgtgttttctcgccatgaacctggtgttacccacgtcttagtaacaggaggagctggttatattggttcacatgccgctttaaggctcttacaggatagctatcgagttaccattgtggataatctatctagaggaaatatgggagcagtaaaggttctgcagggcttatttccgcagcctggtagactacaattcatctttgctgatctgggggaccagaaatctgtcaacaagatatttgctgaaaatgcatttgatgctgtgatgcactttgcagctgttgcttatgtgggagagagcacattggaaccccttaggtactatcacaatattacatcgaacactttactgattttggaggctatggcatctcatggagtcaaaacccttatctactccagtacatgtgctacctacggagaaccagagaagatgcctattacagaagccacacctcagttccctatcaatccatatggaaaagctaagaaaatggcagaggatatcatattagatttctcaaagtcgaagggagctgacatggctgtcatgattttaaggtaatattttttctccagttgcttagattagaacctcgagtttctgaaatctgttcagaaattggtttaaatcgacatctcggcttctgcaccagatatttcaatgttattggctctgaccctgagggaagattaggtgaggctcctaggccagaactccgagagcatggtcggatatctggggcatgcttcgatgcagcattaggagtcattacaggattaaaggttaaaggaacagattatcccacaactgatggaacctgcataagagattatattgatgtcacagatttagttgatgctcatgtgaaagcactcaacaaggcagagcctagaaaagtcagcatttacaatgttggaacaggaagaggtcgctcggttaatgagttcgtcgatgcctgcaagaaggcaactggggttaacatcaaaattgagtacctcagcagaaggccaggagattatgcagaagtatatagcgacccaacaaaaatcaacaaggagctcaactggacagctcgatatactgatcttaaagagagtctgtcagtcgcatggaggtggcaaaagtcgcatcccagtggctacgggccaaatcgaatatagcctgctgatttataattcactgaatcaatacatattaattctttagttagcgataaaaaaatcttgctatgacactcctctcaaaatcactccgtattcttctcgttctttttatttcaaaggtttgctgtttttttactagtagaaacatgaacggtgatttggatacaaaaaacttgtgatgacaatttcattgtttttgacacaaattgttgatagaaaaaatgtacatttttcagccagtgagctgcaaggtttggttgcatcgagtt

SEQ ID NO: 156304 - DNA, 2113 bp, Zea Mays
ttgtgttaaaaacagacaataccttaaaattataagcacaaattttgttacataataagaacgaagcaacaaactaagcataaagcaggacggagcggcagcggtaaaactggccggtgagtcagcggccaggccagcagtggcccttgccttgcctcctccccggctcccgtctcttcctcaaagtgtagcaaaaaaatagcccggatacgcggagtcacgttgcaaaatcaaacagaaccggagtgtcagattcagaaacaataggcagcagctagagcaagcagcatcgcagcatcgcagcagacgccaccgtcacgccaccgcgccgagagagaaaagccgagcggtggcaggcgaggggacgcctgccgcggtgggttggtgggtgccgcctccgcatccggtgccgctgctctgttcctcagtccgcccccatttacctcgcatggattcctgcttgcttctccccaactccacgcgccgatcctccaacctccaggagagcgcgacgcgatccaattgaggtccaggaggtggagggtgcctgcgctgtccgtgtgttcccctttgtttccatcccaagcctggccgcgccgccgctggacgccatcgcgcgcctgcacagcgtcttggtgaggtggtcgaagcagcggcggcggccgcagctcgggagacccggcgcgaggaagcggtggccgagccggcggagcgcgatgctgtgggtggcgcgcctgtccggcttgttatccgccgccatggtggtggtggtgctgtcgccgtcgctccagtccttcccgcccgccgaggccatccggtcgtcgcagttcgacggcagcgtccgcttcccgggacagatcgcagggggcgccaggggggtcgccttccgccgcgccccgccgttccgcaatgccgccgactgcggcgccggcgcggacaacggcaccggcgccaatgtctgcgacccatggctcgtccacatcgcgattacgctcgacaacgaatacctgaggggctccgtcgccgcggtccactcggtggtgcagcacgccaggtgccccgagagcgtcttcttccacttcctcgtctccgacccggggctcggggacctcgtccgcgcggtgttcccgcagctccggttcaaggtctactacctggaccccgggcgcgtccgcgggctcatctccacgtcggtgcggcaggcgctggagcagccgctgaactacgcgcgcaactacctggccgagctcctggagccgtgcgtgcgccgcgccatctacctggactccgacctcgtcgtcgtggacgacgtcgccaagctgtggcgcaccgacctcggcgggcgcaccgtgggcgcgcccgagtactgccacgccaacttcaccaagtacttcacggggcggttctggtcggaccagcggttcgccgggacgttcgcggggcggcggccgtgctacttcaacacgggcgtcatggtggtcgacctggagcggtggcggcaggcgggctacacgcagcgcatcgagcggtggatggaggtacagaagtcggcggcggggcgcatctacgagctggggtcgctgccgcccttcctgctggtgttcgcggggcacgtggcgccgatcgagcaccggtggaaccagcacggcctcggcggcgacaatgtcctgggcagctgccgcgacctgcacccggggcccgtgagcctgctgcattggtccgggtccggcaagccgtgggcgcggctgggcgccgggcggccgtgcccgctcgatgcgctctgggcacccttcgacctgtacgaccccggcggcggcgccgaggagtccccgtacaaattctgagctcctgatttcttgctctccatttacctacatgtttttttattcgcaaaaaacagactatatgttctccatccttttcttcttcttcttcttcttttttcccctctgggctgttggattaaatgttttgtgttagattgttcatgttcgttctcggtgagcccttcttccgttcctttttgatcgctttgttactaaaaccgcttgtatcctactctacagagctgcaggcttgcagcctcatcaccataaataaaaaaggaatagag

SEQ ID NO: 156305 - DNA, 1443 bp, Zea Mays
agcttgtacttgattatgtcagatggaaatatgttagcaacagcagctggccagttgaggacctttgacacttccagcaacaaaaagattaaaaaattatctggacatttcagtttctgtgaggagcatgggtttttttttccaatgatagccagtatgttctgtcatctggagttgggaagcgctatattgccatttggaagctggacagcgggaaaacccagagctcaaactgtatcctgtcgatggagcagccagcaatatttttggactgtaaatgttcagacgaaggagaagtacacattttggctatttctaagattggtgcctgctatttctggtctgcaaacgatgtggatgacctgcgtaataagaagccgaccaagatcatattagctgagtcatctgtgtcaacagttcatcaggcattctccatatttgccgcaaaacttcaaggagtggatggacctaattctgcccatgtcctactggcttatgggtctgtagcgaaaccatcttttgataaacttttggtttgttatggtacggatattaatttgggcatttctcaagatggagttctcttgccaaatactcaaagcaccatgacaaataaaggccaatctgtgaaaaaacaagaaactgtcactgctctagaccgagccaatgctgaagatgctgtccttcctcttccaaagctccatacacaagaaaataaaaggaaacatggtgtaagaaaacccagtggtgatgtcaagcctgaggttcatagtgacctcaccagtcaccgctacaagatctattcataaaagagtttctgtgcaaagaatcgaagatgacagcatatgtatcgaggatatgatgagggagtgtggcatcattgacactagagtagatgatagcatgaagggccatcctggcattccctctgatatttttgtccgatctgtttggtgatggctgcataaaagtcgatgctaatttacccagtaagaagatgcgaggtcatttaagatcattgaaacctggagatgcttgcaaacttcttgagaatttagtatctgcatggacaacaagaaagatacaaagctactgaagctttctggtcggcttcggttaataatggctcaggccgacaaggcttctagtaacatgtcatgtctgagccgacatcagaggagacgcgggatgctgctttcaagtctgacgaagaggaggatgaagacgttgatgaaacagcgtttggtcaagattcagattcgtcgcaaaatagtgatgacggtggtgatgatgctaagtagtctcctgctggtattcatcattacggaaaaatcctctggtccagactgcggcggcgaccctggcctggtcccggcaacttggagcgggaaaaggcacaccgggctcaagtggtcggctgatggatggcgccgcggcggccgc

SEQ ID NO: 156306 - DNA, 472 bp, Zea Mays
gccgctgggacaacgtgacatcaggcgttgtgccacggtcttcctgacacggatgaaggggaagacggtgatgttcgtgggcgactcgctggggcgcaaccagtgggagtcgctcgtctgcctgctgcacgccgccgcgctgcagtcgccgacgcagctcgtctccgtggaccctttgtacacgtacaagttcctggagtaccaggtgacggtatccttctaccgcgcgccgtacctggtggacatcgacgtggtccaggggaagcaggtgctgatgctggacgacatctacgagaacgccgagtcatggcgcgacgccgacgtgctctccttcaactccggcctctggtggacgcacaccggctcgatgcaggggtgggactacatgggcgagtctgggcgatactacgaggacatggaccgcacggtggcgttccagcgcggcgcatggagcacggagcactggcagtag

SEQ ID NO: 156307 - DNA, 1163 bp, Zea Mays
gtctgaaccaaaatctcatgatatcttagccccggtctgcgatgcgacggccgacggccatggatggcaatatctctaaatcgcgaggacctatacgctaatctaacgctcagccgcggcgctcttgcgcgctcctacataaacaaccccggcccgcctcgacacacagacacagcagccgtttccactgacagtttctcagaaccacagcctcgatccatcgggggagaggatgggagagcctacgcggcaggagctggcggaggcggcgctcgccggggagtcggcggagcagcgcaaccgcttcctggtgctgcggctgtacgaggcgctcggctcctgcgacgcgcgccgggcgcggaagctgctggcgcccgacctcgagtggtggttccacggcccccccacgcgccagcacatgatgcgcctcctcaccggcgcggaccaccagcgccacatgagcggcggcggcggcggcgggttcgccttctccccgcgctccgtcgacgccttcgggtccaccgtcgtcgcggagggcggcgctgacgacgcgcgccagctctactgggtgcacgcctggaccgtggggcccgacggggtcattacccagctcagggagtacttcaacaccgacctcaccgtcaccctcctcgccggcactgcctccgccaagaaagctgctccgcctaagaagcagcaggacgctgcctcttcttctacctcctcctcctcacccccctcggctgcgtcgtcgtctgcagctgcagggtccaagtgcctgtggcagagccgccgcgccgacagcgcgcacaagtcgctgccgggcctcgtcctcgccatctgagactagagacagcaagatccatctaccctccattataagtttataaccttattacaaaagatcctaaaattcgaaactgttattgcataaataatctggaactgcactagttgtatgtactcggagtcggagtcagtcagtgaagacgtaatgacgatgcgcgtatggactgaactgctcgatcctccgtgttgtgacttgtgaggttcaggtgtcgtgtgtgctgctactgtaatgatcgactgttattgtccgagtctgctggatcatggatgtgatgtgatggtatatcgtggtggttaaataaaagtttcatgat

SEQ ID NO: 156308 - DNA, 1791 bp, Zea Mays
gaacggaccaaagggcgtatttagaagccatcccaaaaggttatgaaaggttgcactggagttcgtttgtttggcgttctataaccacattcgatcagtgtcagcttacagaagaaatcgaacagaatacaacagaaccagcatgcccagggagatcatacaaataaaacgatgacaaaaacccatagacgaccttaccacatataacaacaccttcagattggacacatgggattaaagctgttcagaatgctaaaaatcattgtagtagtagtagaaaccgtacgcattaaattcaagagaacatgccgacaaacaattgcaatttccaccaggaacataaaaaaaactgcaatccaggcttactaaatcccaaagcagatatagtatgggtcacacggcaagttcgacaaacattgaacaaaattaacagaattacatccaagacaacaagggcttcagcgcagcctcctggcctccctctcagactcgagcagggtcaggatgtcaccctcacgaacagggcccttgacgttcctcatgatgagacggttctggtcatccaagaacttcactctgacctgggtcacctgacccctggagccggtcctgcccatcacctttaccacaacagcaagcttcacttgggtgtccatgctgcattgacagaaagcatttataagttatcaaggtgaatcatttgctttgttcgcatggttcatttcaactgcactgtcacatgatttggtactattggagatccgtgaacaaaactgaaacaaattaacagcttagaagcaaaacataaacacaacacggccaatttggtatccagcacatggtgtttgtagtatgaaagagaggttaacgtaatgcatgctctggcacaattcgtgcctatcactatcaccttgcattcaataggttctcaatgaatgtttgctggcgcacaaatccaaattatcaatactaacttgcgtttaagcggttcaaaacgaatggtttgctgtggcacaattccaaaatgatcatatcagcttgcattttgagagattccgcgactgttaagcaaaggtcaagcaatttccttgagacacagatcaaaagataagttttcttcgcgatgcttctacctatcctcactaaagacttgaaggttgtacaacaaaataggatcatagcaaaaatcgagcatcccacacgaccaccagatcatagtcgcacagcatccaacatattaaatgaagtaatccagtgatattatggccaaaacatcaatatttaattccacatcattttaaatacatattattctagaactaagctaacaaacatgccatcttcacgatgtttaaacagactaacatacagattaacttcattcacggaggacatcaaaaccaaaaaaagcccttaaagattgtaccacagattctctacgaatcacatcaataaagaagacgaacacacgacagcataaaattcatagtcacacagcatccaacatgcacaacaaaaaaaaaatacagtgatagtagtgtcatccatcgcataatatgtggaaccagaacaagtgcctaagaccagaggtttcagaacgctcccagatgaatcacgacaggcaaacagaaaactcgtacaataacaaacaaataaagaaacgcgcgacgcattataacatctacagctaagagttgcacctctcgcttctcgcggggacggaggccgacgagctctcggtgacgcgaagcgaactgggacggcggcggtcgagtcgagaacactgagcag

SEQ ID NO: 156309 - DNA, 996 bp, Zea Mays
atgcacgctagcctcgcctcctacgccgcggcagctatgccggcgctggacctccgccccgagatagcgcacgcgcaccagcccgtcatgtcgccctcgcgccacggctgggacggcaatggcgccgcagcagtgtccagccctatgcccaagaggctggacggcaaggtggccattgtgacgggcggcgcgcgcgggatcggcgaggccatcgtgaggctgttcgtcaagcacggggcgcgggtggtgatcgcggacatcgacgaggccgcgggggacgcgctggcgtcggcgctgggcgcgcgggccagcttcgtgcgctgcgacgtgtccgtggaggaggacgtccggcgcgccgtggactttgccctgtcgcgccacggcggacggctcgacgcctactgcagcaacgccggggtgctgggccggcagacgcgcgccgccaggagcgtcctctccctggacgccggcgagttcgaccgcgtgctccgcgtcaacgcgctgggcgccgcgctcgggatgaagcacgcggcgctggccatggcgccgcgccgcgccgggagcatcgtctccgtcgccagcgtcgccggcgtgctcggcggcctcggcccgcacgcctacaccgcctccaagcacgccgtcgtcggcctcaccaagaacgcggcctgcgagctcggcgcgcacggcgtccgggtcaactgcgtgtcgcccttcggcgtcgccacgcccatgctcatcaacgcctggcgccagggccaccacggcgccggcgccggcctcgacgacctcgacgtcaccgtgcccagcgacgaggaggtggggaagatggaggaggtggtcagggagctggccacgctcaagggccccactctcagacccatggacatcgccgaggccgtgctcttcctggccagcgacgagtccagatatatctccggccacaacctcgtcgtcgacggcggcgtcaccacttccaggaacctgatcggcttatga

SEQ ID NO: 156310 - DNA, 627 bp, Zea Mays
atggggttctccggggtgatcttgaagccctggagagcctgcatcgccaccatggactggccgtcgtcctcgaactccacaaaggcaatgcctggtttggcttcgatcatccggacttcccggaagccgggatactgctggaacaggatctggagcatcatgctcgtggtctggtctggcaagttctggatgaagaggatgttgttcggaggagcagggagagtgagcaatagagtatggggagatagtgagaatgagcatgagctcctactcagtgggggagatgaagggggtgcggtgttggtgttgaatgtgactgctgcgaggcgggggctggtgtcacaatgggatggagcaggagcgagtcaagcagaatcgaggggggccacattggcgaagactcagctgggacgtgcggccgtaggggtgggtggtggccgaagggaggaggatgacgacgagggcgccggggcggtgatacgggcacacctgctctccgacttcaaggccgcgtgttacattttcaatgcagtcatggaaatggaattagatgttgctgttgtgaagagagatgaccttggaaatgctcatggtcttaatcttgatgagttcgatgatggttactaa

SEQ ID NO: 156311 - DNA, 1421 bp, Zea Mays
cacaagtgccttgccgggctcacacacaaaagcacttttgttttttttaaccccccgctagcaaaaattgttccccttccttcctcactccttctctctcatccaccacctcgacgctttgcgccgctaagcgatggcgatggtcatgactgacgccgacgccgccaccgccactgccaccgccgacgccgccaccgccaccgccaccgccaccgccgacgccgccaccgccaccgtcgacgccgactccgtcaccgccaccgccgcagagaagccgaagcacgccgagaagccggactacgccccctacaacggcgcttccaccgcagatggcggcacgggcgcccgcgtccgccgcggcggcggcgtggtggattcggtggtggcgcggtggcggcgggaggacatgctcgacaagagccccctcgcgctgcatgccgcggccgcggtcttcgccttcgtcgctctcgtgcttgtcgcgtccaaccagcacggcgactggatgcagttcgaccggtaccaggagtacaagtacctgctttccatcgcgtcgctggcgctactctactcgctggcgcaggcggcgcggcacgcgcaccggatgcgcggcggcgtcgaccccatctcctcagcatctgggaggcttcttgatttcgttggtgatcaggtagttgcgtacttgctgatgtctgcgctgtcggctgctgccccgatcacgaaccgcatgagatctgcagttgtcaataacttcacagatgcaaccgctgcagcaatcagcatgaccttctttgcatttgcagctcttgccttgtcggcagtggtttctggttacaagctctccaaacaaacatacatgtgaatcatcgtcgtagaagtaaaacccattaggccttgtttggttgcacaaggatcgaatgggattgaggggaattaaatccattcttgtttaattttgactagaaagagatttaatctgctccgatccccttcaatcccttacaaaccgaagaagcccttaggtggaatattcattatggattgcttagccaaagaagagaaacctctgatgcttctcttcaacttgaaggtcatctgttatgtgttacggtgattgttgttgcttgcagtagcttccatgtgtgtacatagaattataggattcctgaatattattgttttcctttctaagatattcctgttataatcagaagtagagctgtatgcttatttcagggctcatgattttcctttacctctgaaaagcgaaatgtttgctgccctaattgtaacatgcaactttgcgctgcgttcattactgtcggaaattttctggttaaatttctaattgacatggttgttatattcattttatacaaggttaactggtattagtggcgtaagctctgtttctgattagctcc

SEQ ID NO: 156312 - DNA, 246 bp, Zea Mays
tccacctcttgtgatgatttattagctatgtcatgttcttcaactatagattattattattcttccttgtcttgtgggactaaccttttgaaggaaaataataagctcaaaaacaaagtgaagaatttaagcaacatgtttgagaagtggaataaatcaaaagtcactcatgatcttataatgaaaaatcaaataagatatgatgacaagagtggccttggtttcaacaagagcaatatcaaaggc

SEQ ID NO: 156313 - DNA, 1048 bp, Zea Mays
gcgcagacacccaagcctccaccaaattaaaccgccggcgcctccacttcgcgttctcgcctcatctcctcccgctcaggatccggcggcgaaggtaaggcaagatgtacaccgcgaggaagaagatccagaaggataagggccttgagccctccgagttcgaggactccgtcgcccaggctttcttcgacctggagaacggtaaccaggagctcaagagcgacctcaaggacctttacatcaacggtgctatccagctggatgttgccgggagcaggaaggctgttgtgatccacgtcccataccgcttgcgtaaggccttcaggaagatccatgtcaggatcgtcagggagctggagaagaaattcagcggcaaggatgtggtaattgttgccacaaggaggatcgtgaggccgcccaagaagggttcagctgttcagcgccctcgcaccaggactctgactgctgtccatgatggcatcctggaggatgttgtcttcccagctgagattgtggggaagcgtgtcaggtaccgtctggatggtgccaagatcatcaagatcttcttggacccaaaggagaggaacaacacagaatacaagctggacacctacactacggtctaccgcaggctgtgtgggaaagatgtggtctttgagtaccctatggccgaaaatgcataaatatgacgcccggatatccccattttattttgttgaatctggatgtttctttggggtctcaactagactgctccgtatgtacttcaaaaaccatagttttgatgccaaagttgttgcctaggaatttggtactcgggaattggtagcggacctgaacaatgttaagttttgagcatttaaatttacctttgtcatgataacatgttgcgagtttttatttaattgctggacgtgtttgatatgccagactgcattgttcgtttgattctacctagaatcaaatcaatatgcaactacaagcctcgcacctgtaacgtctaacctgggtttttcttgttcatttaaactttgtaacatcatgtcca

SEQ ID NO: 156314 - DNA, 1062 bp, Zea Mays
atcgtcgacctggccgcccgttctctgcttaccatctccctttgcgctgtttgctgatccgtgctctccttttcgaatttcctccgccgctgcaggatccggcggcgaaggtaaggcaagatgtacaccgcgaggaagaagatccagaaggataagggccttgagccctccgagttcgaggactccgtcgcccaggctttcttcgacctggagaacggtaaccaggagctcaagagcgacctcaaggacctttacatcaacggtgctatccagctggatgttgccgggagcaggaaggctgttgtgatccacgtcccataccgcttgcgtaaggccttcaggaagatccatgtcaggatcgtcagggagctggagaagaaattcagcggcaaggatgtggtaattgttgccacaaggaggatcgtgaggccgcccaagaagggttcagctgttcagcgccctcgcaccaggactctgactgctgtccatgatggcatcctggaggatgttgtcttcccagctgagattgtggggaagcgtgtcaggtaccgtctggatggtgccaagatcatcaagatcttcttggacccaaaggagaggaacaacacagaatacaagctggacacctacactacggtctaccgcaggctgtgtgggaaagatgtggtctttgagtaccctatggccgaaaatgcataaatatgacgcccggatatccccattttattttgttgaatctggatgtttctttggggtctcaactagactgctccgtatgtacttcaaaaaccatagttttgatgccaaagttgttgcctaggaatttggtactcgggaattggtagcggacctgaacaatgttaagttttgagcatttaaatttacctttgtcatgataacatgttgcgagtttttatttaattgctggacgtgtttgatatgccagactgcattgttcgtttgattctacctagaatcaaatcaatatgcaactacaagcctcgcacctgtaacgtctaacctgggtttttcttgttcatttaaactttgtaacatcatgtc

SEQ ID NO: 156315 - DNA, 1352 bp, Zea Mays
atgttctgccggttccagcctcggtcgcggatcgcccactctcctcccccacggacgcagatcccccgcctcgattcctcattccttcaatggcgcatcccttccttcgatggcgctcctcgcatcccgcctgcccgccgcgctcgattcctccttccttcaatggcgcatcccgcccgcagccaccaatcaacgcccgcggatcctcgtcaatcaactcccgcggatcctccaccctcctccccaccgcggcggatcctccaccctcctcgtcaatcaacgcctgtggtcctcccccacgcggatcctcgcaccacccactcccccgcgtgcgtccctggcccctcgagctcgcgcaggccagaggaccgcgctcgcccccctgaagattactccctccccaaggagctggcggcggcgtgactgtgtcgggagaaggaggccgtagaggacgctgcgcgggggctgcggcaggagctcgactccgagcggtcctccccggagatggcagccagatctgaccattgagccccctaatcgagcggatccaaggtctgtgcgctgggctgaaggcggacgcgcttgctcatcaaccgcgtgcggtcgagtgctagagccaccgattcaccgtcgagtgcatcacccgctacatcgctgggctacagcagaagtatacacaaagtggtggagtccgctccctttggcttcgaacccgacaccaataagccagcgctgtaccagaccgatccatcgggtaccatctctgcttggaaggccaatgccatgggaaggaactccaactctatgtgtgagtttctgaagaactacaaagacctccggcaaggagaccatcaagtttgctatctgtgcacttctagagattgtgaactgaacttaaatcatgcattcagtattggtctctagagaggaagctctgccaagcattactaagaactgatcaggtatacttatccatggtggaaagaaaaggtgattgactcagacttgaaaagaaaagatggcctttgcccattgacgcctgaggagactactcttgtcctcagagcacttgacatcgatagaagtatgcaaatatacattgctgctggggaaatatacggtggaaagcacaggatggcttctctaacttcagcatacctaaatgttgtatgtgcacaaatatattatgcatctattgtagcgtacttgttacacagtactcttccatctctcctttttttccttgttgatgccaaaatcaagtttacaagtatggttgcccctcacccacagcctgttacatattttagtatcatttatttatggaaaaacgaattctcttgtttagtatc

SEQ ID NO: 156316 - DNA, 1562 bp, Zea Mays
atgttctgccggttccagcctcggtcgcggatcgcccactctcctcccccacggacgcagatcccccgcctcgattcctcattccttcaatggcgcatcccttccttcgatggcgctcctcgcatcccgcctgcccgccgcgctcgattcctccttccttcaatggcgcatcccgcccgcagccaccaatcaacgcccgcggatcctcgtcaatcaactcccgcggatcctccaccctcctccccaccgcggcggatcctccaccctcctcgtcaatcaacgcctgtggtcctcccccacgcggatcctcgcaccacccactcccccgcgtgcgtccctggcccctcgagctcgcgcaggccagaggaccgcgctcgcccccctgaagattactccctccccaaggagctggcggcggcgtgactgtgtcgggagaaggaggccgtagaggacgctgcgcgggggctgcggcaggagctcgactccgagcggtcctccccggagatggcagccagatctgaccattgagccccctaatcgagcggatccaagatttaggcggtggtgaccaatctgaacggcgcacactcgacatggccattgctatggcactaagggagagcaagcccgtgtacctcagcatcagttgcaacctccctgggctacctcattctacctttagttttatgttcaagtacatgattatcgggagaaaccaagatatggtgcttacactatttttgtaaatccttttgtagcaatgtctgtgcgctgggctgaaggcggacgcgcttgctcatcaaccgcgtgcggtcgagtgctagagccaccgattcaccgtcgagtgcatcacccgctacatcgctgggctacagcagaagtatacacaaagtggtggagtccgctccctttggcttcgaacccgacaccaataagccagcgctgtaccagaccgatccatcgggtaccatctctgcttggaaggccaatgccatgggaaggaactccaactctatgtgtgagtttctgaagaactacaaagacctccggcaaggagaccatcaagtttgctatctgtgcacttctagagattgtgaactgaacttaaatcatgcattcagtattggtctctagagaggaagctctgccaagcattactaagaactgatcaggtatacttatccatggtggaaagaaaaggtgattgactcagacttgaaaagaaaagatggcctttgcccattgacgcctgaggagactactcttgtcctcagagcacttgacatcgatagaagtatgcaaatatacattgctgctggggaaatatacggtggaaagcacaggatggcttctctaacttcagcatacctaaatgttgtatgtgcacaaatatattatgcatctattgtagcgtacttgttacacagtactcttccatctctcctttttttccttgttgatgccaaaatcaagtttacaagtatggttgcccctcacccacagcctgttacatattttagtatcatttatttatggaaaaacgaattctcttgtttagtatc

SEQ ID NO: 156317 - DNA, 2167 bp, Zea Mays
atgttctgccggttccagcctcggtcgcggatcgcccactctcctcccccacggacgcagatcccccgcctcgattcctcattccttcaatggcgcatcccttccttcgatggcgctcctcgcatcccgcctgcccgccgcgctcgattcctccttccttcaatggcgcatcccgcccgcagccaccaatcaacgcccgcggatcctcgtcaatcaactcccgcggatcctccaccctcctccccaccgcggcggatcctccaccctcctcgtcaatcaacgcctgtggtcctcccccacgcggatcctcgcaccacccactcccccgcgtgcgtccctggcccctcgagctcgcgcaggccagaggaccgcgctcgcccccctgaagattactccctccccaaggagctggcggcggcgtgactgtgtcgggagaaggaggccgtagaggacgctgcgcgggggctgcggcaggagctcgactccgagcggtcctccccggagatggcagccagatctgaccattgagccccctaatcgagcggatccaagatttaggcggtggtgaccaatctgaacggcgcacactcgacatggccattgctatggcactaagggagagcaagcccgtgtacctcagcatcagttgcaacctccctgggctacctcattctacctttagttttatgttcaagtacatgattatcgggagaaaccaagatatggtgcttacactatttttgtaaatccttttgtagcaatgtatgcattgctcttacgtttcctccagttatatttatgagttcccttgtatattgatggactttaggtgcaaaatatttattagttatgtgagaatttatggccaatatctggtttgtttaatggttttacacactaacttcaaatacagcatgaattcctgtcactagcccctataaggctattggagatcgatattcaaataaaaactcttaccgcacagtgcacattgtatagttgaagaagtgcacactctttatgtttttaaaaggaaaaacatttcaagggtgtttagtagccatggtactgtaaacctgtgcattctcttgcaaattaatgcacaaaggttgtgctaacttgcccctaatttttttttatcccacttggcctgttatacttatacaagctaaagtagacttctaagttaaggcacacatgcagaattgttgccactttctcattttgcccttaattttttaccctccatagcatccatttattgctctgatgatcaaactattggtatgatataattaagtactgaagaaaaaaagtttcaaccattttagaaataatatctctgacccgaattttcgtctccccaggtctgtgcgctgggctgaaggcggacgcgcttgctcatcaaccgcgtgcggtcgagtgctagagccaccgattcaccgtcgagtgcatcacccgctacatcgctgggctacagcagaagtatacacaaagtggtggagtccgctccctttggcttcgaacccgacaccaataagccagcgctgtaccagaccgatccatcgggtaccatctctgcttggaaggccaatgccatgggaaggaactccaactctatgtgtgagtttctgaagaactacaaagacctccggcaaggagaccatcaagtttgctatctgtgcacttctagagattgtgaactgaacttaaatcatgcattcagtattggtctctagagaggaagctctgccaagcattactaagaactgatcaggtatacttatccatggtggaaagaaaaggtgattgactcagacttgaaaagaaaagatggcctttgcccattgacgcctgaggagactactcttgtcctcagagcacttgacatcgatagaagtatgcaaatatacattgctgctggggaaatatacggtggaaagcacaggatggcttctctaacttcagcatacctaaatgttgtatgtgcacaaatatattatgcatctattgtagcgtacttgttacacagtactcttccatctctcctttttttccttgttgatgccaaaatcaagtttacaagtatggttgcccctcacccacagcctgttacatattttagtatcatttatttatggaaaaacgaattctcttgtttagtatc

SEQ ID NO: 156318 - DNA, 1916 bp, Zea Mays
cttccaatatcacacgtacaatggcactcgcaaatgggcttcaactttacaaatactagaaaacttggttagccgcccaggtcaaaagcgcccaacacaaaacagaatcagccgccttttaaaaaaaacagaactagaccacgacttcgtctctgcaccagcagaaacaaaagccaacttcgtcctccttataaaccagatgataattagcagatttttcgaataacttaaagtaccaattgggcttacccatagcaaatcaaatcaaatcaagaaatatggaactacaaacccgagggatggccagcacgtaactgttcagaagccgaaaaaccggattgatcgaaacgagaagaacttggccccgtcccctcctcctgaatggcgacatcctcctccccctcaaatctctcctctttatctcccccagtccccctcctcctcgtgcgattcgccccgtgctcccctctcaaaaccctagccctaccacagccgcccctccatggctgcggatttccgcaccccagaccgcctccttcccgccacggctgaggagccgacgaccccgcagggccgccctcccagtccggtgcttagcagccccgccgtccccgacgctacccacgatgacctccgcttctggcagtacatgctcgccggctccgtcgccggcgtcgtcgagcacacggcgatgttccccgtcgacactctgaagacgcacatgcaggccagcgcgccgccgtgccggccggctctgtcgctgcgggcggccctgcgcaacgccgtggccggcgagggcggcgccctcgccctttaccggggactcccggccatggcgctcggcgcgggccccgctcacgccgtctacttctccgtctacgagctcgccaagtcggccctcaccgaccgcctcggccccaacaaccccgccgcgcacgccgcctcgggggtcgtcgcgaccgtggccagcgacgcggtcttcacgcctatggacaccgtcaagcagcggctgcagctcaccagcagcccctacacgggcgtagggcactgcgtccgcaccgtgctgcgagacgaggggcctagcgccttcttcgtttcctaccggacaaccgtggtcatgaacgcgccttacaccgccgtccactttgccacctacgaggcggccaagcggatgctcggggacattgccgccgaggaggagtccctcgccgtacacgccactgctggggccgcagccggggcgcttgccgcggcggtcaccacgcccttcgatgttgtcaagacgcagctacagtgccagggtgtgtgcggctgtgagcgcttttcaagcagctcaataggcgatgtgttcagagcaatcataaagcgagatgggtattctgggctcatgaggggatggaagccaagaatgctattccatgcacctgcggctgcgatatgttggtctacatacgaggcgttaaagtcatctttcggaaggttcaatgaagaaaggcggaaatagtctgcctttctctaagccccgtgtattcccccccccccccccccccaccctgaagtcaatgtacttctatacagaagcatacagcatactcgctcagcagacagagagacgcatctccaggatgcatttgttgtgatgttgtgcccaagaactatcacgaggaattgagatgtggcacatcaatatgcaatatctgtctaacgccaatctgtatgtaccatcttttcttgccagataatttgacgtactattttttccagccttggcccttggggtgaggaaataatagaagagaatactcctttttccatgtattgatcagaactactcagtgtcagcaagcttatctgcattgttgtatcattgtatggccccagatttttttttaataacgcaaaggctttggtttcgt

SEQ ID NO: 156319 - DNA, 392 bp, Zea Mays
catcatcctgtcacatagctttgcatttgaagcatgaggagaagcattgtgggggagaagcttcagtgcaacattgttgttgtatagggattaacatcctcaagatcacttggaaaactttcacaaaaaaactcgtaatgcaagcatatgttttattggaaaagtttttcaagctagatttctgaaagcctcctcactgctttagttatgctgaattggaatttgcagctaggggtttctcacaagtaaatttcttagctaaaggtggattttggtctgttcattgacatgtcctttctgatggtggcgttgtttgttagctacaaaatcatcaatcaaagattgtaattatattgcgtcattgttttgtatcaattttaagttgccgtagc

SEQ ID NO: 156320 - DNA, 980 bp, Zea Mays
tacattggaggggaaataccagaagcttggagctctgccctgactttcttgatcggcttgccaactggcttgtattcatcaccgaaaaccatttcttgtcttgagtgtattggtaaataatttctgtcaacctcaagattttccttcagaggataagaaggtgaacaagaagctgacagccaagctgaccctatactcaggatgtgttgtgccttctggtggtgaaaccgtctctttaagcaactgaactgctttaagtataacagaagagctcagtgatttaccctttagaaaatcctctaccttgctagctctgatggcatggtcagctccataagcaccgaacaccaagcatatatcctccatgatgttcttccctgaagctgcatcagttgaagtccttgccaagagagcagcattgacatatgaagcagcattgccaaatggccgaggcgctgcccggaatgtctcaaaggtgatgccatctcaatcccactttgggatgaatatgctgatcagcagggtcctagaatcacatggagactgctgcaagaactcctccaaagtaaggcacaacctttttggaagccgtctggattgtgactgttgtacctgcagccagtagcacagttgctatgtctgactcgaatggcaacctctgcgccatgattatgttgccacctatggttgctgtgttccgaacaaatggcgaagccactttgcttaggtgattggcaatttttctgaagaccagatttccatctgacaacacctcaatggttgtagcctgtagagatggacacaaccgatccaagctcaattcccttaacgctgctgttgatgactgatagctctggtattcctttgatgtcaatgtacttgtcatagaggtcctgatccatgtgtaagggagttcactgccactccccgctcattttttctaaaggagaaatatccatcttcttgttgttttgtaccgt

SEQ ID NO: 156321 - DNA, 489 bp, Zea Mays
atgcagcacaaagccgaccatggcagatgttatcggtttcgatctaggcacaccgaattcatgcatctccgtattggaatgaaagctccatctgctgttctggaggatggaacaacagtggtggtcaagagattgaaggaagtggtggcgggaatgagggaatttgaacagcagatggagctaattggcaaggtttgccagcatcagaacactgtcccattgcgtgcttactactactccaaggatgagaagctcttggtgtatgtcccactaggtagcctttgtgctgctttgcatggtaacaaagctgctggaagaaccccattggactaggagaccagggtgaagatagctctgggcactgcacgcggaatggcttaccttcactccatgggtagcggcgggaagttcattcacgggaacatgaagtcaagcaacatccttctctcataggaactcggcgcctgcgtcaccgagttcggccttgcc

SEQ ID NO: 156322 - DNA, 1884 bp, Zea Mays
accacgggaagaaagagggccgagacaacagacagccgcagagcatagcagcactagtgcctgtactgacaagacccggtggcctccagcgcgcacggaacacgaggcaatgctgtcccgtcgccgcagctcgccgcgcccgctcgtacctggcctcctcctgttactcctcgccatggcgccgccaccgccggcttccgcggtgggtgtgaactggggcttcgcgtcctcccactcgcttccggcggcgcaggtcgtacggggcctcctcctccccaactctgttccccgcgtccgcctcgccgccgcctcctccgacgcgctcacggcgctcgaaggcaccggcatcgccgtcagcgtcgggatccccgacgcgctgctccggcccctcgcctcctccaccaaggcagccgccgcgtgggtccacgacaacatcacccgttactcctccagcgtgcggttcgagtatattgttgttggggatgagccctttcttctacgtcatggacaaaattttcatccttttgtagttcgagcagcagaaaatgttcaacaagcattagtccatgcaaaattgtctggcaagatgaaggtggtagtaccttgcagtgctgacacattccagaatgcatctactctgcccacgaaagctagcttcagacctgatgttaacaagaccatggcagatctcctctcatttcttgctaacagcagttctccatttatggtcgagctggatccattcttgagctttcaacacaacagaaatttgtcattggactattttcttttccaactaatgtctcatcctgtaaaagatggcgaaaacaagtatgacaactacgttgatgcaagcatagatgctctggttacttctctaaccaaagctggcttcagtgacatggacatcattgttgggagagcaggatggccaacagatggagccatgaacgcaactcctgctattgctcaatcattcatgactggcctagtcaaccacctggccaaaaagtctgggactccacttcgcccaaaagtccctccagttgagatgtatctcttcagccttttagatgaagatcaacggagtatagctagtggaggctatgaaaggcaccatggcatttttacctttgatggccaggcaaagtactatgccaacataggtcaaggtcctaaatcgctcaagaatgcccctgatgtcaattaccttccatcaaaatggtgtgtggtagacaacaacaaggatttgtccaatgtttcttctagtttctcgtcagcttgcgccaatggcgactgcacttctctgttacctggtggctcctgctcaggtcttgcctggcctggcaatgtgtcatacgcgttcaacaactactaccagcagcatgatcagagtgaggatagttgctacttcaatggcctaggtttgataactactgtcgatccatctgtcgacaattgtttgtttcctctcacaattcacgtttctgccgccacttctttgcacctaacattgcccgtgtcgctgttattagttttgtggttttgcattgtctgtatatagtctgatgaggctatagattgagccttcaaaagtgtttcgttgggcctcttgttgaatgtactccaaagtctcggtgcaccatcagacgtattcctagaatggcacaatctggctatcagaactggtaggtttagtccaaatgtaatgatgtgttctaaagtagtcgggctgagtcaaacagcagcttcttctcttgttcaaaattttgaacctggtaatgttgtcatttcatgatagatcatagatacattcttggtttcactatatcttagaaagtccagccaacagaagtactcaagtacaggtgaacctttcagttt

SEQ ID NO: 156323 - DNA, 1422 bp, Zea Mays
gtaaacagacacttccgtttttattgtccaccctccgccgccggcgtctctccaaaacccaaccaaaccctagatccgccgcactcagttccggtgagaccctcctttccagcgaaaatgccgaacctcgagtgccggatgtatgagcagcggttcccggaggtggacgccgcggtgatgatccaggtgaagcacatcgctgacatgggcgcgtacgtctcgttgctcgagtacaacaacatcgagggcatgatcctcttctccgagctctcccgccgtcgtatccgctccatctcctccctcatcaaggttggccgccaggagcccgccatcgtgctccgtgtcgaccgcgacaagggctacatcgacctttcgaagcgtcgcgtctccgaggaggaggcgcacgcatgcgaggacaggtacaacaagtccaagctcgtgcactccatcatgcgccacgtcgccgagacgctcgagatcgacctcgagccgctctaccagcggattggctggccgctctaccgcaagtacggccacgccttcgaggccttcaagctcatagttgccgaccctgacgccatcctcgacgcactcacctatgaggagaaggaggtcggcccggatggccaggaggtgactaaggtggtgcctgctgtcacccccgaggttaaggattctctggttaagaacataaggaggaggatgacaccacagcctctcaagatccgtgctgatatagagatgaaatgcttccagtttgatggagtgctccatattaagcaagctatgaagaaagctgaagctgcgggcaatgataactgtcctgtgaagattaagctagttgctcctccactttatgttttgaccacacagacccttgacaaggatcaaggcatttcagttctcactactgcagtcaaggcttgtacagcagagattgaaaagtacaaaggaaagttagtagtgaaggaaccaccaagagctgttagtgagcgggaagacaagctattcctcgaccagattgattccctaatggagcaaaacgcagaggtcgatggtgatgctgacagtgaagaggaggaagatacaggaatgggggacgtcgacattacaaattctggcgtcgctgcttactaaggctacactggttgatttggatgagctttgctgtacagcaccagctaagttctaagccgttctgtttggaagcagtttctttctgttaggttttggtgaattcgctgaaactcgttacctgcgttgttaatgttttgggctcagccggtgttggggtagcgtttacttctgtcgagaatcaccaattttttcttgggactgaaaacaaagcccgttgctataagtgtttatattcacttcatatacgcaagtttggcttcgtgctgcctattcgaattggccttc

SEQ ID NO: 156324 - DNA, 1401 bp, Zea Mays
gtaaacagacacttccgtttttattgtccaccctccgccgccggcgtctctccaaaacccaaccaaaccctagatccgccgcactcagttccggtgagaccctcctttccagcgaaaatgccgaacctcgagtgccggatgtatgagcagcggttcccggaggtggacgccgcggtgatgatccaggtgaagcacatcgctgacatgggcgcgtacgtctcgttgctcgagtacaacaacatcgagggcatgatcctcttctccgagctctcccgccgtcgtatccgctccatctcctccctcatcaaggttggccgccaggagcccgccatcgtgctccgtgtcgaccgcgacaagggctacatcgacctttcgaagcgtcgcgtctccgaggaggaggcgcacgcatgcgaggacaggtacaacaagtccaagctcgtgcactccatcatgcgccacgtcgccgagacgctcgagatcgacctcgagccgctctaccagcggattggctggccgctctaccgcaagtacggccacgccttcgaggccttcaagctcatagttgccgaccctgacgccatcctcgacgcactcacctatgaggagaaggaggtgactaaggtggtgcctgctgtcacccccgaggttaaggattctctggttaagaacataaggaggaggatgacaccacagcctctcaagatccgtgctgatatagagatgaaatgcttccagtttgatggagtgctccatattaagcaagctatgaagaaagctgaagctgcgggcaatgataactgtcctgtgaagattaagctagttgctcctccactttatgttttgaccacacagacccttgacaaggatcaaggcatttcagttctcactactgcagtcaaggcttgtacagcagagattgaaaagtacaaaggaaagttagtagtgaaggaaccaccaagagctgttagtgagcgggaagacaagctattcctcgaccagattgattccctaatggagcaaaacgcagaggtcgatggtgatgctgacagtgaagaggaggaagatacaggaatgggggacgtcgacattacaaattctggcgtcgctgcttactaaggctacactggttgatttggatgagctttgctgtacagcaccagctaagttctaagccgttctgtttggaagcagtttctttctgttaggttttggtgaattcgctgaaactcgttacctgcgttgttaatgttttgggctcagccggtgttggggtagcgtttacttctgtcgagaatcaccaattttttcttgggactgaaaacaaagcccgttgctataagtgtttatattcacttcatatacgcaagtttggcttcgtgctgcctattcgaattggccttc

SEQ ID NO: 156325 - DNA, 233 bp, Zea Mays
gattcgttctctccttacacctataaaaggaaggaccagggccagaaacaaaagggttggccgcgcggggacaaggacgagacaggcgctcgcgtgagaccgctcgctccctctcccgcgtggacgcttgtaaccccctactgcaagcgcacccgacctgggcgcgggacgaacacgaaggccgcaggatttccacctctctcacgcccatctccggccacctcacttccccc

SEQ ID NO: 156326 - DNA, 240 bp, Zea Mays
gtattatctggttccagacttctcatggttcttatcaacatggttcacaatttgtttaccttcgttcacgttgtttgcattgcttatctaacgaaacacctgttttgccctttactatgttgtagtatgatacttgtacatgcatcattttttatatttatccccacatattgcaattcgctcgattttttattttagtatcaaccctagaattatggttaaggctgtatcatatccttc

SEQ ID NO: 156327 - DNA, 3139 bp, Zea Mays
gatctaacgggaacgcgtctcacagcttccacgcgactgcaccgtgccacccgaggctcgcccccgctgagccagcggagcgaatctccatggcctccacatcctcctccaggtacgcgaaacatcgtcggatcggagaggacgatgagttggaggaggttgaggaggaggccgaagaggagcttgagcggttcgatgatttcaccattgcttcgtcatgggaaaagtttatatctgagatagaggctatttgccgtcaatggcttgcagatggcgcaaagatcttaatgcaaaaaggtgcagagggtgttcctccttttgaaaacttatatatgatcaagcgtgaattgaagcatgggaaaagagtctattctatggagtaccatttcatgaaatctgcaaaaggtcaaaactcatattgggacgatgacacacatagcatgcagctctcatttggagttgatgagtttttgataattgctccgctgagtgccagtggtgtgatcctcgatgatccagaatcaactaagcttttgagttctgtagcaattgctctttctaattgtggcagcaattggccagcgtttgtaccagttcacgacccttcacggaaagcctatatagggattcaaaatctgggaactgtatttactcgaagatttgaagctgaccgaattggtagtcaagtgccaataagactcatgcatctggaggggttacatgagctatttctgtcaaaatttgtcctatcctcgtcagattttccagctagggtaaaggttcacttctcaatgaagcttagctacaagaccccagaatatgatcatgataatgaaactttagattctgaagctactgagccattgactgaaaatgaagttgtgaaccaccctagaaaactatgggacgatgattgcccttgggcagagtggtactctgctgaggatcctgttaaaggttttgagttgactgccatctggggagagaggacatttgaagagacccttgagatggctgaagtggaaaatgcctcgtcctttgatgctgatagctggttccttcacccagttgtatctcgatacatggtagatgattctattggaaaatttgttgggtttgcatcccagctacatcttctagtaaatgcatatgaatcatcagtggaggcacaatttctagaagactttgttgcagatacttcaggccaggataatgcaaaatctactgctactgtgcctccaccatcagttattgatcgtgttatgaaagatcttttcagtgatgagactggcaactatatggaagcagaaaacaagtatagtcgtgctatgcgaggtgcacctgcagattcactttttggccagttctgtttgcatgcactgtggtttggcaactgcaatatatgcgcaattgctacactatggattgattttgtgcgggaaattcgttggtgctgggaggaatcagaaagattgcctaggatgaaaagcacttcaagcattgatctctcttcttgtcttatccaccaaaagttacaaatgctcacgatatgcattgagaggaagagatcactgaaccgtgagaaaggtactggctacaaagatgagacttcaaatagtacggcagtgaacaagtctaggaaaggatcagctggtgttgtgcctaaaatgatgctcctgaatacgtttcaggaaatgcatgctccatatactcaggatgcacctttgatgaccgaagatatgcatgaagaaaggctccatgcagctgaagcttttggcaatgccattggtctatctggacagctggaaagggatatattatgttccgatatgtctgcttttaaagctgcaaacccagatgctgtctttgaagattttattcggtggcattcacctggtgaatggttgagcgaggacaaaacagatggtaatgcaggctggcctcccaaaggaaagctttctcaccgtatgtcccaacatgggaatgtgtggcgcaaaatctggaatgatgctctgccattgcctgtttctgaacagaagtctttgcttgaccctgttcgggaaggagaaaaggtgcttcattaccttgaaactttaaggccacagcagctccttgaacaaatggtgtgtacagctttcaaatcatcagctgatatcctgaataagaccatgtatggtggcttcaaggaaatgaagacaaaaatggatcgactatatgtcaccatggcgtcaacactgaaatcttttctagggaattctgatgtcaatgatttggttggaggcctgaaacggctttgtcaagtttttgagcacatcgagaagttactgattcttgctgcttccatcaatcggaagcttattgatgctccacgactagctcaagcaatattttacgactactacaacttctaccttccaaaaatgggaactagcctggaaagcatttgctatgagaaggagttcacaactaaggaaaaggtcgggatgtatgagagagatgctgtgtcgaacctgtttcctccccctactgctaatcagtcttggaggaaagttttgagcatgggaaatcttctgaacggccatgaaccgatgcaaagggaaatcatattctcagtccaggagagaataagcaacggtcattattcgagcccaaccccattatgtaccaacaatgagaagatccagacacataggatgtatatatctgggacatctaatgacctttgggttgcattgtctgtaacgtcctgggattgagctgcacgatgtatgagaggagcaattggtgttttaattagcttagaatcccgttggtgcagataaactatcattgtattttttttttgttggatgtaccagaagtccagaaggggccaccaggacatggctagtgacgcactgaggacaagcatccatttttgacatcagatcaaagtattgattatttacgtcttgtagcagtcagaactcagaaatgctaatatattcttggcttcctctagagaaatggttgtagacaagctctatttggctgacgtttttggtctgttaggtggtgggctggtgagttgcaacacacacactggggttgatgtacgtaaacatcttgtatgacttttgcaatgagctaggctttgttc

SEQ ID NO: 156328 - DNA, 1550 bp, Zea Mays
gatctaacgggaacgcgtctcacagcttccacgcgactgcaccgtgccacccgaggctcgcccccgctgagccagcggagcgaatctccatggcctccacatcctcctccaggtacgcgaaacatcgtcggatcggagaggacgatgagttggaggaggttgaggaggaggccgaagaggagcttgagcggttcgatgatttcaccattgcttcgtcatgggaaaagtttatatctgagatagaggctatttgccgtcaatggcttgcagatggcgcaaagatcttaatgcaaaaaggtgcagagggtgttcctccttttgaaaacttatatatgatcaagcgtgaattgaagcatgggaaaagagtctattctatggagtaccatttcatgaaatctgcaaaaggtcaaaactcatattgggacgatgacacacatagcatgcagctctcatttggagttgatgagtttttgataattgctccgctgagtgccagtggtgtgatcctcgatgatccagaatcaactaagcttttgagttctgtagcaattgctctttctaattgtggcagcaattggccagcgtttgtaccagttcacgacccttcacggaaagcctatatagggattcaaaatctgggaactgtatttactcgaagatttgaagctgaccgaattggtagtcaagtgccaataagactcatgcatctggaggggttacatgagctatttctgtcaaaatttgtcctatcctcgtcagattttccagctagggtaaaggttcacttctcaatgaagcttagctacaagaccccagaatatgatcatgataatgaaactttagattctgaagctactgagccattgactgaaaatgaagttgtgaaccaccctagaaaactatgggacgatgattgcccttgggcagagtggtactctgctgaggatcctgttaaaggttttgagttgactgccatctggggagagaggacatttgaagagacccttgagatggctgaagtggaaaatgcctcgtcctttgatgctgatagctggttccttcacccagttgtatctcgatacatggtagatgattctattggaaaatttgttgggtttgcatcccagctacatcttctagtaaatgcatatgaatcatcagtggaggcacaatttctagaagactttgttgcagcagatacttcaggccaggataatgcaaaatctactgctactgtgcctccaccatcagttattgatcgtgttatgaaagatcttttcagtgatgagactggcaactatatggaagcagaaaacaagtatagtcgtgctatgcgaggtgcacctgcagattcactttttggccagttctgtttgcatgcactgtggtttggcaactgcaatatatgcgcaattgctacactatggattgattttgtgcgggaaattcgttggtgctgggaggaatcagaaagattgcctaggatgaaaagcacttcaagcattgatctctcttcttgtcttatccaccaaaagttacaaatggtacac

SEQ ID NO: 156329 - DNA, 321 bp, Zea Mays
atgtcggcgagcagcacgcccgtagacgctttgggggagccgatcccgacgtcgtcggtgctgatggcagcgtcgaagcacatcgcagtccggtgccgcccggagaacgtcgccttcctcaactgcaagaagaaggaccctaatcctgagaagtgcctcgagaagggtcgccaggtcacaagctgcgtccttagcctgcttcggtacgttagcgaagcggtttgtgaggttactgatgatacagttgaacagctacctggcattgcttatctgggtaaccatcagcagtatatgcaaatgctatgcagagacatgatttga

SEQ ID NO: 156330 - DNA, 3923 bp, Zea Mays
cagctacggacccccgcattcctcggtgtccttcccctccgtgctcaacgaagcgcctcgtctccccgcgtccccggcccactcccgccgccctccgcaaccaacggaattaacaggcacgcccgggcgcacggcggggacgcgcggccgcgcgggagggcgggggcgacgcgcgcgcgtaccggccgttccgccggtagctcccgctctggcacgatcgtcgccgtgcgacaggctgctggccaaacgcgcgcgcgatagcccagggaaggacgaggagggggcaagccggctgaggaattcaccatgacaagtaacttcgtcacgacgataaagagcctgaaactgatcgagggttgcaaggccgcgcaattatacgccttaagctccgtcggggcagcctccacgtccggctcggcggatgccggcgggagcagcatgggcaagccccagcccccgcctcctccaaagaccatctcgatgcggtccggatcgctctactacccacacacggcgccgtccacgtcggggtccttcgtgcccgaaccgcacctgccgtgcggccttccggtggccgacgcgctcgagccggccctggacgcgtgcctgcgacccgtcgaccacgtcggcgcgctcgccgcgtcgtaccggcgggtgtcggccgccacgtcgggtagcgacgacgatctctgcgacgcgtacctggagcagcacgcgctgttccagtcgatcggggacgcgcagctgatccggggggcgctgcgggctgcgcgcgtccacgcggacaacccacaccgacgcgccgtgctcgccgcgtggctccggtacgagcgccgcgaggacgagctcgacccagcaccgccgccgctcgcgccctgcaccgcgacgacaccgatgctcgagtgcccccgggccgcggtcttcgccagcgtgtcccacagcgtggacccggcgtccccgtgcccgtgccgccgcccatcgcattctctcgtcgtccctccaccccaccgcctcaggcgcagcacgttggggttgggcgccgcctccgagatgagcgaggaggaggagccggagaccaacgacctgtggttcatcatcggcgaggaggaggtggcgtgcgagcgctcgtgcatcgcggcgctctcaaagccgctcaacacactcctctacggcgggttcgccgaggcacaccgcgaccggatcgacttctcccgcgacggaatcacgccgcgcggcatgcgcgcagtgtccgcctacagccgccacggccgcgtggacgactttccgcccgacatcatctcccagctcctcgcgttcgccaacaagttctgctgcgagggcctgaaggcggactgcgacaaccggctcgcagccatggtgcggggtctcgacgacgcccgaaccctcatcgacatcggcctcgaggaggcctcccacctcctcgtcgcctcctgtctccaggcgttcctgcgggagctccccaagtcgctcacccacctggacatcgcgcgcctgctctgcagcccgcaggggcgagagcgccttgacgtttccggtaacgcgtccttcgcgctgtactacttcctctcttacgtcgccatggagcaggacatgaggtcgaacaccacggtgatgctgttggagaggctgaatgagttcgcggagcagccatggcagaagcagctggcgctgcaccagctcgggtgcgtgatgctgcagcgcggcgagttcgaggaggcgcaggagtggtacgaggccgccgttgccgaggcccatgtctactcgctcgccggagaggcacgcgccaagtacaagcgcggacacaagtacgccgcgtacaagctaatgaacagtgtcgtcggcgactacgacgaacccgccgggtggatgtaccaagagcgctccctgtactgtgtcggcaaggagaagttggctgatctgcaggcggcgacggagctggacccgacgatgacgttcccgtacaaataccgtgcctgcacgttgttagaggaggacaacgccgagtccgcggtcgcagagatcagcaaggtcgtcggtttcaagatggcgaccgattgccttgagctccgggcgtggttctaccttgcactcgagcagtgcgagttggctgtgcaggacgtcagggcgatactgacgctggatccaacttacatgatgttccatgggagaatgcacggggagcagctgattgagctcctccgaggacaggtgcggcagtgggatatggcagattgctggatgcagctgtacgatcggtggtcggtggtggatgacatcggctctctggcggttgtccagcagatgctcgccagggagcccggaaacagcagcttgcggtttcgacagtcgcttctcctgctaaggctaaattgccagaaagctgcaatgcgcagtttgcggtgtgctcggaacagttcactccatgagcatgagaggcttgtatacgagggatggatcctgtatgacagtggacatcgggaggaagcattagccaaggctcagcagtcgattgggcttcaaagatcattcgaggccttcttcctgaaggcgtacgctttaggagattctagccttgacacagattcttcgctctccgttgtgcagcttctggaacacgctaacagttgtgcgtccgacaaccttcggaaggggcaggcatacaacaacatggggagcacctacgtggactgcaacatgctggatgaggctgccgagtgctacggcatagcgctgaacataaagcacacacgggcgcatcagggtctagctcgagtccatttcttgaaaaacaggaagaaggctgcgttcgaggagatgacgaagctcgtgcagatagctaccaacagcgcgtcggcgtatgaaaaacggtcagagtatggtgagcgcgacgctgcgaggagcgacctggacacggcgacgcttcttgatcctacaaggacgtatccttatagatacagagcagctgttttgatggatgagggcaaggaagaggaggcgatcgcggagctgtcgggagccatagctttcaagccggacctccagctgctccacctccgcgcggccttcttcgactccatgggcgacagcgagagcgccctgcgggactgcgaggccgcactctgcctggacccgacccacggggacaccctggagctgtacagcaaagcctccaccaaggccggaactgaaaccgagagctagccagccgcccgcccgccgtcctcgtcgttgattcagctgcgattttttttgcgaggcagaatgatgagacgatctcaagcagacggagcactgcagatagttgttttaggcagcaccgcaggagattgagcacgagttgcttaaggtagactgccaggtgacaagtcaggcagcttgcattacttagacagttaagatgtgtttcagcacagatcagtcgacctcttctcagagcagctggctgagcgtgcaccacatatgtgcaacaaaggttgaagacgaccggccggcaccggcctccagaagaaagaataggaagaattaagaaaaggctagggagagaaagggagtatcgacggatcttgctctttttcttcttttgtatggtcgtgtcgtgcatctggtggcacgactgattacaaccaattcgagttttaaaagtaatgcagcaacgaaggcgaagattctccctgcttcattatatttctgcagttggtgtattctgaggtgtggccccgtcgtgcctccagcagtccagctacgaacgagcccatgactatcccgatgaattttatttctgtcttcaatcttcatatatggtcagctctacacgttctgacgctcatgttcaccactgcgctttgttcttcggttcgaaatgtgcacgcgttcctttcgccgccatcgatggccaatgcagc

SEQ ID NO: 156331 - DNA, 2916 bp, Zea Mays
atgacaagtaacttcgtcacgacgataaagagcctgaaactgatcgagggttgcaaggccgcgcaattatacgccttaagctccgtcggggcagcctccacgtccggctcggcggatgccggcgggagcagcatgggcaagccccagcccccgcctcctccaaagaccatctcgatgcggtccggatcgctctactacccacacacggcgccgtccacgtcggggtccttcgtgcccgaaccgcacctgccgtgcggccttccggtggccgacgcgctcgagccggccctggacgcgtgcctgcgacccgtcgaccacgtcggcgcgctcgccgcgtcgtaccggcgggtgtcggccgccacgtcgggtagcgacgacgatctctgcgacgcgtacctggagcagcacgcgctgttccagtcgatcggggacgcgcagctgatccggggggcgctgcgggctgcgcgcgtccacgcggacaacccacaccgacgcgccgtgctcgccgcgtggctccggtacgagcgccgcgaggacgagctcgacccagcaccgccgccgctcgcgccctgcaccgcgacgacaccgatgctcgagtgcccccgggccgcggtcttcgccagcgtgtcccacagcgtggacccggcgtccccgtgcccgtgccgccgcccatcgcattctctcgtcgtccctccaccccaccgcctcaggcgcagcacgttggggttgggcgccgcctccgagatgagcgaggaggaggagccggagaccaacgacctgtggttcatcatcggcgaggaggaggtggcgtgcgagcgctcgtgcatcgcggcgctctcaaagccgctcaacacactcctctacggcgggttcgccgaggcacaccgcgaccggatcgacttctcccgcgacggaatcacgccgcgcggcatgcgcgcagtgtccgcctacagccgccacggccgcgtggacgactttccgcccgacatcatctcccagctcctcgcgttcgccaacaagttctgctgcgagggcctgaaggcggactgcgacaaccggctcgcagccatggtgcggggtctcgacgacgcccgaaccctcatcgacatcggcctcgaggaggcctcccacctcctcgtcgcctcctgtctccaggcgttcctgcgggagctccccaagtcgctcacccacctggacatcgcgcgcctgctctgcagcccgcaggggcgagagcgccttgacgtttccggtaacgcgtccttcgcgctgtactacttcctctcttacgtcgccatggagcaggacatgaggtcgaacaccacggtgatgctgttggagaggctgaatgagttcgcggagcagccatggcagaagcagctggcgctgcaccagctcgggtgcgtgatgctgcagcgcggcgagttcgaggaggcgcaggagtggtacgaggccgccgttgccgaggcccatgtctactcgctcgccggagaggcacgcgccaagtacaagcgcggacacaagtacgccgcgtacaagctaatgaacagtgtcgtcggcgactacgacgaacccgccgggtggatgtaccaagagcgctccctgtactgtgtcggcaaggagaagttggctgatctgcaggcggcgacggagctggacccgacgatgacgttcccgtacaaataccgtgcctgcacgttgttagaggaggacaacgccgagtccgcggtcgcagagatcagcaaggtcgtcggtttcaagatggcgaccgattgccttgagctccgggcgtggttctaccttgcactcgagcagtgcgagttggctgtgcaggacgtcagggcgatactgacgctggatccaacttacatgatgttccatgggagaatgcacggggagcagctgattgagctcctccgaggacaggtgcggcagtgggatatggcagattgctggatgcagctgtacgatcggtggtcggtggtggatgacatcggctctctggcggttgtccagcagatgctcgccagggagcccggaaacagcagcttgcggtttcgacagtcgcttctcctgctaaggctaaattgccagaaagctgcaatgcgcagtttgcggtgtgctcggaacagttcactccatgagcatgagaggcttgtatacgagggatggatcctgtatgacagtggacatcgggaggaagcattagccaaggctcagcagtcgattgggcttcaaagatcattcgaggccttcttcctgaaggcgtacgctttaggagattctagccttgacacagattcttcgctctccgttgtgcagcttctggaacacgctaacagttgtgcgtccgacaaccttcggaaggggcaggcatacaacaacatggggagcacctacgtggactgcaacatgctggatgaggctgccgagtgctacggcatagcgctgaacataaagcacacacgggcgcatcagggtctagctcgagtccatttcttgaaaaacaggaagaaggctgcgttcgaggagatgacgaagctcgtgcagatagctaccaacagcgcgtcggcgtatgaaaaacggtcagagtatggtgagcgcgacgctgcgaggagcgacctggacacggcgacgcttcttgatcctacaaggacgtatccttatagatacagagcagctgttttgatggatgagggcaaggaagaggaggcgatcgcggagctgtcgggagccatagctttcaagccggacctccagctgctccacctccgcgcggccttcttcgactccatgggcgacagcgagagcgccctgcgggactgcgaggccgcactctgcctggacccgacccacggggacaccctggagctgtacagcaaagcctccaccaaggccggaactgaaaccgagagctag

SEQ ID NO: 156332 - DNA, 756 bp, Zea Mays
atggcgccgtcgcgccgccacccgccggcggcgtggacgaccgagccgtggagcgacggggagacgtccacgctgctcgacgcgtggggcgcgcgccacctccgcgagtgcggcggcgcgctccgccccgctgactggcgggcgtgcgccgacgccgtcacctcccgccgcgccgcggccgggcgggccccgcgcaccgtcgaccagtgcaagaaccgcctggattatctcaagaagctgctcagggccgagcgctccagggctaagggagcccggccgacgacgccgccgttctcggggtgtctcgaccgcctccgcacgctgctgcacctcgccccctccgctcctcccgggttcgggcaccgtatcggcgccacgaggacgtggacgaaggtggaggaggaggaggaggaggaggaggaggaggaggatgaggaggagaaggcgagcggcggggctcctctgccccgctactggccgccggtgcccaagcggccgaggacggcggtgtcgctgtcgccgttgagcgccgcctccggggagcaccctggaggcggcgggaggagctgcacggaagtggcggcagctctggataggcttgccgggacgtacgagcgggtggaggcgtcgaagcagagggaggcgatgcgtgatctcgagatcgagcgtgtgcggctcctcgtcgacgtcgaagtcaccgcctccgccggtgtcgatggcgccgccgctgccacaaccgcagccggcgacatctag

SEQ ID NO: 156333 - DNA, 1263 bp, Zea Mays
atgatgagggagggcgatgcatgtgttacgcttctaagaagcaagctccatggcctggtcgagaggaaccgtgctctggaagaggagaacaagcaactgagacaccaagtgagccgactaaaaggtcagatctcttctctcgaaggccaggacactgacaagaggatgctatggaagaagctgctggagagttctgcgaccagcatcagctactccaaggagaagcagtttgtccaaagcaacgatgacgcgaaggaaaccacggatctcagcagctcactgtgtcacagaaggcagcagcagttctccagggtagcactcgtgagatcaagggcgccaagggttccgaatccaccgcccaatccgacatgcacccagccaaagacaaccgtccgaaaggaaggatgcatggcccctcctcctcctccaccacctccgctaccttccaagttgcagaggagcgcaaaggcgatacaaagggtgcccgaggtagtcgagctgtaccggtcgttggtgcggcctgaaggcaaaaacgatgcgaagtctggatccgtaggaattccagcagcgacgagcagcagagagatgattggggaaattgagaacagatcagcttatgttttagctatcaaatcagacgtagaaaatcaaggcaactttgtgaacttcctcgcaagcgaagttcaaaatgcagcgtacagagagatagctgacgttgaagagtttgtcaagtggcttgacggggaactgtcataccttgtggacgagagagcggtgctcaagcacttccccaactggcccgagaagaaagcagacgccatgagagaagcagcgttcaactaccgagatctgaagaacctggagtcagaagcgtcatccttccacgacgacaggagggtggctacgccgatggctctcaagcgcatgcaagccttgcaggacaaaattgaacaaggtatccataacactgaacgagtaagggacagtgcaggcggaaggtacaaggatcttaagataccatgggaatggatgctcgactctggagtcataagccaactgaagatggcttccttgaagcttgcaaaggagtacatgaaccgcatcgcgagcactctgaagtcagatccatttgcgaacgacgaggagctacttctgcaaggcgtccgctttgccttccgcgtacaccagcttgctggtggctttgacgaaggatgcagaaaggcgtttcaagagctaaaaacttacgcaagcaagtctgagtga

SEQ ID NO: 156334 - DNA, 1930 bp, Zea Mays
ccttgtggttctttccttaatcttcgctatagccatttgttaacacatatcatcgcttttctgttgattgcatccagatatctatgaagactttgataagggggcagaactataattccagaaatgctgtctcctatgctttgctggataaggacaaacaatctggattcctgtcatcgtttgacaagtctggatacaggtcatctgacaagctgctcatcgcctacaagccccgccgggggaagttcgcggtgtacgacggcgaggtgacactggaagaagctgaaaggttcgtgggatccgttttgaacggagacgttcaactgtcgccgacgaaacaaaaacctgtccttcggtagacgattattgcaagttgcaagggttttagatctaacacttattatcttaattaaggccttaattaaggcttgtacatagatggacgaagagagtaaaatcatagagcgtttgctggacagtttagtcgttcggtaaaccagagttgctacatctctccctcaaccgtgccaatgtaaattgtgcaaatgctgcagtcctgtcgagatattgaatatatacaggcatacagcggaccatttctatactagccaagtctactaccttttgtttccacaatatcctgttgtcttgttcaaagtatactagcaaacatttttttttcttttggtctgccttgagatagagttgcttctgagaacatgacgcgactgttactcacagaatcagttgtgaggaatcaacccatttcacagcaaaattgtatgaaaaaaaaaaacatatatttactggaatcagcttattttacagaaaaaatgcaggaaaaaatcatatgttccaaaagggagccttaaatgccgtggagatcgaagaagaaatgaattgctgttgaatttatgccaaaattgctgtcgatttgattgtataccgaaagacaactctgggcttacggatgatacaaaattcggcccagcccaacgtgcttgtcggatctatccagtcgcacgccaccgcctcacaccacacggctctacacggctccctcttcgacagcctaattctcagacgaatgctatcttcactggcctcgacctcgagcacaaaacgctgtggccgagcggatgagaggaggatggcttccaccagcctcagctcctccttgcgcagggctactgcaaactagcaggagtcccaagatcttcgtcgtaccacacccagctgacctgttgctcgaggaatccctcccagaacgcggaggcagagctcctccggttgagctacccggcgaggaaataacaagcatgcaaaagaccagctgccggcgggccacggatggcgaccaagcggcgccgtccgcggcgcaagaaacaaccgacacccctcctcctcctccggcctttcacgttcccagcgccgagagattcccggtgacgcctggcaacggacagccgccgcagtagttagccaacgccaacggcgtcgcgccgagcgagccgctgacggcgcgggagcggctgcgggcggcgcgcgtgctgggcaagtacgcggagccgccggcgtcgaaaccggccaagccgagttcgggagcggcgtgctggacgcgctgcggggaggcggacgcgaagaaggccggggggtgggggcgggcggcgcgggtcgcgtcgcggatgcccgaggcgccgccgcgccgggcaacctgttcgacgacagcaggcgtgggatgcccaaggaggggtggacgtcttcctcgtcctcgtctccttcacgctcatcaccagcgtcatgttcgacaccgccttcctcgtgtggaagtggaagctcggcgcaatacacttcaacgagtactagctagccttttgactgactatagattggggaataaaagggcgattatgcagtgattcttgcggtt

SEQ ID NO: 156335 - DNA, 2165 bp, Zea Mays
aaacggcgaccttcctccatggccaaatcgttgtcctcctccgcttccctccaaatccaccctggatccaaccccgattttccccagcagaagcaaacccgagcaaattgagcgcttgcagcttcacccggcgaagcagaatcgaatcggagccgctcgccactccgcgatggggatcctcctccggtccctcctcgtcgcctcgctcgtcctcagttcgctcgtcttgcacgtcgcagcggctaaaactatagatccttacaaggttctaggagttgacaagaatgctagccaacgggatattcagaaagcctttcacaaactttctctaaaataccaccctgacaagaataaagggaagggcgcacaggaaaaatttgaagaaataaacaatgcatatgagattctatctgatgaagagaagaggaaaaactatgacctctacggggatgagaagggtaaccctgaatttggtggtggaaattttggaaatcatgggggttctacatacttcactggtggtggccctaagtccagtcaattcacatctggtaatggatggcagacgatgggtggtcaaggaaatacaaaaacgttttcattttcatttggtggtaaacctggggccagtggtggaaacccgtttggtggtggttttgatcttggtgatgttttctcgaacctttttggtggtggaccaatgggtgatagccatattggtggatcaagtggctcagctagagccaacactggaacttctggtcagcattctggcactaccaagattgaggatatcaccacacaagttttcaataaagaagtagctgatcaaggaactacttggcttctgttattttatactccccaatctaaaagtcagtttgtgctagagagtgtcatgcaagacgtggtccattcactagatggtgttcttagggctggtaagatcaactgtgacaatgaaaaatctctttgcaaaaggtctggtgtttcaatagggaaatcggcccgtctcttcatctattcatatgctactgcagagaaagggtctttgcacgagtattctggggaacatgatgctaagagcttgaagacattttgtcaagaacacctgccaagattctccaaacgggtagatattagccaattcagcttccctttaaatgttctaccaaaccttcctcaagtgctcttactatcgagtaagaaggacacaccagcaatgtggcgtgctatcagtgggatgttccgcaatcggataatcttttatgatgctgaggttcacgatgtttctcatcctctgctgaaaagtcttggcgtgaagaatctcccagctgtaattggccgaaccgtgaatggtgaggagctccttctgaaggatggcatttcggtgaaagatctcagatctggtgtcaaggaattgaagacactgctagatagttttgagaagaagaataagaagttattatcgaatctagctaataagaaaccttccggtcaatgggaagaaatcaagaagattcctctcctcacagcttccaactttgaggaaacatgtggagagaagacttcagtatgcatcattggtgttttcgggtcaaacaaagccaaggggcagcttgaagcagtcctgtctgagatatctatgaagactttgataagggggcagaactataattccagaaatgctgtctcctatgctttgctggataaggacaaacaatctggattcctgtcatcgtttgacaagtctggatacaggtcatctgacaagctgctcatcgcctacaagccccgccgggggaagttcgcggtgtacgacggcgaggtgacactggaagaagctgaaaggttcgtgggatccgttttgaacggagacgttcaactgtcgccgacgaaacaaaaacctgtccttcggtagacgattattgcaagttgcaagggttttagatctaacacttattatcttaattaaggccttaattaaggcttgtacatagatggacgaagagagtaaaatcatagagcgtttgctggacagtttagtcgttcggtaaaccagagttgctacatctctccctcaaccgtgccaatgtaaattgtgcaaatgctgcagtcctgtcgagatattgaatatatacaggcatacagcggaccatttctat

SEQ ID NO: 156336 - DNA, 255 bp, Zea Mays
atgggtgcagacagacagccgcgccaccgccacggccccaaacaacaacaacaacaacaacaacaacaacaacaacaacaacggctgcaccgtatcctggtcctggctgggactgggatgaatgaatggatcgtgctgagaacctgggactgggacgcggggtcgtgcatcccatgcgatgcgcctcgcttttgcccgcacacaagggaaagggatgtttgtttaatcagaacagctgtgcctgccctgggttag

SEQ ID NO: 156337 - DNA, 1660 bp, Zea Mays
ccttatccatactctcccgtaggcgcgtccaccgcaagtccgcaacgcgtgctggtctgtcacccgtatataatccccttttcaaatggccattttccgcaatcagaaaccagtcctctacttgctaggaggtggttacccgaaaacctacccccgccgccttggcccttggcctcacgtcacgatgtcttgcacggtgaccatcccgaactcgccagtattctcgccttcacgccgcccgctgtcctgcaaggccgctcccgcgtcgccggagcccgccgtcgccgtctccgcctcttccgcggcgcccgcgcccgcgcccgccgccgccggctcgccgctccgccccttcgcgctccgcgcgctgctccgggaggaggtattcccgtctccatcgccccagctggcctctgccgcagcggtggcctcggtaccaagcggggccgtgctgaagcggcggcgacctgcgccgctccttgtgccggcgtccggcgcgactgctgctgctgcggtggctgccgtggaggcagatccgacgaacgaggtggaggaggagggggaggagttcgcagcgtactgccggagggggaaggggaggagaagggtggaaatggaggaccggcatgtggccgaggtcgctctcggcggagatccccaagtggcgctctttggtgtattcgatggtcacgggggcaaaaatgcggcagagttcgctgcggagaacatgcccaagtttttggccgaggagttcaagaaggtgaacggcggaggagagatcgaaggagctgtcaacaggggttacctcaagacggacgaggaattcctcaagagggacgagagcgggggcgcgtgctgcgtcacagccgttctccaaaagggtggtctggtcgtctccaacgctggagactgccgtgcggtgctcagccgagcagggaaagcagatgtgctcacctcggaccaccgggcctcccgggaggatgagaaggagagaattgaaaatttgggtggatttgtggtgaattaccatgggacatggcgagtccagggttccctggcagtgtctaggggcattggggatggacacctaaagcagtgggttgtggctaacccagacactaggacgctcctcgtcgaccaccagtgcgagttcttgatacttgcttctgatggcctatgggataagatcgataatcaggaggcagtagaccttgcacgtcctctatgcattaacaatgacaagacctctcgcctggctgcctgcaggatgctcactgagacgtcgatttccaggggctcaactgatgatatcagtgtcatgattgtgcaattgcagaagttttcaagttcctaacttaattggagaaacttgaccaaaactctaggcattagcaccaacagactggtggaaggcaggactttgctggctaaagttttcatgagtcagcactatttttggctgtttaacatcaattctttgtcatagaaccatttgttttattattagatgtaattagatctatttgattcattctttgacaatatttattgaaataatgcggggtgatctctccatgatcgattgactgtaaaaggcgatttgcctatgtaaatacaatgatatattctatcatagaaacttactgtgttttcgttttgttgc

SEQ ID NO: 156338 - DNA, 107 bp, Zea Mays
gtgttcaatgcaaacttatgtttgattatttgttaaaactgtgtacgcatttgctggaccctcgatccatttctccttgttttgacaatgctgttatgacaaaattt

SEQ ID NO: 156339 - DNA, 237 bp, Zea Mays
cttgtcttttatatgtatcctgacataaaaccactgcctattttctatttgtgcatgtgcagatatttcatatatttaacaactctttcaccggacctcttggggcgactttactttctcgtcttttatgtatcctggcatgaaaccaatgcttattttctattcgtgcatgtgcaggtgttgtactgtttcttataattttccagcaactttgattgggaggaattttgtttgagc

SEQ ID NO: 156340 - DNA, 407 bp, Zea Mays
gacttgagcaacaactacttgcacgattcaattccttaccagctgccatcaaaccttacctatctgaacctggcgaaaaacaacttctctggtaatcttccgtactgcatatccaacttggtctcgcttgagtacctgaaattggagaattgtttggaagcctcagttcactcgcagaactagacatatcttacaacaacctcacgagaatcttcctttctcaatgggctctctgtcaaaactttctagcctctaagtattattcagatgctccccatatatctgtatttctttctcgtggctctgatagtttccttcttgtgcctgttatgcaaaacaatcagctgtcgggcatggttgatgtcgtcagcaacataagccttgcaacactgtaagtagcttcccac

SEQ ID NO: 156341 - DNA, 1126 bp, Zea Mays
cggattcgcgccggcctttttgcacgacgtggatgttgcagccggagttcttgacgacggtgcccaacgaggaatagaaagggggaaaaaaagaaacgcgtatctgaattccacacggccggcgaagacacttgaacagtcttgctggcaatgggaaacaagggaccagtgccaacacaggaatcgacgaatgatgacgccgaggcaccgtcgtctacgtctgctgcgagcaatactaagagcaagacagacgtggagcgagagcagctgttcgaaggatcaagcgacgacgacgccgcccacacgccacggaagagaagcacccaggagatcctcaccaaatacaagttcaaaggggacgccgcggctgccgcggctcacgcgaagcagaagctcatggagcggcaggagaaactcgcggtagattagatagacacatagacccaccggttcatgcatgaatgactccttctgttatacataaatgaccgaccgatcgatggccatccgcgcgcctccctgtgctgtgctgtgcccagagaatcacggagcagtccgcggagctggagagcgaggccgagaacttcgccgcgctcgcgcagcagatcaggaagaacacggagacctggtggtggaagcggtgatcaacaacgtaagccatcgcctgcttacgtagctcatgcgtcgtcagcagactggcatgggacgccacgggatcatatgcatggctgtaacccggccacgctgctcggttcctctctgcacaagcgtcagcagactgtggcgctagtacgtgccgctctctctgcatctgcatcacatcactacgagccccagcaagcagaacgaaaagcaatgcgattgtgacggttcagccagcgtcggccctgctgcccctgcagcagcagcagcatgtctgttttcctacggatctttgttttaaggcttcaacaatgagagagatgtgacctgccccccagctgccggtgcataaattcagcatggctctctgatggatggtagaaagacaccaggacgtcacgcgtctcctacctttaatttttaattaattaaagattcacaatacgatcagaaagaaatccgctagtagcgccgtaagctgatt

SEQ ID NO: 156342 - DNA, 525 bp, Zea Mays
cggattcgcgccggcctttttgcacgacgtggatgttgcagccggagttcttgacgacggtgcccaacgaggaatagaaagggggaaaaaaagaaacgcgtatctgaattccacacggccggcgaagacacttgaacagtcttgctggcaatgggaaacaagggaccagtgccaacacaggaatcgacgaatgatgacgccgaggcaccgtcgtctacgtctgctgcgagcaatactaagagcaagacagacgtggagcgagagcagctgttcgaaggatcaagcgacgacgacgccgcccacacgccacggaagagaagcacccaggagatcctcaccaaatacaagttcaaaggggacgccgcggctgccgcggctcacgcgaagcagaagctcatggagcggcaggagaaactcgcgagaatcacggagcagtccgcggagctggagagcgaggccgagaacttcgccgcgctcgcgcagcagatcaggaagaacacggagacctggtggtggaagcggtga

SEQ ID NO: 156343 - DNA, 2396 bp, Zea Mays
cgttacacacagttcctttcaggcttcacccgttttgctctcgagtctctcccggttcggatccaaattcagcaatccgacctgagaccaagaccgcgcaccacgcggctcgccgccgatggcgaacgccgacgccgacgaagcgccgctgctctctgtggaacacctccgtccaggatcctgcagccgcgagctcgagctgcgggagttccgcgaccgctacgtgatccgttcgctcgacggcgccgccgctttcgccgtccttcgctccggcggctccatccgccctctctccccagaggaagccgtagctgagagcgactgcaaggtttccagaatatacggcgtggtcggcaccataagattgctcgctggaagctatgtactcgttatcacttctcagaaagatgctggctcttatctgggctcccctgtgtaccaagtgaactcaatgaaattcttatgctgcaacgaggctatcaagcacttgactccacaggaaagaagggatgaggcatacttcatgtctctcctgagaattgcagaaactacttgtggattgtattattcatatgacagggatttgacactaaacttgcagagggcatccaagttggctgctgggagggtacataaaccactatggaagcaggctgatccacgttttgtttggaacaaaaatttgttagaggaacttattgaagctaagcttgatgagttcatcatcccactgatacaaggaagttttcagtcagcacaatttaccttgaaggatagaccagtgaggataacattgttctcaaggagatgcaacaggcgtttaggaacaagaatgtggagaaggggtgcgaatcttgaaggcgccacagcaaattttgtagaaacagaacagttggttgagtatgaagatctcacatcctcatttatacagcttcgaggttcaattccacttctctgggagcaaatagtggatttaagctacaaaccacggcttagcattattgaacatgaagaaactcataaggttgttcaacgccactttcatgatctttcacaacgatatggcaagataattgttgctgacttgactgataaacgaggtgatgaaggagatttgagcaatgcatttgctgctgaaatggacagaattcctggtgtcaggtatatacattttgatttccatcatgtttgtcgtggaggtaactttgacaatttgcaagctctctacaatcaaattgaggaagctattcataagcaaggatattttcttatgaacactaaaggagagattttgctggagcaaagtggtgtagttaggtccaattgcattgattgcctggaccgtacaaatgtgacacagagtttccttgcaagaaaatcattggattctcaattgcagctgatgggagcattattgtcatctgaaagcatttctctctctgataacattcatgatacattcaaaaaattatgggttgagcacggtgatgagctgagcctggagtatgctggctcttatgctttgaaaggggatctagtgagatatggaaggcagacattgcctggactaattaaagatggaatgagtgctctttcaagatattatttgaataattttcatgacggagtgcggcaagatgctcttgaccttattagcggttattatacagtcagccaaggcagctcttctccttttcataatggtgttgattcttcttcgtatctgccggtggcttcagcaatcatagttggtgggattaccgcgacaactttcactctcagtcaagttggacggaacgcgcagcacttgatctcctccattatctgtgcgggcttaacagtcggagtagtagccttggtgaaagccaatgggaaacagttttgctctaggccccgtctgtgtggtctaatctaatccttggtcttttccccccttccctttcatattgccctttgttagaaattgaatgtaaaaggattagaatgttgttttattcgttgcaagagtaaggttaaataaggaggcaggatggcctgccggtcccgtaatctgaagctgctaatttgtaagcctatagtttggatttgcacattctatttgttatactttttatgtatccatgaatagaaaattacgcctcgaaattccaaatttgtaataaatccgagagaccacatatttttttagtgtgactggttggtagcgacggtcttggcgtcttgcatagttgctgacacagaaaagacacctccgtccctctgtctggtacagtgagggtggggcatcaaaaacacaaagatgctgttcttatcaggcacagatgtttgccaagtataattccacgttgcgctatacagtcgggtttgctcgtatgcatttatgatctagatactta

SEQ ID NO: 156344 - DNA, 2404 bp, Zea Mays
cgttacacacagttcctttcaggcttcacccgttttgctctcgagtctctcccggttcggatccaaattcagcaatccgacctgagaccaagaccgcgcaccacgcggctcgccgccgatggcgaacgccgacgccgacgaagcgccgctgctctctgtggaacacctccgtccaggatcctgcagccgcgagctcgagctgcgggagttccgcgaccgctacgtgatccgttcgctcgacggcgccgccgctttcgccgtccttcgctccggcggctccatccgccctctctccccagaggaagccgtagctgagagcgactgcaaggtttccagaatatacggcgtggtcggcaccataagattgctcgctggaagctatgtactcgttatcacttctcagaaagatgctggctcttatctgggctcccctgtgtaccaagtgaactcaatgaaattcttatgctgcaacgaggctatcaagcacttgactccacaggaaagaagggatgaggcatacttcatgtctctcctgagaattgcagaaactacttgtggattgtattattcatatgacagggatttgacactaaacttgcagagggcatccaagttggctgctgggagggtacataaaccactatggaagcaggctgatccacgttttgtttggaacaaaaatttgttagaggaacttattgaagctaagcttgatgagttcatcatcccactgatacaaggaagttttcagtcagcacaatttaccttgaaggatagaccagtgaggataacattgttctcaaggagatgcaacaggcgtttaggaacaagaatgtggagaaggggtgcgaatcttgaaggcgccacagcaaattttgtagaaacagaacagttggttgagtatgaagatctcacatcctcatttatacagcttcgaggttcaattccacttctctgggagcaaatagtggatttaagctacaaaccacggcttagcattattgaacatgaagaaactcataaggttgttcaacgccactttcatgatctttcacaacgatatggcaagataattgttgctgacttgactgataaacgaggtgatgaaggagatttgagcaatgcatttgctgctgaaatggacagaattcctggtgtcaggtatatacattttgatttccatcatgtttgtcgtggaggtaactttgacaatttgcaagctctctacaatcaaattgaggaagctattcataagcaaggctgagcagatattttcttatgaacactaaaggagagattttgctggagcaaagtggtgtagttaggtccaattgcattgattgcctggaccgtacaaatgtgacacagagtttccttgcaagaaaatcattggattctcaattgcagctgatgggagcattattgtcatctgaaagcatttctctctctgataacattcatgatacattcaaaaaattatgggttgagcacggtgatgagctgagcctggagtatgctggctcttatgctttgaaaggggatctagtgagatatggaaggcagacattgcctggactaattaaagatggaatgagtgctctttcaagatattatttgaataattttcatgacggagtgcggcaagatgctcttgaccttattagcggttattatacagtcagccaaggcagctcttctccttttcataatggtgttgattcttcttcgtatctgccggtggcttcagcaatcatagttggtgggattaccgcgacaactttcactctcagtcaagttggacggaacgcgcagcacttgatctcctccattatctgtgcgggcttaacagtcggagtagtagccttggtgaaagccaatgggaaacagttttgctctaggccccgtctgtgtggtctaatctaatccttggtcttttccccccttccctttcatattgccctttgttagaaattgaatgtaaaaggattagaatgttgttttattcgttgcaagagtaaggttaaataaggaggcaggatggcctgccggtcccgtaatctgaagctgctaatttgtaagcctatagtttggatttgcacattctatttgttatactttttatgtatccatgaatagaaaattacgcctcgaaattccaaatttgtaataaatccgagagaccacatatttttttagtgtgactggttggtagcgacggtcttggcgtcttgcatagttgctgacacagaaaagacacctccgtccctctgtctggtacagtgagggtggggcatcaaaaacacaaagatgctgttcttatcaggcacagatgtttgccaagtataattccacgttgcgctatacagtcgggtttgctcgtatgcatttatgatctagatactta

SEQ ID NO: 156345 - DNA, 1073 bp, Zea Mays
gtctctcccggttcggatccaaattcagcaatccgacctgagaccaagaccgcgcaccacgcggctcgccgccgatggcgaacgccgacgccgacgaagcgccgctgctctctgtggaacacctccgtccaggatcctgcagccgcgagctcgagctgcgggagttccgcgaccgctacgtgatccgttcgctcgacggcgccgccgctttcgccgtccttcgctccggcggctccatccgccctctctccccagaggaagccgtagctgagagcgactgcaaggtttccagaatatacggcgtggtcggcaccataagattgctcgctggaagctatgtactcgttatcacttctcagaaagatgctggctcttatctgggctcccctgtgtaccaagtgaactcaatgaaattcttatgctgcaacgaggctatcaagcacttgactccacaggaaagaagggatgaggcatacttcatgtctctcctgagaattgcagaaactacttgtggattgtattattcatatgacagggatttgacactaaacttgcagagggcatccaagttggctgctgggagggtacataaaccactatggaagcaggctgatccacgttttgtttggaacaaaaatttgttagaggaacttattgaagctaagcttgatgagttcatcatcccactgatacaaggaaatatccaaaaaatgatagttccatgtcactgtttatgtatatatttggtttgcatgcataatgtggggcctataccttgccatcatccaaccatattagaaggatatatttcaaaaagttgcaatgcattcccattgttttctatacttggaggacgaacatgatcaggaagctggtgtcctttaactcctatagacccatacgttttcagtcagcacaatttaccttgaaggatagaccagtgaggataacattgttctcaaggagatgcaacaggcgtttaggtttcttttctttttctttttttcctttttccttttttccttttcttgaaacattagtatagaacacaatgatacttctaaattgtaatg

SEQ ID NO: 156346 - DNA, 1015 bp, Zea Mays
cgttacacacagttcctttcaggcttcacccgttttgctctcgagtctctcccggttcggatccaaattcagcaatccgacctgagaccaagaccgcgcaccacgcggctcgccgccgatggcgaacgccgacgccgacgaagcgccgctgctctctgtggaacacctccgtccaggatcctgcagccgcgagctcgagctgcgggagttccgcgaccgctacgtgatccgttcgctcgacggcgccgccgctttcgccgtccttcgctccggcggctccatccgccctctctccccagaggaagccgtagctgagagcgactgcaaggtttccagaatatacggcgtggtcggcaccataagattgctcgctggaagctatgtactcgttatcacttctcagaaagatgctggctcttatctgggctcccctgtgtaccaagtgaactcaatgaaattcttatgctgcaacgaggctatcaagcacttgactccacaggaaagaagggatgaggcatacttcatgtctctcctgagaattgcagaaactacttgtggattgtattattcatatgacagggatttgacactaaagtaagtgctttgtcatgcatgtatctgaataaggcaaccaaaagacattggcttaatattcagaaaaggccaacaacctttgtgtagtgattatgcacatccttaagatatttttttttctcaaacaacacatgagaactgtgtgcatttcattaagtagagaaaaaaaaccaaaggagaagcagtgtgtggcgctgttagccttgtactaggtggcctagggaagttggcctcctggaaaaaagccgaaacagtcagagcaccctgaatgtcctggatccagagattctgatctaaatcctcctgtaccgttcatctcctcgtcgacatttgtaactaatcgattgcctgttagttccattgttccttgcagatgtgtagtaggttcttgaagtatggatctattgagcacttcttaaga

SEQ ID NO: 156347 - DNA, 2354 bp, Zea Mays
acgttcaattgatgccgagattgtacgttcttcacttttatttaaacgttatcgacgcatttctcccgccaactaattgtgtatactcctgtgatgcaacgacgtcacaatagttttacacacaaacacaacgaaaaaaaacgaatggctggcgagctgctaggtgtacagttggatttggatgactttcttctgtgtcgatcgcggtgtcactgctatttgtagaagaggagtgtgtagaagagctggttccaggtgtccgggaggccgggaaggcaccagtggctgcagtcaacggagccggcgccggggttggcgcgctgcgccggcgagaagtcgccgctgtatgccgacgggtgcgcgtccttccgcatcgccgacagcgccgtgatgtcgaggagacggacggggctcttcatgccccgcagcacggcctggatcacctggtcctggcccgaggcctggccggtcgagttgagcccggtcgccggtgccgtctcgccgtagcagttcttcgacaccgggttgggccattccttcgagctggtacagcgcacagtcgcacacacagcacaaaatggccgaaataaaaggcgatgaacgaactgatcgaataaaaaaaaaagacacgacaggacacgtgcctgaacatgcgtatgcgcgtccggacaaggacgccgctgggctcgtggagtcacgggtgagatgagaatagtacctgtagtgcgtgggcgacatggactggaagaagacacgggtcttggcttgatcgaggttgaggtccacccagctggcccaggtggtgaggccgcgctggaacgccaccgtgcggtccatgtcctcgtagtatcgcccagactcgcccatgtagtcccacctgcatccaccgaccaccaagcacactctcactacagaccggaggggattgccatgtgcagttctactctaccgtccgtacccctgcatcgagccggtgtgcgtccaccagtggccggagttgaaggagagcacgtcggcgtcgcgccacgactcggcgttctcggagatgtcgtccagcatcagcacccgcttcccctggaccacgtcgatgtccaccaggtacggcgcgcggtagaaggataccgtcacctggtactcctgctcgatcgagcaacgtgtttagattagattagattaggccccatctcttcggccaagcagcctagctggtacatgtgtttacacatgacataccaggaacttgtaggtgtacaaagggtccgcggagacgagctgcgccggcgactgcggcgcggcggcgtgcagcaggcagacgagcgactcccactggttgcgccccagcgagtcgcccacgaacatcaccgtcttccccttcatccgcgtcaggaagtccgcgccatcgaacctgcaggtgcacgcagacacagtacaagctaagtaatcagggcggcgctcactgccactggttgccgtgggttcatgaggcatggctggcgctcacggccacgtacgtacctcggtagctcgcagccggccggcttccagaggtaccggaggtagtcggagtccgggcggccgtagagctggcagttgaactccgcgtcgatgagcgggcagttgtacccggtgtacgccgccgaggccgagctaccgccgtcgaggacccagctgccgctgaagacgtcgcagccgccggcggccagcccgggcgtggcatcgtgcctgtggcgccgcgccaggccgacggagagcgcagaggctgccgggagagagaaggcgtggagcaggatgaggacggaggaggacaacgcgacgacgccgaggacggcactcttcctgcgggacggcagcatcgtggcaaacaaaagagaagagaacggaagcaaagccgtctttctgatggcccctttatgctgctgctcggttcatcgtgtaaccacgagtccagaatccagatagccgcgagtaatctatctagctgcgctaattctcaggagttcgattgaagaggaggtgtgcatgtgagggtaagaattgccgctagaccccgactggagttcacgtgagcgtgttcgagatctcgtaagtagtttgcacccgtatggaatccgtggattcgttgccttgcccggtttgcccttcggcgtacgtcggtgtaggaacatccaaagattcgcagccatggaattcgtgctttcttggaaatggaacatactttgcatatctcgttttcaaagggccaactagatagatggccatatgttattacggtttccatttatatctgagtatatagagtatataccacgaaaacacatgtgttttgttggtttattcttatcccatgttcagtt

SEQ ID NO: 156348 - DNA, 2206 bp, Zea Mays
acgttcaattgatgccgagattgtacgttcttcacttttatttaaacgttatcgacgcatttctcccgccaactaattgtgtatactcctgtgatgcaacgacgtcacaatagttttacacacaaacacaacgaaaaaaaacgaatggctggcgagctgctaggtgtacagttggatttggatgactttcttctgtgtcgatcgcggtgtcactgctatttgtagaagaggagtgtgtagaagagctggttccaggtgtccgggaggccgggaaggcaccagtggctgcagtcaacggagccggcgccggggttggcgcgctgcgccggcgagaagtcgccgctgtatgccgacgggtgcgcgtccttccgcatcgccgacagcgccgtgatgtcgaggagacggacggggctcttcatgccccgcagcacggcctggatcacctggtcctggcccgaggcctggccggtcgagttgagcccggtcgccggtgccgtctcgccgtagcagttcttcgacaccgggttgggccattccttcgagctggtacagcgcacagtcgcacacacagcacaaaatggccgaaataaaaggcgatgaacgaactgatcgaataaaaaaaaaagacacgacaggacacgtgcctgaacatgcgtatgcgcgtccggacaaggacgccgctgggctcgtggagtcacgggtgagatgagaatagtacctgtagtgcgtgggcgacatggactggaagaagacacgggtcttggcttgatcgaggttgaggtccacccagctggcccaggtggtgaggccgcgctggaacgccaccgtgcggtccatgtcctcgtagtatcgcccagactcgcccatgtagtcccacctgcatccaccgaccaccaagcacactctcactacagaccggaggggattgccatgtgcagttctactctaccgtccgtacccctgcatcgagccggtgtgcgtccaccagtggccggagttgaaggagagcacgtcggcgtcgcgccacgactcggcgttctcggagatgtcgtccagcatcagcacccgcttcccctggaccacgtcgatgtccaccaggtgtacaaagggtccgcggagacgagctgcgccggcgactgcggcgcggcggcgtgcagcaggcagacgagcgactcccactggttgcgccccagcgagtcgcccacgaacatcaccgtcttccccttcatccgcgtcaggaagtccgcgccatcgaacctgcaggtgcacgcagacacagtacaagctaagtaatcagggcggcgctcactgccactggttgccgtgggttcatgaggcatggctggcgctcacggccacgtacgtacctcggtagctcgcagccggccggcttccagaggtaccggaggtagtcggagtccgggcggccgtagagctggcagttgaactccgcgtcgatgagcgggcagttgtacccggtgtacgccgccgaggccgagctaccgccgtcgaggacccagctgccgctgaagacgtcgcagccgccggcggccagcccgggcgtggcatcgtgcctgtggcgccgcgccaggccgacggagagcgcagaggctgccgggagagagaaggcgtggagcaggatgaggacggaggaggacaacgcgacgacgccgaggacggcactcttcctgcgggacggcagcatcgtggcaaacaaaagagaagagaacggaagcaaagccgtctttctgatggcccctttatgctgctgctcggttcatcgtgtaaccacgagtccagaatccagatagccgcgagtaatctatctagctgcgctaattctcaggagttcgattgaagaggaggtgtgcatgtgagggtaagaattgccgctagaccccgactggagttcacgtgagcgtgttcgagatctcgtaagtagtttgcacccgtatggaatccgtggattcgttgccttgcccggtttgcccttcggcgtacgtcggtgtaggaacatccaaagattcgcagccatggaattcgtgctttcttggaaatggaacatactttgcatatctcgttttcaaagggccaactagatagatggccatatgttattacggtttccatttatatctgagtatatagagtatataccacgaaaacacatgtgttttgttggtttattcttatcccatgttcagtt

SEQ ID NO: 156349 - DNA, 2927 bp, Zea Mays
cgtcgtttgcatcaccatcgcccgcgacagaaacacactccgccgaacggttgtgtgcatcgtcgcatctcgcggcaaagcgcacgggccggccattggtggatccggtgggggggccgccagcagccttgctccaccagccgcgatcatggcgggcctactcccagaacctcgcccagccgtggaaggtagatccgatggccaggaccccggctgacgcgggctcggggccccacgctgactcggccccgctgcatcccgaacggataagctcctgccgcgcacggagctcgccgaaccgacacccgccgcgtgtccagggagcgctcccggcgggggtcgctcgcagacgcgaggtcccggagccgcgcgcgcccccgcctataaaactgcagccattctcccctggttcccgcatcccactcgcagcacgagcgctcagcgtctcgtctcctcctccccacaaaaagccgctgaattgctccgtcggcgtcatgtgtggcatcttagccgtgctcggatgctccgactgctcccaggccaggagggctcgcatcctcgcctgctccagaaggctgaagcacaggggccccgactggtcgggcctctaccagcacgagggcaacttcctggcgcagcagcggctcgccatcgtctccccgctgtccggcgaccagccgctgttcaacgaggaccgcaccgtcgtggtggtggccaatggagagatctacaaccacaagaacgtccggaagcagttcaccggcgcgcacagcttcagcaccggcagtgactgcgaggtcatcatccccctgtacgagaagtacggcgagaacttcgtggacatgctggacggagtcttcgcgttcgtgctctacgacacgcgagacaggacctacgtggcggcacgcgacgccatcggcgtcaacccgctctacatcggctggggcagcgacggttccgtctggatgtcgtccgagatgaaggcgctgaacgaggactgcgtgcgcttcgagatcttcccgccggggcacctctactccagcgccgccggcgggttccgccggtggtacaccccgcactggttccaggagcaggtgccccggacgccgtaccagccgctcgtccttagagaggccttcgagaaggcggttatcaagaggctcatgaccgacgtcccgttcggggtcctcctctccggcggcctcgactcctccctcgtcgcctccgtcaccaagcgccacctcgtcaagaccgacgccgccggaaagttcggcacagagctccactccttcgtcgtcggcctcgagggctcccctgacctgaaggccgcacgagaggtcgctgactacctcggaaccacccatcacgagttccatttcaccgtacaggcaagtaaatcattcgcgcgcgcgctcgcttttggcgagatcgtgacgtaggctgacgagtggcaaacaaattacaaaaatgggccatcatccataggacggcatcgacgcgatcgaggaggtgatctaccacgacgagacgtacgacgtgacgacgatccgggccagcacgcccatgttcctgatggctcgcaagatcaagtcgctgggcgtgaagatggtgctgtccggggagggctccgacgagctcctgggcggctacctctacttccacttcgcccccaacagggaggagctccacagggagacctgccgcaaggtgaaggccctgcaccagtacgactgcctgcgcgccaacaaggcgacgtcggcgtggggcctggaggtccgcgtgccgttcctcgacaaggagttcgtcgacgtcgcgatgggcatggaccccgaatggaaaatggtactgaagcgggcctttttcgacccggcccggcccggtgtgttctgttgtttttggccggttctatgtatgatgatgagttgatgacgccttcttctcttctacttggtgaatgcgcagtacgacaagaacctgggtcgcatcgagaagtgggtcctgaggaaggcgttcgacgacgaggagcacccttacctgcccgaggtaaggacatcttcagagaaggctggtcgtttacctctgtgtctgtgtgttttcaagcctgaactgacgcctctgtgccatgcatcctccgcagcatattctgtacaggcagaaagaacagttcagtgacggagtgggctacaactggatcgatggactcaaagccttcaccgaacagcaggtgacggatgagatgatgaacagcgccgcccagatgttcccgtacaacacgcccgtcaacaaggaggcctactactaccggatgatattcgagaggctcttccctcaggactcggcgagggagacggtgccgtggggcccgagcatcgcctgcagcacgcccgcggccatcgagtgggtggagcagtggaaggcctccaacgacccctccggccgcttcatctcctcccacgactccgccgccaccgaccgcaccggagacaagctggcggtggtcaacggcgacgggcacggcgcggcgaacggcacggtcaacggcaacgacgtcgctgtcgccatcgcggtgtaacagtaatgaactggaggatagggacgaacgaacgactggtaggtgtggcgtacctgccgcgtgcccaccggccggccatatatatcgaatcccggcccggcgcggcagcacgtgctattgttacgtgtcaccagcgtacgtgtctgtgtagtgcctcgatcgtatctgtacgtctttaggaaaaggtgtgtccgtgtgtattgtatgtgtgtgagcaagcgtgcgtgacgcgctctgcctgtgtgacaaagcagagcagtacaagctcaggcattttctgtccgagcgatgatttgaactggatctatcatctctgaattgaactcggccggacgacgacctaccgctaaaatta

SEQ ID NO: 156350 - DNA, 2503 bp, Zea Mays
cgtcgtttgcatcaccatcgcccgcgacagaaacacactccgccgaacggttgtgtgcatcgtcgcatctcgcggcaaagcgcacgggccggccattggtggatccggtgggggggccgccagcagccttgctccaccagccgcgatcatggcgggcctactcccagaacctcgcccagccgtggaaggtagatccgatggccaggaccccggctgacgcgggctcggggccccacgctgactcggccccgctgcatcccgaacggataagctcctgccgcgcacggagctcgccgaaccgacacccgccgcgtgtccagggagcgctcccggcgggggtcgctcgcagacgcgaggtcccggagccgcgcgcgcccccgcctataaaactgcagccattctcccctggttcccgcatcccactcgcagcacgagcgctcagcgtctcgtctcctcctccccacaaaaagccgctgaattgctccgtcggcgtcatgtgtggcatcttagccgtgctcggatgctccgactgctcccaggccaggagggctcgcatcctcgcctgctccagaaggctgaagcacaggggccccgactggtcgggcctctaccagcacgagggcaacttcctggcgcagcagcggctcgccatcgtctccccgctgtccggcgaccagccgctgttcaacgaggaccgcaccgtcgtggtggtggccaatggagagatctacaaccacaagaacgtccggaagcagttcaccggcgcgcacagcttcagcaccggcagtgactgcgaggtcatcatccccctgtacgagaagtacggcgagaacttcgtggacatgctggacggagtcttcgcgttcgtgctctacgacacgcgagacaggacctacgtggcggcacgcgacgccatcggcgtcaacccgctctacatcggctggggcagcgacggttccgtctggatgtcgtccgagatgaaggcgctgaacgaggactgcgtgcgcttcgagatcttcccgccggggcacctctactccagcgccgccggcgggttccgccggtggtacaccccgcactggttccaggagcaggtgccccggacgccgtaccagccgctcgtccttagagaggccttcgagaaggcggttatcaagaggctcatgaccgacgtcccgttcggggtcctcctctccggcggcctcgactcctccctcgtcgcctccgtcaccaagcgccacctcgtcaagaccgacgccgccggaaagttcggcacagagctccactccttcgtcgtcggcctcgagggctcccctgacctgaaggccgcacgagaggtcgctgactacctcggaaccacccatcacgagttccatttcaccgtacaggacggcatcgacgcgatcgaggaggtgatctaccacgacgagacgtacgacgtgacgacgatccgggccagcacgcccatgttcctgatggctcgcaagatcaagtcgctgggcgtgaagatggtgctgtccggggagggctccgacgagctcctgggcggctacctctacttccacttcgcccccaacagggaggagctccacagggagacctgccgcaaggtgaaggccctgcaccagtacgactgcctgcgcgccaacaaggcgacgtcggcgtggggcctggaggtccgcgtgccgttcctcgacaaggagttcgtcgacgtcgcgatgggcatggaccccgaatggaaaatgtacgacaagaacctgggtcgcatcgagaagtgggtcctgaggaaggcgttcgacgacgaggagcacccttacctgcccgagcatattctgtacaggcagaaagaacagttcagtgacggagtgggctacaactggatcgatggactcaaagccttcaccgaacagcaggtgacggatgagatgatgaacagcgccgcccagatgttcccgtacaacacgcccgtcaacaaggaggcctactactaccggatgatattcgagaggctcttccctcaggactcggcgagggagacggtgccgtggggcccgagcatcgcctgcagcacgcccgcggccatcgagtgggtggagcagtggaaggcctccaacgacccctccggccgcttcatctcctcccacgactccgccgccaccgaccgcaccggagacaagctggcggtggtcaacggcgacgggcacggcgcggcgaacggcacggtcaacggcaacgacgtcgctgtcgccatcgcggtgtaacagtaatgaactggaggatagggacgaacgaacgactggtaggtgtggcgtacctgccgcgtgcccaccggccggccatatatatcgaatcccggcccggcgcggcagcacgtgctattgttacgtgtcaccagcgtacgtgtctgtgtagtgcctcgatcgtatctgtacgtctttaggaaaaggtgtgtccgtgtgtattgtatgtgtgtgagcaagcgtgcgtgacgcgctctgcctgt

SEQ ID NO: 156351 - DNA, 1222 bp, Zea Mays
cgtcgtttgcatcaccatcgcccgcgacagaaacacactccgccgaacggttgtgtgcatcgtcgcatctcgcggcaaagcgcacgggccggccattggtggatccggtgggggggccgccagcagccttgctccaccagccgcgatcatggcgggcctactcccagaacctcgcccagccgtggaaggtagatccgatggccaggaccccggctgacgcgggctcggggccccacgctgactcggccccgctgcatcccgaacggataagctcctgccgcgcacggagctcgccgaaccgacacccgccgcgtgtccagggagcgctcccggcgggggtcgctcgcagacgcgaggtcccggagccgcgcgcgcccccgcctataaaactgcagccattctcccctggttcccgcatcccactcgcagcacgagcgctcagcgtctcgtctcctcctccccacaaaaagccgctgaattgctccgtcggcgtcatgtgtggcatcttagccgtgctcggatgctccgactgctcccaggccaggagggctcgcatcctcgcctgctccagaaggctgaagcacaggggccccgactggtcgggcctctaccagcacgagggcaacttcctggcgcagcagcggctcgccatcgtctccccgctgtccggcgaccagccgctgttcaacgaggaccgcaccgtcgtggtggtggccaatggagagatctacaaccacaagaacgtccggaagcagttcaccggcgcgcacagcttcagcaccggcagtgactgcgaggtcatcatccccctgtacgagaagtacggcgagaacttcgtggacatgctggacggagtcttcgcgttcgtgctctacgacacgcgagacaggacctacgtggcggcacgcgacgccatcggcgtcaacccgctctacatcggctggggcagcgacggtcagactcagacacagcgtggcgtggcattttcgcagtgcggtcgcgccaagcagagcaccccagctaggtgggtcaagctgaagctgaagctgaccgatcgattttctcgcctcgccttccctccactactgcaggttccgtctggatgtcgtccgagatgaaggcgctgaacgaggactgcgtgcgcttcgagatcttcccgccggggcacctctactccagcgccgccggcgggttccgccggtggtacaccccgcactggttc

SEQ ID NO: 156352 - DNA, 1454 bp, Zea Mays
aaaaaaaaaataaaacaatagccggaagccgaagtacagcgctgtcgcgaacgctccggtcctatactcctcctgacatcgattcccgcactacctagatctcgaactcccaccatcgccgccgccgcccatggcgaaggagttccccgtgccaccggtggtcttcacgccgtccaccccaacacaccgccgccaccctcccccgggcatgggggtctcccctccgcccgcgttcgcgccgccacgtccctccacctcatccgccgccaacccgctccctttcatgtcgttcgatgtctcagctgccgcggcctcctcctcctctgcgccgcccctcttcgcggggcctatcggtgtcggcggttccggcgcatcctttgaggacgagccgccgctcctcgaggagctcggtatcaacacgcgccagatctggcggaagacgatctccatcctccacccattccgctccaccgacccctccctccacgccgacgccgacctatcgggcccgttcctcttcctcctctcctttggactcttccagctcctcgcggggaagttccacttcgggatcgtgctcggttgggtcaccgtggcgtccctcttcctctacttcgtcttttccatgctctcgggcggccgccgcggggacctcgatctttacagatgcgttagcctagtgggctactgcatgctgcccatggtcatcttctctgctgtgtccctctttctgccgcgcggtggcgggttcatatttggagtagggatggcgttcgtgatatggtccaccagggtctgcaccaggctactaggagagcttgcttccagcggagacgagcacaggggcctcatcgcttatgcgtgctggctcgtctacatgctcttctcattgctcgtcatcttctgataccgtttatggcatggaagactatgttcgcaatttgtttagcggatgatgtggacagtggactgccaccagtcactggagtgttttgctatgttgttgcagaactacatagtatctggccactttggggaattgttctgtagtgatctattagttccagtgggcatggttggtgttcggtgtagatcttagtaaaaagaaaaggaaatcgaggtccagaaacagcaaatgtgcagtaattaggtttttgccgaagtattggtggaaatcgtactctctaggcttggtcgtggtcggtgcaaatcttgtttgttatggtacttaccacgacttatatttttttaggatcaccgtggcatttcttttcttcttactgtttatttgtcagtggttcattttggcaaagagtttttctatctttcgatatcgtggtagttagttaccgaatcatcataaatcaaaagaacgttagttttctttcatttgttacaagttgacccccgcattgagtttatcttctgggatagcaaaatatgatgtttataat

SEQ ID NO: 156353 - DNA, 2294 bp, Zea Mays
aaaccctaaaccccatgtgataaccatgcatgggttgtcttctcgtgtctcggtgcttccccagggaggagcagctcaccaagctcgccggacgagcgggtatctctgtccttgctgctgtttttgtcattaggttggtggaagcagcactcggtcttgttgcacttttcacactgctggggttcttcagggcactgatgttatacaatgggcagaaggcactggccaaggccgacaaggttgtcttgtctgaacgccaactggggcttcttgggttaaagatggcaggttcagaaggaggtgggaaaggtgagcaaatcaaaaggcctcccaagaccaagccatcaacaccatcggaaccaattgtgcctatcaggaggtcttcgttcagctatacaccatctcggccttcggggcaatctaggattggttccagccatttgagccctggtggtgagagactgatcatggcattgccaatgtcaccctccacaccattgcagaagcatgtctcttctccttcaactccatggtcaaggaaaagctcaggcagtgccaagggcatacagacagaggcaatgctggaccagttcttggctggcttggatgtaaacattgacaaaatcatggatccagagactaagactacaacacctccagcaaccattacaagctttggtgttgctacccctgtttcaattaccacatcgaccaccccttctggtgctgcaaggagcacacctctgagacctgtgaggatgtctcctggctcccatcagaaatacagcacgccaccaaaaaagggtgagggtgaacttccaactccaatgtccttagagcaagcagtggaggcctttgagaacttgggtgtatatcctgagattgagcagtggcgagatagtctcaggcagtggttttcttcagttgtgatgaacccacttgtacaaaaaatcaaaacaagccatactcaggttaagcaaacaacagctactgttggggcttcagttactgttagccaagttggaagtgatctgccaagcacaacaccaccagttgccttgtctcctcttggtgggactaaagattggcaaccgactgtcacggtagatgaggatgggatccttaaccaattgcactctgcactcctacattctcgagatgcccctgttgcgcaaacttttggcagtctacaacagccacaacggaacccccaccttccagctattcaagcatgtattgatgcaatcacagagcatcagaggctcaacactctgatgaagggagagctgataaaaggcttgttgccacagagtagtgtccgtgctgattacactgtccagagagttcaagaactcgctgaaggaacatgcttgaagaattatgattacatgggtcatggaaatgactatggtaaatcagaaaagaaatggaccaccgagctacctactgactcacaccttcttctgtatctgtttgctgctttccttgaacatccaaaatggatgcttcatgttgaccctacctcgtactctggttcccagtccagcaaaaatcccttatttctgggagttcttccaccaaaagagaggttcccagaaaagtatgttgctctgatatcaggtgttccagcaattattcacccaggggctcttatactggctgtgagcaagcagaatcctccaatttttgctctatactgggacaagaagcagcaattttctcttcagggaagaacagctctgtgggatgccattctacttttatgtcaccaaataaacgttgggtatggcggtgtggttagaggaatccatatcggttcgtctgccttgaatctcctgtcagttatagattcagattcagaaagctgaaagttagtttggtagtcttgaggggatgaattatgtcaagctagtttactggtgttaatgttgtaatttacactagcatgtttggaattgacatagctttatctagctgtaatatgccctgtggtaccttggatttgtgactatattattattgttctttgaatccttcattaatgtaccggtactttctctttacaacctgagttgcctaatcacataattcagttgtatgttctctttatcccaacttcaacgcttcaatagagcaaaatacaaggatatacaatgcacaatttagatataagtaggacctacgaagaacaactatacaataatagccattttcaatttgttactcataaaatcatctaactctcatttccatgtctcccggttgactcggcaaccgaagctttacagtaatcc

SEQ ID NO: 156354 - DNA, 2614 bp, Zea Mays
ggccagggccgccgttgtgtccgtctgggtctctcggactgtgtgcttggtcgtttgccaccccctgtggccttgtcccttgaattcgaaccccgcctcctgcttcccgatttcaaatagctggcccgcggtgcctgcagtgcagcactgcactgcacgcctccgccatactgcgacgccgccgtgcatcgcttcacgcagagcagtgatggaatcccatcacggcggcgacgggaaggcgcgggacaagttctcggtgtaccagaacccgtccctcacccgcgccctagactcccgcagcgcccgcccctccgtcacagtcctcctcgtcctcgcggtcatatccgtcgcctccgcatcctccttcctcgccctcacctcccgggaggagcagctcaccaagctcgccggacgagcgggtatctctgtccttgctgctgtttttgtcattaggttggtggaagcagcactcggtcttgttgcacttttcacactgctggggttcttcagggcactgatgttatacaatgggcagaaggcactggccaaggccgacaaggttgtcttgtctgaacgccaactggggcttcttgggttaaagatggcaggttcagaaggaggtgggaaaggtgagcaaatcaaaaggcctcccaagaccaagccatcaacaccatcggaaccaattgtgcctatcaggaggtcttcgttcagctatacaccatctcggccttcggggcaatctaggattggttccagccatttgagccctggtggtgagagactgatcatggcattgccaatgtcaccctccacaccattgcagaagcatgtctcttctccttcaactccatggtcaaggaaaagctcaggcagtgccaagggcatacagacagaggcaatgctggaccagttcttggctggcttggatgtaaacattgacaaaatcatggatccagagactaagactacaacacctccagcaaccattacaagctttggtgttgctacccctgtttcaattaccacatcgaccaccccttctggtgctgcaaggagcacacctctgagacctgtgaggatgtctcctggctcccatcagaaatacagcacgccaccaaaaaagggtgagggtgaacttccaactccaatgtccttagagcaagcagtggaggcctttgagaacttgggtgtatatcctgagattgagcagtggcgagatagtctcaggcagtggttttcttcagttgtgatgaacccacttgtacaaaaaatcaaaacaagccatactcaggttaagcaaacaacagctactgttggggcttcagttactgttagccaagttggaagtgatctgccaagcacaacaccaccagttgccttgtctcctcttggtgggactaaagattggcaaccgactgtcacggtagatgaggatgggatccttaaccaattgcactctgcactcctacattctcgagatgcccctgttgcgcaaacttttggcagtctacaacagccacaacggaacccccaccttccagctattcaagcatgtattgatgcaatcacagagcatcagaggctcaacactctgatgaagggagagctgataaaaggcttgttgccacagagtagtgtccgtgctgattacactgtccagagagttcaagaactcgctgaaggaacatgcttgaagaattatgattacatgggtcatggaaatgactatggtaaatcagaaaagaaatggaccaccgagctacctactgactcacaccttcttctgtatctgtttgctgctttccttgaacatccaaaatggatgcttcatgttgaccctacctcgtactctggttcccagtccagcaaaaatcccttatttctgggagttcttccaccaaaagagaggttcccagaaaagtatgttgctctgatatcaggtgttccagcaattattcacccaggggctcttatactggctgtgagcaagcagaatcctccaatttttgctctatactgggacaagaagcagcaattttctcttcagggaagaacagctctgtgggatgccattctacttttatgtcaccaaataaacgttgggtatggcggtgtggttagaggaatccatatcggttcgtctgccttgaatctcctgtcagttatagattcagattcagaaagctgaaagttagtttggtagtcttgaggggatgaattatgtcaagctagtttactggtgttaatgttgtaatttacactagcatgtttggaattgacatagctttatctagctgtaatatgccctgtggtaccttggatttgtgactatattattattgttctttgaatccttcattaatgtaccggtactttctctttacaacctgagttgcctaatcacataattcagttgtatgttctctttatcccaacttcaacgcttcaatagagcaaaatacaaggatatacaatgcacaatttagatataagtaggacctacgaagaacaactatacaataatagccattttcaatttgttactcataaaatcatctaactctcatttccatgtctcccggttgactcggcaaccgaagctttacagtaatcc

SEQ ID NO: 156355 - DNA, 2296 bp, Zea Mays
ggccagggccgccgttgtgtccgtctgggtctctcggactgtgtgcttggtcgtttgccaccccctgtggccttgtcccttgaattcgaaccccgcctcctgcttcccgatttcaaatagctggcccgcggtgcctgcagtgcagcactgcactgcacgcctccgccatactgcgacgccgccgtgcatcgcttcacgcagagcagtgatggaatcccatcacggcggcgacgggaaggcgcgggacaagttctcggtgtaccagaacccgtccctcacccgcgccctagactcccgcagcgcccgcccctccgtcacagtcctcctcgtcctcgcggtcatatccgtcgcctccgcatcctccttcctcgccctcacctcccgggaggagcagctcaccaagctcgccggacgagcgggtatctctgtccttgctgctgtttttgtcattaggttggtggaagcagcactcggtcttgttgcacttttcacactgctggggttcttcagggcactgatgttatacaatgggcagaaggcactggccaaggccgacaaggttgtcttgtctgaacgccaactggggcttcttgggttaaagatggcaggttcagaaggaggtgggaaaggtgagcaaatcaaaaggcctcccaagaccaagccatcaacaccatcggaaccaattgtgcctatcaggaggtcttcgttcagctatacaccatctcggccttcggggcaatctaggattggttccagccatttgagccctggtggtgagagactgatcatggcattgccaatgtcaccctccacaccattgcagaagcatgtctcttctccttcaactccatggtcaaggaaaagctcaggcagtgccaagggcatacagacagaggcaatgctggaccagttcttggctggcttggatgtaaacattgacaaaatcatggatccagagactaagactacaacacctccagcaaccattacaagctttggtgttgctacccctgtttcaattaccacatcgaccaccccttctggtgctgcaaggagcacacctctgagacctgtgaggatgtctcctggctcccatcagaaatacagcacgccaccaaaaaagggtgagggtgaacttccaactccaatgtccttagagcaagcagtggaggcctttgagaacttgggtgtatatcctgagattgagcagtggcgagatagtctcaggcagtggttttcttcagttgtgatgaacccacttgtacaaaaaatcaaaacaagccatactcaggttaagcaaacaacagctactgttggggcttcagttactgttagccaagttggaagtgatctgccaagcacaacaccaccagttgccttgtctcctcttggtgggactaaagattggcaaccgactgtcacggtagatgaggatgggatccttaaccaattgcactctgcactcctacattctcgagatgcccctgttgcgcaaacttttggcagtctacaacagccacaacggaacccccaccttccagctattcaagcatgtattgatgcaatcacagagcatcagaggctcaacactctgatgaagggagagctgataaaaggcttgttgccacagagtagtgtccgtgctgattacactgtccagagagttcaagaactcgctgaaggaacatgcttgaagaattatgattacatgggtcatggaaatgactatggtaaatcagaaaagaaatggaccaccgagctacctactgactcacaccttcttctgtatctgtttgctgctttccttgaacatccaaaatggatgcttcatgttgaccctacctcgtactctggttcccagtccagcaaaaatcccttatttctgggagttcttccaccaaaagagaggttcccagaaaagtatgttgctctgatatcaggtgttccagcaattattcacccaggggctcttatactggctgtgagcaagcagaatcctccaatttttgctctatactgggacaagaagcagcaattttctcttcaggtgatttgttatgtgcatttgttcctctatcatggctgttactattccttttcctcccttcagtcatttattttagcatgagttgctgttgagggagtgatatttagttttaataagatacacaatctaggaatttaaggaaagttgggagaaacaaacacagaagaaatgtaggaaacgggtagttttgtttgcttaaggagttgaggtatgacttgaacgaaactacatttagttatcatcttatgt

SEQ ID NO: 156356 - DNA, 2012 bp, Zea Mays
gcatcgttagaatcagccttacacgagacagaattcagggaaaggaggactggaggagggcgcggcggcgacgagcttagcgatacagcggcaccggagagctagccgcagcctcgatgctcgcggggatctgaactagtgccgctgcccaatcgcgccgaggactgtggcgctcactcctcatatcccatttccagcactcgtttctccatttcccaccttcccaaacgccacttaaaagagaaaggagagcatcgcagtggcacacgcgcaatggaaggctcgctggtgacgcgcctcccggaggctaactccctccccgacggcttcgttcccgactccgagagccctggcacggacgcgacgtttcccttctccgcgcccatcgttgatgatgcgctcaactccgatatccccgccgcgaccaacccaggcggcgaggaaaccctaaacgatccccccctccctgcgtccagcgccgaagatgcctcctcggccgccgctgctgaagccttgggcacactttctctggacgctgccgccgagccagaacgcgctctagaggagaacggacccaccggcgctgcaagaggtgaagcatccttgaagaattgtgcatcagagctagtgggcgctccaactgctcaaaaagggagcgttgagccgaaacgtaaggttgtgaaacgtagcaagcttgagaaggacagagagttgtttgaactggcccagcaataccacaaagttgttgcagaaagggatgcagccattggagttaaagaaaaactagaatctctttgtagggagtttcagcgtcaaaacaaaatgctaaaggaagagtgccaaagggtgtcgacggagggacagaacatgcgtatggaattgtctgaaaaatttgatatcgccataaagggtgtcagtgtcaagcttgaggagcagagggttgagtgcattgctcagctagaagagaacaatatgttgagaagtaaactcaaagacattgctgatcagtataacattactcagcagaaatatgctcaccaattgaaagagaaaatgatggaacttgagcttgctgatctgagacttcaacaacatcaagagaaggctgctcacgaacatacccaaatgcagttgtatgccgagcaagtttctcagcttatgactactgagaagaacctgcggttgcaactagcttcggatggagaaagatttcagcactttcaggatgccctgtcaaaaagcaatgaagtctttgaaacttacaagcaggagatggaaaaaatgattttggtgataaaaaatcttaagaaggacaatgaatttctgaagggaaaatgtgagaactcagatattgctcttgtgaagctcattgaagagcgtgagctaacgaagaagcaaatagagaaattgaaaaaccaaaaggagacacttgagtccctgtgtcgatcactacaggcagaaaggaaacaaggccgctccgccagtattccagacgccccttctagccaagaagacatgccagcgacaagtcaagaatcttagcatatgtgcttgccaatattccgttggtgtccgttacagcttgccgggacttctgaagcctgagaaatgaatatgttactgatatcttgttttgcttgagtttgcggaagttctggtcccatttaacacatactcagctgtcaacctactcaggcctttggggattgtaactataacctagagttgcattcctctacaagtaactcggtattgttactaaccatataagctatccgttgttccttgttttttgttcgagacaaaggctgttgctggtaaatgttaccaatcatataagctctcagtcgttccttttcttgattttgtttgagacaaaggctgttgcattgtgggtgtgttggttcctctgatcttttgttcccgttttgtccctaattaatggcctttttgtttcatgttttctcttatctatcgtgttaaaaactaaaacatcttttactttggataga

SEQ ID NO: 156357 - DNA, 1988 bp, Zea Mays
gcatcgttagaatcagccttacacgagacagaattcagggaaaggaggactggaggagggcgcggcggcgacgagcttagcgatacagcggcaccggagagctagccgcagcctcgatgctcgcggggatctgaactagtgccgctgcccaatcgcgccgaggactgtggcgctcactcctcatatcccatttccagcactcgtttctccatttcccaccttcccaaacgccacttaaaagagaaaggagagcatcgcagtggcacacgcgcaatggaaggctcgctggtgacgcgcctcccggaggctaactccctccccgacggcttcgttcccgactccgagagccctggcacggacgcgacgtttcccttctccgcgcccatcgttgatgatgcgctcaactccgatatccccgccgcgaccaacccaggcggcgaggaaaccctaaacgatccccccctccctgcgtccagcgccgaagatgcctcctcggccgccgctgctgaagccttgggcacactttctctggacgctgccgccgagccagaacgcgctctagaggagaacggacccaccggcgctgcaagaggtgaagcatccttgaagaattgtgcatcagagctagggagcgttgagccgaaacgtaaggttgtgaaacgtagcaagcttgagaaggacagagagttgtttgaactggcccagcaataccacaaagttgttgcagaaagggatgcagccattggagttaaagaaaaactagaatctctttgtagggagtttcagcgtcaaaacaaaatgctaaaggaagagtgccaaagggtgtcgacggagggacagaacatgcgtatggaattgtctgaaaaatttgatatcgccataaagggtgtcagtgtcaagcttgaggagcagagggttgagtgcattgctcagctagaagagaacaatatgttgagaagtaaactcaaagacattgctgatcagtataacattactcagcagaaatatgctcaccaattgaaagagaaaatgatggaacttgagcttgctgatctgagacttcaacaacatcaagagaaggctgctcacgaacatacccaaatgcagttgtatgccgagcaagtttctcagcttatgactactgagaagaacctgcggttgcaactagcttcggatggagaaagatttcagcactttcaggatgccctgtcaaaaagcaatgaagtctttgaaacttacaagcaggagatggaaaaaatgattttggtgataaaaaatcttaagaaggacaatgaatttctgaagggaaaatgtgagaactcagatattgctcttgtgaagctcattgaagagcgtgagctaacgaagaagcaaatagagaaattgaaaaaccaaaaggagacacttgagtccctgtgtcgatcactacaggcagaaaggaaacaaggccgctccgccagtattccagacgccccttctagccaagaagacatgccagcgacaagtcaagaatcttagcatatgtgcttgccaatattccgttggtgtccgttacagcttgccgggacttctgaagcctgagaaatgaatatgttactgatatcttgttttgcttgagtttgcggaagttctggtcccatttaacacatactcagctgtcaacctactcaggcctttggggattgtaactataacctagagttgcattcctctacaagtaactcggtattgttactaaccatataagctatccgttgttccttgttttttgttcgagacaaaggctgttgctggtaaatgttaccaatcatataagctctcagtcgttccttttcttgattttgtttgagacaaaggctgttgcattgtgggtgtgttggttcctctgatcttttgttcccgttttgtccctaattaatggcctttttgtttcatgttttctcttatctatcgtgttaaaaactaaaacatcttttactttggataga

SEQ ID NO: 156358 - DNA, 2120 bp, Zea Mays
gccaaacgtctcaagctcgccatttcgcctcggtttccagctcccactcctcccttcctcgcttcccaatctccaaacctctcacttgcacgggagcacgtacagccgtacaggcggagccaaagcgatcggcgccgcggcggcaagacgtcgtcggcggcgacgatgacgtggcacgaggacctggccactcacgtggggaacacgggcgttcgcctccccggcgccggaggtcacgcgccggcggcggcgaatgttgctgcggcgggggccgggtggtacggggaggaggaagaggggagggcggaggaggggtgggcgcagcaggcgaaggggttcgcggagtcgacggcggagatgctgcgggagctgggccgggggctgtgggacgtcgccgcgcagagcctcgccggcgccgaggacagcgaggtggcgcggcggctccggaagcgggcggcggctacggggaagcgcctcagcttcatgaacgagtacctccccgaggagcgcgacccggtgaggtgttggctcaccgtcgccgcagtcgcattcgtctcgctcctagttttaggttttgggagtggcaatgaaactccagtagagcttccaaagaaacttatcatcggccccccaagtgctgatagaatccaacttcctgatggacggcatctggcttatcaagaacaaggagtttcagctaacagagcaagattttcactgatttatcctcattcttttctttcatcaaggctagcaggaatccctggaattagagcatctcttctggaagaatttggagtacgacttgtgacctatgatcttcctggttttggtgagagcgatccacacataggccggaatctcaattcttctgcaatggacatgctctatctggctaatgctctcaatattccggagaagttctgggttgtgggctattctggaggtggaatgcatgcctggagtgctcttcgttacattcctgatcgcattgctggtgcagcaatgttcgcacctatggcaaatccatatgactccaagatgaccaaagatgagaggcgtaaaacatgggatagctggtcaacgaaacggaaactgatgcacattttagctcggaggtttccatcactactaccattcttttatcgccaaacctttctttctggaaagcaaggacatccagagagttggttgtcgctgtcattggggaagaaggacaaaactttactggaaggtcctgcgttcaatgcattctgggaaaggaatgttgcagagtctgtgcgccagggagatgcaaggccatttgtggaggaagctgtgctgcaagtatctgactggggtttcagcctatctgacatccaaatgcagaagaaagaggctcgaggcttttttgaactcatcaagtctctcttcaatcaggctgaaagagagtgggtgggatttctgggcccaatacatatatggcaggggatggatgaccgagtgatctcgccgtcagtggctgaatttgtgcggcggttggttccaggagccacggtccacaagcttcttgatgaaggtcacttctcatacttctgcttctgtgacgagtgccacaggcagatattctccaccctcttcggcattccccagggccctatgaaccctgcaccgcaacccagcgaggtcgtttcagagctcaacgaagaaataacagtaccagacaatgtcacagatcaggaacaaggaaaatcaggcctgccctgatcaagatcagttttcaggatcaacagtatagatacaagacattactactaaacacaacacctcatatcgacgggacaggcttttcgtcgctgcttgtggactgagctgctcctcttgcggagtcttgaaggatgaaggcaaagtattggatagaggctgtgccgtttcacttggatgtacaaaaatgctcattacagattcgcacggcacctgctcggtgtgcttttagtatagtcggcattaacattcgattaacctgctatgactgcattataggcttcttttagcacatttgttttggcatgcgaacccaatggttcaattgcgtcctcagctgaattttgttactttgtcagggactgtttgatgtagct

SEQ ID NO: 156359 - DNA, 2770 bp, Zea Mays
gaagaaagcaacccgggcccggaaccaccaaagccagagacacccaccagaaactcctagactcctagtacagttttacccacacagcctagcgggacctacaagtcagccaaacgtctcaagctcgccatttcgcctcggtttccagctcccactcctcccttcctcgcttcccaatctccaaacctctcacttgcacgggagcacgtacagccgtacaggcggagccaaagcgatcggcgccgcggcggcaagacgtcgtcggcggcgacgatgacgtggcacgaggacctggccactcacgtggggaacacgggcgttcgcctccccggcgccggaggtcacgcgccggcggcggcgaatgttgctgcggcgggggccgggtggtacggggaggaggaagaggggagggcggaggaggggtgggcgcagcaggcgaaggggttcgcggagtcgacggcggagatgctgcgggagctgggccgggggctgtgggacgtcgccgcgcagagcctcgccggcgccgaggacagcgaggtggcgcggcggctccggaagcgggcggcggctacggggaagcgcctcagcttcatgaacgagtacctccccgaggagcgcgacccggtgaggtgttggctcaccgtcgccgcagtcgcattcgtctcgctcctagttttaggttttgggagtggcaatgaaactccagtagagcttccaaagaaacttatcatcggccccccaagtgctgatagaatccaacttcctgatggacggcatctggcttatcaagaacaaggagtttcagctaacagagcaagattttcactgatttatcctcattcttttctttcatcaaggctagcaggaatccctggaattagagcatctcttctggaagaatttggagtacgacttgtgacctatgatcttcctggttttggtgagagcgatccacacataggccggaatctcaattcttctgcaatggacatgctctatctggctaatgctctcaatattccggagaagttctgggttgtgggctattctggaggtggaatgcatgcctggagtgctcttcgttacattcctgatcgcattgctggtgcagcaatgttcgcacctatggcaaatccatatgactccaagatgaccaaagatgagaggcgtaaaacatgggatagctggtcaacgaaacggaaactgatgcacattttagctcggaggtttccatcactactaccattcttttatcgccaaacctttctttctggaaagcaaggacatccagagagttggttgtcgctgtcattggggaagaaggacaaaactttactggaaggtcctgcgttcaatgcattctgggaaaggaatgttgcagagtctgtgcgccagggagatgcaaggccatttgtggaggaagctgtgctgcaagtatctgactggggtttcagcctatctgacatccaaatgcagaagaaagaggctcgaggcttttttgaactcatcaagtctctcttcaatcaggctgaaagagagtgggtgggatttctgggcccaatacatatatggcaggtttgtactctgttctcttaaaccggacgtgatccaaaagcatggcggcatttagtagaaacttaagaaaacttcagctatttcacacatagcgtgcttgcacacaatgacgttgtttagaagttgttctgtagctgcctagcatccgggctcatcagtttctgtttattgtggtcatactgtcagagtctgtgcatgtcaaggttgcatcagctgtaacagcatagatgaaaggttgcatcaatagtgattgtagctgaagagtattggttgtgcatgattcatgaaaattgatgcataaatgtgcgtaatatcgttattggttttatatgtactaacaaatagcaacttccaaatggtataagtactgggaaatggagacactataaaagcatcgtgcattgtcaattggacacaacgaattggatatgtccattatgttgcttggtggttcaacttctcaaactatatgccttgcatgtttgtgtagccgaataagggattcccgaaggctgaagcactaacctttcatatctcaataggggatggatgaccgagtgatctcgccgtcagtggctgaatttgtgcggcggttggttccaggagccacggtccacaagcttcttgatgaaggtcacttctcatacttctgcttctgtgacgagtgccacaggcagatattctccaccctcttcggcattccccagggccctatgaaccctgcaccgcaacccagcgaggtcgtttcagagctcaacgaagaaataacagtaccagacaatgtcacagatcaggaacaaggaaaatcaggcctgccctgatcaagatcagttttcaggatcaacagtatagatacaagacattactactaaacacaacacctcatatcgacgggacaggcttttcgtcgctgcttgtggactgagctgctcctcttgcggagtcttgaaggatgaaggcaaagtattggatagaggctgtgccgtttcacttggatgtacaaaaatgctcattacagattcgcacggcacctgctcggtgtgcttttagtatagtcggcattaacattcgattaacctgctatgactgcattataggcttcttttagcacatttgttttggcatgcgaacccaatggttcaattgcgtcctcagctgaattttgttactttgtcagggactgtttgatgtagct

SEQ ID NO: 156360 - DNA, 1854 bp, Zea Mays
ctcctcccttcctcgcttcccaatctccaaacctctcacttgcacgggagcacgtacagccgtacaggcggagccaaagcgatcggcgccgcggcggcaagacgtcgtcggcggcgacgatgacgtggcacgaggacctggccactcacgtggggaacacgggcgttcgcctccccggcgccggaggtcacgcgccggcggcggcgaatgttgctgcggcgggggccgggtggtacggggaggaggaagaggggagggcggaggaggggtgggcgcagcaggcgaaggggttcgcggagtcgacggcggagatgctgcgggagctgggccgggggctgtgggacgtcgccgcgcagagcctcgccggcgccgaggacagcgaggtggcgcggcggctccggaagcgggcggcggctacggggaagcgcctcagcttcatgaacgagtacctccccgaggagcgcgacccggtgaggtgttggctcaccgtcgccgcagtcgcattcgtctcgctcctagttttaggttttgggagtggcaatgaaactccagtagagcttccaaagaaacttatcatcggccccccaagtgctgatagaatccaacttcctgatggacggcatctggcttatcaagaacaaggagtttcagctaacagagcaagattttcactgatttatcctcattcttttctttcatcaaggctagcaggaatccctggaattagagcatctcttctggaagaatttggagtacgacttgtgacctatgatcttcctggttttggtgagagcgatccacacataggccggaatctcaattcttctgcaatggacatgctctatctggctaatgctctcaatattccggagaagttctgggttgtgggctattctggaggtggaatgcatgcctggagtgctcttcgttacattcctgatcgcattgctggtgcagcaatgttcgcacctatggcaaatccatatgactccaagatgaccaaagatgagaggcgtaaaacatgggatagctggtcaacgaaacggaaactgatgcacattttagctcggaggtttccatcactactaccattcttttatcgccaaacctttctttctggaaagcaaggacatccagagagttggttgtcgctgtcattggggaagaaggacaaaactttactggaaggtcctgcgttcaatgcattctgggaaaggaatgttgcagagtctgtgcgccagggagatgcaaggccatttgtggaggaagctgtgctgcaagtatctgactggggtttcagcctatctgacatccaaatgcagaagaaagaggctcgaggcttttttgaactcatcaagtctctcttcaatcaggctgaaagagagtgggtgggatttctgggcccaatacatatatggcaggtttgtactctgttctcttaaaccggacgtgatccaaaagcatggcggcatttagtagaaacttaagaaaacttcagctatttcacacatagcgtgcttgcacacaatgacgttgtttagaagttgttctgtagctgcctagcatccgggctcatcagtttctgtttattgtggtcatactgtcagagtctgtgcatgtcaaggttgcatcagctgtaacagcatagatgaaaggttgcatcaatagtgattgtagctgaagagtattggttgtgcatgattcatgaaaattgatgcataaatgtgcgtaatatcgttattggttttatatgtactaacaaatagcaacttccaaatggtataagtactgggaaatggagacactataaaagcatcgtgcattgtcaattggacacaacgaattggatatgtc

SEQ ID NO: 156361 - DNA, 1803 bp, Zea Mays
tgataaagggaagaaaaaaagcgtgacaccaacacgacatcctctcccctcgtccgctccgctctagcctgctgccatcctgtcctctcgtctcgtctcctcgcggcgctcctcccctgctcgccacctcccgccctttttaaaccaccaccactaccaaattcacttgcctccccaacaccgcttggccgcttggcgcttgctgctgcggcccgtcggtctaggcgtctagctaagctacctcgttatttaggcgacgcttgcatagcccagggctttgacacgacgcgacgccgattaagcgacacgaggccaggtcccggtcccggtagctcgaacgaggagctaagcagaggcgccgttctgctggttggcttctgtgatggggtcgtccacggaccacggtggcgccggttggcggggcaagaagcaggggtcgcagctgtggaagaaggcgctgctgcattcctccctctgcttcgtcatgggcttcttcaccggcttcgcgccgtcgtccgtgtccgactggacgtccgcggcggcggcggcgggcagcagcagcagcagcagccacgtggtacgggcgctgccggcgggcggggccttgaaccggagcctgctggcgcacggcgcggggcctggctacgaccgggcagcgtctccgcgcccgctcctggtggtcgtcacgacgacggagtcgacgcccgtggcgtccggcgagcgggccgccgcgctgacgcggacggcgcacgcgctgcggctggtggcgccgccgctgctgtgggtggtcgtggaggccgccccggacgcgccggccacggcgcggcagctgcgcgccacggggctcatgtaccgccacctgacgtacagggacaacttcaccgccgcgggcgcgggcaaggagcgccaccaccagcgcaacgtggcgctcgggcacgtcgagcaccaccgcctcgccggcgtcgtcctcttcgcgggcctcgacgacgtgctggacctccgcctcttcgaccagatcagggagatcagcgcgttcggtgcgtggccggtggcgacgatgtggcgggacgagagggaggtcgtcgtgcggggccccgcgtgcagctcgtccgcggtcaccggctggttctcccaggacctgagcgacggcaccgcggctgctgcctctaccacctccaccgcgagggcgaggccttctggcgaggtggacgtccacggcttcgccttcaacagctccgtgctctgggaccccgagcgctggggccgctacccgacctccgagcccgacaagtcccaggactccacgaagttcgtccagcaagtggttctggaagatcttagcaaggtgaagggcattccttccgattgttcagaggtcatggtatggcacgtcgatacggccgcgccttctccctcgtctccgcagaacaagaggagatagagagctgaacaccatagaagagaacggacgagcctggaggacggccggagtggtgtacactgtacatgcatggctacaccactgagatgctgattgtcctcctagctagttgcaaagaaggaaaatttttggttttctcaccggaggatggatccacctctgaccccccccccccccccccctccatcataatgtgcgattttctgctattcttttttttccttaaaaatgtgatatatgtatattttcccttttctttttactcaagtgggtttaggtgaatacaaacataataaccccttgaagtgtttctcaaggatgtaatggatagatggcaagctaaaaaagatcaacttaacaat

SEQ ID NO: 156362 - DNA, 268 bp, Zea Mays
ctcacaattctgtcacatgtcagagtgtattctgcatcaataatttcttcctccagcttgaaccttctcaaagattctatctagacaaaagttaacacatattacaaatagataaggtaaagagacatgttttcgaggagtcaatagttctactaaaaaaaggctcaattaaatattatatcagttgagtgaaatgaaaagccactggcaaatgtaagttgattgcttacttcatcaaccggaggggcacttgtcttttgtatctttg

SEQ ID NO: 156363 - DNA, 1654 bp, Zea Mays
caccgacagccggacacgcctcgtctcgtccccgctcccataaacgcagaggctcacgcagacgcctcgctcccgtgccaacgagccaagcccaaacccaccaccaattcaaccgcgacccagcccaccgccccgcacgccattcccacctcctcccccctcaccactcagatctccccgcgcgcccgcgcgcgagctcgttcgtgcgcggccgccggcgttggcgacgacgaccgaggagccatggctgccaagggcggcgccacgccgtcccccggcggcacggggcccgcggcggggaacggccgcctcttcacggtggggctagtcacggcctggtactcctccaacatcggcgtgctcctgctcaacaagtacctcctcagcaactacggcttcaagtaccccatcttcctcaccatgtgccacatgtccgcctgcgccctgctctcctacgccgccatcgcctggctgcgcgtcgtgcccatgcagctcgtgcgctcccgcgtccagctcgccaagatcgccgcgctcagcctcgtcttctgcggctccgtcgtctccgggaacgtctcgctgcgctacctccccgtctccttcaaccaggccgtcggcgccaccacgcccttctttaccgccgtcttcgcgtacatcatgaccgtcaagcgcgagtcgtggatcacctacctcaccctcgtgcccgtcgttactggagtcatcatcgccagcggcggcgagcctagctttcatctgtttggattcatcatgtgcataggagcaactgcagcaagggcgttgaagacagtactgcaaggaattcttctgtcttctgatggggagaagcttaattctatgaatctgttattgtacatggctccaattgctgttattttcttgcttcctgcaactatctttatggaggataatgttgttggcatcacaattcagcttgcaaagaaggatttcacgattgtttggttgctactgttcaattcttgcttgtcatattttgtcaatttgaccaatttcttggtgaccaaacatactagcgcactgactctacaggttctcggaaatgcaaagggtgccgtggcagtcgtcatctcaatcatgatattcaggaatcctgtgtccataacaggaatgctcggttacactctcacagtttttggcgtcattctttacagtgaatccaaaaagcgcagcaacaagccgtgaccaccctagaagacagtaaatacggccatcatttctttgtcctgccagcgcctagagctaatatatgatgagaaactacaccggtggcgatcacaacaaatccaatgccgtaccgcctcagcaattggacatcaagggtagaagtccaataatacctgtagtattaaattggcatgtgggaggcattttttttaatggcattgatggatagaatatatatattttttgtgttagagaagtgtggctcagactgccagcattgtttagtacgtttagctcttgggatattgcctcttctattcatcggctactgtaacttccattttcttttgttctgaagactacctgtaccagactttgatccaggttccagggcctaattaatatattgacactgaatttaagcacaaatgactgacttttagtgaaactgttg

SEQ ID NO: 156364 - DNA, 984 bp, Zea Mays
atggctgccaagggcggcgccacgccgtcccccggcggcacggggcccgcggcggggaacggccgcctcttcacggtggggctagtcacggcctggtactcctccaacatcggcgtgctcctgctcaacaagtacctcctcagcaactacggcttcaagtaccccatcttcctcaccatgtgccacatgtccgcctgcgccctgctctcctacgccgccatcgcctggctgcgcgtcgtgcccatgcagctcgtgcgctcccgcgtccagctcgccaagatcgccgcgctcagcctcgtcttctgcggctccgtcgtctccgggaacgtctcgctgcgctacctccccgtctccttcaaccaggccgtcggcgccaccacgcccttctttaccgccgtcttcgcgtacatcatgaccgtcaagcgcgagtcgtggatcacctacctcaccctcgtgcccgtcgttactggagtcatcatcgccagcggcctaatcctttgggtgtattccatcatttcgtgtaaaaaatcccctaaagaaccacaattatatctacggttggataacgatctaacagaccaggatgctcgcttgcacataagggagaagcttaattctatgaatctgttattgtacatggctccaattgctgttattttcttgcttcctgcaactatctttatggaggataatgttgttggcatcacaattcagcttgcaaagaaggatttcacgattgtttggttgctactgttcaattcttgcttgtcatattttgtcaatttgaccaatttcttggtgaccaaacatactagcgcactgactctacaggttctcggaaatgcaaagggtgccgtggcagtcgtcatctcaatcatgatattcaggaatcctgtgtccataacaggaatgctcggttacactctcacagtttttggcgtcattctttacagtgaatccaaaaagcgcagcaacaagccgtga

SEQ ID NO: 156365 - DNA, 891 bp, Zea Mays
cctaaaacattttctttttgccctgcgtggcgttctccactctcctctccctctcccgagcacctctccttcctccactttctccccaactccggtgagcgagagtgtggtcacgacacaatcatggcgctgcccgtggggccaatcgtcggtgcgcgagctccccttcggggtgagcatgtcaccgtcgagcgacctcttggcggtgccctagtgtcctgtgcgtggcgttatgtaccggtggctgcgttgtttctacccagtcgtctgcaaacaagattagcaggaatggacgaaatggtttgagttggttctctgagcaggttgacaagtgaggacctctatgaagctgatgctaacatttacagagcaaaaggatctatattagagcagtatagaagggtggatgtgaggcttacattggttgtgagcttgaaagggaatttgttgtttggctggtgaggttcttttgacttctgatgcaacgaggatagctgaaatagcaatcttcttcaatgtcttattatgcgggagcttgaaaatacttcaatttataagtttataggttttcatgttggagcatctttgtcatggtagcatgtaggttgctaaaatagtcagtggaataatgagacaatgtctaagaacacttgtcttttttttaggacagtataataagaactgacgtttccatgtccatatggacgttccacaaaaatcttatttgctgtcatgatgggctctattcatctggtggtggccaaacctctgccaaactttacttctgtaggagaaaataatttgttgctccttgtacttttctattgatgaaacggaatttggtgccccttgtttgccttgatctgtgccaggtcaaattgggctgttcaa

SEQ ID NO: 156366 - DNA, 885 bp, Zea Mays
cctaaaacattttctttttgccctgcgtggcgttctccactctcctctccctctcccgagcacctctccttcctccactttctccccaactccggtgagcgagagtgtggtcacgacacaatcatggcgctgcccgtggggccaatcgtcggtgcgcgagctccccttcggggtgagcatgtcaccgtcgagcgacctcttggcggtgccctagtgtcctgtgcgtggcgttatgtaccggtggctgcgttgtttctacccagtcgtctgcaaacaacaggaatggacgaaatggtttgagttggttctctgagcaggttgacaagtgaggacctctatgaagctgatgctaacatttacagagcaaaaggatctatattagagcagtatagaagggtggatgtgaggcttacattggttgtgagcttgaaagggaatttgttgtttggctggtgaggttcttttgacttctgatgcaacgaggatagctgaaatagcaatcttcttcaatgtcttattatgcgggagcttgaaaatacttcaatttataagtttataggttttcatgttggagcatctttgtcatggtagcatgtaggttgctaaaatagtcagtggaataatgagacaatgtctaagaacacttgtcttttttttaggacagtataataagaactgacgtttccatgtccatatggacgttccacaaaaatcttatttgctgtcatgatgggctctattcatctggtggtggccaaacctctgccaaactttacttctgtaggagaaaataatttgttgctccttgtacttttctattgatgaaacggaatttggtgccccttgtttgccttgatctgtgccaggtcaaattgggctgttcaa

SEQ ID NO: 156367 - DNA, 882 bp, Zea Mays
cctaaaacattttctttttgccctgcgtggcgttctccactctcctctccctctcccgagcacctctccttcctccactttctccccaactccggtgagcgagagtgtggtcacgacacaatcatggcgctgcccgtggggccaatcgtcggtgcgcgagctccccttcggggtgagcatgtcaccgtcgagcgacctcttggcggtgccctagtgtcctgtgcgtggcgttatgtaccggtggctgcgttgtttctacccagtcgtctgcaaacaagaatggacgaaatggtttgagttggttctctgagcaggttgacaagtgaggacctctatgaagctgatgctaacatttacagagcaaaaggatctatattagagcagtatagaagggtggatgtgaggcttacattggttgtgagcttgaaagggaatttgttgtttggctggtgaggttcttttgacttctgatgcaacgaggatagctgaaatagcaatcttcttcaatgtcttattatgcgggagcttgaaaatacttcaatttataagtttataggttttcatgttggagcatctttgtcatggtagcatgtaggttgctaaaatagtcagtggaataatgagacaatgtctaagaacacttgtcttttttttaggacagtataataagaactgacgtttccatgtccatatggacgttccacaaaaatcttatttgctgtcatgatgggctctattcatctggtggtggccaaacctctgccaaactttacttctgtaggagaaaataatttgttgctccttgtacttttctattgatgaaacggaatttggtgccccttgtttgccttgatctgtgccaggtcaaattgggctgttcaa

SEQ ID NO: 156368 - DNA, 1753 bp, Zea Mays
ctcgtctcgtgtgaactgctgcggatcagtcgggggccataagacccttgcgcgctgcgcagcggtgggcggtggccggtggcaatggcgcccacgacttgcctccggatccccttcctccccgcccgaggccgctccgctaacgtcaacgcccctccgtcctggctcccccgccgcctttctctcaaatccagcgcgaccaacgggccgttcactagcgcggacgtcatgggggcggattggaaggggctcaaggttgcttaccagggttgcgctggggcgtacagcgaagcggcagcaaagaaggcatacccaaattgtgaggctgtgccctgtgagcactttgacactgcatttcaggctgttcaaaactgggtagttgatagggcagtgctgccacttgagaattcattgggaggtagcatacatcggaactatgatctattggttcagcatagtttgcacattgtcggagaagttcgccttgaggttcaccattgcttgttagccaatcctggtgtgaagattgaaaatctgaaaagtgttatgagccatccccaggctcttgcgcaatgtgaacacacattaacaggactaggaattgaacatagagaggctgttgacgacactgctggtgcagcaaagattgttgcagaacatatggtccaggatactggtgctattgctagttcattggctgctaaactctatggattggatgttcttgctgagaatattcaggatggcaaaaataatgtcacccgttttatgatgctagctcgaaaacccaacattcttcgcaatgatagaccatttaagacaagcatagtcttttcactagaagaaggacatggacaactctttagggcgcttggtgtattcgcacagaggaaaatcaacctcacaaagatcgaaagtcgtccacacaaggagaggcctcttcgagtatctgatgactgttcctcactcttaaagaattttgattacctcttttacgttgaccttgaagcatcaatggctgatccaaagattcagaatgctcttggaaatctgaaggagtttgcaacctttttaagagtcctcggaagctatcctacaaatgtgaatgaaccttagaaaacactgcagattacatgatggattagcaggaatggacgaaatggtttgagttggttctctgagcaggttgacaagtgaggacctctatgaagctgatgctaacatttacagagcaaaaggatctatattagagcagtatagaagggtggatgtgaggcttacattggttgtgagcttgaaagggaatttgttgtttggctggtgaggttcttttgacttctgatgcaacgaggatagctgaaatagcaatcttcttcaatgtcttattatgcgggagcttgaaaatacttcaatttataagtttataggttttcatgttggagcatctttgtcatggtagcatgtaggttgctaaaatagtcagtggaataatgagacaatgtctaagaacacttgtcttttttttaggacagtataataagaactgacgtttccatgtccatatggacgttccacaaaaatcttatttgctgtcatgatgggctctattcatctggtggtggccaaacctctgccaaactttacttctgtaggagaaaataatttgttgctccttgtacttttctattgatgaaacggaatttggtgccccttgtttgccttgatctgtgccaggtcaaattgggctgttcaa

SEQ ID NO: 156369 - DNA, 1936 bp, Zea Mays
gttagagcttcactcccatcttacatatacatggatctcgtctcgtgtgaactgctgcggatcagtcgggggccataagacccttgcgcgctgcgcagcggtgggcggtggccggtggcaatggcgcccacgacttgcctccggatccccttcctccccgcccgaggccgctccgctaacgtcaacgcccctccgtcctggctcccccgccgcctttctctcaaatccagcgcgaccaacggtgacaattccctccccaatcccatctccacctctcccacctcgccgccttggttaacggtggtggacgttaacgggttgcgtcgcccgcccgcgcctgtttccgcccctaccatccccggcgaccgcggtccccggtggctgcctcggccgttcactagcgcggacgtcatgggggcggattggaaggggctcaaggttgcttaccagggttgcgctggggcgtacagcgaagcggcagcaaagaaggcatacccaaattgtgaggctgtgccctgtgagcactttgacactgcatttcaggctgttcaaaactgggtagttgatagggcagtgctgccacttgagaattcattgggaggtagcatacatcggaactatgatctattggttcagcatagtttgcacattgtcggagaagttcgccttgaggttcaccattgcttgttagccaatcctggtgtgaagattgaaaatctgaaaagtgttatgagccatccccaggctcttgcgcaatgtgaacacacattaacaggactaggaattgaacatagagaggctgttgacgacactgctggtgcagcaaagattgttgcagaacatatggtccaggatactggtgctattgctagttcattggctgctaaactctatggattggatgttcttgctgagaatattcaggatggcaaaaataatgtcacccgttttatgatgctagctcgaaaacccaacattcttcgcaatgatagaccatttaagacaagcatagtcttttcactagaagaaggacatggacaactctttagggcgcttggtgtattcgcacagaggaaaatcaacctcacaaagatcgaaagtcgtccacacaaggagaggcctcttcgagtatctgatgactgttcctcactcttaaagaattttgattacctcttttacgttgaccttgaagcatcaatggctgatccaaagattcagaatgctcttggaaatctgaaggagtttgcaacctttttaagagtcctcggaagctatcctacaaatgtgaatgaaccttagaaaacactgcagattacatgatggattagcaggaatggacgaaatggtttgagttggttctctgagcaggttgacaagtgaggacctctatgaagctgatgctaacatttacagagcaaaaggatctatattagagcagtatagaagggtggatgtgaggcttacattggttgtgagcttgaaagggaatttgttgtttggctggtgaggttcttttgacttctgatgcaacgaggatagctgaaatagcaatcttcttcaatgtcttattatgcgggagcttgaaaatacttcaatttataagtttataggttttcatgttggagcatctttgtcatggtagcatgtaggttgctaaaatagtcagtggaataatgagacaatgtctaagaacacttgtcttttttttaggacagtataataagaactgacgtttccatgtccatatggacgttccacaaaaatcttatttgctgtcatgatgggctctattcatctggtggtggccaaacctctgccaaactttacttctgtaggagaaaataatttgttgctccttgtacttttctattgatgaaacggaatttggtgccccttgtttgccttgatctgtgccaggtcaaattgggctgttcaa

SEQ ID NO: 156370 - DNA, 1051 bp, Zea Mays
gctaaaatagtaaaataagataaaatgttctgttatttgttctgaacattagtctgtcaaatttctttaggatggcaaaaataatgtcacccgttttatgatgctagctcgaaaacccaacattcttcgcaatgatagaccatttaagacaagcatagtcttttcactagaagaaggacatggacaactctttagggcgcttggtgtattcgcacagaggaaaatcaacctcacaaagatcgaaagtcgtccacacaaggagaggcctcttcgagtatctgatgactgttcctcactcttaaagaattttgattacctcttttacgttgaccttgaagcatcaatggctgatccaaagattcagaatgctcttggaaatctgaaggagtttgcaacctttttaagagtcctcggaagctatcctacaaatgtgaatgaaccttagaaaacactgcagattacatgatggattagcaggaatggacgaaatggtttgagttggttctctgagcaggttgacaagtgaggacctctatgaagctgatgctaacatttacagagcaaaaggatctatattagagcagtatagaagggtggatgtgaggcttacattggttgtgagcttgaaagggaatttgttgtttggctggtgaggttcttttgacttctgatgcaacgaggatagctgaaatagcaatcttcttcaatgtcttattatgcgggagcttgaaaatacttcaatttataagtttataggttttcatgttggagcatctttgtcatggtagcatgtaggttgctaaaatagtcagtggaataatgagacaatgtctaagaacacttgtcttttttttaggacagtataataagaactgacgtttccatgtccatatggacgttccacaaaaatcttatttgctgtcatgatgggctctattcatctggtggtggccaaacctctgccaaactttacttctgtaggagaaaataatttgttgctccttgtacttttctattgatgaaacggaatttggtgccccttgtttgcctt

SEQ ID NO: 156371 - DNA, 1874 bp, Zea Mays
gttagagcttcactcccatcttacatatacatggatctcgtctcgtgtgaactgctgcggatcagtcgggggccataagacccttgcgcgctgcgcagcggtgggcggtggccggtggcaatggcgcccacgacttgcctccggatccccttcctccccgcccgaggccgctccgctaacgtcaacgcccctccgtcctggctcccccgccgcctttctctcaaatccagcgcgaccaacggtgacaattccctccccaatcccatctccacctctcccacctcgccgccttggttaacggtggtggacgttaacgggttgcgtcgcccgcccgcgcctgtttccgcccctaccatccccggcgaccgcggtccccggtggctgcctcggccgttcactagcgcggacgtcatgggggcggattggaaggggctcaaggttgcttaccagggttgcgctggggcgtacagcgaagcggcagcaaagaaggcatacccaaattgtgaggctgtgccctgtgagcactttgacactgcatttcaggctgttcaaaactgggtagttgatagggcagtgctgccacttgagaattcattgggaggtagcatacatcggaactatgatctattggttcagcatagtttgcacattgtcggagaagttcgccttgaggttcaccattgcttgttagccaatcctggtgtgaagattgaaaatctgaaaagtgttatgagccatccccaggactaggaattgaacatagagaggctgttgacgacactgctggtgcagcaaagattgttgcagaacatatggtccaggatactggtgctattgctagttcattggctgctaaactctatggattggatgttcttgctgagaatattcaggatggcaaaaataatgtcacccgttttatgatgctagctcgaaaacccaacattcttcgcaatgatagaccatttaagacaagcatagtcttttcactagaagaaggacatggacaactctttagggcgcttggtgtattcgcacagaggaaaatcaacctcacaaagatcgaaagtcgtccacacaaggagaggcctcttcgagtatctgatgactgttcctcactcttaaagaattttgattacctcttttacgttgaccttgaagcatcaatggctgatccaaagattcagaatgctcttggaaatctgaaggagtttgcaacctttttaagagtcctcggaagctatcctacaaatgtgaatgaaccttagaaaacactgcagattacatgatggattagcaggaatggacgaaatggtttgagttggttctctgagcaggttgacaagtgaggacctctatgaagctgatgctaacatttacagagcaaaaggatctatattagagcagtatagaagggtggatgtgaggcttacattggttgtgagcttgaaagggaatttgttgtttggctggtgaggttcttttgacttctgatgcaacgaggatagctgaaatagcaatcttcttcaatgtcttattatgcgggagcttgaaaatacttcaatttataagtttataggttttcatgttggagcatctttgtcatggtagcatgtaggttgctaaaatagtcagtggaataatgagacaatgtctaagaacacttgtcttttttttaggacagtataataagaactgacgtttccatgtccatatggacgttccacaaaaatcttatttgctgtcatgatgggctctattcatctggtggtggccaaacctctgccaaactttacttctgtaggagaaaataatttgttgctccttgtacttttctattgatgaaacggaatttggtgccccttgtttgcctt

SEQ ID NO: 156372 - DNA, 954 bp, Zea Mays
atgggttccgattcaaccatagacaaagtaccaagaacagataaatttattacaaagaagacactagacaatctgatggttcaccctgaatcgcacgagtccatacaggcagcagtttgtgtcccgctccaggatatggaccatttaagcatcagcataccccagttcggagagcttgaggtgggcctctttgtagtcatcaaagaatgccttctcatctgcagcatatttctccacaagagggcggaagacagggtcgctcagcagggctttgtcacttgggagctgaagaaggccctccttgtcgccactcagaagttccttgaagtaagagttgtcaaagaccaaagggttcgtagtccaggccccctcaaaaccagaccgctctttgtggcaccttcccaaggtgtggccaccagagagggcaacaatgtcctgatcactcaaacccatctgcttgccaaagacttgcctcaggtggtcagaacccttggtggcatcaggaagacggccctcaggtggcggctgaggcttgtcctccctgccggggtggaaggggatctcaggcccaccggtgacctcgacggccacaactccggcaagctggtagaaatcggcataggagagggtggggaactcctccttgatgggctcgagcagccgcaccgcgatgtccagccccgcgttggcgccgtgagccagttccgccgggcacttcatagtaccgaagggaccgccggtcctcgacgacacgtcgaacgtccccgcggagtgccacgcgaggcggagcatgaggggcgcgcagctcttctcggcgatgagggcgcggagcttgcgcctggccttctcgacggcctcgctgtactcggcgctcacggttgggtaattcttcgccatggctgcgagcagagagagcttcgaatcgtagaatgcgatgcggtgcgacgcggctga

SEQ ID NO: 156373 - DNA, 1383 bp, Zea Mays
gccgtcctggtgcagcaggcagggcgcgatgcccagctcggtgatgaactccgagacgaaggagatggtggccatcaagaagatcgccaacgccttcgacaaccacatggacgccaagcgcacgctccgggagatcaagctgctgaggcacctcgaccacgagaacatcatcggcatcagggacgtgatcccgccgcccgtcccgcaggcgttcaacgacgtgtacatcgggacggagctgatggacacggacctgcaccacatcatccggtccaaccaggagctctcggaggagcactcccagtacttcatgtaccagatcctccgcgggctcaagtacatccactccgccaacgtgatccaccgcgacctcaagcccagcaacctgctggtgaacgccaactgcgacctcaagatctgcgacttcgggctggcgcgcccgtcctccgagagcgacatgatgacggagtacgtggtcacgcgctggtaccgcgcgcccgagctgctgctcaactccaccgactactcggcggccatcgacgtctggtccgtcggctgcatcttcatggagctcatcaaccgccagccgctcttccccggacgcgaccacatgcaccagatgcgcctcataaccgaggtgatcgggacgcccacggacgatgagctcgggttcatccggaacgaggacgcgcggaagtacatgcgccacctcccgcagttcccgcgccggccgttcgtcagcctgttcccgcggatgcagcccgtcgcgctggacctcatcgagcggatgctcaccttcaacccgctgcagaggatcacagtggaagaggcgctggagcacccgtacctggaacggctacacgacgtcgccgacgagcccatctgcacggacccgttctcgttcgacttcgagcagcaggctctgacggaagaccaaatgaagcagctgatattcaacgaggccatcgaactcaaccccaacttccgatactagctagctagctagttcggacacacatcttaattatacgtttcaggctgtgtagtctgctgcaggtttcaggtgttcgtgtaatgagctgtaccaagaataaaatgctttggactcatctggtgactggtgggtcacatgttcctcgggcatacagaatcacagttttgtctgccaaagttatagcagcttctcttctcatgcagttgttcatattcgccacgcagctaacttttgcaagcagtaatctaataacacggacgaactactcgtcagttccgaaccataggtcctttaaattttaatctaagctagtttaatttgtctatatttaatcgaacttatagaaaataagtcaatatatctacaacaatacaatatcgaatagatgc

SEQ ID NO: 156374 - DNA, 1921 bp, Zea Mays
gactagcaacagtggccgtcccgctcactttctcgctaccttcctcagccggagtcgtgggcagagcagagcgatcgaggcctgcttcagcagttcagctgcagccgccgcccgcccgtcccccagtccccaccttcttttataaatcccacgcctgcgcttcctcttttgacgaatcggtcgcgaggggagaaagataggagtcaattaatttgcctgttctgcttgctgctgaccttgtgagtgagccgccggtcttccccttcctcgccgaggggaaataataaggcagccacagccagggccgccccgaggaagaagatgagcggaggaggcgtggacggagctccggtcgccgagttccggcagacggtgacgcacggcggccggttcctgcagtacaacatcttcggcaacctgttcgagatcacgcacaagtaccagccccccatcatgcccatcggccgcggcgcctacgggatcgtctgggatgatggatgggcatggattgattggttggacctggaccaccgtaccgataggctcttaatttgatcctgcacagcgcgtaatatatagatagcagttgattatagttctgaagaagaagaagaaaataatgatctgtactgtgctacggacggacgcgcgcagctcggtgatgaactccgagacgaaggagatggtggccatcaagaagatcgccaacgccttcgacaaccacatggacgccaagcgcacgctccgggagatcaagctgctgaggcacctcgaccacgagaacatcatcggcatcagggacgtgatcccgccgcccgtcccgcaggcgttcaacgacgtgtacatcgggacggagctgatggacacggacctgcaccacatcatccggtccaaccaggagctctcggaggagcactcccagtacttcatgtaccagatcctccgcgggctcaagtacatccactccgccaacgtgatccaccgcgacctcaagcccagcaacctgctggtgaacgccaactgcgacctcaagatctgcgacttcgggctggcgcgcccgtcctccgagagcgacatgatgacggagtacgtggtcacgcgctggtaccgcgcgcccgagctgctgctcaactccaccgactactcggcggccatcgacgtctggtccgtcggctgcatcttcatggagctcatcaaccgccagccgctcttccccggacgcgaccacatgcaccagatgcgcctcataaccgaggtgatcgggacgcccacggacgatgagctcgggttcatccggaacgaggacgcgcggaagtacatgcgccacctcccgcagttcccgcgccggccgttcgtcagcctgttcccgcggatgcagcccgtcgcgctggacctcatcgagcggatgctcaccttcaacccgctgcagaggatcacagtggaagaggcgctggagcacccgtacctggaacggctacacgacgtcgccgacgagcccatctgcacggacccgttctcgttcgacttcgagcagcaggctctgacggaagaccaaatgaagcagctgatattcaacgaggccatcgaactcaaccccaacttccgatactagctagctagctagttcggacacacatcttaattatacgtatgtatgattcctcgtacgtggtttgtaaatagaagatcgagccggccgccggtgttattagactgaacgttgcatttgtttgttcgttgacgttcgcgctcgcaggtttcaggctgtgtagtctgctgcaggtttcaggtgttcgtgtaatgagctgtaccaagaataaaatgctttggactcatctggtgactggtgggtcacatgttcctcgggcatacagaatcacagttttgtctgccaaagttatagcagcttctcttctcatgc

SEQ ID NO: 156375 - DNA, 1696 bp, Zea Mays
cgccggcgccagcaaaatcaacgcgtcggcggctatcggccaattgccaattcctcccgccgaacgctgagaccctgacacggtggcccaccatcgcagcagggcacccctgcctcctcctcctccactcaccagcccaaccgctcaattaatttgcctgttctgcttgctgctgaccttgtgagtgagccgccggtcttccccttcctcgccgaggggaaataataaggcagccacagccagggccgccccgaggaagaagatgagcggaggaggcgtggacggagctccggtcgccgagttccggcagacggtgacgcacggcggccggttcctgcagtacaacatcttcggcaacctgttcgagatcacgcacaagtaccagccccccatcatgcccatcggccgcggcgcctacgggatcgtctgctcggtgatgaactccgagacgaaggagatggtggccatcaagaagatcgccaacgccttcgacaaccacatggacgccaagcgcacgctccgggagatcaagctgctgaggcacctcgaccacgagaacatcatcggcatcagggacgtgatcccgccgcccgtcccgcaggcgttcaacgacgtgtacatcgggacggagctgatggacacggacctgcaccacatcatccggtccaaccaggagctctcggaggagcactcccagtacttcatgtaccagatcctccgcgggctcaagtacatccactccgccaacgtgatccaccgcgacctcaagcccagcaacctgctggtgaacgccaactgcgacctcaagatctgcgacttcgggctggcgcgcccgtcctccgagagcgacatgatgacggagtacgtggtcacgcgctggtaccgcgcgcccgagctgctgctcaactccaccgactactcggcggccatcgacgtctggtccgtcggctgcatcttcatggagctcatcaaccgccagccgctcttccccggacgcgaccacatgcaccagatgcgcctcataaccgaggtgatcgggacgcccacggacgatgagctcgggttcatccggaacgaggacgcgcggaagtacatgcgccacctcccgcagttcccgcgccggccgttcgtcagcctgttcccgcggatgcagcccgtcgcgctggacctcatcgagcggatgctcaccttcaacccgctgcagaggatcacagtggaagaggcgctggagcacccgtacctggaacggctacacgacgtcgccgacgagcccatctgcacggacccgttctcgttcgacttcgagcagcaggctctgacggaagaccaaatgaagcagctgatattcaacgaggccatcgaactcaaccccaacttccgatactagctagctagctagttcggacacacatcttaattatacgtatgtatgattcctcgtacgtggtttgtaaatagaagatcgagccggccgccggtgttattagactgaacgttgcatttgtttgttcgttgacgttcgcgctcgcaggtttcaggctgtgtagtctgctgcaggtttcaggtgttcgtgtaatgagctgtaccaagaataaaatgctttggactcatctggtgactggtgggtcacatgttcctcgggcatacagaatcacagttttgtctgccaaagttatagcagcttctcttctcatgc

SEQ ID NO: 156376 - DNA, 1564 bp, Zea Mays
gactagcaacagtggccgtcccgctcactttctcgctaccttcctcagccggagtcgtgggcagagcagagcgatcgaggcctgcttcagcagttcagctgcagccgccgcccgcccgtcccccagtccccaccttcttttataaatcccacgcctgcgcttcctcttttgacgaatcggtcgcgaggggagaaagataggagtcaattaatttgcctgttctgcttgctgctgaccttgtgagtgagccgccggtcttccccttcctcgccgaggggaaataataaggcagccacagccagggccgccccgaggaagaagatgagcggaggaggcgtggacggagctccggtcgccgagttccggcagacggtgacgcacggcggccggttcctgcagtacaacatcttcggcaacctgttcgagatcacgcacaagtaccagccccccatcatgcccatcggccgcggcgcctacgggatcgtctgctcggtgatgaactccgagacgaaggagatggtggccatcaagaagatcgccaacgccttcgacaaccacatggacgccaagcgcacgctccgggagatcaagctgctgaggcacctcgaccacgagaacatcatcggcatcagggacgtgatcccgccgcccgtcccgcaggcgttcaacgacgtgtacatcgggacggagctgatggacacggacctgcaccacatcatccggtccaaccaggagctctcggaggagcactcccagtacttcatgtaccagatcctccgcgggctcaagtacatccactccgccaacgtgatccaccgcgacctcaagcccagcaacctgctggtgaacgccaactgcgacctcaagatctgcgacttcgggctggcgcgcccgtcctccgagagcgacatgatgacggagtacgtggtcacgcgctggtaccgcgcgcccgagctgctgctcaactccaccgactactcggcggccatcgacgtctggtccgtcggctgcatcttcatggagctcatcaaccgccagccgctcttccccggacgcgaccacatgcaccagatgcgcctcataaccgaggtgatcgggacgcccacggacgatgagctcgggttcatccggaacgaggacgcgcggaagtacatgcgccacctcccgcagttcccgcgccggccgttcgtcagcctgttcccgcggatgcagcccgtcgcgctggacctcatcgagcggatgctcaccttcaacccgctgcagaggatcacagtggaagaggcgctggagcacccgtacctggaacggctacacgacgtcgccgacgagcccatctgcacggacccgttctcgttcgacttcgagcagcaggctctgacggaagaccaaatgaagcagctgatattcaacgaggccatcgaactcaaccccaacttccgatactagctagctagctagttcggacacacatcttaattatacgtatgtttcaggctgtgtagtctgctgcaggtttcaggtgttcgtgtaatgagctgtaccaagaataaaatgctttggactc

SEQ ID NO: 156377 - DNA, 1152 bp, Zea Mays
agggagcacccccaccactccccaaacacaccactccaaacaaatccagacattggagattctacctgcgtgctatggaaactggcagatgagcagagtttgaacgtgagcagagccttggaggtgagggcgagcttggctgtggagggtgccggcgttgggcagaggacaggagcgagctcgccacctgggggcaaagaaagggcggccatggagaaaactgggaagcaagggcgcgacggccatgggcgagctgagcttggaggagcagagggaggaagcttgggcgcgacgcagtgagctccggcaaggagaacaaaggagctggacgcgccgagggaaagacgccatggggggctcgcggcagccatttttggagcagaaaaactccagcgcgcacagggaggagctctggagagggagtccgcggctggggaaaggggcatcccggcgagctgcgcgcaggggcaagctcgcgcgcgccagggagagagcagaggaactcggcgagctgcggcagaagagggaggccgaggagcaaggcaggggcgcttggttgagagcagaagatggacaccgatgggatttttatccaggatggccgagcggatgggaacgaggcaacggcggtgagaaaaatcttgagcagagcggcggctgcgaggataagcacggccaccggcggacagatttttgttcccaacaaccggagcggatgaggacgaccgggtgaaggaagcagaggtgagcgctcgggaagaacagctgtagagatatttttttttattttcttttctcctttttttttacagaaaactatagatatttttgtgtccggatttttttagcaatgcacacttgatcgatacactattcaactacgcattccatttcccgaatcttgaaatggaaatccgaggactaacgacttgatttagcgaattctctgaactcggacaaaatcgtgttgttaattcatttttgacgatttagatcgagacaaaaagcaacgaaccgaattaaacatatttcgacgttggtattttaatttacgactgattccgttgaagttaaccgattagaaattattcgagtccggcttcgcgattttaatttgctctgcgcgattcgaccgaaatcagccgaaaccag

SEQ ID NO: 156378 - DNA, 638 bp, Zea Mays
cctgctcaaccgagtctcttcttaaagaatgctgttcatctttatgccacgtttgtatggacatcatataaaaaaatgaatggcctcattgatctagaaagattatacaaagttgaggtgcagtgggttcaccatatttgatgaattgtttttagcagggaaggcaaaattccactgaaacatctggaggctaaactcatctagagttcaggatgaagtcatagctcccaacaagatctggattgttcattgatgcttggattgcctgatcacgataagaatgtgttgaaatcagcagctatgttttctcggggagattcagctggcattttccatgaagttttgcaggaagtgtatcttgtaccatattgagctcagttgtcggataaagttttgttggtaggtcagaaaggctgctgcaagtcatcggtgtaaattttcttttattagtttcattaaggtcgtcaatagtcagtgtttccaagtaggagaaagaaaagaacccaacttcatatacacatggaaagaggaaaaattgtgttagattagttacagtatcatggggttgttttgttgaagagcgtatatctcttccgaaatgtctgaaccactgaagagattatctctgtttttttttt

SEQ ID NO: 156379 - DNA, 3256 bp, Zea Mays
aaatccaggtcaaacccaggtgattagttttccagtcccactcactcaaacctctccgtcctcctcctcctccgggccgggctgcaacctgcgacgctggcgccggtcggcacgaggtgttccacgagtcgctgcgccccccaccggccaccacggcgcgtgccgggagcagcgcagcggcggcggccataatgggcgccgccgccgcggccttcgactccgagtgcaagagggacgcttatggattcacggtgcggccgcagcatctgcagcgtttccgcgagtacgccaagatttacaaggaagaggaggaggagagggcgcacagatggagggacttcttggacaggttggctgagtcagcgaatgtgcccaccacacccagtgtttctccatatgcagctaccgacgatggtgcctcaggtgcaggacaaacacaagggaataacggcatcggaatacattgtgatgatgaagaagtgggatctgagaacgcagaagataacaacaaatttgaaagcccgaaggaagctgatgcaagtggcgaatcaagggaaccaaatggtaagccaggagatctgaaagatgtaactaagttggacaaagtgcaagaggagactggtagcagctctacgcaagcaatcaaagacttagagggcttgatggaagcaagcggggactttgaagaactaagagatttgaatggaatcccagaagaattggaagaagagaataatggcaacttggaaaagctggtagaactcttcttggataaggggttgttggatgaactgaagcccataaaagttgagtcccagtggcgggtgcgtgcagcgcttagcatcattgacaaaatgatgagctctcgggtagtgaagggtggtaatggtgcaaacgatattcatcgaaaggatggaccacagcttacttctattgaagaggaaggaatgactgcagaagtgagtcacgacggatatccagctgaggttgaggagtcttgtgttgcagagaaggtggaacttggacaggagacaactgatgattctacaggtactgctttggatagagacaatgatgggtcgtattttctttggagggaggagcttgagagcttggttcgtggaggtgtgccaatggctcttagaggagagatatggcaagcatttgcaggtgttagtgctcggaggattactgggtactacaacaatttgcttgatgacaggactgcgatattggatgaaaaggatcccgtggacccagtggtcaatgaacagagaagtgcaccgagaaaagctacacagcctgagaagtggaaaggacagatagaaaaggatttgccacgaacatttccaggacaccctgcattagatgaggatgggaggaatgctttgaggcggttattaaccgcatatgcaaggcataatccatcagttgggtattgccaggccatgaacttttttgctgggttatttttgttattcatgcctgaagaaaatgcattttgggctttagtaggggttattgatgattattttgatggatactacactgaagaaatgattgaatcacaggttgaccaactcgtccttgaggaggttgtacgagaaaggttccctaaattggccaaacatatggatttcttggaagttcaagtgggatgggtgactggaccatggttcctttctattttcgtcaatatgcttccatgggaaagtgtactccgtgtttgggatgtcatcctttttgaaggaaatcgtagaatgttgttcaggacgacgcttgctttgctggatttatatgggcctgcacttgtgaccacaaaagatgccggagatgcaattacactactgcaatctcttgctgggtctacttttgacagcagccagcttgtattgacagcttgtatgggctttcaatcagttggagaaatgggattgcaagagttaaggaaaaaacacaggccagaaattttaactgcaatggaagaaagatcgaaagaccgtggctcctggaaagataagaaggggttagcaaccaaactttacagctttaaacatgatccttcattcgtgtgctcaccagttaagtccaaggaggggctagatggttcaaaggtgaatggagagactgggccagcaaatcttaagacctaccttagtactagttctatactggatactgatttggatcagggtgttgatcttcaagatcaggtgtcatggctaaagattgaactatgcaagctgctcgaggagaaaagatcagctgatctcaggggcgaggaattggaaactgctttgatggagatggtcaagcatgacaacagacgtatgttgagtgctaaggttgagaagctggaagcagaggtatatgaactgcgaaaagttttttcatacaagcaagagcaagagcaaataacgcttcagatcttgttaagaatggagcaagaacagaaagtggcagaagatgcccgcatagtcgctgagcgagatgctgctgaacaaacatgcgctgcccatttgcttcaggagaagtatgaagctacaatggcagcactttcacaaatggagaagagagctgtaatggcagaaacaatgctggaagctacaaagcaataccaggctgggcaggttaaagccaaccaatctttcacttcaagttcacctcgtgcagaacatgttcttgggaagataaatcaagaaccaaaccaagatatgtctaacaggagaatcggcctgctttctaggggacttggatggcttgacaagagcaagcagggaaggcaaaattccactgaaacatctggaggctaaactcatctagagttcaggatgaagtcatagctcccaacaagatctggattgttcattgatgcttggattgcctgatcacgataagaatgtgttgaaatcagcagctatgttttctcggggagattcagctggcattttccatgaagttttgcaggaagtgtatcttgtaccatattgagctcagttgtcggataaagttttgttggtaggtcagaaaggctgctgcaagtcatcggtgtaaattttcttttattagtttcattaaggtcgtcaatagtcagtgtttccaagtaggagaaagaaaagaacccaacttcatatacacatggaaagaggaaaaattgtgttagattagttacagtatcatggggttgttttgttgaagagcgtatatctcttccgaaatgtctgaaccactgaagagattatctctgttttttttt

SEQ ID NO: 156380 - DNA, 3373 bp, Zea Mays
aaatccaggtcaaacccaggtgattagttttccagtcccactcactcaaacctctccgtcctcctcctcctccgggccgggctgcaacctgcgacgctggcgccggtcggcacgaggtgttccacgagtcgctgcgccccccaccggccaccacggcgcgtgccgggagcagcgcagcggcggcggccataatgggcgccgccgccgcggccttcgactccgagtgcaagagggacgcttatggattcacggtgcggccgcagcatctgcagcgtttccgcgagtacgccaagatttacaaggaagaggaggaggagagggcgcacagatggagggacttcttggacaggttggctgagtcagcgaatgtgcccaccacacccagtgtttctccatatgcagctaccgacgatggtgcctcaggtgcaggacaaacacaagggaataacggcatcggaatacattgtgatgatgaagaagtgggatctgagaacgcagaagataacaacaaatttgaaagcccgaaggaagctgatgcaagtggcgaatcaagggaaccaaatggtaagccaggagatctgaaagatgtaactaagttggacaaagtgcaagaggagactggtagcagctctacgcaagcaatcaaagacttagagggcttgatggaagcaagcggggactttgaagaactaagagatttgaatggaatcccagaagaattggaagaagagaataatggcaacttggaaaagctggtagaactcttcttggataaggggttgttggatgaactgaagcccataaaagttgagtcccagtggcgggtgcgtgcagcgcttagcatcattgacaaaatgatgagctctcgggtagtgaagggtggtaatggtgcaaacgatattcatcgaaaggatggaccacagcttacttctattgaagaggaaggaatgactgcagaagtgagtcacgacggatatccagctgaggttgaggagtcttgtgttgcagagaaggtggaacttggacaggagacaactgatgattctacaggtactgctttggatagagacaatgatgggtcgtattttctttggagggaggagcttgagagcttggttcgtggaggtgtgccaatggctcttagaggagagatatggcaagcatttgcaggtgttagtgctcggaggattactgggtactacaacaatttgcttgatgacaggactgcgatattggatgaaaaggatcccgtggacccagtggtcaatgaacagagaagtgcaccgagaaaagctacacagcctgagaagtggaaaggacagatagaaaaggatttgccacgaacatttccaggacaccctgcattagatgaggatgggaggaatgctttgaggcggttattaaccgcatatgcaaggcataatccatcagttgggtattgccaggccatgaacttttttgctgggttatttttgttattcatgcctgaagaaaatgcattttgggctttagtaggggttattgatgattattttgatggatactacactgaagaaatgattgaatcacaggttgaccaactcgtccttgaggaggttgtacgagaaaggttccctaaattggccaaacatatggatttcttggaagttcaagtgggatgggtgactggaccatggttcctttctattttcgtcaatatgcttccatgggaaagtgtactccgtgtttgggatgtcatcctttttgaaggaaatcgtagaatgttgttcaggacgacgcttgctttgctggatttatatggtattagttatcccttcttagcctgtttattaacatctggaaaatgtttttttatttgttcttttttttatctattttgatgtgcaatcaacattgttgtcttcatacattaatttgcagggcctgcacttgtgaccacaaaagatgccggagatgcaattacactactgcaatctcttgctgggtctacttttgacagcagccagcttgtattgacagcttgtatgggctttcaatcagttggagaaatgggattgcaagagttaaggaaaaaacacaggccagaaattttaactgcaatggaagaaagatcgaaagaccgtggctcctggaaagataagaaggggttagcaaccaaactttacagctttaaacatgatccttcattcgtgtgctcaccagttaagtccaaggaggggctagatggttcaaaggtgaatggagagactgggccagcaaatcttaagacctaccttagtactagttctatactggatactgatttggatcagggtgttgatcttcaagatcaggtgtcatggctaaagattgaactatgcaagctgctcgaggagaaaagatcagctgatctcaggggcgaggaattggaaactgctttgatggagatggtcaagcatgacaacagacgtatgttgagtgctaaggttgagaagctggaagcagaggtatatgaactgcgaaaagttttttcatacaagcaagagcaagagcaaataacgcttcagatcttgttaagaatggagcaagaacagaaagtggcagaagatgcccgcatagtcgctgagcgagatgctgctgaacaaacatgcgctgcccatttgcttcaggagaagtatgaagctacaatggcagcactttcacaaatggagaagagagctgtaatggcagaaacaatgctggaagctacaaagcaataccaggctgggcaggttaaagccaaccaatctttcacttcaagttcacctcgtgcagaacatgttcttgggaagataaatcaagaaccaaaccaagatatgtctaacaggagaatcggcctgctttctaggggacttggatggcttgacaagagcaagggaaggcaaaattccactgaaacatctggaggctaaactcatctagagttcaggatgaagtcatagctcccaacaagatctggattgttcattgatgcttggattgcctgatcacgataagaatgtgttgaaatcagcagctatgttttctcggggagattcagctggcattttccatgaagttttgcaggaagtgtatcttgtaccatattgagctcagttgtcggataaagttttgttggtaggtcagaaaggctgctgcaagtcatcggtgtaaattttcttttattagtttcattaaggtcgtcaatagtcagtgtttccaagtaggagaaagaaaagaacccaacttcatatacacatggaaagaggaaaaattgtgttagattagttacagtatcatggggttgttttgttgaagagcgtatatctcttccgaaatgtctgaaccactgaagagattatctctgttttttttt

SEQ ID NO: 156381 - DNA, 2226 bp, Zea Mays
gaaatccacgatgcatgaggcaggcggcaggacagacgcgcgccatcgtcgtgccgcgcgccacgtgctccgcgctagtctagcgtcgaacgaaaaatggccttctttttttctttccctcccttctttcggtctcctgctcgccgtccccaatctgcgctgccgattcttcttcttcttcttcttcaccaattcaattcatcttcgtcgcctggggcacacccctcgggcgccgcggcagcagggggtgcggtgcagttagcgccagcgcgcgtggctccaaccggacttgccgcgatccgttgcaatcctgattcccttcctctccagaattcatcctcccatgtgcgtggatctcggggcccgcgcgggctagggtttagtatggctttggtcaatccatggcgtgcgctgccgaggtcgtcctgtcgcttcttctttaatgcgcgctgatccccatggactccgagtccccacggtaaatcccacacaaaggcgggttcctttgcccatttcgcatgcctcctcctcttctctccatctcctgccgtatcttgttcggttccttgtattcgtattgccccgggggtgctaatgccgttgttggggttccctccgggagctgtggttgatgctcctgaggtttggcgcagggacgcttatggattcacggtgcggccgcagcatctgcagcgtttccgcgagtacgccaagatttacaaggaagaggaggaggagagggcgcacagatggagggacttcttggacaggttggctgagtcagcgaatgtgcccaccacacccagtgtttctccatatgcagctaccgacgatggtgcctcaggtgcaggacaaacacaagggaataacggcatcggaatacattgtgatgatgaagaagtgggatctgagaacgcagaagataacaacaaatttgaaagcccgaaggaagctgatgcaagtggcgaatcaagggaaccaaatggtaagccaggagatctgaaagatgtaactaagttggacaaagtgcaagaggagactggtagcagctctacgcaagcaatcaaagacttagagggcttgatggaagcaagcggggactttgaagaactaagagatttgaatggaatcccagaagaattggaagaagagaataatggcaacttggaaaagctggtagaactcttcttggataaggggttgttggatgaactgaagcccataaaagttgagtcccagtggcgggtgcgtgcagcgcttagcatcattgacaaaatgatgagctctcgggtagtgaagggtggtaatggtgcaaacgatattcatcgaaaggatggaccacagcttacttctattgaagaggaaggaatgactgcagaagtgagtcacgacggatatccagctgaggttgaggagtcttgtgttgcagagaaggtggaacttggacaggagacaactgatgattctacaggtactgctttggatagagacaatgatgggtcgtattttctttggagggaggagcttgagagcttggttcgtggaggtgtgccaatggctcttagaggagaggtgcaactgcagccacttttgcaaatttctgctgtctgctttgtgtgtgagatttgatactttatgctcacatattattgacttccctgcagatatggcaagcatttgcaggtgttagtgctcggaggattactgggtactacaacaatttgcttgatgacaggactgcgatattggatgaaaaggatcccgtggacccagtggtcaatgaacagagaagtgcaccgagaaaagctacacagcctgagaagtggaaaggacagatagaaaaggttgttttctgcaacagtttgaatttagagaaagcatgccatggttggcaagctctagtgtttctatacacttgatttctgttttcattacaggatttgccacgaacatttccaggacaccctgcattagatgaggatgggaggaatgctttgaggcggttattaaccgcatatgcaaggcataatccatcagttgggtattgccaggtagatgccaattgaaggaattttgtcattttgattttttatgtagcctcttgctatcttaatcgtatagaacaaggtagattgtaatcctaattggtgcatgcaaactatgaaggtcatggttctcatgctcagttgagcatttgagcaaaattgtaatgtatccttaaatgtt

SEQ ID NO: 156382 - DNA, 228 bp, Zea Mays
gcagggctgatggctcgatgtcgagcagttggccgactgtgcggggagaggcgcccggtcaagatacaggaggagcggcgaccccgcgagtacgaccgggagcacagctattccggatgggccaaggtgttggagaacaccttaagggatgaggaggagctccgtgccattcttggtgatagcatcggcaacatggagctcatgaggaaacggtggcgacacgtctga

SEQ ID NO: 156383 - DNA, 1115 bp, Zea Mays
gacgagacccattagcgaccggccagtgatccccgaccccgagtcccgaggccgacgccattcctgattcctccatcttccgttccgccgcaccgccgccggagatatgtcgaggctcgctgctgccgccctccgctgcgtcgtcactgcatcgagagatacctcctcatctcgcttcgccgtgtctgcgccggtgtctgctcggctcttctccgcggatgcatccggtgaagccgccgccacggccgcagagtcgcaggatgactctttcttcaaggcatcccgcgaaggattagcctatggaaggttttacagtgtcattggtggaggcagtcgtcttgagaagaacatattgaaaactgatattatccatcaccttgacagatgtggattgtcattggatgatgtgaagattgaatacaacaagggatatgctccattggccgctttgctgaggttttcttcgaaggcaatgtttaccaccgcaattaggcaagcaaatcagaatcgtctgcacaggattgatgagataagtcgtgaaacatgggatctcaaaaagtccttcgatgggaaagcggtattactgcaaggagtcccacgaaatgccctcgcagatgacatagagcgttttttgtgtggcacgaactttgaacctccaccgtttgaaacctttctaagagctggtgtcccagagcccataagaatgatgctggttaagttccacacaaagaccgatgcgatgaatgccttcatcaccaaaaacaggagtttctgtctgaacagtcaagttagcatgcgtgttcttcagtaactgagtagccagttgaatctcgtgatgtttgccccggctttgtcaaacaaaaagccttttaagtccgatctgaggtctatccattatccacaaatgttgccgcattgtgtgtttctgcaggttatattggactggcagcctgctttaggttttcattcctactagtttgtggtttcagctgtactgcaccgcttttatttcatgagtactctgaaaaatgtaccaccattccgctttacaatgaaataattaacggcacaaacgctaggggttcgaatctgctactgctaccgtgcccattgtt

SEQ ID NO: 156384 - DNA, 1015 bp, Zea Mays
gcgatccaaccaaagaccctatccaaaaccagaggcaagccaagacgcaagctgcaagcacgcgctcgtgcccgcgccatgaagtgctggtgcgtgcactcgccaaggggagcaatggcgacgccgctctccagccccttggctcccaccgccctccgctcccctctccggcaccgcgccctgctgctgctgctgccgttccctccccgtgcggcctcctccggcgaggacaccgccgcagcagccgaccaggagccagccccggcggccaccaagacggccaccgcggacgacgacttcgaggagcgcgtgctacggatcaagtcccgcgtcgggcccaagaagcgcggcgcgcgcaagaagaaggccgcggcgtccgcgtcagccagcgccgtgacgctcccgcccgtgccgctgcgggagccccggtcggcgctcggcgcgcccgtcgagctcggcttcaccgcgtacagcgagcggctcaacggcgcgctggccgcgctggggctcgccgcggtgctgctcgtggagctgggctccgggcaggccctggtgaagtaccaccagccggccacgctgttcctgcaggcgtacaccgtcgctgcggccgccgcgctgttcgtcaagtacgagaaggagcggatcagcacgtggccggggccgccggcaaagtgagataaatggcgttgtctcggtcgcggatctttacttgtacttttacctcttgatgatgtgcactgcacggatattatatgtgttcgttgtgagaactgggaaattcgaggagagaagaagagcttgattttttacagtccttttaacgcccatagtttcatttcatttctttcgtcacattaggcaggtccagcctccagcggcaggcggtttggtcggttcgagtgttttgctgcgttcgtcggttatcacggagaatatccagacagttgttggttcgagaacatttcgtttgtgaattttggtgttcggaagattgtgtaaagctttgagaagcaag

SEQ ID NO: 156385 - DNA, 724 bp, Zea Mays
ttgtacccaagacaaatgtatgcatatatacgtacggcgttcgcttgcacttgtcatatatacaggtcaatgccagcaaaaatctacagcgaacaggacgtgacagaaaaagaaacaaagtcacgtacggagtacacggctctgcgctctgctatactacatttcccaatgattttgtgccaatggctctcattgaagactactggatgtctgtgataaatcccattaacaccctgatcataggaagccaggtgttggctcgtcttcgaggtcatcgaactcccacccactgatctcgtcggccttgtattcctggtcgaacttggccagctccgattcggactctgatggcagtcgtgtcctgagctgagccgcgataggagagtcgcttctcgaatggctaggtgacgcggacaccttcaaggaaggggatcgtttctttttctctgcctgttctttaatctcaatttgaagcactggacgtggcacggattcgaactcgatccgcagattgtcaatggaggtaaacagattttttacctcagtgtcatcccttctgcacaaactataagcacagatctggctgtgtaaaggacggcatgcaaattatgtagcctgcgctcgaaagatagaacaagagagatcctgaaaagcaactacctcgttttatagtaatcctggtttgaagaatatattgctctgatactatcaaccaaactgaatg

SEQ ID NO: 156386 - DNA, 2643 bp, Zea Mays
tcccccgtcacaaacacacacactgcggagaggaccgcaacgcgagcccaccccaggccgaacgccgagagcgatccctcccgtccgtgttgccctttgcgctccgccttcctcctcttccaccccgtcacttccgtgccatccgcggctcgcctccccaccccccattcccgccgccccatgcctccggctcgaccgtagccgcccgacgacgaccgccatggccgccgattccggcagcgggatggccggcctggagatcgggccggcgtcgccgggctcggagggggcgccatcgccggcgtcgagcgtgggcgcctccgtggagcggcccgagcagtcgtcgccgcgggtgaccaagcgcccaggcctcgtcatgtccttctccgggaagcggctggaccagtcgccggccgggtcgccgtcgccgtcgccgtcgctgtcgcgcccggtgctggtcatgtcccactccagcaaccgcctcgaccagtcgcccgcgcgcccggtgctcgtcatgtcccgctccagcaaccggctggaccagtcctccccggcgtcgtcgccggcgccagtgaaggcgcccgtgctggtcatgtcaggctccagcaatcggcttgacagctcgcatccgtcgccgtcgccgtcgccgtcgccgaccgccgcggccgccgctgcgccggttctggtgctctccaactccggcaagcggatggaccaggtggggcggaagaagtacgtcaagcaggtgacgggccgccacaacgatacggagctccacctcgccgcgcagcgcggggacctcgaggccgtgcgccagatcatcgccgagattgacgcccaaatgaccggcaccggcgaggagtttgacaacgaggtcgccgagatccgcgccgctatagtgaacgaggccaacgagatggaggcgaccgcgctgctcatcgccgccgagaaggggtttcttgacatcgtcgtcgagctgctcaagcactccgacaaggacagcctcaccaggaagaacaagtccggattcgatgctctgcacgtcgctgcaaaagagggccacagagatattgtcaaggtacttctggaccatgatccatcccttgggaaaacgtttggccaatcgaatgtgactcctctcataactgcggcgattagaggccacactgaggtggtgaacctactgctggagcgagtttctgggttggttgagttatcaaaagcgaatggaaagaatgccttgcactttgctgcccggcaggggcatgtggaaatcgtgaaggctttgctagatgctgatacccagcttgctcggaggactgataagaaaggccagactgctctacacatggcagtaaaaggtactaacccggaagttgttcaagcgcttgtgaatgccgatccggcaatagtcatgctacctgacagaaatggcaacttagctctgcatgttgcaaccagaaagaaaagatcagagattgtaaacgtgcttctgcttctcccggatatgaacgtgaatgcgttgactagggaccggaagaccgcattcgacatcgccgagggcctcccactatcagaggagtcccaagaaataaaggagtgcttgtcccgcgctggcgcggtcagagcaaatgagctgaatcagcctcgggatgagctcagaaaaacagttacagagatcaagaaggacgtgcatactcagcttgagcaggcgagaaaaaccaacaagaatgtctacggcatcgcgaaggagctaaggaaactccacagggagggcatcaacaacgcgacgaattcagtcacggtcgtggcggtgctcttcgccacagtggcgttcgccgcaatcttcacggtgcccggcggcaacaccgacgacggcgtagcggtggccgtgcacgcgacatccttcaaggtgttcttcatcttcaacgccgtcgccctcttcacgtcgctagcggtggtggtggtccagataacggtggtcaggggcgagaccaaggcggagaggcgggtggtgggggtcatcaacaagctgatgtggctggcctcggtgtgcacgacggtcgcgttcatatcctcctcgtacatcgtggtggggcggcacttcaagtgggcggcgctcctggtgaccctgatcggcggggtgatcatggccggcgtgctcggcacgatgacgtactacgtggtgaagtccaagcgcgtgcgcaagatcaggaagaaggtgaagtcgacgaggaggagcggctcgaactcgtggcaccacaactcggagctctcggattcggaggtcgaccgcatctacgccatatgagggggccggtgcagctggttccttccttcagaccgtctggccgtgatgcagcacggatgcatactgtaaacatcgaatcacggcccttgagatggagatgcgctagggggtggttaactctgtacattccaataagctggtgtaaactgccattccccttgttcatggatcgggcgggaggcgactgtcttggctgtatactactcacagatagatttgtcatcaggttatatatagtgtattatatatgtgcagcctgctgtgtgctccttgtgcgtgaccttcatcagattcatgtcaggccgctgctgagttcgaatggcagctgcatg

SEQ ID NO: 156387 - DNA, 1162 bp, Zea Mays
tcaaaccactctactcaagatgtacagtacccacggctggctctcgtcataccctgcacggctcctatataatcctggcatatcgcagcgacatgcacagcaacagcaagccccacagtcctcgctcttctccacctacgctacgcgccttggtgccttgcgagacatggccaagaacgcggtgcaaaccgtcagggcggtgctgtgcctggtgctcgctcttgctgtggcgaactgcgcattcgctggtcgtttcctcgacgacgaacaggctgcggctcccctgccggctgaccccctgcccgccccgacggatcccccgacagacccagccgtggcgccagcgggtgcgggtgcgggtgccgccgcgacgggcaacgcaggagccgccagcgaccacccgctgacgttcttcatgcacgacatcctcggcggctcgcagccgtcggggcgcatcgtgaccggcgtggtggcgagcgcggcagccaacgggcagctcccgttcgcgcgccccaacaccaacatcttcccgatccagggggcggtgccgcttccgcaaggcgccagcagcctcatcaacggcaacaacgcgccctacgtcgcgggcctcggcggcacgtcctccgccgtcgtccagaacaacggcaaccccgccaacggaggcaacaagaacatccccttcgtcaacgccggcgacctgccgtccggcgccacgctccagaacctcctcttcggcacgaccacggtcatcgacgacgagctcaccgaggggcacgagctcggcgcgggggtcgtcggtagggcgcagggcttctacgtcgccagctcgcaggacggcaccagcaagaccatcgtgcttaccgccatgttcgagggccccgaggcaccgcatggcggcgacacgctcagcttcttcggggtccaccgcatggcggcgccggagtcccacatcgccgtcatcggaggcaccggcaagtacgagaacgccaagggcttcgccgccatccagacgctgcatcctggcgacgagcacaccacagacggcgtcgagactctactccagttcaacgttcacctcatataagccgctccattaccattattatatcgaccattcgcacttccagcttgtccttgcagcagtttcgtgcaagggatttgc

SEQ ID NO: 156388 - DNA, 3674 bp, Zea Mays
cgtcctccagtcctccctccctcccactcaaaaatcgagttcccgtttagctctcccagtccacctccctcccccctctccgtcccaagtcctccccgctcgtgcgcggtggatgcgagcgatttgctttgtcgccgcatcttatcgggcttaggagcggagatgagcatggcaggcattgcgcgcggcagatcgcgatggagacagggcgacgggtcgtcgaatcggaatgcggcacactccactgttcctaaccccgatcaccaaggggttgtgtcctctaggaagcaagcaacttaccctgggatgctatctgattcggtgtttgctacagtagacaggcaaagtaaaacaagaaaagccattgctgtaccaatgaaaatactgatagaagaagaattttcaaatgatgtcaattctaggcatatttcaccaggtgctgtaggaaggctcatgggtcttgattcgttgccctcatctggaatccataataagcatagacataccaaaagtcatgcaccaaagacttcacctagtagttttcatggtcgaactggtttgcatgacattccacacaggaggagtgtagataccattaatgtttttgaaggtatggaagccacaaaaacaaatatgcaccggagtccaagatctaaaattggaagtacaacttccagatcagacaaggttgttagtgctgatatcgatttcataaggcagaaatttatggatgctaagcgtctttctattgatgaatcccttcacatatcagaagaatttaatgagacacttgatgccctggtatctaacagtgaccttttgttggattttcttcaaaattttgatcctgctgtcataagggacctacataatcatggttctccatcctctaccgcaaactgcatcacaatattgaagccatctcgaagaaatcaatttattgacatggacaatatttatccgcaagagaaaggaaccgagagcatcttcaacgagcaaatggaagggaaacattctttatggaagccatattctaatgtgcccttgcagtccctaaaagaagattcttgttcatcaaggcagaaactgtcaaggtccagtcaccaagaaaatactggaaaacgtggctcccccacccggattgttgtcttgaagccaaatcttgagaaacctcatgatattgaagaagcccttcccctacatcataaaatatcccattctgattatagaaggcataaagaatgtccggaggttgatagatggactccaaatactgaagattacatgtgtcaggtgccccttggagattctgaaacattaagtcgtatggggaagggatctagagaaattgctagggagatcaccaaacagatgagagctgctaggggtggaagtaggaaacattctgtcaaaccggagactagaactcttgcttcagatgaaaggtcacagtttcagtcatctgttactagacccaagactccagagtcaattcatagatattctgagtcatgtgatgcttgggcttcttcaagtctcaactctttgccaacatattcgactgaaacatcagaaagcaaggaagcaaagaaacacctctctaacagatggaagaagacccgtcagtgtcagcatcaagaaactgataatgacagcttcaacacgcttggggatatgcttgctctctctgatcagaatgcatcaaatgttgctacccataaaatgacatgcaggaaatgtccaaagtcagaagtgcagagtgatagaatacaaagctcatatcctcttggcatcagcaccaatgatggttggaaagacacaactactagtaaattgacaaggtccaagtctcttccaccatccttcattcgtggagttcaaaagtcaaacaatagaaaaagaagcggcagcgttacatacaatgagttttcaatgcttaaagatgttcttaaggttggaccccactattctgaatatgcatatcgtagcaggcaaagacgatctctaagtagagattctacaattcatggtgatgaatctgatccgatgtccacagataatgaagaaaatatggtagttgaacgtgagatacatgtaaattatgaggaaccaattaatggtactgctgtgacatatacatctgggcagtcacaacatcctacaaatcttgaccatgaactagatgcaataggtgtactagataccagttctgcagtccctttcagtaataaaaagtctctttctcctgctgaacaggaccagcaagtgcttaagatgaccacaacagcactagataactgctttcttgtgcctaatctcgatgatctgatgcctaagcatgagcaaattgaataccatcaagctgatgattacccagccacttatgatcctcatatagcatcagattctcctgaggagaataatcatcacctaggggatgtcagtgaaaccctttgtattctacctgatgtattagaatcgccagcgaactccaacaaagatgaccagcaaagtccaatgtctgttcttgaatcttccatggacggagaagatgtttactctggggattttgagaagatcagtgcagatctccaagagctcagattgcaacttgggcttctgaagagggagactacagacactagagatggcagcgagctttctatattgagtgatgatgagacagcacgtcgatcacttcctgagactggggaatcccatgcttttaggaatacggaagaaagggacttctcctacgtgtttgatatgcttgctgctctgggcatccacgcggccaacgaggatgacctccttgacaactgctacttactggagtgctctgcaggccttgatttatacgatgacctcgaacagaagtacgacagcctcattttatggcctgtgcatgagaggaagctcttgtttgatatcacgaatgctgttcttggggacatgatcacctccgtgatgaacggctgctcgaagggactgatggcgaggtgctcgcctggatggaatcgggaagagtttgctgagctcgtgtggcaaagggtggtgcagctccggcaagagatagagttcaaccaggaagccctgctgttgagcgtagagtgggctggctctgaagatggcgccagtctggtcgggcgcgatatcgggaatatgttgcaagatgatctcgtacaggaaattatagctgactttctgggggcaactaaatccgccaagctccgtggctagaattgccagtgtttgcatccgaggccattgcaagcatatgcatatggattggtcgctggtgaactctagtggacgatgagccttcgatgaattgcttaaggaggggactgtaattcaaggaattcacctcatggctactgaagacatgagctaagatggcttaggtgatggtggggcatcaaacaagcagtgtcgaagtttgacctagttgtgtcatgctcgtcagctcatcaccattggccccgaactcagcaatagcgtacaactggatgatttcccccctctgaactttgaaaatattttttttcattaggttatcataatgctggaatatagatgcacaattttggtgtaaaataatctctggcggattttagtttgtttatcatgggatgcaataaggacagtgtcagttgagacatctttatctgcca

SEQ ID NO: 156389 - DNA, 1783 bp, Zea Mays
ctcctccagtcctcttgtgaagtcagagcgatgactcgagtccccgcccgaactggtcgtctccttcgccgggctgcccccaccacgcgaaggccgggtttagcatcgccctgctttgtttagctgcggttataaccgccggacgccggtgatggccacgtaatccggtgtccgctcgttaaccacaaacgtccgagcgtcacctggcgtcggctgtctggccgcgcggactggagcaatcaaaatctctcggccggcccccatacgcgccgcggacacccacccaccaccaccacacgcagtgacgcagcccgcccctctctctctctctctcggttcctgcgcacgcacacacgcacgtttccagttcgaccgagccagagccccgccccgggcagtttccattcgctgtcgcgctcctcctcctcctcctgcacatcccctccccccgaattcgagccggaggaccgaagagtagatctgcgccgggcgaccagaggatggccgtcaactgggagctgcagggctgctgccaccgcgaccagaggatcttcatcgccgccgttggagtctccaccgtcgtcatcctcctcctctggaggacgttcctgctcacgccgttcaagctcatcaccgtcttcctccacgagaccagccacgcgctcgcctgcaagctcacctgcggcgatgtagaaggcatgcaggtccatgcgaatgagggtggcgttactcaaactcggggtggcatatattggataatcttgcccgctggatatctgggttcatcattttggggaatggtgttcatacttgcatccacaaatctcctcactacaagaattgcagcgggttgtttcatacttgcactgtttattgtcctttttgttgcagacaattggtttcttcgctggctctgccttggattcattgtattcattgctgttgtttgggtcatacaagaatttacatctttccatattctgaaatatgtgatcttattcataggtgtgatgaacagcttattttcagtttatgatatttatgacgacttgatatcccgaagagttaatacaagtgatgctgagaagtttgctgaaatatgcccttgcccttgcaatggttttgcatggggtgttatatggggattcatctcgtttatcttcctctgcgcttcaatataccttggactggtcatattgtcttgagggttccaacctcgcgcacgccgttttgatctgacaaccaactctggttggctttttccagagttctccttgctctagattttgggttcaaacttacattgttctggcggctgtacagtatacatgtagggtaaacatgtacatccatcgtggagttaattcggcggggattgttcatgtgattcttcgattttagcggttctatagataccattgctcatttatggtctgtagcctcattgctcatttgaccaatttgaaatcgtattcagaaacgccatattcttcgatttacaggtacatgtacaccatattacctttgccccattgctcatttgaccaattgattgaaatcgtattcagaaacgcaacgctgtggcattttatctggcaccgtttttgcaacgggatgattttgctaccgctagcaggagttgagttagtgcccgctgcggtttagtttatcctggtactttgagaggccctctaatccactgcttttgacggatggaactgtctcgtggttaactaactgtagatcttgtcgccatgttggttcgaagcaaaaaaaaaaaaaa

SEQ ID NO: 156390 - DNA, 1907 bp, Zea Mays
ctcctccagtcctcttgtgaagtcagagcgatgactcgagtccccgcccgaactggtcgtctccttcgccgggctgcccccaccacgcgaaggccgggtttagcatcgccctgctttgtttagctgcggttataaccgccggacgccggtgatggccacgtaatccggtgtccgctcgttaaccacaaacgtccgagcgtcacctggcgtcggctgtctggccgcgcggactggagcaatcaaaatctctcggccggcccccatacgcgccgcggacacccacccaccaccaccacacgcagtgacgcagcccgcccctctctctctctctctcggttcctgcgcacgcacacacgcacgtttccagttcgaccgagccagagccccgccccgggcagtttccattcgctgtcgcgctcctcctcctcctcctgcacatcccctccccccgaattcgagccggaggaccgaagagtagatctgcgccgggcgaccagaggatggccgtcaactgggagctgcagggctgctgccaccgcgaccagaggatcttcatcgccgccgttggagtctccaccgtcgtcatcctcctcctctggaggacgttcctgctcacgccgttcaagctcatcaccgtcttcctccacgagaccagccacgcgctcgcctgcaagctcacctgcggcgatgtagaaggcatgcaggtccatgcgaatgagggtggcgttactcaaactcggggtggcatatattggataatcttgcccgctggatatctgggttcatcattttggggaatggtgttcatacttgcatccacaaatctcctcactacaagaattgcagcgggttgtttcatacttgcactgtttattgtcctttttgttgcagacaatgtaagttcagtattgtttatttatttattttgcaacttctgatttcatttgtcttttccacttgcgcatacagtaaccattatcatctggctaagtgttattatctcttgtttgaattgtgcagtggtttcttcgctggctctgccttggattcattgtattcattgctgttgtttgggtcatacaagaatttacatctttccatattctgaaatatgtgatcttattcataggtgtgatgaacagcttattttcagtttatgatatttatgacgacttgatatcccgaagagttaatacaagtgatgctgagaagtttgctgaaatatgcccttgcccttgcaatggttttgcatggggtgttatatggggattcatctcgtttatcttcctctgcgcttcaatataccttggactggtcatattgtcttgagggttccaacctcgcgcacgccgttttgatctgacaaccaactctggttggctttttccagagttctccttgctctagattttgggttcaaacttacattgttctggcggctgtacagtatacatgtagggtaaacatgtacatccatcgtggagttaattcggcggggattgttcatgtgattcttcgattttagcggttctatagataccattgctcatttatggtctgtagcctcattgctcatttgaccaatttgaaatcgtattcagaaacgccatattcttcgatttacaggtacatgtacaccatattacctttgccccattgctcatttgaccaattgattgaaatcgtattcagaaacgcaacgctgtggcattttatctggcaccgtttttgcaacgggatgattttgctaccgctagcaggagttgagttagtgcccgctgcggtttagtttatcctggtactttgagaggccctctaatccactgcttttgacggatggaactgtctcgtggttaactaactgtagatcttgtcgccatgttggttcgaagcaaaaaaaaaaaaaa

SEQ ID NO: 156391 - DNA, 246 bp, Zea Mays
atggctcccggagccggagacgactctgatcccgcctcttatatccacacggtgcagcacctgatagagaggtgcatgacgttcgggatgagcatggaggagtgcatggaggcgctggcgaagcgcgccgacgtccaacccgtggtcacctccacagtgtggaaggagctggagaaggagaacaaggagttcttcgacaagtacaggcagtggatctcggagaagagaagcgggagtacctcctag

SEQ ID NO: 156392 - DNA, 921 bp, Zea Mays
atgccgcagcggcattcgaaaaacaacaacgacctcgccttcttcacgtacgaggagaagcggaagctcgggtacggcacgcagcgggagcgcctgggaaaggactccatcaagcccttcgacgcctgctgcctctgcctcaagccgctcatcggcccgctctgctgccccaagggccacacattctgtaaggagtgcatcctcgagtgcctcctctcccagaagaaggacatcaagcgcaagctagcagcacatgaggcccagaaaaagcaggagaaagaagaggaggaagagaagctaattctgcagaaggctaaggagttggatgcctttgatcagcagaatcatggagctgttccccagtaccatgatcgcagtggttcccaatacaagaatgggtttcatggagcaaatagtgtgaaggtcacttcttttgaagaggaagcccttcgcaatatgaaggcattctggctcccttcagctactcctgaagctacggtcaaggtagacttgccctccaccgacactgtttgcccggaggggcaggagaagcttaagttgaaatcgctcttccctatctcgttcacagaggaaactgctgatcagaagagcagcaaggcaggaaactcctgtagctacatgtgccctagttgcaagtccactctcacaaataccatgtcccttgtggcggtgagcacctgtggccatgtcttctgcaagaaatgttccgacaagtttctagtgaaggataaagcttgcttggagtgcagcaaaccattcagggagaggaatctggttccattggagaaaggaggaactgggtttgctgcacatgatgaacgcctggaggcaagagatttcaagtatttgggtagtggctctgggttagggctagtgaagcctgcaccaaaaacttactaa

SEQ ID NO: 156393 - DNA, 574 bp, Zea Mays
cgccaccgctttgatcgacgcaggaaataggggtgaaaacgggcggatacggacggatagtagatcatcatgtatcctaccctaatgtattttaaatggattcgggagcagatacagatagttagaaatgggacggatacggatacagggaccggatatttattcgggcggataagtgggatacgaatattatttggtcggatatcggatatttgccggataatgcattaatttcttatcataaaatattcttgttcggccatgaattataaataaattatcaaggctaataaacaatttataagaagataatcttaagttcccacataaaaatggtaaagtgaagtattgattatgttgaaacttggatacttaagagtgatttcacgtgtaactcatgcaacaagtggaaataaaatagaagaaacgttgacatcttgtggattttatggtcccattatttttaatgactatgtggccatatgttgtacctccgtataatttcatggatttctgaggctatttgtgcattattattttttctacataaaatcatcaaaatataattaaattc

SEQ ID NO: 156394 - DNA, 845 bp, Zea Mays
ttttacctggaagattgttttttttttgtaaaacaaggcatttcttcttccattttaaatagcaaagggcaacttgcagcagggcacatacacacacaagcacattcgacccatctacagcctacgcatcaccgcatactggtatcaaggtcctgctaaacatcagatcactccagacagtcagtctatgccttcttgggggacttggcggccttcttgggcgactttgcctccttgctccccacactggacgccttctccgccgtcttcttgggcagcagaacagggttgatattggggagcacaccgccgtgagcgatagtcacgccgcccaacagcttcccaagctcctcgtcgttccggatcgccagaagcacgtggcgcggaataatgcgagtcttcttgttgtccctggcagcattaccggcgagctccagaacctggtcaaacaaggaagcaaaacgaatcgggacgcaagaattaatactccgtcgccaaatcagtacaaacaaagaactgggctcaaattgcagtacctcagcggcgaggtattcgaggacagcggcgaggtagacgggggcgccggtgccgacacgctgcgcgtagcggcccttcttcaagtagcgcccgatgcggccgacggggaactggagcccggccttcacggacctcgacaccgacttcttccttggcccgccgaccttgcgcccggccgctcccttcttccccttaccccctgctccggtgccggtggagtccatggccgtatctcggcttcgattggcttgtcggggacgaggagaaagtgctcaggagttggaacgaatgcggaattgcgagttgat

SEQ ID NO: 156395 - DNA, 1101 bp, Zea Mays
tcctctcgcggcggcccaaatccaacgcctgcagctcgcgccaagtcattgatccgcgtccacccatctccaccaatctccttccatcatgcccttctacaaaagctaccaccccctttttgcacaccaagaaaagcctccattcccgagtctccagccaaccgcatccagtccacccccatccccctcgaccccgacaaacccgacccgatggcgcccaaggccgagaagaagccagcggagaagaagccggcggccgaggagaaggcggagaagacgaccgcaggtaagaagcccaagtccgagaagcgcctgccggcctcgaagtcctccggcaaggagggcggcgagaagaaggggaagaagaaggccaagaagagcgtggagacctacaaaatctacatcttcaaggtcctgaagcaggtgcaccccgacatcggcatctcctccaaggccatgtccatcatgaactccttcatcaacgacatattcgagaagctcgccggcgaggccgccaagctcgcgcggtacaacaagaagcccaccatcacctcccgcgagatccagacctccgtgcgcctcgtcctcccaggagagctcgccaaacatgccgtctccgagggaaccaaggccgtcaccaagttcaccagcaattgagcagcctgcagcgtccacggatttgttaggtctccccttcttacaagggttcttcgtcgtgtcctctacccctccccgcctatgtatgtgctgtgaaatcgttgatgttctcgtcgggtgaacaaaggccagtagctagcttgcctgcttcataaatcgtgccggattgtaatgggcctcttagatttgacgcccctattttggaatatagttgtatcggtgccttccctgcttgctaattttcttctgccctggtaatttgggatctaagattttgaccgggcagtggagaaccgatgaagatacagggtcatgaggtcgaaagctcatgggtttgtttcagtctcaggttcttcggcatggatatatttatgagcggtaactatgtattgcagccatatggttcaccatgtgatgaaatgatgattccatttgcgccacaac

SEQ ID NO: 156396 - DNA, 145 bp, Zea Mays
cccgcccctcccccggcaagcgccccgcccccttccagccaaggccgccggcccacaccgccaaggccgccgccccaacgtcgagccccggccgcgccccatccccgccggcgcaccaagccccgcccctcccggcgcccgcgcc

SEQ ID NO: 156397 - DNA, 2459 bp, Zea Mays
atgaacgggcggccagccagcgcgcgaacggtttcccgcacccgacgcgctctccgcagattaaaaggcggcggcggcctacctgtggcgtctcttggccctagtcctcgcagaaaccgtcgtgtcgccgaaaccagctcgccggtttcgcctccccaccgttccttgtctcgcgcccctctcggctccagcctccaggtctgcttgttgctatctttcaatatgccggcgtcggagatggaagcgcctgcgtccgcgcacgcctcggcggcggccgctgatgacagccaggaggactctgcgcccacggccgcggtggcggcggccgctgatgaggcgcagccggccgcagctgcagtacccgcgctgtacgtgggcgatctgcacgaggacgtggcggaagaacacctcttcgaagctttcagcaagatcggcactgtcacgtccgtgcgtgtttgccgtgacaacgccacaagcagatctctccgatatggatacgtgaattatttctctcgcgccgacgctgtggtggctcttgataagttgaatcatagcttggttttggataagcccataagggtaatgtggtccaatcgggatccagatgcccggagaagtggcgttggtaacatttttgttaagaaccttagtagttctgttgacaatgccagccttcaagaattgttctccaagtttggagacgttttgtcatgcaaagttgcaaaaaatgaggatgggaccagtagaggatatgggtttgttcaatttacatcacaggagtcagcagatgaagcaattgggaacctcaatggctcccttttcaatgacagaaaattgcatgtagctacgttcattaagaaaagtgaacgatctgcaaataatgatgataagtttactaacttatatatgaagcatctagatgatgacataacagaggaacttgttaaattgaagttctctcagtttggttcgatagtcagcgtgaagattatgaagagacccgatgggtcatctttggggtttgggtttgtcagtttccaaaaccctgagagtgctattaaagcacagagcaccatgaatgggatgctacttggatcaaaagccttatacgtggcgagggctcaaaagaaggaggaaaggaaacaatatttgcaacgcttacatgaggaaaagagaaacgaaataatgactaggtgcaatgaatcaaatgtatatataaaaaacattcatgacgaggttgatgatgatgctcttcgtgctcgctttgttgaatttggtaatatcacatcagcaaaagtcatgcgtgatgacaagggaatcagtagaggctttggatttgtatgctatagtacccctgaggaggcaaagagcgctgtaaacaacatgcgaggtgttatgttttttgggaaaccattgtatgttgctattttccaaagaaaagaggagagaaaagccaagttgcagcaacatttcgctcagcttgcaagaatggttggacctgcgaactctatgatccccactggatatccacaagtttattttgcccatccaagtacccatatccctcaaggtcctccaagacatggttttgtgtatccacccatgggccttagtcatgaatggagaccaagtatgttccccccagcaccaaatctccagcaaatacattcacccgtgatgccaaattcgccaaggcattacagaagcaaccgaggaaggatgggtgggaatatgatgcctcttcctcatgcagttcatacaatgaactatatgacacatccacagccagctaaagaattcatgtctttgcctcgacagcgattcaatcatccgaagtacttctcaaatgatgttatggccaacagcttggccatccatcaaagtgacccggtttcaacaatgaatgattcttttagcaactatttggcctccgctccacccgcggaacaaaagaacttgcttgggaacaggctctatcctcttgttgagaggcatcagcccgaactcgcgagcaaaatcactgggatgctcttggagcttgacaactctgaagtggtcacgttgctttgctcgtcggagatgttgtcggttaaggtcgacgagtgtgtccagctgttgcaagcaaccaagcctaaggctgaggatcatgaggcactgcacccaggattcatgctcgagcctcggcctcctagtgtaaatgccagttgatgaggttctgattgcgcggatgagcttctggatgcgcttgtgtttagggatatggtaacaagctagtcgctagctgctgcgttcgttctctcctagtttgcgaagttttggtgtttggattaatctactgagccgttattgctttctatatatagaacttaatagtaataaggactatatatattcagctagaaactttttatctggacatgttatatgaatgtatgttagaacctttattcctatccaac

SEQ ID NO: 156398 - DNA, 318 bp, Zea Mays
atggctggcctcaggggcatcggctacaatttcgattactatgagtaccacgccttcgtccatggaagcgacaaggtccacgtcgtgagagccctcaagaggctggacctggacgactgctttgaggggatcatctgcttcaagaccctgaacccgtcgtgcccgccgcagggagatctggagcccgagatcttcgacatcgccgcccacttcgctcgctcgggcaccgccgacgagctgcccgagacccctgtcctgtgcaaacccaacatcgacgctatggaggagtcgcttaggatcgccaacgtttgcgactga

SEQ ID NO: 156399 - DNA, 3466 bp, Zea Mays
ccaacttcccgtcacgccccgtccacgttacctacctgagctgtgggcagtagtggcctgtgtgggacgtatgagctgcgagaagacgcctacttgtttcccgtcactccccgtccacgttagctgcctgagtcgtggggcgtgtgagctccggaccgggcacccgcacgaccgcgactccggcagcgagagcacagaagacgacggcaagactgagcaacgggccaacggcgcgtgctggacgcggacggacggaacatacggttgcgtccacgcgccaaaagtggtttggctgtctccaactggagcctatatcaacaacaggagactacatgttttttgattacatagattatatgtaatattttttcgtttatagtctctaatagtatctttttaaatattgttctaaatacagtacagtgtacactctttcgtcctcatatatagagtttcttttcttgttatctattttttataatctagataatatattacataaaaaatatttgagagtatgacgtgtttataaaaatttagagtaaaacatatttttaatataaatatttcatatgtagaacattgttggaaaataatattttttaaaaagaaactgtaaaagaaacagaggaaacagaataggcattgcccgggccgcgtttataagtcgccagaccctccctccccgatctcgcactctcctcccccgctctcgacttcccacatcccctgcggccccgccccccgactcttctcgtcgcggcgcgcccaatcggctcggtggcaggctagtgcaccggctcggctcgggtccggttctaccgccaacgcgggccgcggcgctcccggatctcggtctagtcagagagttagcagacaaagatggcgacttatgagcccaagaacattctcataactggtgctgctggtttcattgcatcgcatgtcgccaaccgtctggtcaggaactatccccaatacaagatcgttgtccttgacaagattgactactgctccaacctaaagaacctcaatccttcacggtcttcaccaaatttcaaatttgtcaagggtgatattgcaagtgctgacctggtgaattaccttctgatcaccgagtcaattgacaccatcatgcactttgctgctcagacgcatgttgataattcttttggcaattcatttgagttcacaaaaaacaatatatatggcacccatgttcttcttgaggcttgcaaggttactggtcagatcaggaggtttattcatgtcagtaccgacgaggtatatggtgaaactgatgaagatgctgtggttggtaaccatgaggcctcacagctgcttccaacaaatccatattcagctacaaaggctggggctgaaatgcttgtgatggcatacggaaggtcttatggtcttcctgtgattaccactcgtggcaacaatgtgtatgggccaaatcaatttcctgagaaactcattcccaaattcattcttttggccatgcaaggtctgcctcttccaattcatggagatggctccaacgtcaggagctacctgtactgtgaggatgtggccgaagcttttgaggtggtccttcacaaaggagaagttggacatgtgtataatattggtactgtgaaggagaggagggtgattgatgtggccaaggacatatgcaagctctttggcttggatactgagaaagtcatcaggtttgttgaaaacaggccattcaatgaccagaggtacttcttagatgatcagaagctaaagagattgggatgggcagagcgcacaccatgggaagagggtttgaagaagacgatggagtggtacaccaccaatcctgattactggggagatgtcactggtgcgctgcttcctcatccaaggatgttgatgactcctggagttgaaaggcataactgggctgaagaaatcaagtctctggcttcttcgccagctgaagctagtacaatagctccagcaaccagtaccaaaagcatctctgatgcccctcagaagccttcctacaggtttttaatctatggtaggactggatggattggtggcctccttggaaagatttgtgaaaagcaagggataccatatgagtatgggaaaggacgcttggaggagcgctctcagctgttggaggacattagaaatgtgaagccaactcatgttttcaatgctgccggagtcactgggagaccaaatgttgactggtgcgagacccataaacaggacactatccgcaccaatgttgtaggcactttgaatctagctgatgtctgtcgcaagcagggtctgctcatgattaattatgctacaggctgtatatttgagtatgatgctaagcaccctgaagggtctggtattggctttaaagaggaagacacgcccaactttattggttccttttattccaaaacaaaagcaatggtggaagagctattgaaggagtatgataatgtctgtactcttagggtcaggatgcctatatcatcagatctaagcaacccccgtaatttcatcacaaagatagctcgttacgacaaggtggtgaacattcccaacagcatgacaatcttggatgagcttctgcctatctccattgagatggcgaaacgggactgcaggggcatatggaacttcaccaaccctggcgctgtaagccacaacgagattctagagatgtacaagaaatacatcaatcctgatttcaagtggaccaacttcacactcgaagagcaggccaaggtgatagtcgcgcctagaagcaacaacgagatggacacgtcgaaactgaaggctgagttccctcagcttctgtccatcaaggattctttgatcaagtacgtctttgagcccaacaggaaggttcctgttaattgaggatttacgttgcgtggatgcagaggttatttgtgttggttattggactctaaattagctaatgttgcaccgtggtgcgtactagttgtgttcgattcttttgggacaatagcaagcatacctctttctggtcgtctattatacacgcaatctacaaacaggtagatatttagatgttcttttagtggctgatacgaaggcttggcctggtgaagtggtgagagctttcttgctgagccactaggtcatgctttcgaagcagtctctccgtgtttatggtatagtggctgatatgctgagacacggttatcgatgaacactacgaattgtcttaatatattatatatattaactaccaagagcagttgtacatggtcttgtaaatttttatcccttcgttgcagttggctccaattttcctgttcttgttttttctatgccattttcctgttcttgttgtttctatgccaaacgtagcatcaaattttcagttggttttgtgttgctcgtcaatcctcaatggtgtatgctgcagtgttgatggtgcaattggtttctgttgata

SEQ ID NO: 156400 - DNA, 2624 bp, Zea Mays
agtcgccagaccctccctccccgatctcgcactctcctcccccgctctcgacttcccacatcccctgcggccccgccccccgactcttctcgtcgcggcgcgcccaatcggctcggtggcaggctagtgcaccggctcggctcgggtccggttctaccgccaacgcgggccgcggcgctcccggatctcggtctaagagttagcagacaaagatggcgacttatgagcccaagaacattctcataactggtgctgctggtttcattgcatcgcatgtcgccaaccgtctggtcaggaactatccccaatacaagatcgttgtccttgacaagattgactactgctccaacctaaagaacctcaatccttcacggtcttcaccaaatttcaaatttgtcaagggtgatattgcaagtgctgacctggtgaattaccttctgatcaccgagtcaattgacaccatcatgcactttgctgctcagacgcatgttgataattcttttggcaattcatttgagttcacaaaaaacaatatatatggcacccatgttcttcttgaggcttgcaaggttactggtcagatcaggaggtttattcatgtcagtaccgacgaggtatatggtgaaactgatgaagatgctgtggttggtaaccatgaggcctcacagctgcttccaacaaatccatattcagctacaaaggctggggctgaaatgcttgtgatggcatacggaaggtcttatggtcttcctgtgattaccactcgtggcaacaatgtgtatgggccaaatcaatttcctgagaaactcattcccaaattcattcttttggccatgcaaggtctgcctcttccaattcatggagatggctccaacgtcaggagctacctgtactgtgaggatgtggccgaagcttttgaggtggtccttcacaaaggagaagttggacatgtgtataatattggtactgtgaaggagaggagggtgattgatgtggccaaggacatatgcaagctctttggcttggatactgagaaagtcatcaggtttgttgaaaacaggccattcaatgaccagaggtacttcttagatgatcagaagctaaagagattgggatgggcagagcgcacaccatgggaagagggtttgaagaagacgatggagtggtacaccaccaatcctgattactggggagatgtcactggtgcgctgcttcctcatccaaggatgttgatgactcctggagttgaaaggcataactgggctgaagaaatcaagtctctggcttcttcgccagctgaagctagtacaatagctccagcaaccagtaccaaaagcatctctgatgcccctcagaagccttcctacaggtttttaatctatggtaggactggatggattggtggcctccttggaaagatttgtgaaaagcaagggataccatatgagtatgggaaaggacgcttggaggagcgctctcagctgttggaggacattagaaatgtgaagccaactcatgttttcaatgctgccggagtcactgggagaccaaatgttgactggtgcgagacccataaacaggacactatccgcaccaatgttgtaggcactttgaatctagctgatgtctgtcgcaagcagggtctgctcatgattaattatgctacaggctgtatatttgagtatgatgctaagcaccctgaagggtctggtattggctttaaagaggaagacacgcccaactttattggttccttttattccaaaacaaaagcaatggtggaagagctattgaaggagtatgataatgtctgtactcttagggtcaggatgcctatatcatcagatctaagcaacccccgtaatttcatcacaaagatagctcgttacgacaaggtggtgaacattcccaacagcatgacaatcttggatgagcttctgcctatctccattgagatggcgaaacgggactgcaggggcatatggaacttcaccaaccctggcgctgtaagccacaacgagattctagagatgtacaagaaatacatcaatcctgatttcaagtggaccaacttcacactcgaagagcaggccaaggtgatagtcgcgcctagaagcaacaacgagatggacacgtcgaaactgaaggctgagttccctcagcttctgtccatcaaggattctttgatcaagtacgtctttgagcccaacaggaaggttcctgttaattgaggatttacgttgcgtggatgcagaggttatttgtgttggttattggactctaaattagctaatgttgcaccgtggtgcgtactagttgtgttcgattcttttgggacaatagcaagcatacctctttctggtcgtctattatacacgcaatctacaaacaggtagatatttagatgttcttttagtggctgatacgaaggcttggcctggtgaagtggtgagagctttcttgctgagccactaggtcatgctttcgaagcagtctctccgtgtttatggtatagtggctgatatgctgagacacggttatcgatgaacactacgaattgtcttaatatattatatatattaactaccaagagcagttgtacatggtcttgtaaatttttatcc

SEQ ID NO: 156401 - DNA, 1669 bp, Zea Mays
gtgtgtcatttctctctgacgggtgagatttggtttggatctggtcggaccaggtgctccacgcgatggcgcagaaggagactaatggcagcaacggcgatcacatctccacccgcccgccgccgaccccctcgcccctccgcttctccaagttctttcaggctaacctgcggatcctggtcactggtggggcgggcttcatcggctcgcacctcgtagacaagctcatggagaacgagaagcacgaggtcattgttgctgataactttttcactggttcaaaagacaacctgaagaagtggattggccacccaagatttgagctcatccgtcatgatgtcaccgagccgcttcttgtggaagttgaccaaatctatcaccttgcttgccctgcttcaccaatcttctacaagcacaaccctgttaagaccatcaagacaaatgttattggtaccctgaacatgctaggacttgcaaagagagttggagctaggattttgttgacatcaacctctgaagtttatggtgatccacttgagcatcctcaaactgaggcctactggggcaatgttaacccgattggtgttaggagttgttatgatgagggtaagcgtgtagcagagacgctgatgttcgactatcacaggcagcatggcattgaaatccggattgccaggattttcaacacctatgggcctaggatgaacattgatgatggccgtgttgttagcaacttcattgctcaggctgtgcgcggtgagcccctgactgtccagaggccaggaacacagactaggagtttctgctatgttgccgatatggttgatggtcttattaagctgatgaatggaaacaagactggaccgattaacttggggaacccaggtgaattcaccatgctggaacttgctgagaatgtgaaggagttgatcaacccagatgtgacagtgacgatgaccgagaacactcctgatgatccccgccagaggaagccggacatcacaaaggcgaaggaagttctgggatgggagcccaagatcgtcctgcgggacggcttggtgctcatggaggatgatttccgggagcgcctgaccgtgcccaagaaaaccaaggcctaaattgccctgcagttggggaagaatatccacacggggaagcatactcatagtcgggctcgtcattatttgtggccacatttcattacggaatttgagttccaataaacttaatattcctttgtcgttcaccttgaaggattgtattattagaattttcatacagggctggccattcgagtctctgcctacgcagatcttgtggtacttgtgtttgtagccaatgtgtgagtaaaagtcgattatagcaatgttgatgccattttgggcttattgttcgctcctttttgctgcttgagctgagacaagtctcgatccaatgagagcggtactgactgtgtggaggcgccatttcccatttggtatcgatcggtctggtcctaataatggcctgtcgacctgctgaccgatcgggcgttggatggttggtaccagcatgaaccgttaccagtcagatttaaccacgtggattgttcatacatgtgtcacgttagctgtctgtttccaaaccatttgaagtctaaaagattcaaagaaaataaaaaaactaaaaa

SEQ ID NO: 156402 - DNA, 2098 bp, Zea Mays
cgcgctgcgctgtcgccatcgatcgcacgcggcacccgttgtgttgttggaatctcgcgcgcgggggcacaggcaccagcagctttgcttccattggaagcgcaaatgtctgctccatcctccgcctcatcgccccctgcacggtcacggattactggtttcttattgccaccagatcgaaaaggggggaggaattaaattgtggagtcgggtggtgagatctgatttatagattatttgattagcccggttggtagcagcagtcggtggtggtggtggtagtggtgcaagagcaagaccctgaccgacggcctctgcctccttgcatctctgttcgggtttgtgaagcgcgggctctataaatacgactcagatctgagaggccttctcctcgtccgccccagtctaatccgattcaaaccgcccgttccccgtgtccgtgccaagcaagccgagcccaacccccaagagccagctgctcggtgctccacgcgatggcgcagaaggagactaatggcagcaacggcgatcacatctccacccgcccgccgccgaccccctcgcccctccgcttctccaagttctttcaggctaacctgcggatcctggtcactggtggggcgggcttcatcggctcgcacctcgtagacaagctcatggagaacgagaagcacgaggtcattgttgctgataactttttcactggttcaaaagacaacctgaagaagtggattggccacccaagatttgagctcatccgtcatgatgtcaccgagccgcttcttgtggaagttgaccaaatctatcaccttgcttgccctgcttcaccaatcttctacaagcacaaccctgttaagaccatcaagacaaatgttattggtaccctgaacatgctaggacttgcaaagagagttggagctaggattttgttgacatcaacctctgaagtttatggtgatccacttgagcatcctcaaactgaggcctactggggcaatgttaacccgattggtgttaggagttgttatgatgagggtaagcgtgtagcagagacgctgatgttcgactatcacaggcagcatggcattgaaatccggattgccaggattttcaacacctatgggcctaggatgaacattgatgatggccgtgttgttagcaacttcattgctcaggctgtgcgcggtgagcccctgactgtccagaggccaggaacacagactaggagtttctgctatgttgccgatatggttgatggtcttattaagctgatgaatggaaacaagactggaccgattaacttggggaacccaggtgaattcaccatgctggaacttgctgagaatgtgaaggagttgatcaacccagatgtgacagtgacgatgaccgagaacactcctgatgatccccgccagaggaagccggacatcacaaaggcgaaggaagttctgggatgggagcccaagatcgtcctgcgggacggcttggtgctcatggaggatgatttccgggagcgcctgaccgtgcccaagaaaaccaaggcctaaattgccctgcagttggggaagaatatccacacggggaagcatactcatagtcgggctcgtcattatttgtggccacatttcattacggaatttgagttccaataaacttaatattcctttgtcgttcaccttgaaggattgtattattagaattttcatacagggctggccattcgagtctctgcctacgcagatcttgtggtacttgtgtttgtagccaatgtgtgagtaaaagtcgattatagcaatgttgatgccattttgggcttattgttcgctcctttttgctgcttgagctgagacaagtctcgatccaatgagagcggtactgactgtgtggaggcgccatttcccatttggtatcgatcggtctggtcctaataatggcctgtcgacctgctgaccgatcgggcgttggatggttggtaccagcatgaaccgttaccagtcagatttaaccacgtggattgttcatacatgtgtcacgttagctgtctgtttccaaaccatttgaagtctaaaagattcaaagaaaataaaaaaactaaaaa

SEQ ID NO: 156403 - DNA, 553 bp, Zea Mays
ggcatacaggtacattttagctgcagcttcaataatttattggcccttttatgtgtaaaataacagcttcctggtgttgatcccaatgatccatctgttaaaggtctctgtatttacgaatcttgactagtctagtaatgtatgtatgtggaaatatgaaggtttctttatttctcttcttaaacagcaagagaagaaggaagacaagtcagacaaaacagaagacgagaagaactgatgtagccatgttcatgcttccactgttgaaatgcatatttagcatagcttgctcagctcctatctgttgtttcaatgttgatttaaaagaagagctggtagttgtgggcttttgaacaatagctggagtgatatgaaacattagtgaatagttatgggcttttgaactgcttcaagccggagtgatgtcgctgtggtgtttttgtgactgatcatctctggagcttttgtgaatgatctagctagctatatgtaaatgatctagttgtgaatgatattataattgtggtgcttttgtgaatatataattgtggtg

SEQ ID NO: 156404 - DNA, 627 bp, Zea Mays
atgacttattccatcactcaccttacacgctgttgagctaatcacacatatcggtcaaatccatgaaggtgaaggtgagggtgaagcagcagaatgggtcggtaggctggtgctttgcacataaacccaaagaagtttggtgctgttgcgaagccttgcatgccagaaatggtggcctggccttaaacaaacagaatgatgacaagtgcatcaggcagaagtatcttttggttgcatgcacccaaactcaggttattatccatgtcgcttttcgtgttttgcatccttaggcattgtttagtcaaagcaatgaccttaacatttcttctgctcctaatgcctgcttgtgacatgattgcagaaggggaggccaaagaacgcagcgaagaccatcaattaccatctccagcgacttgggcacatcaagttcctctaggtgcatgattttgatatcatttccgcattaggctttactgccctgtgtagaagttcaggaagagaattttttttccaaaatagatttgctgaaacgaggaattaatgtgtttgcttagattgggcaatgctcagcaaataactctgtcaaacaataatatatcagcagtatattgatactgtttttttctc

SEQ ID NO: 156405 - DNA, 846 bp, Zea Mays
gaacacgaaagtgaagacgctttggtcgttaaagatcgcaaatcccactcacctcaagtcacttcccaacttggacatggcggtccactcccaccttcccgaaactgctcgtacgatctcaagcacggctcctccctagttgtcggctctcggccgcatcaccatccccgtcgccccgagcagtctcgttctccaggtacttctctgattctctctttcttcgtcatggcttacccttccggatcggtgctttctccccgccgcagtaagaatccccccacccacgggttccggttaccactcggcggtagacctgacggtgttgaggtgtttccgcttgctggaacaacttcgctggcgcctgcaagctgttcgaccgaatgcttctgcgaatgaagtgaaggtgagggtgaagcagcagaatgggtcggtaggctggtgctttgcacataaacccaaagaagtttggtgctgttgcgaagccttgcatgccagaaatggtggcctggccttaaacaaacagaatgatgacaagtgcatcaggcagaagtatcttttggttgcatgcacccaaactcagaaggggaggccaaagaacgcagcgaagaccatcaattaccatctccagcgacttgggcacatcaagttcctctaggtgcatgattttgatatcatttccgcattaggctttactgccctgtgtagaagttcaggaagagaattttttttccaaaatagatttgctgaaacgaggaattaatgtgtttgcttagattgggcaatgctcagcaaataactctgtcaaacaataatatatcagcagtatattgatactgtttttttctc

SEQ ID NO: 156406 - DNA, 645 bp, Zea Mays
gaacacgaaagtgaagacgctttggtcgttaaagatcgcaaatcccactcacctcaagtcacttcccaacttggacatggcggtccactcccaccttcccgaaactgctcgtacgatctcaagcacggctcctccctagttgtcggctctcggccgcatcaccatccccgtcgccccgagcagtctcgttctccaggtgaaggtgagggtgaagcagcagaatgggtcggtaggctggtgctttgcacataaacccaaagaagtttggtgctgttgcgaagccttgcatgccagaaatggtggcctggccttaaacaaacagaatgatgacaagtgcatcaggcagaagtatcttttggttgcatgcacccaaactcagaaggggaggccaaagaacgcagcgaagaccatcaattaccatctccagcgacttgggcacatcaagttcctctaggtgcatgattttgatatcatttccgcattaggctttactgccctgtgtagaagttcaggaagagaattttttttccaaaatagatttgctgaaacgaggaattaatgtgtttgcttagattgggcaatgctcagcaaataactctgtcaaacaataatatatcagcagtatattgatactgtttttttctc

SEQ ID NO: 156407 - DNA, 1715 bp, Zea Mays
tgtccgtctgtctccaccagctaccgagccagccagcaaacaagcaagcaaccgactgcccccttgcccgtacgcagtacacctcgcgccggtgagcgagcgaatgccgcgggagctctagccctcggctcctcgcccgggccggcgtgtcgttccgatccatgaggaagctgccgccagcgcaccgcctccggtggatgcgcgcgctgctcctcgcgctcccgctcgtctcgctccccatcctctacgcggcgctcggcgcggcgcgctcgtcggcctcggcggcgcggccgccgccgccgccgccgcagcagcagcagcagcggaggccgccgccgaggctggcgtacctcataacgggcgcaggccccggggacggcccgcggatccggaggctgatgcgggcgctctaccacccctggaactactacctcgtcggagtggcgggggaggacgagcggacggatctcgaagccttcgtgcgcgcccaggaggcgccgcgccggtacggcaatgtccgggtgtcggccgcgggggagtggggctccgtctcgcggaggggccccaccgaattggcctccacgctccacgccgccgcggtgctgctccgggagttcgacggctggagctggttcatcaatcttagcgcctccgattacccgctcatgccccaagatgacatccttcatatcttctcatacatgccaagagacctcaatttcattgagcacacaagcaatattggttggaaagagtaagcatatgatttcaatattctgtggttctttattcttaacctctcttttttttattatgattcttgggttgcatgttgcaggtatcaaagagcccgaccaatcattgtagacccagcattgcaggtcccaaataaaactgaggttgtaacaacaaaggagaaaaggagtatgccctcagctttcaaaatatttgtaggttcgtcttgggtgatgcttagtagatcattcctggagttttgcttactgggatgggataaccttcctcgcacactactcatgtatttcaccaacttcctctcgtcctcagaaggctacttccacacagtgatctgcaactcagagtactaccagaacaccactgtgaacagtgatctgcgcttcatggcatgggataacccacctcggacgcaccctgctaacctcacaacagagcattttgatgcaatggcagacagcggggcgccgtttgcacactcatttgccaatgataactcagtcctggatatgatcgacgccaagttgttggggcgagcacctgaccgcttcacgccgggtggatggtgcctgggtagctcagtaggcgggaaagatccgtgtaccttcttgggaaggtcctttattctcaggccgaccaaaggctcggccaagctagagaagttgctgttgaaacttttggaacctgataacttcaggcctaaacagtgtaaataacactcattttacatggtagccagttctttttttttttgtggtagtgttcagaagccgaagtttgatgacatgtttcttgttgttgcggcagtaggcattacatacagatgttttatacttgcaaccggaaagctcaactcacaagtgatttgagatcatacacgatacatgtactcttgctgtttcatcacttctacggctgtacaacaaccgatgataatgagaggttcgctggaagtcagtctg

SEQ ID NO: 156408 - DNA, 1711 bp, Zea Mays
tgtccgtctgtctccaccagctaccgagccagccagcaaacaagcaagcaaccgactgcccccttgcccgtacgcagtacacctcgcgccggtgagcgagcgaatgccgcgggagctctagccctcggctcctcgcccgggccggcgtgtcgttccgatccatgaggaagctgccgccagcgcaccgcctccggtggatgcgcgcgctgctcctcgcgctcccgctcgtctcgctccccatcctctacgcggcgctcggcgcggcgcgctcgtcggcctcggcggcgcggccgccgccgccgccgccgcagcagcagcagcagcggaggccgccgccgaggctggcgtacctcataacgggcgcaggccccggggacggcccgcggatccggaggctgatgcgggcgctctaccacccctggaactactacctcgtcggagtggcgggggaggacgagcggacggatctcgaagccttcgtgcgcgcccaggaggcgccgcgccggtacggcaatgtccgggtgtcggccgcgggggagtggggctccgtctcgcggaggggccccaccgaattggcctccacgctccacgccgccgcggtgctgctccgggagttcgacggctggagctggttcatcaatcttagcgcctccgattacccgctcatgccccaagatgacatccttcatatcttctcatacatgccaagagacctcaatttcattgagcacacaagcaatattggttggaaagagtaagcatatgatttcaatattctgtggttctttattcttaacctctcttttttttattatgattcttgggttgcatgttgcaggtatcaaagagcccgaccaatcattgtagacccagcattgcaggtcccaaataaaactgaggttgtaacaacaaaggagaaaaggagtatgccctcagctttcaaaatatttgttcgtcttgggtgatgcttagtagatcattcctggagttttgcttactgggatgggataaccttcctcgcacactactcatgtatttcaccaacttcctctcgtcctcagaaggctacttccacacagtgatctgcaactcagagtactaccagaacaccactgtgaacagtgatctgcgcttcatggcatgggataacccacctcggacgcaccctgctaacctcacaacagagcattttgatgcaatggcagacagcggggcgccgtttgcacactcatttgccaatgataactcagtcctggatatgatcgacgccaagttgttggggcgagcacctgaccgcttcacgccgggtggatggtgcctgggtagctcagtaggcgggaaagatccgtgtaccttcttgggaaggtcctttattctcaggccgaccaaaggctcggccaagctagagaagttgctgttgaaacttttggaacctgataacttcaggcctaaacagtgtaaataacactcattttacatggtagccagttctttttttttttgtggtagtgttcagaagccgaagtttgatgacatgtttcttgttgttgcggcagtaggcattacatacagatgttttatacttgcaaccggaaagctcaactcacaagtgatttgagatcatacacgatacatgtactcttgctgtttcatcacttctacggctgtacaacaaccgatgataatgagaggttcgctggaagtcagtctg

SEQ ID NO: 156409 - DNA, 1624 bp, Zea Mays
ggcttaccgcttacctccgcgcactgcacacgttcgacgaaatgccgccgcgagccctcttcgtcgtcaactgagatttgcctcacatcatctccgattccttcccctacttccgtccccatcagtggacccagccgagatcgactggatctcctggctcgggcggctttgatggttcctggggtcggcccggggaggagttcgaggcgatgagcaggcttgcgtcggggctccagcgcccgcggaggtcgttgtcgccgtgcgaggtgctgtggtgcgcgctcgcgtcatgcggcctagtgcttttctcgcagctcgccgtggcgatggttccccgcctcttcccttccctctatctcctcgccatgctccccatcgcggggctggtgttactcgcggctatcgtgctcggccgcctgtggaggaggttcatcggagtgacggcgtcggcgccgctcttcgtgctcttcaacatcctcctatcgtggggcgtttacatcttcgtaatccgtagaaaaacttcttctctgctggacatgctaataaatgcagaatgtgcactgcttctgtggggattctacaggattttatcttgtgatcctggtatttttgcttgtgattcttcttatttggcagaggctggttgcaaggattttgtggaagctatatacacgagtgagagactcccaatgctctcaagagtcaggcagtgtacctggtgcaaagcaaacattaggggctatgaccatcattgccctgcatttggtacttgtataggacagaaaaatcatcgtctatttatggcccttttgacaggatttgttgttgctgaatcaacatatacgatgtgctcaacaaaatatattactatatgcattagctcaggaactataaaatcagagaatcctgtatctctaaacatggtaatcagtacaatgctcttctctatcctccaagtcctctggcagattgtattcttgatgtggcacatatattgcatctgcttcaacatcaagacatatgagtgggtaatttcaaatttcccatgctttagattcttttttcatcaattgcaggtcgtcttctcgttaggtgtttcttgtagctaaaaggtcagattttccagattaactggaagaaatatcctgagttccagatgaaggaacaacctcgatcagattctgaagtcaaatctatgaacccatatgacaaaggcatgctgtgtaacataagagattttctaaaaccagttttgagtacgaagacctgacctctgatggaactatagaaacatgggaaatctgaagtgcgttatactggagccaacatggaagcttgtttcccttgttgctgccgtagcatttattgagactcgtcgtgaggattctgctgtgtaatttaatgtgcaagtagcattcttttataagattacttccgaccgggaattctagtctcttaacttcagaactgatttggtgagtaggtaaatagaggggatctatggggtcccttactattcatatggagttcacatcgtgatcctgcatttttttcctgtctggtcttgccaaagggtaactcttgcaggtgaaaggaccacgatgctcaagagggggtgaattgg

SEQ ID NO: 156410 - DNA, 1516 bp, Zea Mays
ggcttaccgcttacctccgcgcactgcacacgttcgacgaaatgccgccgcgagccctcttcgtcgtcaactgagatttgcctcacatcatctccgattccttcccctacttccgtccccatcagtggacccagccgagatcgactggatctcctggctcgggcggctttgatggttcctggggtcggcccggggaggagttcgaggcgatgagcaggcttgcgtcggggctccagcgcccgcggaggtcgttgtcgccgtgcgaggtgctgtggtgcgcgctcgcgtcatgcggcctagtgcttttctcgcagctcgccgtggcgatggttccccgcctcttcccttccctctatctcctcgccatgctccccatcgcggggctggtgttactcgcggctatcgtgctcggccgcctgtggaggaggttcatcggagtgacggcgtcggcgccgctcttcgtgctcttcaacatcctcctatcgtggggcgtttacatcttcgtaatccgtagaaaaacttcttctctgctggacatgctaataaatgcagaatgtgcactgcttctgtggggattctacaggattttatcttgtgatcctggtatttttgcttgtgattcttcttatttggcagaggctggttgcaaggattttgtggaagctatatacacgagtgagagactcccaatgctctcaagagtcaggcagtgtacctggtgcaaagcaaacattaggggctatgaccatcattgccctgcatttggtacttgtataggacagaaaaatcatcgtctatttatggcccttttgacaggatttgttgttgctgaatcaacatatacgatgtgctcaacaaaatatattactatatgcattagctcaggaactataaaatcagagaatcctgtatctctaaacatggtaatcagtacaatgctcttctctatcctccaagtcctctggcaggtcgtcttctcgttaggtgtttcttgtagctaaaaggtcagattttccagattaactggaagaaatatcctgagttccagatgaaggaacaacctcgatcagattctgaagtcaaatctatgaacccatatgacaaaggcatgctgtgtaacataagagattttctaaaaccagttttgagtacgaagacctgacctctgatggaactatagaaacatgggaaatctgaagtgcgttatactggagccaacatggaagcttgtttcccttgttgctgccgtagcatttattgagactcgtcgtgaggattctgctgtgtaatttaatgtgcaagtagcattcttttataagattacttccgaccgggaattctagtctcttaacttcagaactgatttggtgagtaggtaaatagaggggatctatggggtcccttactattcatatggagttcacatcgtgatcctgcatttttttcctgtctggtcttgccaaagggtaactcttgcaggtgaaaggaccacgatgctcaagagggggtgaattgg

SEQ ID NO: 156411 - DNA, 865 bp, Zea Mays
ggcttaccgcttacctccgcgcactgcacacgttcgacgaaatgccgccgcgagccctcttcgtcgtcaactgagatttgcctcacatcatctccgattccttcccctacttccgtccccatcagtggacccagccgagatcgactggatctcctggctcgggcggctttgatggttcctggggtcggcccggggaggagttcgaggcgatgagcaggcttgcgtcggggctccagcgcccgcggaggtcgttgtcgccgtgcgaggtgctgtggtgcgcgctcgcgtcatgcggcctagtgcttttctcgcagctcgccgtggcgatggttccccgcctcttcccttccctctatctcctcgccatgctccccatcgcggggctggtgttactcgcggctatcgtgctcggccgcctgtggaggaggttcatcggagtgacggcgtcggcgccgctcttcgtgctcttcaacatcctcctatcgtggggcgtttacatcttcgtaatccgtagaagtgagctcttgtggtactgtaaattggattcagccattaagagatgattttatgctccattcaatgagagttgcagacttcaaagcatatactaagggattatttcaactatgaatccctgtagtacttcaacattaggtcactccttgtcaccaaatttgtgctcaactacaaaacccgtatctgctcaagactgagctggcttcggttaagggaccaagtgtggacactgcatgctctagtcaatttgtgctcacttttagagtcctaattcttggtgaatcaaaatgcttcaagagatcaagcatggaagcattactcttggtttgtctgtgctcacctctagttc

SEQ ID NO: 156412 - DNA, 678 bp, Zea Mays
ggcttaccgcttacctccgcgcactgcacacgttcgacgaaatgccgccgcgagccctcttcgtcgtcaactgagatttgcctcacatcatctccgattccttcccctacttccgtccccatcagtggacccagccgagatcgactggatctcctggctcgggcggctttgatggttcctggggtcggcccggggaggagttcgaggcgatgagcaggcttgcgtcggggctccagcgcccgcggaggtcgttgtcgccgtgcgaggtgctgtggtgcgcgctcgcgtcatgcggcctagtgcttttctcgcagctcgccgtggcgatggttccccgcctcttcccttccctctatctcctcgccatgctccccatcgcggggctggtgttactcgcggctatcgtgctcggccgcctgtggaggaggttcatcggagtgacggcgtcggcgccgctcttcgtgctcttcaacatcctcctatcgtggggcgtttacatcttcgtaatccgtagaagtgagctcttgtggtaatgcttgcggacttgcactgtattggtaggacacaatcgatcgctgtggtgtggatatttgctatttttgtcttgctgcctctggaagttagtaaaattacctggaaggttatacctctatgtcttagcttgagaaatttgtaatt

SEQ ID NO: 156413 - DNA, 570 bp, Zea Mays
atgaacttgagagcggacggccagaccaggggctccgcggatgacgggttcagcagcgccgcgcacgcgacgtgccctcgcttcacggcgacctcatacggaattctcccgacggagtctcgctggaggcggtcggcgccccaggagagcagttgccggacgcagtccaggttgccgccgcgcgcggccaaatgtagcggtgtgctcccggggaatccgaaggcaccgctggaggcggacacgatggcgccgttctcgagcaggacgtggacacagcgccgccagccctgcctcgccgcgaggtgcagcggcgtcgccccggtgtcgtcccgcacgttcacgaagcgcgcgaaccccctgcacctccacagcaggattccgacaccggcgcggacttggccgccgagaggatggtccggaggcagtccgcgtgcccgtagtaggccgcgtagtgcaggcacgtccgccgatgcgaggaatcgaacatcacgatattggcgccggcgtcgagaagccgccggacgcagtcggtcttcccgtgcatcgccgcgagcatcaatgccgtctgcg

SEQ ID NO: 156414 - DNA, 2032 bp, Zea Mays
accccgagcaagagcgccacattcactccaaggacaaggagggcctgcccctcaccgcatcactctgactcaaactacagtcaactcgcataaacaaattatcttctaccggtctaccctaccctccctttcacagaaggtcaaaactcctgatcccaaaatccaaagcccaagaaaacaaaatgggtaatgccatcaccaagaacccatgcttctccggcgaaccgtacgccgccgccgtcacgtcggacccgctcccggacgacagccatggtcattccttcacctacgtgccatcgggcggcgccttcgaccagcccccgacggctgccgcgacgtcgtcggagtcgtcgctcttctctctgtccggcgccgccatcagcgccaatctggcgacgtctgggtcaatgccgtcgttccgcatgttcaacgagctgacgtggccgcagtcgaccgcgtgcaccttcgagagctcgcgatccttcgccgccgtgcctctcctggcgccgccgcgtacgctgtccatgtcggggccggtccagttcacgtccggccgtttctccgaggcatccggttccgcgtccaccatctccggcacgccctcgggccgtgcattcatgtcaggtccatttgaccgctcctcgtccgcctcctcgtccgctgggttccaactgagcgtttctcagctcatcgctgagcgccacgccgcgcgctctcgcctccgtgatgagcgatccctgctacggttcttcgtcggtacggcctccaaactccggctcgggtcgccgcgctgtggccgccggccagaggaacctgctcaggtctccttcagcgatggggactcccgctccccgccgaacggcaatgtggagtgggctcagggcatagccggcgaggaccgcttccacgtcgcggtgtccgaggagcatggctgggtgttcgtggggatttacgacgggttcaacggccccgacgcgaccgactacctcttcaccaacctctacgtcgccgtgcacaacgagctcaaaggcgtgctctgggacgacattatccaagccggcgacagcgccaggtgcggccaggaagatcatgcggcggcaggcaatgccgaacgcctccgtcttgctcaggccgacggcggcggcgcggaagcgcccacgccaggcaacagcgcagcatcagtgcaccgcgacgtgctgagggcgctggcgcgggcgctgaagaagacggaggaggcgttcttcgcggcggcggaggaacgcgcggccgagagcccggagctggggctgatgggctcctgcgtgctggtcatggtgatgaagggcacggacgtctacgtcatgaacgtcggggacagccgcgccgtgctggcgcggaggccggagcccgacctgaagaacgtcctcggcaaggcgtcgcaggacctgcagcagttcaaggccgacatcgtgcgcgagctggaggcgcgcgaggtggacggcctgcaggccgtgcagctcaccccagagcacagcaccgcggtccaggaggaggtgacgaggatcaagggccagcatctgaatgaccggaacgccatagtcaatggccgggtcaaggggaagatcaacgtcaccagagcgtttggggtcggctacctgaagcagcccaagtggaacagcaggcttctggaagccttcaagatcgactacgtcggcacggacccgtacgtgagctgcgcgccgtcgctgtgccaccaccgcgtcgggtcgcaggacaagttcctggtgctgtcctccgacgggctgtaccagtacttcaccaacaaggaggtggtggaccaggtggtggaggcgctcaccgccgcggagcccgacggcgaccccgcgcagcacctcgtcggggagctcgtgcaccgcgccgcgaggaaggccggcatggagtcgcgccagctgctggacatcccgcgcggcgagaggaggcactaccatgacgacgtctccatcatcgtcatctcgttcgaggggcggatctggaggtcgtctgtctagaggcg

SEQ ID NO: 156415 - DNA, 3023 bp, Zea Mays
tctcctactagtgagatttttcttttgctgattgctgatgggttcttgcagatttgggtcggggacaagccatgaacaacgcaaccaccagttgttaactaaccctcttttaaacttcaagcaaccaaagccaagagcagaaatggttttccaaaagtggtcgtcgtcgtcagagatggagtcgtgcggtggaggccaagtcccggagatgccacgcgttcccaagtccgcgaggggcaagagatcggtcaggaagaaggaggcccagagcccggcccagatgtctgcaatcgaccttctcgcaaccgtggcagggaagctgtttgacgagggggcggggtcgctggggaacacgagcgccggtgccccggccttggctgcgttcgcaaaggatgccctggtgaagcaggagcagtgtgatgagcaaatgaagctgttcaagcatgaggcgacggatcaggatagctgcaatgagagtgcaatcctcccccacattgtgctccagcgggtggtgaataatgctaggaatgaggatcctaaggcgaagtctgaggtccaggacaaggaatcctccatgatcagctatacgaaggctgaattgggttgtaattttggtgtgatcgcagacaggtggtcgcctgaatccgtggaatcaggagccttcacaggagatgcagtggcgagactgatgatgacggccccggcaggatttcataagaatgcacccgaaatgtatagtttgcttgattcaatggatgtggatgtcaagccgcctcctttggtcagctctgacagcaccggcgagatgccattgcatggcgataaaattcaccgctcaacctccttaccgagggccccaaagggggtggggttttttgctgtagatagagatgatgacgacgacaagtcctctgggtgcactcatccgagcaccgccactaacaaggatttcacatccaattgtaaagctgagtataatagggtaaggaagctgctcactagtaagcacaggaaagttgctccagcgaggattcacaaatctgatctttcctatagtgatgtcgagcggaagccttctttccggtacaaaaaaatgcatacacgacagaggacacaaaggagtacattcaagcggaggaagctctttgatcgccatttagctctagcatctgaatttggtacagcaaatggaaagggaaacacaaaggttgccggaagaaactccaatgctgtgtctttggaagcaaacaaggggactaattcaatgccattccagaaatcttgtgggtcaaatgattgccatgtgaaacttagaattaagtcttttaacgtgcctgaacttcttgttgaaatcccagacagtgcaactgttggctcactaaagaaaactgttctcgaggcagtgactgcgattcttggaggtggcctacgtgttggtgttcttcaccatggaaagaaagtcagagatgatagtaaaacgttaattcaggctgggattggtcaggatgatatgctggacaaccttggcttttcacttgaacccaactgtactcaaaacccacaagtacaagctcctgaagatgtcagtttcctcgaaaacattgatactaccgaacccctcgcaaggatcacacctgctgactcgtcttctaagcttggtgaagttgacgtatcacaggagcttgcattaaccccattagcaatgaactaccagggcagtgatcatgattccgtgcactcccctggggctgtctcgtcgcgcgataaagactcgcgagccttatttctggttccagctgcagatcccaatgcaggagctgtagttccagcaaataagactaagaggtcaccagagcagggacaccgcagaatcaggcggccgttctctgttgctgaagtagaagcacttgtgctcgcagtcgaaaagcttggaaccggaaggtggcgagatgttaaacttcgcgcttttgacaatgcaaagcaccgtacctacgttgaccttaaggacaaatggaagacgctggtacacacagcgagcatctcgccgcagcagcggcgtggcgagccggtgcctcaggagctgctcgaccgggtcctggcggcccaggcctactggtcccagcagcaagccaagctccagcctaagacgccctcgctggctgaggctcgcttgctcacccaataattcgatgatcccggctgatggcctcctctgaggccgttgcagcctttgtataaagtcagtaagtcccttcacaggaggtttaatgaaaatataatattaggggaaaaaaagaatgcatatataaggtacaagaagcattgaccgatttgttgtaatatctactcaccaccggttattctttaagccaggattctctctccttgtgaatttaaccaaaggaaagggcatttctttggcaattgtacattttgatgatggaagaagaagatgatccatgaactgagatctgcagtgtctacctactaatggctcacaatttttgcaattgtgattaagaaattcaaggtgctgcttgaccaagctcggctccggcttccagtttttggattctcttgtgaagaagttgctgcctcttttttatacagcagaagctgagagccgaacagtgtatttggcttgaattgcagcctatatagtttcatccactcatacagacggccacaaatgccgtaaaaggagggtagcttcttttgctgagtctagtcttgggagcaaagctcaggaccgaagtctagacttgagacggagcgggggccaaagcggcacccgaatgaaagcttcagattcttttgttcagttaaattcattctttggtagtggagactgacggaaggataggagattaggtggggtggatctttggttctctttttctttcttcttctattattacattattagttgtattaatgtactatattattttaccaatcttgtagttaccctcaaatttgtaattggtgaaattaacaaaattgaaggaaatacatttccacca

SEQ ID NO: 156416 - DNA, 1927 bp, Zea Mays
gggcgtctcgacctgaccaatcctaccgccagcctctgcccttgtgctccagtctcctcccgcgaccgttccaaattcctcctcgcgttcgtattccattccacgcggcgacgtcgccgtcgcggccgccgctccgctccccttccttcgcctatacgtaggtagccgctgcggccgcctccccaaaccctaagcctttccctcccacacgcgcttcaccccgcacatcgccggcgatgggatccaaggaccagggcggaggggccgcctcctcgggcggcggcttcttctcgtcgttcgccgccggcatgcgcagctggggcaccgccgtgcacaaatccgtcaacgggctgcttggttatgaaggccttgaagttattaaccccgatggaggcacagatgatgctgaagaagaagctttaaggggccgatggaagcaagaggatcgtgatagctattggaagatgatgcacaagtacataggatcagatgttacatcacttgtgacacttccagtcataatttttgagccaatgacaatgcttcagaaaatggctgagttgatggaatactgtgagttgttagacaaagcagatgaatgtgaggatccatacatgcgtatggtttatgcttctacatgggctgtttcggtatacttcgcgtatcagcgcacatggaagccttttaatccgatccttggagagacttacgagatggttaaccaccagggcatcacatttcttgccgagcaggtaagccatcatcccccaatgggtgctgctcactgtgagaatgagcattttacttatgatatcacgtctaaggtgaagacaaagttcttgggaaattcattggaaatctatccagttggaaggactagagtgacacttaaaaaatctggtgtcgtgttggatttggtgccaccactaacaaaggttaacaacctgatatttgggcgtacttgggttgattctcctggagagatggttatgacaaacctgacaaccggagacaaagctgtgttatatttccagccatgtggctggttcggggctggccggtatgaggtagatgggtatgtgtacagtgcagcggaagaacccaaaataatgattacagggaaatggaacaagtcactgagctgccaaccatgtgaccaagaaggcgaccctcttccaggcacggagctgaaggagatctggagagtcgcccctgccccacagaacgacgggtatcagtacacacactttgcgcacaaaataaacagcttcagcacggcacctaagaagctgttggcatctgattcccggctgaggcccgatagatatgccctcgagaagggcgacatgtccaagtctggctcagaaaagagcaggctggaggagcagcagagagccgagaaaaggactcgagaggccaagggcgagcagttcactccgcgatggttcaacgtgacggatgcggtcgcctccacgccgtggggtgacctggaaatttgtgagtacagcggcagatacacggagcaccgggctgccatagacagctccaacagcaccgacgacgacgacgagatagacgtcacttcggtcgagttcgacccatggcagtatggtggtagctcgtcatctccccaatgattctccgcgtccggaagctgccgtgcctgtgctccttgtgtaaaaaaaaaatgcttccaggcggcctggccttcgctggtttgttgtggcaccagcggtttccgtgcccttgtagtagtattatgacctgccccctctttctcttattaacgctacagatttattcaggaagtggtgtgttttgatagtagtccgcgtactgtcgtgtcgtggatctggcagaagctgcagagttttccttgagccgttggattgtttcatttacgcgcgacagctgaaggtaacgacgc

SEQ ID NO: 156417 - DNA, 1016 bp, Zea Mays
gtctcgacctgaccaatcctaccgccagcctctgcccttgtgctccagtctcctcccgcgaccgttccaaattcctcctcgcgttcgtattccattccacgcggcgacgtcgccgtcgcggccgccgctccgctccccttccttcgcctatacgtaggtagccgctgcggccgcctccccaaaccctaagcctttccctcccacacgcgcttcaccccgcacatcgccggcgatgggatccaaggaccagggcggaggggccgcctcctcgggcggcggcttcttctcgtcgttcgccgccggcatgcgcagctggggcaccgccgtgcacaaatccgtcaacgggctgcttggttatgaaggccttgaagttattaaccccgatggaggcacagatgatgctgaagaagaagctttaaggggccgatggaagcaagaggatcgtgatagctattggaagatgatgcacaagtacataggatcagatgttacatcacttgtgacacttccagtcataatttttgagccaatgacaatgcttcagaaaatggctgagttgatggaatactgtgagttgttagacaaagcagatgaatgtgaggatccatacatgcgtatggtttatgcttctacatgggctgtttcggtatacttcgcgtatcagcgcacatggaagccttttaatccgatccttggagagacttacgagatggttaaccaccagggcatcacatttcttgccgagcaggtaagccatcatcccccaatgggtgctgctcactgtgagaatgagcattttacttatgatatcacgtctaaggtgaagacaaagttcttgggaaattcattggaaatctatccagttggaaggttaattgttagaattgtatttctttcttggagatctgtatggcttaaaaatattttattggaataaaatggaaacctttttgaaggctgaattgggaccagttattctaatccctgctgtaatataatttccatgtcacaggact

SEQ ID NO: 156418 - DNA, 1442 bp, Zea Mays
cccccgcctcctctcctccccctccgccttctgctctctctcgcctctggtgcgcagagctatagctctcttgaagcctcgagactcgtctcgccgctgctctgctccccagctctgccgctgcgtgcctgcgtcagctgtcgcattgcagccagcgagccttgagctgctagctctctcttccccacagttcccaggcatggagttcgaggatcgctgccacaaggtccaggagcccaagttcgactgcctgctcttcgacctcgacgacaccctgtacccgctgagctccgggatcgcggaccatgtcaagaagaacattgaagattacatggtcgagaagctgggtattgacgagagcaagatcgagaacctgggaaatctgctgtacaagaactacggcaccacgatggctggcctcagggcgatcggctacagcttcgattacgatgagtaccacgccttcgtccacggaaggctgccgtacgacaacatcaagcccgaccctgttctcaagcacattctcaagaacctgcccatccgcaaactcatattcaccaacggcgacaaggtccacgccgtgagagccctggagaggctgggcctggaggactgcttcgaggggatcatctgcttcgagaccctgaacccgccgtgcccgcctcagggagaccgggaggccgagatcttcgacatcgccggccacttcgcccgctccggcgccgccgccgagctgcccaagacccccgtcctgtgcaagcccaacgtcgacgccatggaggaggcgctcaggatcgccaacgtcaacccgcacaaggcgattttcttcgacgacagcgtacgcaacatccaggccgggaagcagatcggccttcacacagtgctggtgggcaagtcgcagcgggtgaaaggcgcggaccacgcgctggagagcatccacaacgtcagggaggcgctgccggggctgtgggaggaggccgagaaggcggaggacgtgctctacgccgagcgcgtcgccatggagacctcggtcaccgcgtaaacccctctctcgaatcctccggtgcaccgtcagcccaaccttctcgacatccaggaccgggacgatcgcataccactctctccccgagccagggctggtggtctcacgctggaactgaatccagccatggccgggccgagaatttccgacagcaagaaggggtgcagcatgtaaaggggggagcagatgatatcatgtttgggatgctcccagatatgtatagttatgtatcagccagttgtttgtaaattaccaataaatattagaagtaataagaaaaaatggagtttacttgtacgtttcttgtgctctgtcatctgaagtaataaaagcggttagcaagaatggaagagcaacacatttgcttctctgaaaatctgaatgctgccagatttctctc

SEQ ID NO: 156419 - DNA, 297 bp, Zea Mays
atgccgtaccgcaggctcggcagcggcgcgacagcgcagcagtgccgccgcaggcctggccacgcaccacgaaggacggggaccaacgcccaagcccaagcaaagccatcctcccaccacggtccacgccacgcgccagcgaacgggtggcgcgggcgcgcgcttgccacgacgcgcgcgccgcagccacccaacgcggggcgccggcagatacgccgatcacgatgggcgtattacgcgatgtgttctgttccgggggtactgacgcgcgtcggcccgtgcgccaggcgaaaatag

SEQ ID NO: 156420 - DNA, 1626 bp, Zea Mays
gaacgaacgtcatatcacatggacgcccatttcttgccactacttgctcggttgttcttttatctcggaacgcggtaggggttgcggattgggagcaaaggaggagagggagtactgggccgccgccggctgcgaacgcggaggaggcagcttccaccaatcagtgcaccctcatcctcaaaggctgatgctgacacggtggatccggcgtggctatcgatcaggtgagaagcttaccatcgatcaagaattcgagcagtatttttcgaacctgatgctgtaggatcgaatggatagttttgtgaccaaaaaaatggcgctagctgggacctccaaacatggtttgcttgctgagcgaggtgccgaaccgtggctattagtattattggagccatcggtttatatgtacaccgaatcctatcactgaatgtatgtatctgtggtatgtgtatctttttcagcttgaccatcagatgttagcatcatggtgtatggtaatgtgtgcagataagaacatgtctaagcaatatagtaaatagtgtattccttgtatacttatgttccagtgtttctgaatagatgggtgagtagacggaagcgactactagacaccgtgaacgaccatcagtgttcacacacacaccgttcacacgcgcgcacggatccaaacggcggtgctacacgtgcgtatcgcaggcgcgtgcagccagccccggcacctggatctccttggcacccaccggcagattttccagccggcgaccaccccaaaaaaggaatcatggaaaagcttgcaggttgaggatacgatgtatgaaacctgtcgccgctctgctcttgtgcgccgctgccgctctctcgtccctgtctctcccgcacggtgcgccctgcccctggcgtaagcgcgcgagacgaacatccgcgagcggggtcccgccgcacgtggcccggctccccacccccgccccgccgcggactgcgccgacgtggcgggccgggccctccgcctctcggcgtcgtgacccggcggcacctacgggcagcaaaggccctgacgccggtgggccccgcccgcggtcaaatccgtcacacaggggtggggctgatccaggtccggttggtgggggagcacatgaggccgccacccccacgtgcgatgttgaggttgtctggccgttcttttcttctagctgccgctcgacggctggatggccccacgttgtgggcttctggctcctcgtgggccctggaccgcgtcatgtcaacggtcagcgtcacggcacagatcctctgctcctgctcctgcccccgcgcgcgcacgcggcacgctccgctccggccggcggcaggtgcaccggcgtgagcgcgagcgcgagaggggcaggagagccctgcgcacgcgtcgactctggacggtcagctccagcctcccgcgccgccctcaacgtgtctcgcactctcgcgtgcacgaacacgatgcaccggagcttgcttgctcgggcgagcgggcacgaggccgacgtggaggcgcaggcgcgcggtggacgcaacgcaactggccgtgcgggcgagtcggtgacgagacagccagacagtatagcaggtgtgaaaactgaccgaggagcc

SEQ ID NO: 156421 - DNA, 548 bp, Zea Mays
gaacgaacgtcatatcacatggacgcccatttcttgccactacttgctcggttgttcttttatctcggaacgcggtaggggttgcggattgggagcaaaggaggagagggagtactgggccgccgccggctgcgaacgcggaggaggcagcttccaccaatcagtgcaccctcatcctcaaaggctgatgctgacacggtggatccggcgtggctatcgatcaggtgagaagcttaccatcgatcaagaattcgagcagtatttttcgaacctgatgctgtaggatcgaatggatagttttgtgaccaaaaaaatggcgctagctgggacctccaaacatggtttgcttgctgagcgaggtgccgaaccgtggctattagtattattggagccatcggtttatatgtacaccgaatcctatcactgaatgtatgtatctgtggtatgtgtatctttttcagcttgaccatcagatgttagcatcatggtgtatggtaatgtgtgcagataagaacatgtctaagcaatatagtaaatagtgtattcct

SEQ ID NO: 156422 - DNA, 1377 bp, Zea Mays
cgcctttctagctcctgcagtcctgctgttagtgctgttcccctctctcttccccgtcctgcaggctccaggcgctgctgctctcgtcctccgctagcgagcgaatcgctgacgctggcccgacgccgcggcgggaggtatctcgctttcgatcaggattttggttggggcgtcgttctccggtgcttatctcatttctatttatcggtgcctcgggttcacggccaaattcgctgctgcgtggggctttggagattggagccgattccttaaagtggcggtggcagcgtctggtgggaaccatgagcttcgtgttccgaggaagcagggccgacatcgaggccggtggcttcacagggttcgcccccgagcgccgcaccatgcgaattcatgcagggagcaggccggtgaatagcaattccttggtttttcttctaactgtttttgttttgttcatggtactgaactcacaccagatgtctcccaatcttttgctttggatagtcttgggagccttcctaatggccacgagccttagaatgtatgccacgtgccagcagcttgctcatgctgcagctgccaacagttttcttggccacactgagctgcgtgtgcatgtaccgccgaccattgcccttgctacgagaggccagttacagagccttagacttcaactggctcttcttgaccgtgaatttgatgatttagattatgacactctgagagcactggatgctgacaatagcctgcatgttccttctatgagtgaagaagaaataaattctcttcctgtcttcaaatataaagtccaggcacagcagggaaatgcccctgcccgaaaaagtgatgaggcatcgcagctatcggtttcttcaactggctccggcaatgagaaaaagcaggatggtttaaaagcagatggaactggcaaaactccacaggatgaactaacatgtagtgtttgcttagagcaagtcatggtgggtgatctgttgagaagcctaccatgcttgcatcagtttcacgtaaactgcatcgacccatggctgcgccaacagggtacatgcccaatctgcaagcaccaggtcagtgatgggtggcatgccacaggcaacggtgaagaggatgcttcatacatggtgtaagtagctgcccaggagtaggccataggtaactagtagctgctaacagaatccgtggaacgctgttttggaggtgacggtttggacttgcaatctagggatgtggtctaatccctgtctaccctaacaaaaaaccgagtgtggaatcagctgtccagtgcactgagttcttgtacaactcatgtttatttctctcattctctgtgatgttgatgcataaaaaggttgctgataa

SEQ ID NO: 156423 - DNA, 1280 bp, Zea Mays
cgcctttctagctcctgcagtcctgctgttagtgctgttcccctctctcttccccgtcctgcaggctccaggcgctgctgctctcgtcctccgctagcgagcgaatcgctgacgctggcccgacgccgcggcgggaggtatctcgctttcgatcaggattttggttggggcgtcgttctccggtgcttatctcatttctatttatcggtgcctcgggttcacggccaaattcgctgctgcgtggggctttggagattggagccgattccttaaagtggcggtggcagcgtctggtgggaaccatgagcttcgtgttccgaggaagcagggccgacatcgaggccggtggcttcacagggttcgcccccgagcgccgcaccatgcgaattcatgcagggagcaggccgtcttgggagccttcctaatggccacgagccttagaatgtatgccacgtgccagcagcttgctcatgctgcagctgccaacagttttcttggccacactgagctgcgtgtgcatgtaccgccgaccattgcccttgctacgagaggccagttacagagccttagacttcaactggctcttcttgaccgtgaatttgatgatttagattatgacactctgagagcactggatgctgacaatagcctgcatgttccttctatgagtgaagaagaaataaattctcttcctgtcttcaaatataaagtccaggcacagcagggaaatgcccctgcccgaaaaagtgatgaggcatcgcagctatcggtttcttcaactggctccggcaatgagaaaaagcaggatggtttaaaagcagatggaactggcaaaactccacaggatgaactaacatgtagtgtttgcttagagcaagtcatggtgggtgatctgttgagaagcctaccatgcttgcatcagtttcacgtaaactgcatcgacccatggctgcgccaacagggtacatgcccaatctgcaagcaccaggtcagtgatgggtggcatgccacaggcaacggtgaagaggatgcttcatacatggtgtaagtagctgcccaggagtaggccataggtaactagtagctgctaacagaatccgtggaacgctgttttggaggtgacggtttggacttgcaatctagggatgtggtctaatccctgtctaccctaacaaaaaaccgagtgtggaatcagctgtccagtgcactgagttcttgtacaactcatgtttatttctctcattctctgtgatgttgatgcataaaaaggttgctgataa

SEQ ID NO: 156424 - DNA, 1708 bp, Zea Mays
aatcgccgcgctccacgtgcaatctccgtctcccgcgacgtcacagctccggcagatgccgtcccacataaaaccgccccacctactcctcacccagctcccaattcccctcccgtcccgtcccgtcccctcccctcccctccgctcccgtcgtctaccctcactcgaaaccccgattcgaaaccggctgagttcaatttggggatttcggcacctcgttccccgaaattttctggatctgagtctgtcggccgttctcgatttgcgtctggagtgagcctgcgagttttcaggctcgatttggtcggggcctcgggggtcccggtcttcgatttcggggatggactcgtctccggtgtcttattggtgctacagctgcagccgcttcgtgagggtatctccgtcaactgtcgtctgcccggagtgtgatggcggcttcctagagcagtttacgcagccgccgccccgcggcggcggtgggagcggccggcgcgggacgatgaacccggtcatcgtgctccgcggcggatcgctttcagggttcgagctctactacgacgacggcgcgggcgaagggctgcggccgctgcccggtgacgtccagcacctcctcatggggtccggtttccaccgcctgctcgaccagttctcgcggttggaggccgcggctccgcgtccaccggcgtcgaaggctgcggtggagtccatgccatcggtgacggtggccggaggtggtgctcactgtgccgtgtgccaggaggcctttgagcctggcgccgccggacgggagatgccgtgcaagcacgtttaccaccaggactgcatccttccctggctctcgctccgcaactcctgccccgtctgccgccaagagcttccggctgcagccaccccagatgcggaggcggatgctgggctcaccatatggcgacttcctcgcggtggatttgccgtggggaggttcgccggcgggcctagagagcagctcccggtcgtctacactgagctggatggtggcttcagtaacggggttgggccgaggcgggtgacatggccagagggagatggccaagtggatggtggtgaaggtcggattcgccgcctacttagaaatctatttggttgttttggtcatggcagccgaccagcaagttcgtcgcagtcccgtagtggctgagcacagttttccttgtaccattttttcaattgatagcactgaagaactagggctagtgtaagaatgaaacccagattataatttcttggggctttgatgtaaatgaaggcctattgtctcattaagaattattaagagatggctatgagcaaacatcttggattgagttttgcaaccaaatttggtcaaacataagtgcaagccttcaagaaaggaatatcaatgaatgttttggggaaacaaatctttgtcaatattgtaggtagagagaacaattgttgtatttgcatccctacaccctactgtttgtgtacatactgaattggttgaacatgaatttccattctgttatatcttatattgacattaaaaatcccaaaaatctctggcattccttatgttcatccagccacatcccttcattgtttcagtttgaagtatttgtgtcattgatcagtcataacagctgccagctgagcacttgtttatgcttaatggtcataggctcatagctaaccctagtttgtgctc

SEQ ID NO: 156425 - DNA, 612 bp, Zea Mays
atggaggcctgcacagatgttgtccccaccctattcctccaccacttctatcgcaaccatgaccacatcgccagcatcctcttcatcactagtttcacttccataggctgtgttagtgccacgaggagaggagtaggacttaggtgtcgtggtcaagatttgggtggagaaggagcgccgggaggggataatggcaaagcagtgagctcggtctctgttctgcccctcgcgccgctgaggcctcttccattgaggcgtgctgctaggaatgtgttggagggaggaggaagaagggctttgagtcccctgctcctcgcgaggtatgggctgcggcgcggacgctcggctgctgctgccgtggtcggtgaagcggagttggccctcgaagaggcggatgccgcgatgagggtggccaccgacgacgacagcatcacggccacgttggtgtccgtgctgctcacacttgcgttcgtcggcctctccatcctcaccctcggggacttcttgcagaagagggaaaaggagaagtttgagaaggagaaggccgaaaagcagaaagaggaggcgaggaagaagagggctaagtccaggcagaagagaagaaattattga

SEQ ID NO: 156426 - DNA, 1107 bp, Zea Mays
ctgatgagacaaaggaagggggcatagtagttgaaattaagcttaaggaactggaacccaagtcagctgaagtaagcacagaatggagtattgtacctgggcgtgaaggccgaccaactttggcatccatacaacccggaggaactgtgtcatttgagcaccggaacatctatggtcttaatagatctattgttggttctgttacatccagcaacctgctgaatcctcaggatgatctttcattcaagcttgagtatgtccatccttatttggatggtgtcgatgatcgtagtaaaaaccgcacattcaaaactagctgcttcaacaccaggaaattgagtcctgtctttgttgctggtcccaacatggatgaggctccacctgtttggatcgacagagttggatttaaagccaacataacagagagcttcacacgtcaaagcaaattcacatatggccttgtggttgaagagattacaacacgtgatgaaactaatactgtctgtacccatggttctcgagcaatgcctagcggcggtctgaacatggatggacctcccacaaccctcagtggtactggagttgaccgaatggcatttcttcaggctaatataacccgtgacaatactgagtttgtgaatggtgcaattgttggagacagatacattttccagttagaccaaggtcttggcattggaagcaaaaacccgttcttcaaccgtcatcaacttactctgaccaagttcatcaatttaaataagcaagagaaaggtgtcggcaagccactaccagctgttttggttcttcatggtcattatgctggttgtgtgggtgatttgccgagctatgacgcctttgcacttggagggccttattctgttaggggctttagtaatggtgaactgggcgcttctaggaatattcttgaggttgctactgaactgcgtgtccctgtaagaaacacacacgtttatgcatttgtggaacatgggactgaccttgggagttccaaggatgtcaaagggaaccctacagagtttttcaggcgtgttggtcatggatcttcatatggtgttggtgtcaagcttgggttggtaaggggagagt

SEQ ID NO: 156427 - DNA, 652 bp, Zea Mays
ctgatgagacaaaggaagggggcatagtagttgaaattaagcttaaggaactggaacccaagtcagctgaagtaagcacagaatggagtattgtacctgggcgtgaaggccgaccaactttggcatccatacaacccggaggaactgtgtcatttgagcaccggaacatctatggtcttaatagatctattgttggttctgttacatccagcaacctgctgaatcctcaggatgatctttcattcaagcttgagtatgtccatccttatttggatggtgtcgatgatcgtagtaaaaaccgcacattcaaaactagctgcttcaacaccaggaaattgagtcctgtctttgttgctggtcccaacatggatgaggctccacctgtttggatcgacagagttggatttaaagccaacataacagaggtttgcacgagttctttcgcatttttttaaattttttttgtgaccagtactgttccaggaatatctgtaacatgatgaacacttgtttggattcacagagcttcacacgtcaaagcaaattcacatatggccttgtggttgaagagattacaacacgtgatgaaactaatactgtctgtacccatggttctcgagcaatgcctagcggcggtctgaacatggatgga

SEQ ID NO: 156428 - DNA, 1412 bp, Zea Mays
ggaagacgcacctcctccgcccctcctcgccctccgccctcgctcccccacgccgacgccgacacctatcctcaccgtatccgcggtcgcaaatggcgctaacctcccaaggcatcaccctccgttccccgccagcggggccccgcggccacggcgggaggcggtcctcttccgtgcccaccgccgcgaccccgcgcgtcttggggcagccccacgcggggcaagccttatccatctcgcccgtcaggtatgaacccgccgctcgcccaccacggggaggctccgccgccgccgccatacgtgccgccgcctcggccggcgcgcagcccggcagcgacccggtctctgctgagcccagaatcgagctccccacgatattttccgtcttctccgagaccgctaagaccggcgctgccttcttcattgcctcgtcgggcgcggccttcctcctcggctcgtttggggggttcggcggcggtgctgggggtctcttcggcggcggcggtggtggagggggtggatggggcgcggggggtggtggtgccggtggcggagggggtggagacttctggtaccggctcatctcttccggcgcggcgcacgcggacgacaagtcatcgggggattgggacgcgcacgggctccccgtcaacatgacggtgccgctcacgaagctgagcgggctgaagaggtataagctgtctgagctcaagttctttgatcgggcagctgccagcggtggcgcctatacggggccagaggattccttcttcgaaatggtgacactgcagcctggtggcgtgtacaccaagtcgcagctgttgaaggagctcgagacactcgtctcctgtggcatgtttgagcgggttgatctggaggtgaagcccaagccagataacacaattgggctcacagtctcctttgtggagagtgtgtggagttctgcaaagcagttcaagtgcatcaatgtggggcttatgtcacagtcagggcaggttgacttcgaccaggacatgacagagagggagaaaatggattacctccgtaagcaggaacgtgattaccagcagcgtgtacgaggtgccaatccctgcatcttgccagaaaatgtacgtggagaggtgctgggaatgatgaagaagcaggagaaagtgagtgccaggatgctgcagaagatcagagatcatgtccagaaatggtaccacaatgagggtttcgtatgcgcacaggtggttaactttggaaaccttaacaccaatgaggttgtgtgtgaggtggtcgagggtgacatcaccaaggtggagtaccagttccaggataagcttggaaatattgttgaaggaaatacccagcttgcgatcatagaccgagagctgccgcagcagcttcgacctggccacatctttaacatt

SEQ ID NO: 156429 - DNA, 243 bp, Zea Mays
ctccttttctggcttcttttggatctcctgcgcaatcctgtcatcctatgcctgtgttaagtagaaggccttcaaatttcttaaagctaaatataacctacattttgatgctgtctgaaaaatgttctggtttcaccaaacaacaaagaaaaaacactaaatacgagctaactggttgtcctaacaattacatgtaaaggatttttttcgaaagcgcaggggaactgcgcatcatttaattag

SEQ ID NO: 156430 - DNA, 381 bp, Zea Mays
atggcgaaaagctggttggacatcggccttgcggtttttgtagccatcccgtctttagagggcgggcaggtgttcgtacagactgcatttaatgcacatgtcttggggtttcgagaagtcggtcgaggctgggctcataccgggacctcgcctgagatgccctcgggtgaggcggacacgcgttctccgcccaagggtgcccttggtaggttgctgatccacgtagatgtagcattcaccggagtggatgtttgctgcaagaagaaagtggagagggcaaataaggctctcctgtggatgcatcaagacaacagcatgatggcgccaaacttgaggtcagcattgggcaagggcaactaccagagcagagaaaccaaataa

SEQ ID NO: 156431 - DNA, 663 bp, Zea Mays
acatcgccgttgcagacccaccagggtaggtcaccacgaacgaacgcgtcgcgtatacggcgcaccaccatggcactagcgggaaaatttcagtgaccgaataaacgaaacacctcagtcgagacgcgagagtttatctacctatctggtgtccgctttaatttctttcctcggtccctccaccccccttcgccctttccgacgcgccgcccgaaaccctagccccactgattctctccagcccagcccagccaaggggaggggatgtcggcggcgccagcggcgggagggcagggtggcgggggcattgacgccgcgctcctcgacgacatcatccgccgcctgctcgaggtgcggaccgcgcgcccagggaagcaggtgcagctctctgagtcggagatccgccagctgtgcaccgtctcccgcgccatcttcctcagccagcccaacctcctcgagctcgaggcgcccatcaagatctgcggtgacatccatggtcaatacagtgatcttctaaggctttttgaatatggaggttttcctcctgaagccaattatctattcttaggtgattatgttgatcgaggcaaacaaagtttggagactatatgccttcttcttgcttacaaaatcaagtaccctgagaacttttttcttctgaga

SEQ ID NO: 156432 - DNA, 790 bp, Zea Mays
acatcgccgttgcagacccaccagggtaggtcaccacgaacgaacgcgtcgcgtatacggcgcaccaccatggcactagcgggaaaatttcagtgaccgaataaacgaaacacctcagtcgagacgcgagagtttatctacctatctggtgtccgctttaatttctttcctcggtccctccaccccccttcgccctttccgacgcgccgcccgaaaccctagccccactgattctctccagcccagcccagccaaggggaggggatgtcggcggcgccagcggcgggagggcagggtggcgggggcattgacgccgcgctcctcgacgacatcatccgccgcctgctcgaggtgcggaccgcgcgcccagggaagcaggtgcagctctctgagtcggagatccgccagctgtgcaccgtctcccgcgccatcttcctcagccagcccaacctcctcgagctcgaggcgcccatcaagatctgcggtgcgtacctcacctccctctttctcgtctccggccggccgtggcggtagatctggtctgtttgcgccgccagtgggtgaagcttacgtctcgtgggaaactggcgttcgtgtctctatgaagcactggagtaattgtaccattaatctgggctgttctggatttaatgattttttttgctggtatatggatgtgttttatgagacccttttattttcctgggttttaatttgattatgaatggatgtttatgtcattaccatgctggtggtttatttgcaacgagaaaatttgggtaacaatata

SEQ ID NO: 156433 - DNA, 446 bp, Zea Mays
gctcctctcaccctccccacacatctcctctcaccctcccgacacatctctgccagtcctgacgtccgacatacgacaccggcgatctgcgcaatcgctcccatcgatccttcctaggatatggagaagggtaagaagtcaggctcgggcaggggctacatttctcggaatgatgatatggacaaggcacttcttgacacattcgtggagtactaaaacaagggtgacagatgccaaaatgggtggaagtctcatgtctacacggctgctatcaagaatgtccgaaatgggtggaaaagtctcatgtctaggcataatttgtgaagaatgccaaaatgggtgtaatttttctgtctaagtttagttgttcaatttgatgtggttacttccctcaaattatgtaaattccatatataactatccaaacaagatatttaatttgattc

SEQ ID NO: 156434 - DNA, 1916 bp, Zea Mays
ttttacgcaatccatgcccgtgtctttattcgcggccgccgacctccggagcatgagaaaaatagaaaatcccttcaaaccctaagcccctctctgctcacctctgcactccgaatctgctcccaagtctgctagggtttaacgcccgcgtcctcctcacgcattcggtctggtcgctgatcttcgcttgttcgattccgctcggctctaggacccaggctctcgaggcggctggagtggcggcgcgacgagagggtgaagcggatgcagacggaggcgagggtggggatggccgccgccacgatggacggcaccggcgccgcggcgtccgccgcccggaggtacacgacgcagcagcagcagcagcagcagctgcagcaccaccagccgcagctcgggaccgtgccccatctcctcgccggcggcgtcgctggcgcagtcagcaagacctgcaccgccccgctcgcacgcctcaccatcctctttcaggtacaaggaatgcactcagatgtggctacaatgcgcaatactagcatatggcgtgaagcatcccgcattgtctatgaagaaggttttcgagctttctggaaagggaaccttgttaccattgctcaccggttgccttactcttcaattagtttctatgcctatgagagatacaagaatttgcttcagatgctaccgggtcttgagaagaatggtggatttggtgcagatgttggtgttagattgctaggtggtggtttatcaggaatcactgcagcttctgcgacgtatccactggacttggtgcggacacgtcttgctgcccagacaaatactgcctactacaggggcatatctcatgctctttatgcgatctgcagagatgagggtgtccgtggattgtacaagggtcttggtgccactttactgggagtgggccccagcattgcagtaagcttctctgtgtatgaaactttacgttcccattggcaaatagagaggccatgtgattcccctgttctgatcagtttggcttgtggaagtctttcaggaattgcatcgtctacttttacattcccattggatcttgtgagacgtcgcatgcaattggaaggagcagccgggagggctcgcgtctaccagacaggactttttggaaccttcggacatattgtccgtacggagggttttagaggcatgtatagaggaatcttgcctgagtactgcaaagtggttcctggtgtcggcatcgtatttatgacatatgagatgcttaaggccatcctcacaggactggaatctgatgattagatatctgcgaggtcatgctacgcaattttgatacatggtgtcagaacaacatttgaggctgattagactgggagaaatatgagcatgtagcatacgttagggtttaggatgtgctaaggtttgcagtttgtgttatatggttacagatgtttatgtagtgcaccgtgaacgatgccacaggtcttccaaaatgaatatttttttggcatcaccatcattttgtgtatcttcaataacattgtaatggtacatgaagctgttgtctttagcctgatgatctttataactgtgagatatggtctccaattttaccagtgttatagcaaggttgatcaatggtggcaagagaactgtgaatagccttgacttgatatatgtttatcctgatatgaccatgggtctgtttcttgcatatcagtttagcaacttctcgttgcaggtgttcgtttatctccattttgtgagcgagaacccaatggctagtaatggaccacttcattttgttctcttttttttcttgctttggaaaccaaattgtttattttgttgagttcagaattgatccaatgacccaagagaaggcagaactttcatttgttgttagaatgatattcatatgc

SEQ ID NO: 156435 - DNA, 2010 bp, Zea Mays
ttttacgcaatccatgcccgtgtctttattcgcggccgccgacctccggagcatgagaaaaatagaaaatcccttcaaaccctaagcccctctctgctcacctctgcactccgaatctgctcccaagtctgctagggtttaacgcccgcgtcctcctcacgcattcggtctggtcgctgatcttcgcttgttcgattccgctcggctctaggacccaggctctcgaggcggctggagtggcggcgcgacgagagggtgaagcggatgcagacggaggcgagggtggggatggccgccgccacgatggacggcaccggcgccgcggcgtccgccgcccggaggtacacgacgcagcagcagcagcagcagcagctgcagcaccaccagccgcagctcgggaccgtgccccatctcctcgccggcggcgtcgctggcgcagtcagcaagacctgcaccgccccgctcgcacgcctcaccatcctctttcaggtgcgtctgtatcatagggagggcggtcttgcttctgcagttctgctcgccaggttactcaaatgctcagagtgcgactcgtgtaaatagcagattaggctattatttcctcgggtgtttataactaagccacggagtacgtcacatcttttcttttctttttggaatgaattggctgcaatcttactaggatttgtggagaaaatagtaaccataatgcattatctcattttactttggcagcagacaacttgtttggctatttaaaggaatgctgatcacatagttgcttttctgatttttctggagaaatccttgatagtgtggcttagttttgttgttctactctttcgcaatatgattgtgtggctttagtgaaatttatgaatcgtacttgcaggtacaaggaatgcactcagatgtggctacaatgcgcaatactagcatatggcgtgaagcatcccgcattgtctatgaagaaggttttcgagctttctggaaagggaaccttgttaccattgctcaccggttgccttactcttcaattagtttctatgcctatgagagatacaagaatttgcttcagatgctaccgggtcttgagaagaatggtggatttggtgcagatgttggtgttagattgctaggtggtggtttatcaggaatcactgcagcttctgcgacgtatccactggacttggtgcggacacgtcttgctgcccagacaaatactgcctactacaggggcatatctcatgctctttatgcgatctgcagagatgagggtgtccgtggattgtacaagggtcttggtgccactttactgggagtgggccccagcattgcagtaagcttctctgtgtatgaaactttacgttcccattggcaaatagagaggccatgtgattcccctgttctgatcagtttggcttgtggaagtctttcaggaattgcatcgtctacttttacattcccattggatcttgtgagacgtcgcatgcaattggaaggagcagccgggagggctcgcgtctaccagacaggactttttggaaccttcggacatattgtccgtacggagggttttagaggcatgtatagaggaatcttgcctgagtactgcaaagtggttcctggtgtcggcatcgtatttatgacatatgagatgcttaaggccatcctcacaggactggaatctgatgattagatatctgcgaggtcatgctacgcaattttgatacatggtgtcagaacaacatttgaggctgattagactgggagaaatatgagcatgtagcatacgttagggtttaggatgtgctaaggtttgcagtttgtgttatatggttacagatgtttatgtagtgcaccgtgaacgatgccacaggtcttccaaaatgaatatttttttggcatcaccatcattttgtgtatcttcaataacattgtaatggtacatgaagctgttgtctttagcctgatgatctttataactgtgagatatggtctccaattttacca

SEQ ID NO: 156436 - DNA, 1849 bp, Zea Mays
ccgaggccccaggacaggcactgaggtctgaggcacgcacatacataccacgcgcgctccagaggacttgtgcgctcgtcaggccacaaccgcagcgcggcacaagaccaacggggaagaggaaggcagtgagctgttccgcacccgccgcccgcccgtctcatctgatgaggaaggtctgcccgaacctcgagcgcgacgacgcgctggacacggtgctggaggtgcccatccccgaggagatgttctccggcggcggcggcggcggcggcggctcctgcgggttcaggttcggctgcaccagcgtcaaggcgtggatgcggtcgcacgccgctgaccggtgcggcgcgggcgagccgtgctccatgagccgcggggagctgcagctcatgctaggcgtcatcggcgcgccgctcgtcccgctgcccgtcgccgtctgctgccgcgccgagcagtcgccctgctccgtcctctgcgagcagctcaagaccggtccaatcgagtcgtcgtccgccaagtacatcgtgcagcagtacgtcgcggcgtcgggcggggagcgggcgctggacagggtcaagagcatgtacgcgatgggcaaggtgcggatgacggccgcggagcagctcaacggcagcgacgccgccggcggccactgcggaggagccaccggaaaggggaaccgcggcgggaggaggaagggccgcggcggcgaggtcggcgggttcgtgctgtggcagaagaggccggagctgtggtgcctagagctcgtcgtgtccggctgcaagatcagcgccggcagcgacggaaaggtcgcgtggcgccagacgccgtggcaccagtcccacgcttcccgcggccccccgcgcccgctccgccgctcgctccagggcctcgacccgcagctgacggcgagcctgttcgcggactcggtgtgcatcggcgagcggagcgtcgacggcgaggactgcttcgtgctcaaggtggaggcggaggcgtccagcctgcgcgcgcgcaacagcggcagcgtcgagatcgtccggcacacgctgtggggctacttcagccagcgcacgggcctgctggtgcagctcgaggactcgcacctgctgcagatcaggtccggcggcggcggcggcggcgggagcatcttctgggagaccaccgtggagtcccgcctcggcgactaccgcgccgtcgacggcgtgaacatcgcccacgccgggcgcaccgccgtctcgctcgtcaggttcggcgactgccagcaggacggcagcagcgccaggacgcgcatggaggagacgtgggacatcgaggaggtggacttcaacatctggggcctgtccatggactgcttcttgccgcccagcgacctccgggaggggggcaaggagagccaggacgtcgccgtcgctgtcgccaaggccgatgcgcgacccccgccgataaggatacctgcggtggccgtgcgcgtcgggccctcgcaggtggctgccgtcagcatggacgactcggactcgctcatcgcgaggccatgactactcctgccgtacccgtacgtacgtgcttacagtgctgagtgaagagcaagtatacgtggcacttgttagttgttactacaggatcatacttgtcgcaagatctgtaaatatattgcagtttgagatttttcccccttcgagaggtgtcaggtgtggatttacctcagctagaattgaggccagaagcagtagtgagtaatccgaactagatgttcggcgtatagctgcattgtaaattctaatgaactagtcctgtaaatctgaaagaaaatcccagttcttctgcccagtcacaatactgaagtacgtaa

SEQ ID NO: 156437 - DNA, 728 bp, Zea Mays
ccgaggccccaggacaggcactgaggtctgaggcacgcacatacataccacgcgcgctccagaggacttgtgcgctcgtcaggccacaaccgcagcgcggcacaagaccaacggggaagaggaaggcagtgagctgttccgcacccgccgcccgcccgtctcatctgatgaggaaggtctgcccgaacctcgagcgcgacgacgcgctggacacggtgctggaggtgcccatccccgaggagatgttctccggcggcggcggcggcggcggcggctcctgcgggttcaggttcggctgcaccagcgtcaaggcgtggatgcggtcgcacgccgctgaccggtgcggcgcgggcgagccgtgctccatgagccgcggggagctgcagctcatgctaggcgtcatcggcgcgccgctcgtcccgctgcccgtcgccgtctgctgccgcgccgagcagtcgccctgctccgtcctctgcgagcagctcaagaccggtccaatcgtacgtagtatacgactacggtccacggccggccggcgttctggttgatggttgttcttggtcgatgagggcgctgagccgctgacccatccgtctgtgtctgtctatctatcgcgctgtggttccaggagtcgtcgtccgccaagtacatcgtgcagcagtacgtcgcggcgtcgggcggggagcgggcgctggacagggtcaagagcatgtacgcgatgggcaagg

SEQ ID NO: 156438 - DNA, 3481 bp, Zea Mays
cgacctcgccacactcctcactcgcgcacaccaccaccagtcagtccagttcccgcagtgcagcagcggccagcggctgcctaatctctccagccctttttcgtcccctagccacgccgcccaccgctgccgcgtcatccgccagtcgtcgcctgccccgcggcttccgcccccattcgccgccgaagcacgccgagccccgtcccagatcgccgccgcgcttcctgccgccgccggcgcggcgcagggttggaaatctgtttgaccactcagtgagtggcttcatgttaaatccatttctggtttcaagatgcttcatcaatgacatctggaaactgtaatagtatgtgctgatcttctatgcttcatcacctgatcatcaatgggctctttcctgaggaaacagcccagctacctcttcattttaataattctgcaccttgttgctcatgaggcaagaacactgagttcagatggcgaagcacttcttgctttcaaaaaggcagttacaaattcagatggagtcttcctaaattggcgcgagcaagatgcagacccctgcaattggaagggtgttagatgtgatagtcatagcaagagagtgattaatctgattcttgcataccacagattagttgggcccataccaccagaaattggaaggttaaatcagttgcaaaccttgtcattgcaggggaacagtttgtatggttcactccctcctgaactggggaattgtaccaagttgcaacaactgtatctacaaggaaattacttaagtggatacatcccttcagaattcggcgaactggtggaactcgtggcattggacttatccagtaatacattgagtggatctgttccgcattctcttgataagttgtccaaacttacatcattcaatgtttccatgaacttcctgacaggagcaataccatcttctggttcacttgtcaatttcaatgagacaacgatgaggcttgtggagaaccaaaatgacgacatgattaacaaaaggaacgggaagaattctaccagacttgttataagtgcagtggcaacagtgggagctctcctattggtggctttaatgtgtttctggggttgctttctttacaaaaattttggaaagaaagatatgcgtggtttcagagttgagctctgtggaggctcttctgttgtgatgttccatggagacctcccttactcctcaaaagacatactcaagaagctagagactatggatgaagaaaatatcattggagcaggaggcttcggaactgtttataaacttgcaatggatgatggcaatgtctttgctttgaaaagaatagtgaaaacaaatgaagggctagatcggttctttgatagagaacttgagatattgggaagtgttaaacatcgttacttggtcaatcttcgtggttattgcaactctccttcatcaaaacttttgatatatgattatcttcaaggtggaagcctggatgaagtgctgcatgaaaagtctgaacagttggattgggatgcacgtattaacatcatacttggagctgcaaaaggcttgtcttacttgcatcacgattgttcgcctcgaataatacatcgtgatatcaagtcgagcaacatcttgcttgacggcagttttgaggcccgcgtatcagactttggacttgcaaagcttttagaggacgaagaatcccatatcactacaatagttgcaggaacatttggttatcttgcgccagagtatatgcagtttggcagagccaccgagaagaccgatgtctacagttttggggttctggtacttgaaatactcagcggaaagcggcctacggatgcatccttcattgagaagggattaaacattgttggatggttaaattttctggctggcgagaaccgggagagggaaatcgtcgatctgaattgtgaaggagtgcacaccgagaccttggacgctctgctctctctcgccaagcagtgtgtcagctctttgccggaggagcggccgacgatgcacagggtggtacagatgctggagtcggatgtagttacgccgtgccctagcgacttctacgattcagagtagcctcctggacggacaagccacagtggtgccgctagtttcccgtggaggcgcattcctttattctttgcagatattgtgtaaatgcattgccgcggtgtttgtttggtctcctccaatcggctggttcaacgggtgacatttttgcgtctgtgtttatctgtcatgctacaagttggctatgtgctgatttaataagagagaacttaccagtgtgtgtttaaaacattgatcttttggggttgtttggttccgaaggttaaattttagtctcatcaaatcggatgataacccaattacacacacaaaaactaagcagtaagatgagtatattaaacctaattaatctacaataaattagatttaatgaatttgtttcttagtttagttttcaactatctaattattttctaattagattatatttaatactgttaattggctattttataattagattatatttaatactgttaattggcgttcaaacataatacatacaccaaactttagaaccaaacaactcaacttcgaaatgctttaaaactgggttcgttacagacggcactgatacacgacggatgagacttcaatatcgttcggaacacagtagccacaacacacgctactcaagacagccatgataccggtacaacacagttacacggacgctggcattttatggacacccggcatgtgaagaactacccgatcgatcaacactaagacgaagacggcacaccatcggttgtgggcttgagcatactagccggagatctggatagacttgacgtcggccttcttggcctcctccttaggcacggtgacggtgagcacgccgttctccatggacgcactgatctgctccgtcctggcgttctccgtcaggcggaacctgcgcaggaacttgccgctgctgcgctccacgcggtgccaggtgtccgtcttctcctcctgctccttgcagcgctcgccgctgatctggagcacgttgccgtcctccagctccaccttcacctcctccttcttcagccccggcacgtcggtcttgaacacgtgcgcctccggcgtctccttccagtcgacgcgagcgccggcgaaggcggccgtctccgagctggtggtggtgcctccgaacgaggggaacaggctgctgctgctgctgcttccagagccgaagggaaataagccctggaaggggtcccagaggtcgagggagaaggggtcgaatgcgcttccacggcgaatcagcgacattgttgctcgagctcgagttttgagtgacgaggggggattgggattgttgttgtttcggcgactcgggtatgtgcttttcttggctgctctaggcttctagcttctgatgaggagcgtcgacgcgggagcggc

SEQ ID NO: 156439 - DNA, 411 bp, Zea Mays
atgtttataacccatgctatacataaattaaacaaatccaagttgaagaaaacaaaagatgtaaaccccaccagtgcatccactatatgtatgttcaacaacaattgccatcatctagtaaaaaatggtacatttcaccaccctatttccatatacttgccgaggacgaactcacgcaattggacaagaaaacaaagaaaagctaagtggctacatacgaaggcggatcaatatttccaattctccccgcaactcaaacgataccacagatcagctcgtgttgactgttctccaattctcccctgcatagacgccttcacttccaagttctccctcgattctaagcagctgattgtaattagtgagacactctccacggcagggggcaccggctttgatctgtccggctga

SEQ ID NO: 156440 - DNA, 890 bp, Zea Mays
ttcaaaccaacaatagcaagatagcatcagaaagatagcacagaatgaacataatttggcacaatgcacacatccatacagttctcaagttcgtaatatacgaagtacacaagttctgatagatgcaaatacagcgcatatcttataaccacctaggacgacacacctcgcagatcaagctgagcgctccctggacacagacctggagtacgaactgcggctatgagagtggctttcccttgaatgacgactcttgccagagtatctgctacgcgagggttcccttttactccctttcttaggagaatagcttgttgatctctcggattctggggaatggctgcgcgagtagcttctctgtggtgataaactgcacgaatagctccgtcctctggcccttggagatgaactggatgacttggagacagatctgtacctgtgccggcggtagtatggcgaaacagaaggtgacctgcgtcttctgtagcagtatggggaccttgaacgataccgtctgctgtagtaaggtgagtatgatcgccggccatagtaaggggaatatgattcatccctgccgtaaggagagtatgatcgccttctgtcatatggagagtatgaccggtctctaccatgacagtccctccgatcaggtgagtagcttgtggagtacctccgtcctggtgtcatcgtataacaaaaaatgtcaacaatgacaggttatatcaagataattttacagtgcttatatttctctttgaggaaatcgggcaaagacacccaatggttatagacttataggtggtgattagttcatgaaaacactcaccacgggatgattttgtgccaagatacttcccaggtgttggggttctacctcgtcttctctttgc

SEQ ID NO: 156441 - DNA, 1969 bp, Zea Mays
tattttctccctcgtcgacggctgtgtccggcttgatttcgatcggcagctggagagaatcgattcgattccccgtctgccgctgtcctttggctctggctcgctcattcgttcgctcgtcctaattgtctccaccactttttttttctgcccggccactgccagtccaccacaaccacgtcccgccgtcgtcgtcgcgcttcccccacgcgcgccccgtcgcgtcccggtgctgctgttgagtgcgcccgcgcccgcgcgttgccgtgaagctgcttccgcgcgccgccgccgccgcctgcctgcgtgggttgcaagtcaagcggcaggcggggggacgggcgccggagggagcggacgacccgggaggaagcaggaggagtgcaggacaagggcagccgcggcacgcgcttgagcggcacaagcgaagcaggctgcgtttagttcgtgcggtggactgcggccggggatcgctcgcttcggaggaggatgtcgcagacaggggaggtgcaggtgccgctgttgcagaccgaggaggcggatggcgagtggagctccaagccacgccgcattgctctcttcgtcgagccgtcgccctttgcttacatttccggctacaagaatcggtttcagaacttcatcaagcatctacgagagatgggcgatgaggtattggtggtgactacacacaagggagctcctgaggagttccatggtgcaaaggtcattggctcttggagctttccatgtcctctgtaccaaaatgttccactctcgctggcattgagccccagaatattttctgaggtgaataaattcaagccagacataatccatgcgacatcacctggaattatggttctcggtgctctggctatagctaaaatgatatcggttccaatattgatgtcttatcacacacatcttccagcgtacataccgagatacaatttaaattggttacttgagcccacgtggagttttataaggtgcctccacagatcagcagatcttactctagttccttcattagctattgctgaagactttgaaaccgctaaagtagtgccagcaaacagaatacggctttggaataagggtgtagattctgaaagctttcatactaaatatcggaggcacgaaatgcgtgtcagattgagtggtggtgaaccagaaaaaccattggtaatacatgtgggccgttttggacgtgaaaaaaatttggattttctgaaaagggttatggagaggctcccaggagcaaggattgccttcgttggagacgggccatacagggctgagttggaaaaaatgttcatgggcatgcctgcagtttttaccggaatgctccaaggtgaggagctctcacaagcgtacgccagtgcggatgtatttgcaatgccttcagaatccgagaccctcgggcaagtagtgctggagtccatggcttctggagtcccagtcgtcgctgctcgtgctggagggatacctgatataatacccaaggacaaggagggtaaaacaagctttttgtttacaccgggagatctcgatgagtgcgtgaggaagatagagcaagtcctcagttcaaaggatctcagggaaaccgttggaaaggctgccagggaagagatggagaagtgtgactggagagcagcctcgaagaaaatccgcaatgagcactacagcactgcgatatcgtactggcggaagaagatggacaagagtaactaggcttccgtgttccgggttcttctgtcgctgccctctccaactagttgctgttaataaccaaagaatttgtacattgtacccaaacagctcgcgagtttgtgtggctggctgcattcaaatgtccacagtttgactgacgacggcttgtatgcaattcgtgtacaattagacagctcttaagattgccgaactgctaactcaggaaggttcgacacaaaattctccaataatttcg

SEQ ID NO: 156442 - DNA, 107 bp, Zea Mays
aagatggcgtggatcagaaaaatggtaagttttgcttcatagatatattaatatttgaaatctcaatcaaaccctcttgttttccgtctgctaacataatcgtatgg

SEQ ID NO: 156443 - DNA, 2068 bp, Zea Mays
cgccgggcatcggccgcctcctaccccctctagtccaccctgtccccggacaggcagcgtcggagcgccggcgttgccaacgccaacgcggaggcgagacgatcgggaaggaggggagcagaggaaggatacagtccggagcttcagctgtctgctgtctgcggtctgcgggagcgatcacgtctacggtctacagtcgacaggttcgtgcccgattcttgtctgctttgctttggggaatggtatggcgcatcgaatccagctattctcatgcgtttttcaagatttttctcattttgtcctcgatttcgccccccttttcagtttatgtagcttgttgcgaacgagcagagtatacaatattgcttcgtctatcgacagttcgacgcgctaaagtaaacaagcttttacagctttatttactgataacttcgcaccctccgcgcagttgcgacctccaactggagctggcttcacatagacttctggaggaggcaacgggattgcgatttggaacatggggagttcggtcggctgcttggtaggcggctccaagtcgaggcaagatcagaattgtcaggtcgtcgcgggttcgtctcacagttcaggtcatgtcttatcaagagctggaaataatgtacaggtattctccctaaacgagttgaagactgccacacaaaactttcacatgttgaattgcattggccgtgggggtttcggagcagtgtataagggaaacctcaaagatggcactcaaattgcaattaaaaagcttgcagttgagtcaaaacaaagaattagtgaattcttgacagaaattaatgtcatatcaaatgttaggcacccaaaccttgtcaggctgattggttgctgcgctgaagggaaaaacagactattggtgtatgagtatgcggagaataatagtttggcgaatgctttgcttggaccaaagaataaatgtatcccattggactggcagaaaagagctgctatatgtattggaactgcttctggccttgcttttcttcatgagaaagcacaaccatgcattgtccaccgtgatatcaaggctagcaacattttacttgataagaaactgctgcccaaaattggagattttggattggccaagatttttcctgataccgttactcacattagcacgcgtgttgcaggaacaatgggttatttggcaccagagtatgcattgttgggacaattaaccaagaaagcagacatatatagttttggtgtgcttcttctcgaagtgataagtggtgaaaacagcagcaagccgacttgggggcctaatatgcatgttcttgtggaatggacatggaagctgcgagaagaaggaagactcttggaaattgttgatccagaactgaaaaagtacccagaggagcaaatgcttcgtttcatcaaggtggcactgctgtgcacacaagccacgtcccaacagaggccatccatgaagcaggttgtcaatatgctatctaacaaagcagaaattgacctgcaaaatgtagttgcaccaggtgtactgaaagaacctcggcagcgtactggcggctttgggagtttgacagcaggcacgtcctcaaagccaaagcaccaaaggcaatccagctgaatcatacagtacaattgtacaaagaccaacatgaacagctgtcagtttagcacaaccgacgcatcaccaaggtgacgtgatagactgtcagcttgcaagcttgtttgacgtcttcactcttcaaaggtgtcacaaactctagtgatatggaaggcctgatccattttcatcctgttttagagttacgtagtatgcgaaggccgctgtgaattgctgatgtacaggaattgtagctcatcttttttttgttcttttgcaaaagaggaattgtagtttgatttgacgattgattttaccttctggcggccacgttacaaaggacagttattttaggcatcaagttctctatatattagacacatttagtagcagtttatactattcaacgtttttttacaatatactattcaacattgagttgcaactgtacatggt

SEQ ID NO: 156444 - DNA, 745 bp, Zea Mays
atcggataagccttatcttctccaacaaacaacaaataaatcccgccataacatgcatgacgatcgtgctcgccaaagtgatccgtgtcttctacccgctcgccgacatgctccgccaggacgacgcctaccgactcgacggccgcatccaccaggacgacaccgatggcggcgctctcaccgtcgagaacgacgagggcgtggaggtcttcgagggcgaagccgaggccgagcgcgtctccttccacccgctcgtcggtcgcatcctccaggacgaacggcgacgcgctcgccgtcgagggcgacgagggcgtggacttctttgaaggcaggcaagcggcggcaattgctgtcgcgggcgaccatgcagcgcaactggagaaggccgatctagccgccgcgatgatgctcctcctcctcgacgctacctcgctccgctactcgcccgccgcgctggtagccgcgcacgagaggttgtgggcctgcagggtctccatcgccgtacgcacgagaggtttgctaatattgtgagagcgaaagaaattatccaactttagacatcagcaaagccatgttcatatatttttcatttcaatgttatgtgtgcaattacatttattcatctactcattcttacatgcatatttatgtagtaaaactggaatagtgttcatatcaacttagcttaggaacatacatgaattatttgtactacaaaccgaactataggttgtatatactttcg

SEQ ID NO: 156445 - DNA, 560 bp, Zea Mays
cggtgctacagtgaagggaaggttccttcggccttcaagttggaggagtacaggttcaaagaatacgctatggtgtaattgtttgcttggcactggtgagttcaccgtgattagaaggattcgaacttccccaattctgcttcctctgcctgagcacctgtgaaatggtatactgagctgagccatgtaagagaaagcgctggtttggtataacgaactgagcgtctgagccaactaagagagagagctgaacggatgggccagctatccactcagccatatggtcaaaatcgaccaactcttgatgcattaatctgactgccacacattttttacaaagttgttttgccttcacgtacccttcgcaataacaccatgtgttgtctctggtttcttctgtaaccttatcattgggttttaaggctcaaacccaacgaaacatgagaacttggtggtctatggtttcttctgtaaccttatcgttgggttttaaggctcaaacccagccgaaacatgagaacttggtggttttaaagataaatcaccaaacctctacaggt

SEQ ID NO: 156446 - DNA, 3272 bp, Zea Mays
cctcccctcggccctctccgtcctggctgggcccacccgggcattcctgcatcaaatcccccacccgcgcgtgccgtcgctccgcccgccccgcgtgcccgaatttcgccgtaatccggctggtttttccccgtgcgcagcgagccgtaatggcgctgtccgcgtcggcggcgtcgaccggccgcgggtcgcgggcggagaaggtgaggaggatcttcgagcgcttcgacaccaatggggacggcgggctggaccgcaacgagatggccgccctcgtcgtcgccgtcaaccctcgggtcaagttcagcgaggaccagatctccgccatcctcgacgaggtgttccgcacctacgccgagttcatcctccccgacggcagcggcctctccctgtcggggctgctccgcacctacaacgacggcgccggggacgtcgaccgcgacttcgtcgcgctctcccttcccaccgtccattccgacgcctcatccccggatatcgccgcgggggacgccgccgcccactcctccccgccctccgcctccgccgcgtcgctgctcgacgaccacgccatgccgctcggcggcggcggcgttccgacgccagccacggccagctcccgcgccacggccgccgcgccggcgtgggcgggctcgcccaaccacggcatcgccttcgactcctcctgggggctcctcgacgacctggagatactcgtcaagcgcctccgctcaaagcaggtgcggaagggctccatcgacgggagcggcggcgccggcaacagcaacttcgactccttctccgaggccgggtggtccagggagatctccggcgcggcggattcggcatccaccagcgccccgtgggacgagacgagccgcgactacctcaccttcgtcaaggaactcgccgtgctccgcacgcgcgccgacgcatcccgctcgcgtgaggaggccttcgacaaccacatgatcatcgggcgggcgctttccgagcaccgcctcttccgagacgccctagccagcttccgccgcgcctgtgagctgcagcccactgacgtccgtccccacttccgcgcggggaactgcctgtacggcctcggtcgctatgctgaagccaaggaggagtaccttcttgcccttgaagccgcggaggctggtggctcacagtccgcggacatcctcccgcagatccatgtcaaccttggtattgccatggaggccgaagggatggtacttggtgcctgtgagcattaccgagaagccgccatattgtgcccatctcatgccagggcactcaagctcctggggagcgctctctttggcgttggggagtaccgagctgctgagaaggcactggaggaggccatcttcctgaaggaagactatgctgatgcgcactgtgaccttgggtcggccctgcatgcagtaggggaggatgaccgtgctatccaggagtttcagacagcaattgatctcaaacctggccatgttgatgccttgtacaatcttggtggattgaacatggatgctggccgcttcgtacgggctgcagagatgtatactcgtgtgctgagcatccgaccaaaccattggcgtgcgcagctaaacaaggcagtggctttgcttgggcagggtgaatccgaggaggctaagaaggcactcaaggaggcgtttaagatgacacagagggtggaagtgtatgatgctatctcacatttgaagacattgcaaaagaagaagctaaagccttccaaaggaaaaaatgatggtcaaggggagcagacttatgttattgtggaggcatccaagttcaagagggttggcaggaagactaccttgcggcaggatttggccaatgctctagatataagggccttcgagaggatgacgaagctaggccactgcgatgtggagcttcttagaaaagagatgaatgagactgatgtccccgtatcttactcaggcactggcatccctgagaagtcaatacgcaaagcagctcttgaggttattctccgcaggctcctctcttttctcaagccagacacctttcagggtgccatcaaggcaatcaacgaaagaattctctctgtccttgatgctcctggttctggtcgtgttgatctgggtatgttcttcgccatcattgctccaatctgttcaggccctgtggataggcgcaagcgtatcgtctttgatgcacttctttggcgtcctgctagcgaaggaagcaatggccagataaggaggagcgatgcattgacctacgttaagcttcttcgggctgtttatatacccacccatggggctagtgacatgctcgaaatgcatggggagtccgaccctaccatggtatcatacacggaattcttagagatgttcaatgatccggattggggatttgggatcctgagcactctggtgaagctcgaagagagtgaccacatacgccatggtagccacacatgctccatctgccggtaccctatcattgggtcacggtttaaggaaacaaaacactcattcagcctgtgcaaccggtgctacagtgaagggaaggttccttcggccttcaagttggaggagtacaggttcaaagaatacggtaacgagtcagaggccctcattgataagtgcatgtgcttcaatttacattctaagaagctggaaaccgatgcctgatcattcaaacttggatctcaagtgctcaaagcatgaatctgtgtatttcctaggtgcaaagatgtctagtcagctctcccactctcttgtaaacaaagctatggtgtaattgtttgcttggcactggtgagttcaccgtgattagaaggattcgaacttccccaattctgcttcctctgcctgagcacctgtgaaatggtatactgagctgagccatgtaagagaaagcgctggtttggtataacgaactgagcgtctgagccaactaagagagagagctgaacggatgggccagctatccactcagccatatggtcaaaatcgaccaactcttgatgcattaatctgactgccacacattttttacaaagttgttttgccttcacgtacccttcgcaataacaccatgtgttgtctctggtttcttctgtaaccttatcattgggttttaaggctcaaacccaacgaaacatgagaacttggtggtctatggtttcttctgtaaccttatcgttgggttttaaggctcaaacccagccgaaacatgagaacttggtggttttaaagataaatcaccaaacctctacaggt

SEQ ID NO: 156447 - DNA, 3034 bp, Zea Mays
gagccagccagccaggcacacggctccgccgccccttccgctccgccctcctctcctcccctcggccctctccgtcctggctgggcccacccgggcattcctgcatcaaatcccccacccgcgcgtgccgtcgctccgcccgccccgcgtgcccgaatttcgccgtaatccggctggtttttccccgtgcgcagcgagccgtaatggcgctgtccgcgtcggcggcgtcgaccggccgcgggtcgcgggcggagaaggtgaggaggatcttcgagcgcttcgacaccaatggggacggcgggctggaccgcaacgagatggccgccctcgtcgtcgccgtcaaccctcgggtcaagttcagcgaggaccagatctccgccatcctcgacgaggtgttccgcacctacgccgagttcatcctccccgacggcagcggcctctccctgtcggggctgctccgcacctacaacgacggcgccggggacgtcgaccgcgacttcgtcgcgctctcccttcccaccgtccattccgacgcctcatccccggatatcgccgcgggggacgccgccgcccactcctccccgccctccgcctccgccgcgtcgctgctcgacgaccacgccatgccgctcggcggcggcggcgttccgacgccagccacggccagctcccgcgccacggccgccgcgccggcgtgggcgggctcgcccaaccacggcatcgccttcgactcctcctgggggctcctcgacgacctggagatactcgtcaagcgcctccgctcaaagcaggtgcggaagggctccatcgacgggagcggcggcgccggcaacagcaacttcgactccttctccgaggccgggtggtccagggagatctccggcgcggcggattcggcatccaccagcgccccgtgggacgagacgagccgcgactacctcaccttcgtcaaggaactcgccgtgctccgcacgcgcgccgacgcatcccgctcgcgtgaggaggccttcgacaaccacatgatcatcgggcgggcgctttccgagcaccgcctcttccgagacgccctagccagcttccgccgcgcctgtgagctgcagcccactgacgtccgtccccacttccgcgcggggaactgcctgtacggcctcggtcgctatgctgaagccaaggaggagtaccttcttgcccttgaagccgcggaggctggtggctcacagtccgcggacatcctcccgcagatccatgtcaaccttggtattgccatggaggccgaagggatggtacttggtgcctgtgagcattaccgagaagccgccatattgtgcccatctcatgccagggcactcaagctcctggggagcgctctctttggcgttggggagtaccgagctgctgagaaggcactggaggaggccatcttcctgaaggaagactatgctgatgcgcactgtgaccttgggtcggccctgcatgcagtaggggaggatgaccgtgctatccaggagtttcagacagcaattgatctcaaacctggccatgttgatgccttgtacaatcttggtggattgaacatggatgctggccgcttcgtacgggctgcagagatgtatactcgtgtgctgagcatccgaccaaaccattggcgtgcgcagctaaacaaggcagtggctttgcttgggcagggtgaatccgaggaggctaagaaggcactcaaggaggcgtttaagatgacacagagggtggaagtgtatgatgctatctcacatttgaagacattgcaaaagaagaagctaaagccttccaaaggaaaaaatgatggtcaaggggagcagacttatgttattgtggaggcatccaagttcaagagggttggcaggaagactaccttgcggcaggatttggccaatgctctagatataagggccttcgagaggatgacgaagctaggccactgcgatgtggagcttcttagaaaagagatgaatgagactgatgtccccgtatcttactcaggcactggcatccctgagaagtcaatacgcaaagcagctcttgaggttattctccgcaggctcctctcttttctcaagccagacacctttcagggtgccatcaaggcaatcaacgaaagaattctctctgtccttgatgctcctggttctggtcgtgttgatctgggtatgttcttcgccatcattgctccaatctgttcaggccctgtggataggcgcaagcgtatcgtctttgatgcacttctttggcgtcctgctagcgaaggaagcaatggccagataaggaggagcgatgcattgacctacgttaagcttcttcgggctgtttatatacccacccatggggctagtgacatgctcgaaatgcatggggagtccgaccctaccatggtatcatacacggaattcttagagatgttcaatgatccggattggggatttgggatcctgagcactctggtgaagctcgaagagagtgaccacatacgccatggtagccacacatgctccatctgccggtaccctatcattgggtcacggtttaaggaaacaaaacactcattcagcctgtgcaaccggtgctacagtgaagggaaggttccttcggccttcaagttggaggagtacaggttcaaagaatacggtaacgagtcagaggccctcattgataagtgcatgtgcttcaatttacattctaagaagctggaaaccgatgcctgatcattcaaacttggatctcaagtgctcaaagcatgaatctgtgtatttcctaggtgcaaagatgtctagtcagctctcccactctcttgtaaacaaaggtgccatcattcggagtttctctaaatgtgtcccagttactaataaccctgatgtgctagctggtgttttaagtgtacggaaacgagtaaatgggaattccatacactctgttaccccagtccaatacaaccttgctgacccttgcatatttttgtttgagcaagaacaattttggggttctcttcaatgctttttgcctt

SEQ ID NO: 156448 - DNA, 2395 bp, Zea Mays
ttatcgttttgccatttgccaacccaactcccgattcccgaaggcccatttcgtcgtctctcgctccctcggtccttccttcacccatctcacccgcgacccgcccctttcccctaagccatctccttcctcctcacctcgccatggcgttcttctctcatcaccatctccagcagccacacgcgcagcagccagtgctcccttccttcaggaacgcgctaccggtgcctgtggatggccagatcccagcgcccctcaccttcttcaacccgccgcctgccttcccggagcaacccgcgcaggcacctctggtggatgcggtgggcttgacggcagctgcggggcttgggtggaggcagccgagggagcaggaactgcttggggaaaactcccagatgtcgtccattgattttctgcagacgggctcggcagtgtcgacggggttggcgctgtctctggaggaccggcgccacgtcggcggcggggctgggaactcctctggcgattcaccgctgctcctgctgcccatgctggacgatgacatctcacgcgaggtccagcggcttgacgctgatatggaccgctttattaaagctcagagtgaacggctgaggcaatctatactggaaaaagttcaggcaaagcaatttgaggcactggcctcagttgaggacaagatactcagaaaaataagggacaaagaggcggaagtggagaccataaacaaaaggaactctgaactagaggaccagattaagcatttgggagtggaagttggtgcttggcagcatagggccaagtacaatgaaagcatgatcaatgcactcaagtacaacttggaacaggtttgtgctcaccagagcaaggatttcaaggaaggctgcggcgatagcgaggtagatgacacggcgtcctgtcgcgatggtggtgctatcaattttcaactgactccgaaggagaacagacaaccgaaggatttgacggcttgcagggtctgcaaatcaagtgaggcatccatgctcttgctgccttgtcggcatctttgtctatgcaaggagtgcgagagcaagctgagcttctgccccctgtgccagtcctccaagatacttggcatggagatatattatgcgtagaatagaatttatgtatcacatgagtatcgtacgagatactgctatgttaatacgattaatctattgccaaactttagaacctatgtaccagtaccactatgacttgccactggatcaaaagacactgccgttgatggtagatttaccgcagcaaatttctgtgagaagcccatcgttgatttgtgctcctggttaacttcttggcggagtttgtcttgtgcgactgattgttaccgtccgtctgtatttccatcacctgaacttctgaggccgtgtttcgaactcagaaaatttacccggctcctgtgctttcactgctacattgacttggcaatttggtaaatatttatgtgtatatataaatagagtgtcaaactgttttttttagataatgggaaaaaggttcccggcctacatcaaagatgacggccgtccaaaaaacagtagtactgccagaaaataaaagaagccacaagcggcaaaaagacccaagcacagttgggattgaataactagccactagttattctatttctaaagctccaaccgtgcttggcgaagatttgcatcattgagacttccagggtcctgcaggcaactttgatccttacgatgtcctcttcacgcctttggagaagcccccagaaccgacaccaataagtccctcgaaagagtacctgcaagtaagttataataggcttcttatcaaaaaccacatcatttcgacttagccacaacgcccagcagattgctatggcaccaacataaatctttgcctttgtttctttatcgaacttctgcaaccaggaggatcccatatcctgtatgctagttggttctctaataccaaaggtaaagaaaatcgttcaccaaagaaatctagcatagtgacaatcgaagaaaagatgttggatggtctcgtcatgagaacaaaacatacacttttttgattctacccagtttcttttgattaggttgtcttttgtcaagatcaccccccgtgttaggaaccagcagaatatcttaatttttagtggtactttaagtttccagatgagagactcttgacggtgtattcccctctcaatcaaggctgcatacatcgagtgagaggagaacttcccgttttggtgaaggctccaactgaaagtgtcttttgattggtttaatgaaaggcccactaccctgttaactagcgaataccaccgtcccaagttatctccatgcaatcccctgcgaaaggatacatttagcgggacagt

SEQ ID NO: 156449 - DNA, 845 bp, Zea Mays
gatacacacggacacaccaggttcgagggttcgagcggtcgagcctggtgacctgatccctgtgctggtcaacgtcaaccgagtccgaaccgcatcgatcggacggtctcacgacgacgaaggttcgcgaatcccctccttccttcggcctcgccttcttattttgtccgccggacaagccagtagtggctacatcgcgaagggcggcaaggcagatctagggcgatcatggcttacgtcgagagaggtgttgtgaaagacaaacggactatatggcgactgagcataatctcagacttcttctgggccattgtgagctttatcagaatcttctttgacacactgttctcattggacaaaactgacaacttcaagaaagggtatggtgctggtaagaagtgggatggtggacctggtggtggtgggcggggcccatatggcggtggaggaggtggaggattcggcggcggaggtggaggtggttcacggggtcctcgcactctatctgacatccaatccaatgaccacagttctctccctgcttgtggatcctgctgtggctaataagcgtgcaaccgttccgcctgatgactacgtataacaaatgaatacacatgcttctgtatgttctgaagaacatcgtagctattgatatgtattttactgtcagacgattgtatcataatcgatatgtcgtttattaacagcctatttacctgtagcttgactctggcatgattcgcatggtacattcatggttcatctttcgtgtaccgctgcctgattgcataataactagatcagttacaaagtttaataaattgtctggtgtgctgttctgttaa

SEQ ID NO: 156450 - DNA, 1929 bp, Zea Mays
agaaaatcgccgcgtggtcggtccatccgggtcgacttgacttccctctgcaacctcggaacccagccaatccgctgatctcaactgccgggcactccgatccggcaacgatggaggggagcgccgactccttcgggtccttgacggcgccgcttgcctggcacgacttcctcgagcgcatgcgccagccttccgccgccgagttcgtcaagtccattaaaagctttattgtgacattctcaaacagagctcctgatccagagaaggatagtactgctatccaggagttcctggaaaacatggaaggggctttcagagcccacaccccttgggctggcagttcagaggaagaactagagagtgctggtgagggacttgagaaatatgttatgacaaagctgtttaatcgggtattcgcatcagtcccagaagatgtgaagagtgatgaagaactttttgagaaaatgtctttgctacagcaatttgtaaggcctgaaaacttggatataaaaccagagtaccagaatgaaacatcctggctgctcgcacagaaggagctgcagaaaataaacatgtataaagctccaagggataagcttgcctgcattctgaactgctgtaaagttataaataatttacttctaaatgcttccattgtgtccaatgaaaccccccctggagctgacgaattccttccagtccttatctacgtcaccataaaggctaatcctccgcagctccactcaaatctgttgtacatacaaagatatagacggcaaacaagattggtgtcagaggctcaatacttttttacaaacatattgtctgctgagtctttcatatggaacattgatggggaatcattatcgatgaatgaattggattttcaaaggagaatggattcagcaagggaacgcatgttggggttatcagctgactcagaataccaggataatcaagccaatcctgatgtccaagatcgtacgtcacaaagtcttggagctaacagaaattctgatgccagtttatctttgaaagaccacgtccaaggttcagggcaggatatgagaagggacagtgatgtgactgtgagtggtaaacaagctgagcaggtgcaatctatttctgaattagagaagaaaggaactgcggagctcctcaatgaggatgacttgaacaaaaaattccaggagtacccgtttctgtttgcccgtgctggtgatctgactattgctgatgtagagagcctattgaattcgtacaagcatctagtacttcggtatgtagcacttgcacaaggtatgggtgtcagtcctgaaaccactcttactcagaacgggcagacatctgatcttgtagtatctgaggagccagaaattttgaatagcgtggtaaaggacaacgagaacagtgcaataattaacaaaaatgttgatgatgttataagcttaaaccatcattcagaagcagttgacacagaagcatctgaacaaatgaaccagagaactgctgttgattccagtgatgatctggaggcattgggtcggcctgagaatgcatgacctgctggttaagccaagatgaaatggccatacatggcagaagtactctgaagtttgttcttatacctatagacgacaatgatcacaaaacagagtgcacatttccctgagtgatatgcagcagctcctcgaaccacaattttgtatgctggaggcttgagcgtcaacatagtggaaattaatctactctgccgaagctgttcttagatccaaatgttcattgcattgaagttcctggactcttggctctgttgtaggtccaatttgtggtgaacacaccctttcatgtttttatgtaactataatttccgtaagtgaagattagttcatataaaaaattatattcagagcaaagagtgaaaatgcc

SEQ ID NO: 156451 - DNA, 1605 bp, Zea Mays
cgtccttcgtccagccccagcccaagctccagccgccgcttggctcctgccgtcctgcgtcctggtccagcgcttcctctccagctccagcgccgcagcgcgctcgcccgtgcctcatctccagctctccagcgccgcagcgcgctcacggcccaccagcgccagccgccaggccgccaccgcggcaccgccaggcgcccaggcgcgctcgcccgccgaccgccgttgtccttgtccagccgccggagtccggagcaccgagcacgggagcagccgaggcgagcaaccgagcaccgccattgagcaacagtgaccgtgagccaagccgggctctctcaatatcaccacaggaacaaaggatcagaaatggctatgcaggccgcaaggaggctagcatctttgaaactccaacgacgcctactccttccctctcaggccgagtccccaagcataagcatcccaaccgcagcggcggcggcagccttcctccactcccatgccaccagcttcgggtacaagcaggttcgcgaagaggataagagcaaattggttggcaacgtgttcagcagcgtggcttctagctacgacctcatgaacgatctcatgagtgtcggcctgcataggctgtggaaggacaggcttatttccaagctgaaccccttttcggggatgaagcatctcgatgtggctggtggaacaggtgatgttgcttttcgtgtactggaaagagttaagagtgtgggtcacagagctatgcagggtactcttactgaaaccgaagaaggcacccacatttatgtctgtgacattaatccaaatatgctaaatgttgggaaaaagcgtgctgcagaaagaggttatagcgaagaacattgtcttagctggatacaaggagatgcagaagctctgagttttgaggatggatctatggatggttacactatcgcatttgggatcagaaatgtgacgcacattgagaaagctctgtcagaagcttacagggttctaaagcaaggggggaggttcctatgcttggagttgagtcatgtggatgtccctatttttaaagagatttatgatgtttactcgttttctatggttccggctattggagagctggttgctggtgatcggcagtcgtaccaatacttggttgagagcatccgtcggtttccgaatcaggaaaagtttgctcagatgattcaggaagccggattccagagggtggaatatgagaacctcgtgggtggtgtagttgccattcattctggactgaaactgtagagctgaatacggatggatattttttcatacgtgcaccgcttctacaattagtagtatttgttttttaaattaattctataataggttcggtggcttgtaaaagcagctggtgctggctgtcagcatcagcacaataagtagtatttgctaataagtagtatttgcgagaagtatatgctggagcagtagcgtcagtggctattttggcttttaagctagctgacctcttccatttgtaaagttttttcttgaaaacgtgaaaccatccagaacatcaaattagtcttatcacatacctcctgcaatatatttttttgttct

SEQ ID NO: 156452 - DNA, 1662 bp, Zea Mays
cgtccttcgtccagccccagcccaagctccagccgccgcttggctcctgccgtcctgcgtcctggtccagcgcttcctctccagctccagcgccgcagcgcgctcgcccgtgcctcatctccagctctccagcgccgcagcgcgctcacggcccaccagcgccagccgccaggccgccaccgcggcaccgccaggcgcccaggcgcgctcgcccgccgaccgccgttgtccttgtccagccgccggagtccggagcaccgagcacgggagcagccgaggcgagcaaccgagcaccgccattgagcaacagtgaccgtgagccaagccgggaactctgggggtcagtagcccgatggctttcgctgagagattgatccgcaaacgattaagaagagtactgttattctgaacaaaaagaactctctcaatatcaccacaggaacaaaggatcagaaatggctatgcaggccgcaaggaggctagcatctttgaaactccaacgacgcctactccttccctctcaggccgagtccccaagcataagcatcccaaccgcagcggcggcggcagccttcctccactcccatgccaccagcttcgggtacaagcaggttcgcgaagaggataagagcaaattggttggcaacgtgttcagcagcgtggcttctagctacgacctcatgaacgatctcatgagtgtcggcctgcataggctgtggaaggacaggcttatttccaagctgaaccccttttcggggatgaagcatctcgatgtggctggtggaacaggtgatgttgcttttcgtgtactggaaagagttaagagtgtgggtcacagagctatgcagggtactcttactgaaaccgaagaaggcacccacatttatgtctgtgacattaatccaaatatgctaaatgttgggaaaaagcgtgctgcagaaagaggttatagcgaagaacattgtcttagctggatacaaggagatgcagaagctctgagttttgaggatggatctatggatggttacactatcgcatttgggatcagaaatgtgacgcacattgagaaagctctgtcagaagcttacagggttctaaagcaaggggggaggttcctatgcttggagttgagtcatgtggatgtccctatttttaaagagatttatgatgtttactcgttttctatggttccggctattggagagctggttgctggtgatcggcagtcgtaccaatacttggttgagagcatccgtcggtttccgaatcaggaaaagtttgctcagatgattcaggaagccggattccagagggtggaatatgagaacctcgtgggtggtgtagttgccattcattctggactgaaactgtagagctgaatacggatggatattttttcatacgtgcaccgcttctacaattagtagtatttgttttttaaattaattctataataggttcggtggcttgtaaaagcagctggtgctggctgtcagcatcagcacaataagtagtatttgctaataagtagtatttgcgagaagtatatgctggagcagtagcgtcagtggctattttggcttttaagctagctgacctcttccatttgtaaagttttttcttgaaaacgtgaaaccatccagaacatcaaattagtcttat

SEQ ID NO: 156453 - DNA, 731 bp, Zea Mays
cgtccttcgtccagccccagcccaagctccagccgccgcttggctcctgccgtcctgcgtcctggtccagcgcttcctctccagctccagcgccgcagcgcgctcgcccgtgcctcatctccagctctccagcgccgcagcgcgctcacggcccaccagcgccagccgccaggccgccaccgcggcaccgccaggcgcccaggcgcgctcgcccgccgaccgccgttgtccttgtccagccgccggagtccggagcaccgagcacgggagcagccgaggcgagcaaccgagcaccgccattgagcaacagtgaccgtgagccaagccggggtttgtgaattgtgatttaaagttttggtttcattatttatttggtagtaatcccatgtttaattataggaataagatagacaaatttctcatcaagaatcggaagaaagatgcttctaattctaaaacaattaggacaaatgagagccgtgtagaataaaataggccatatattgagctagatatgaatgatatagtcctgtgcatcacgccttcggcggatgggagattcgtccgccgccggcaataagcatcacgtatgtagcaactttcaaaaggatttctgttcatcccgcaatacacatgtagccgctttttttagtattcactgctggatgttgggaattttagcctccacgacctgacaacataatcaacaagagcctccacgaagtggctag

SEQ ID NO: 156454 - DNA, 606 bp, Zea Mays
caaaagctcagtggtattcagaagtcagtaggtcagaatggtgtagttgaacctgatacatcatgggatataataacgtcagtggatttgtggaaagatggtggctcagatgatggatatgtacttgttaagcacgaggatgttgttgatgggatgacttcctttatggctgcatgtttggtgtcaattaaaaagaccaaggacctgccccttgatcaacttcaaaaagcgcttaggaagacgttttcagctgaaaagaagaaaagtaaaattcggaaggcatgggatggaactaaagtcatttataatgatgcttcatggggcgccactgttgttggggtctatagtaatcgagcattacttacgatcgcaactacaacgtttcagacttcctgtcgtgtgatatccaagttcctttgaatattgtgtcaactactagggcatgttagaattgcttgcgtgtgtgcttttccattgttcaggcagcataaagcttgagaccatttgtttagtctatgctgatgagttcgactgctaattagcaacgcctcctagtcaaaagcagcatgtgtattgtataactgtaaatattgccttgatttgaac

SEQ ID NO: 156455 - DNA, 1260 bp, Zea Mays
gcccgatcacggcgtcaactcaagccttcactgttcactctgacatctcgactctaaaccttcgcccgccgtcgccgcagccttcgccctcccctccatccccgcatccgaatcacgcacgcgacccttgacatggccacttacagcgacggcggcggcgaccagcggcgccttctcaccatccccaaggaaggcgagcgcatcatcgcgcccacgcgccgtcccgacggcacgctccgcaaggccatccgcatccgcgccggctatgtgccccaggaggaggtcgccatctaccagtccaagggcgccctaatgaggaagtcaggacccgacgtgccgccggggtacgatccggcgcaagtggccgatgccaaacccaagacgaaggcggccaagaggaacgagcgacggaaagagaaacggcagcaggccagttcgacaaataataaaggaaagagtatggacatagagggaactgatgctggagaaactgacaaggctctttcttccaaaacggttaagcagaaggattcggtggaaagtgtaataaagcagataagtggcattgctatttccgagtcacatgcaacgccgtccacaaatactacaaacaattcacaaccggaatcatctgctccagacatagataagaaaattcgagcattgaaaaagaagatacgcttagctgaagcacaagtacaaggtgaccctgaaaaattgagacttgaggcactggaaaagatgaaaaagattgatggatggcttaaggagctgaagcttttggaggacaagagagcgcctgctgcttagacaaaatcaacttcggttctgatgtagagccaccacgaccacaccatggtgccgatccagattcgaaggtgcaactgaatcaccataggcttctccgtcacccgtggtggttattggaagagcagtccagtagatgtgggtttgcgcagaacgatggaagtttttcaccgcacatttctggcgccaagtttcaagatctgtaccgcaagaaagaccgctgctaattatggggatctctgacactgggtcagaatttacttttgctctcacggcccgaattcatctccggctttaccaccattgttcaattagctgttatatcacggttgaaactgactggaagtgccggaattcttatgtctctggctccctgcctctcttcatcacatgtactacctccgttcttaataatatttatcgctggctagttcatttttaaactaaaacaca

SEQ ID NO: 156456 - DNA, 2335 bp, Zea Mays
cccacgccaacgacgacccagctgctagctagctcctcctccagtagccggatcggcgatcgatgggtggtcacggcgaccaccatcaccaccaccaggaagttggagtgctcgtcgacgacgacggcgacgacgaggagctcgagcaccaggggagggcctgcggtggcgccacgagcggaggagtggtggagcaaggggtaggggatggcggcagtgctggtcatcaagacgctgcgggcatggcgttcgaggcgagcatcagcagcgtggggagcgtgagtgcagcaacgaccatggcgccgccccagatcctctgctggccaccgccgccgcaacagcagcagctccagcagcaccataacctcggcggtggccaccaccagtccccgttcttcccgctcctgcagccgccgccgccgccgccgcctcccccgccgcagccgcccttcttcgccgacttgtacgcgcggcgcgcgctccagctcgcgtacgaccaccaccattcgggcggcggcggcggcccgtccacgtcgtcggacccgctcggcctctacatggggcacccgcaccaccaccagcagcacgccggcccagggatgatgatgatgatgcccccgcccttcgcgtcctcgtcgtcgcccttcggggacttcgtcgggcggatgaccgcgcaggagatcttggacgccaaggcgctggccgcgtccaagagccacagcgaggccgagcgcaggcgccgcgagcgcatcaacgcgcacctcgcgcgcctccgcagcctcctgcccaacacaaccaagacagacaaggcgtcgctgctggcggaggtgatccagcacgtcaaggagctgaagcggcagacgtcggagatcacggaggaggcgtgccagctccccaccgagtccgacgagctcaccgtcgacgcgtccagcgacgaggacggccgcctcgtcgtgcgcgcgtcgctctgctgcgacgaccgcgccgacctgctgccggacctcgtccgcgcgctcaaggcgctccgcctgcgcgcgctcaaggccgagatcaccaccctcggcggccgcgtcaagaacgtcctcctcatcaccgccgacgacagcagcgccgccgccggatgccacgacgacgggggggcggcggcgccggatgacgacgacgacgaccggcaggaggaggcggcgcccgtgtccgtgtcgtcgcagcagcacacggtcgcgtccatccacgaggccctgcgcgccgtcatggagcgcacggcggcggcgtcggccgccgaggactcgggagcggccgccgccgggctcaagcggcagcgcacgacgagcctttcggcgatcctagagaacagcaggtccatctagaagctaattaacatatatccacgcaccaccaccacttccacttgatgagatgtgcaaaatttaaaacgaaacaacagtagaacacaaacaccacaatctctcgatcagatgagttggtcataataccatataataccaaccatgcatgcaactagctggcgctacttacacggatccatgataatgcatgtttgcccgtcgttatcagcatccactacttttttttaaaaaaaaaagtttattctcatttatttctagtcttcctctcttgtgctgtgcatgtattgatctgatgaatcggtagtagtgtgtgcctctgcatgcatatgggtgggatatcctcgtcgtcaatcaaacacagcgattcgtttttcttctttctcttaattaccagcaaataaattaaatcgtcagttcgatctttggacgtagcagaagcttgcagttgcaggcagctataattgagagcattgagtacgtactacgtagcatggcttcgtaactagattagctgctggttacgatcgaagtcatgtataactataatttatttatagttcctttcttgacattagcattagcgctggttattagtcatgtactacgtcctacaatgtagaagctgcggttcaattcggatattcggtagtcaagacatatttcgtaggagtgaatgatattatactacatactgccactctcgatttcccagcaaacgacaggcacatggcaacaccatccatcttcgttcagaatggaaactctccacttcgacgtaggtctctgctgacttggcgccgtcccttattatactgaggccattgagtagtatatgaagctgcacacttcagtcatgaatctaaggccatccccaatgctggggctcatatatacttttcaagggacacgaaaaatattttgtatttcattgatgaatggaatagcacatgcatgcgctgttacttata

SEQ ID NO: 156457 - DNA, 3308 bp, Zea Mays
gccatcgcattccagctctgcctttgcaagatcgccgccactcgcagccagcaagcaaccattccaccacatacttttttcctccggtttcgtccggcggcgagcgagcgaggtagcgcttgtccatgccgcggccgtgagggtgatcgaacgaggactacttcggcctagcgcggggagccatgtcggcgtcggcgtcggcgggtaagctggcggcggcgctgcaccggaggacgcgcagggtcacgtccgcgctggcgtgcgcggccctggagtgggtcctcatcgcgctgctcctcgtcaacggcctgctggcctacgccgtcgccaggttcgcggactacttcggcctcagcccgccgtgcctcctctgctcccgcgtcgaccgcctcttccaggccgaaggcggtggcggcggcgacgctagcggcgccggcgcgcggtggctgcgggacgccctctgcgacgcccacgccgcggagatctccgcgctggggtactgcctccgccaccgccggctcgctgaggccggagagatgtgcgtgggctgccgcccgtcgtcgtggaaggagaggacaagcgacgcaggtgcgtgcgcctgctgcgaagctgctgctgtactgcgcgcttctcctgtgcgcgagctggaagatactacaagggatgcgcgtgtctcggagaaagaggtagaagatggcgaccagggctacgttctgctggctcaagatgatcacgaggaggagccggatgaggtcgaaaaccgacaacaagaaccgcagagcgaggtggatggccgacaacatctggaagacgaggtgatggctgccgttcaggacgaatccttggaattcatggatcaggtcgaagacatcacgatcgaggacgaccggttggtgtcggtggtggcgcttgacgagatgaccatcgccgatgattcgggtctccatcgggatgtagaagaggtggacggaacgaatcatgtagtagaagatgagcaggatccgagggatgtggatgtcggagcggttctggaggagaagaggatgttggattcctcggttgcaacgccggtcgatttgaccgaggactctgtcgtgcccaccagccccgtaccttgtcctgagacttcaacagacccatctcatcctgatcatagctccgtttcccaagacgatggagatgttcttgaagatacttccacggccgaggaagaacacatctttgtgcctcaagcttcagtatcggaagccgtttccgaggatgacaacagaacagctgctgaggtggacacgaactgcgaagtgtcaatcgggagcgatatatgcgaacgggaacaagatgagcatgtcgttccatttcaagatttggcagcatttgaggagctggttgctccattggcaactggagatgatctaccattgccatcggaggtcctagagccacctgaccaagtagaagcaggtgaagttgaacaggaggacgtgaccacaagcacgggattagacctccaaccaaatgaacagaacgagatcgaagaagacagagcacctgagacgccgacgaacagcgtcgccacacaacgctccgacagaatgttcttgctcgagaggaaacggtcgctgtcgctgtctctggatgggagcgtagcgagcgagatggaaggcagcgagccgtccaccgtggaccagctgaaatcagcgctgcaggccgagcggaaggcgctcggcgcgctgtacgccgagctggaggaggagcggaacgccgcggccatcgcgaccaaccagacgatggccatgatcaaccggctgcaggaagagaaggcggcgatgcagatggaggcgctgcagtaccagcggatgatggaggagcagtcggagtacgaccaggaggcgctgcagctgctgaacgagctggtcagcaagcgggcgagggagaagcaggagctggagagggagctcgagctgtacaggcagaaggtgcagcactacgaggacaaggagaggaggaggacggcgagcttcaaggccaatggggtaagccccagtggcagtggcacttccgtgtcgtccagcggcgaggacagcgacgggcactccgacgactactgcgagctcggcgactctcctgacggcggcaacgtccagagctcatcggatgctgcccttagctccatgagggaccaggacgacggcacgaagcacctagcggctctggacgattccttgacgtacttcgaggtggagagactctccatcctggaggaactcaagacgttggaggagaggctcttcacactggaagacgacgatatcaacaccagcaaagaagttactggccattcctcgagtgacatggatttaccacacgatggccttcagtcgccggagtacattctcaccggtgacaggccaagattcggaggaagggcctctatcagcagagggaagagccttctgcctctgttcgatgcagtcggcgacgaggcctgtgaccgaatgccgccatctgcaggagcaggagaggcagaccaggccgacgatgcagcaacgaagccggcatccgtgcttgtcaaagagcaggagaggctggcgatcatagaggaggtcgaccatgtctacgaaaggttgcaggcgctggaggcggacaaggaattcctgaggcactgcatcaagtccctgaagaaaggagacaagggcatggaccttctccaggagatcttgcagcaccttcgcgatctccgcagtgtggagcttcacgtcaagaatgccggtggtgccatggctgcaaattcagcctagcaagttcatctatacgcggtaacgatgacactactagcttggtatggattcagtcgattggattgtaggactccaaagcactgcattggtgatggtccctgcaaggtactgccggagttatagggaggctctgctcattttgcctgtgggccggaagcaagccctcccttttgtgctggtccagcactgccaactttttctgtcgtggtggtcgcctggtctggtcggtcggtcgtaggaatcattagcccttccaaagctgcacaaagctgaatcacggtgacagcttctgcagcatgcacggggcaaaagaaaaaagatagccccagtggagatgtggatgtttttttttcttgtctgatttaatcttttgattaactttggatttgtttgtgcgctgaggtagggagtcctcgtgtattttttttttggtgaggatgtagcttgaacggttggtatgtgcagtttgtgctttctcaatatccaggtttataatgaaaggaaaggcgg

SEQ ID NO: 156458 - DNA, 1821 bp, Zea Mays
tttttttttcgaacacacatgagagttgtgtaccattttacacattttgtaaagaagacaaatggaaacaaagaagtgtgtgtgtgtgtggttgtggtggaactaaaccatatactaattacaccaggtctgacaacagaggcttaaaatacaattaaacatgattcacgtaatatatctactctaaatgctcatgaacctaggaaattaccatccttgttgttgttgcaggcaagggaacttttcgaacttgcagccgagaataaggaagccggtggacattataaccttggtgtgttgtatcttaagggaattggtgtgaagagggatgtaattagagcatgtaatttcttgcttcatgcagttaatgctgggcaaccaaaagctatttatcaggtggcgaagctgttccagaaaggcattggtcttaagaggaatctccatatggcaacaatgctgtacaagtctattgctgagaggggaccctggagttcactgtccagatgggctctggagtcttatttgaaaggcgatgtagggaaagcattgctcttgtattccagaatggcagatcttggatatgaggttgcacagagcaatgctgcctggattctggataggtatagtgatcaaagtatttgcatgggagaatctagtttttgcacagatatggaaagacatcttcgtgcacatgctttgtggtggcatgcatccgagcagggtaatgagcatgctgctttgttgattggcgatgcctactactatggccggggcgtcgcaagggactatgaacgtgcagcagaggcatatatgcatgctcggtcacagtctaatgctcaagctatttttaaccttgggtacatgcatgagcatggtcatggactcccccttgatttgcacttggcaaaaagatattatgatcaagccgttgaggtggattcagctgctaagctccctgtcatgcttgcattaacaagtttatggctaaggacgaactatgcagacagttttttggttggttttatcgattcacttccagaaatgtatcctgttgttaaggaatgggtggaagatgttctcatggatgaagggaatgcaacaattttgactctctttgcttgccttgtaactgtcctctacttgcgagaacgccaaaggcgtcaagtagcagcagcagccaaccccctaacaacatgatgatgtggccatgtaaatgtcggttttcatgacatgggcaggccttttgcttgagggaactcgagatgtaaaatgatggctcattgacatgactcgcgcactaaattgagtagagggacatgaaagccgctggagactcagacaatgtttgctgcctggcgaatattcacctctccaagacttagggagctatgcttgtaaaggacaacaattcttggaaactggctgctcagaaatacagtttagaaatctcacagatgttgaaaagcatgctccccccttgttgcgcatatgcatggccatggaatttcgacaagcacacacggagaacatttctggaagaggcaactttacaattggtagtttagcgatcgggtaactttccatcagcatttacacgcactgtatagttttctctggatgtgttagttgaaaaggggcggtgcatgttgtgagcagcaattttgcaatagtatccatcagagtttgaagtataaacacattttttgaatagcctgaaaatagatcttacagcagagggtgttgaatgacgacggcagccgcgcgcgcggagcagccattgccgggcggcagaagtgtgcatagcgtggttctctgtagcag

SEQ ID NO: 156459 - DNA, 860 bp, Zea Mays
ttaggcatgccttccccgatggctcgcatcttccaccgccatctcctcctcgccgtcgtcaccttagccgtggccgcttctctccttcgcccagctgccgcagtgcgcccatttgttttggttctctccggtgaggacttcctcaaggatccggccgcgcacccgtcccttccctctgccgactccgacgacgacgatgggtgggacgacttcgccgacgattcaccggccgccgacccgctactctctccgtcctcctgggcccccctcctcgacccaaccatctctctcccctctggcgatgagacggactcgccggccgacgcgctcttcgtcgcgggcacccgcgcgatgctatccgcagcgtctgatggagacgacgcggcgttcaccacggctgccgcgcagatcgaggcctcggcagaggcggggcacccgggcgcgcagtctgcgctcgcgttccttaccggcgccgggatgacgcgtccggcatcccggtcgctcgcgttcctgctgcacaagttcgccgccgacgcaggagatctccagtcaaagatggccctcgcgtactcctacttccgccaggagatgtatgaagaagctgttatactatacgctgaacttgcagaagctgccctaacaagctccttgatatcaaaggagccaccagtgattgaaccaatccgtcttcacagtgggactgaagaaaataaagaggccttgaggaagtcccgaggtgaggacgatgaagatttccaaatcacagagtatcaggcacagcgaggcaacgctgccaacatgtacaaattagggcttctgtattactatggactacgtgggctccgccgtgattatggaaa

SEQ ID NO: 156460 - DNA, 1594 bp, Zea Mays
aagccaacacggtcacacgactgcataattgtgctcgctcgccgggccccgggacgtgacacatcgcacggccgaagcagcttgccggctgccgcgtttcgcctcccgcctgccgtgccgcccgtgaccgcgagaaggccggcagctttgcatgaggaggaggaggatgggggcactgcacgtcgtcggcgagcccaggatcagcttccgccagcagcctgcagcagtcgtcgcgaagaacggcggccacggcgccgtcgtcgaggagatccacggcctgatccgcgtctacaaggacggacacgtggagcggctcccggcgatcccagccgtgccctgcacgtggggcggcacggccccggacgcgccgggcggcgtcgtcgcgagggacgtggtggtggaccccgcgacgggggtgtgggcgcggctgtacgcgccgacgtcggcgggggacggagccaggcgccccgtcgtggtgtacttccacggcggcgggttctgcgtcgggtccgcggcctggagctgctaccacgagttcctcgcccagctcgcggcgcgcgcgggctgcgccgtgatgtccgtggactaccggctggcgcccgagcaccgcctgccggccgcgttcgacgacgggctggccgcggtgcggtggctgcggcaccaggccgcagcgtcagcgtcagcgtcagcgtgctgcaacgacgacctgtcgtggtggcgggcccgctgcggctttgaccgcgtgttcctcatgggcgacagcgcgggcgccagcatcgccttgcacgtggccgcgaggctcgggcagggccagcttggcgcgctgccccccttgaccgtcaggggcgccgtcctgatccagccattcctgggcggcgaggggcgtaccgcgtccgagaagaacgtggcgcagccgccacggtcggcgctgacgctggccacctccgactgctactggcggctggcgctgccggccggagccagccgcgagcacccctggtgcaacccgctgtcgggccgcgccgcgccgcgcctggagaccactccgctgcccccgctcctggtgtgcgtctcggagacggacatcctgcgggaccgcaacctggagctgtgcagggcgttgcgcgaggcgggcaagcgcgtggagcaggccgtgtacggcggcgtcgggcacgcgttccaggtgctccacaactgccacctgtcccagccgcggacgcaggagatgctcgcgcacatcaaggccttcgtcagcgccaggtagcaggcgccgcagcagcagccgcctcctccattcgtcgttggtccctaacaaacagacactcgccatgttaattaatccactacctaatcctaatccaatcgaagagtagatgccgtgtaagcaaccagaaccagccttgtgcagtactgtatcagtagtgtgtgacttggagcagaaagcgtccaatgcccagcccgggttgttgttgtagcggtgtcggaaagcaaaagcttatcactacactaccccggtcgtctggccgcttcatatacatgtatgatccgccgttcatttcatttcatcttgttaagaaagcctgatgctgtttct

SEQ ID NO: 156461 - DNA, 576 bp, Zea Mays
ggatcggagtatcggacggctcactacccagaaaagggctcgtggagcttctcttaatctcttgtaaaaaaaaaaccttgacaagaacgaattcgcctccggctctcctcttctcgagcgttttcggcaccacggcgcagtaggatggcggcggcggccccgacgagagcagaggtgctgtcgctcttccgttccttactccgcacggcgaagaagttctcggactacaacatccgcgagtacacgcgccgacgcgccgcggactccttccgcgaaaaccgcgccctcgccgatgcgtcggccgccgccgcggcgttctcggaggggaagaagcagctagaggttgcgaagcggcaagcggtggtttactctctctacgcccccaaggccaagagcgtgatggagttgaaggtgcagtgatggctgcgaccttttcttccccaccgttcccgttccagattcgttgcttttgtgtgatgatgaaactataaactgctccgttgtcgcattttctggatgattgtcatgatatagtttcgttctgtgcaataaattactaaattctaccgccattat

SEQ ID NO: 156462 - DNA, 498 bp, Zea Mays
ggatcggagtatcggacggctcactacccagaaaagggctcgtggagcttctcttaatctcttgtaaaaaaaaaaccttgacaagaacgaattcgcctccggctctcctcttctcgagcgttttcggcaccacggcgcagtaggatggcggcggcggccccgacgagagcagaggtgctgtcgctcttccgttccttactccgcacggcgaagaagttctcggactacaacatccgcggcgttctcggaggggaagaagcagctagaggttgcgaagcggcaagcggtggtttactctctctacgcccccaaggccaagagcgtgatggagttgaaggtgcagtgatggctgcgaccttttcttccccaccgttcccgttccagattcgttgcttttgtgtgatgatgaaactataaactgctccgttgtcgcattttctggatgattgtcatgatatagtttcgttctgtgcaataaattactaaattctaccgcca

SEQ ID NO: 156463 - DNA, 318 bp, Zea Mays
atgcgcctactacagcgtggaggcacagctggagaaattgggttcccaggtctgacttccagaggagcattgataaacttcctgcagtggtggaaacgcattgctgatattgtgtcaggcatgaccaagaagggggtaaattcacttttgattctgggagcctggatgatctggaagttcagaaacagagtggtgtttgacgggtccccccccaatatcactacactattagaggccactgctgaggaaagggagaaatggatggttgcaggagctaagggtctttcctttttagctgctcccagtaccaatgcctga

SEQ ID NO: 156464 - DNA, 1285 bp, Zea Mays
cggtgacagatttgtcggtgtagtcaacttcacgagtatgctcatcgaagacaacgttctccagcactgcagcaacaggagcattattccgtcagtcacccaattcagctttcacgaagaaaccgagagttgagacaataagtaccggctccgaacttgatggcgttccagatatcaggctctttctcctgcgataggtctatgcacttggcatagcagccgccctcgatgttggacacgccattctcgctccagcagtgctcgtcgtcgccgatcagaagcctgttgtgatccgtcgacagcgtcgtcttcccggtacctggaaggccaaagaagagggcgacgtcgccgtccttgcccatattgcagccggagtgcagcgagaggatgccgcgcttgggcatgaggtagtgcatgacgccgaacagccccttcttcatctcgccggcgtactgcgtgcccaggatcaccatctccctcctggcgaggttgatgtctacgctggtggacgacgtcatgtagtgcgtgtagcggttacaggggaactggccggcgttgtagatggtgaagtccggcgtgccgaagctctccagctcctcgtccgtgggccggatgcacctgcgaccggcgaccccccatatgcattgtgtcacgctttcgctagggccgtagatagagtagccttgtgttgcattgtgtcagtgtcaggcttacatgttgtgcatgaagagggagtggtacgccctggcggagatgatgcggaccttgatccggttctcggggtcccagttgagaaactggtcgttcacgaacaccttgtccagggagttgaggtagtccacggccctctccctgttggtcaggaacgtgtgctcgtccatctcgatgttgggcgagcccctgcatggcatcaccaggtgtcagcagccagcgaaccaaaagaacgaaagggtgtggtgtgcggcggagcagagcagagcagagcactcacttgccccaccacaggtcccgcgccgcgacctcgtccttgacgacgcgcttgtccctgggcgaccgcccggtcttggcgccggacagcgtcgccagcgcgccggtggacgtgatgaacgaccccttctcgtacttgatggcctgctcgtacagctctgtttttttttgggttccagtttatgatcgacaagcagtcaagcaccacaagcaaattaagaagaagaagttgtccatgcatacgcacgcgacgcgtaccagcaggcgagaggttgtagaggacatgggtgaacttgag

SEQ ID NO: 156465 - DNA, 505 bp, Zea Mays
caggtttcagtgaactcagggccgcagggtttggtttggtgtcaaagatcggcctggaggcgaccaacacaagtggttccctgattctgcattgtggaatccttcgcccagacaagagagattggatcctcccgtccagacaacctgatagaacgacagtgtataagaacagggctcttaggacgccttttgtcaagatgggtcataactctaccctgtgaattgagatagatgatcatgtggtgcaagatattgagtccctcatctttgacgacacacataacaaatggtaagcgtctccgtggatggagcctgaagtatattcaaattcaaggcatgccacaaagcatctcgcgtgtgggatgctccggcgtgtggaaaggagaaaagccaaataaatgggtacatgtccagcaggcgtgagttcttaaatactcagattccttgtccataggcaaatgcatagttcatacgaatcagggcttcacatacatatccatttttg

SEQ ID NO: 156466 - DNA, 110 bp, Zea Mays
ggttccttctgggattttccgaagtcccattgaaactttcttggcaatttgtgtttttttaccgttgatgttgcagcgagataaaaatggatgatcatcgttatgatatg

SEQ ID NO: 156467 - DNA, 3979 bp, Zea Mays
ggcatcgttcatccgccacatccgcacagcggcacaggcgaaatccttaagctcacccaggaacgaactccccgtcttcctccccacacacatccgctccgctccgcccaccaaagcaaaagcaacccagcccgagcctcccccaatttcccttctcttccccggcgacgtccccactccccacgccaaccgccctggcccagatcgacgctgctcctccagtgccccacgccacctcccccgctcccgcgtaccgtcgcctgcgctgaaccctcttcattccgtgccgcggggtatccgccccactgtaccagtgtacctctagtgtttaatgctggtggtgtggcgcacgcgcgcgcaagagggtgtgtgtaaatagtctaggggcagagcatgagggcgggttcgaagaggcgggccaccggggctcaaaaccctagcctcgagtccgacgaggaggaggcgcggcaggtcaagggggagcttgctgacgacctcaacggataccctgcggaggaggatgaggacgaggtggtcgtggaggacgatgaggtggccatcccctccgacgacgacgaggacggtggcggcggggacaccgtcttcgtccccaacacgctggaggaggccctcgtgccgcgggttggcatggtgttcgactccgtggacgaggccttcgcgctatacaaggcctacgcctaccgcacggggttccatgccgtgcgccgcacttgccacaactacgaaggtagagtctgtcgacttggagcataatcatccttgtactccagatatggtgaggttcttaaaggcgtacagagagatgcctgagccaacaaagaagaaggccaagattacggatgagatggatgagatggtggagaaatcgctgagcgagattgctgagacaaggaagtttccgacacgacccaagaggggtgctaacgttgggtctgctgttggtagccagaggttgagtaggctcgagagttttatgcagcgtttcggggaggatgacctcaactcacttaagaagttcattgacaagatgcaacacagaaaaccaaacttcatccacagctgggatcttgatccggaaagtcatgtgaagaatttcttctggactgattctagggcccaggcgcaataccgctactttggtgacgtcattacatttgatgttatgtatttacagcattcacgtgccagccgcccattagccacactccttggggtgaacaaccatggccaccttgtgcttcttggctgtggtctcctgtccggtgacagcaaggagaactatgtttggttgttgaagaggtggttgagctgtatgaatggcaaatcgccagaagcgatcacgaccggctattcagatgtcatcacagaggccgtggctgaggtgtttccaaatgcaagacaccgcttttgcttttggcatatcttgaagaagctacttgaaaatgtgggacgcacacatgagaaagaggcaatttcctcaaggttcaaggaggttgtatatgatagtgtcactctcaccgactttgaaaaagagtggggagcaatggttgaccagtatagtctcaaagacaacaagtggttctctgctttgtacagctgtcggaagcaatgggcacctgggtatgtcaatcattcattctgggctggcacctctgctatcaggaaggctgaaaaaactgatccatactttgatagtgttgtgagtaaaaccacccttccagttttccttgagcaatatgagactaccctgaaagagaagttggaaagggaagcatatgatgatttgcgctcatactattctagactcactttgctgtcgggattgccatttgaggagcaacttgtggagctctatacagtaactatgtttcaaacgttccaggacgagattaagcaattgatgcatgttatttgtaaagaggtagacagaagtgggaactcaattacttacatggtcagtgagttaatacagggaaagaaggttgactatacagttgtttatgacaattctgacaaggatgtttggtgcatttgtcgctcctttccctcgaggggtattctttgcagtcatgctctggctgttctgaagcaagagaatgtactgatgcttccgcctaagtacatcctgaaccgctggaggaaggattttagaatactcaattcatctgcaaatgttaattgtatggaatcagataggaatttgggtttttatgatgatctctattttcgtgcacatgagtattttgaagatgtcattgacattggagcaagagaacctgagctgaaggagtttgtgttgtcagccatgaaggaagcaaaggacagactgattaggcctgatcacagccagcaaagtgatcaacggtttgatgtaaatatgactgtgattggtcaggtgtctgcagatacaggagttgatatgaacatggcatcacatacctcagcttcgattcacggggatagaagggttgatgcggatatagcaccaaatgcgccagccttagtccatggtgataccatgacatctaatacaactgccctgattcatagggacagaagagttgagataaaaatgccgatgactcaccttattcatggagagggaagacttgacatgaacatgacatctcctcacttgatgcagagggaaagaagagtggacatgaacatggcatcacctcacctgatacaggggggcagaagaattgatatgaacttgtcatcaccccacttcatacacggtgacagaagagttgatatgaatctggcatctccgcatttgatacatggggacagaagggttgatatgaacataacatcccctcacctgatacagagcgatgccagagtggatatgaatatggtatcgacttctcagaatgggatgcacactttcgatttggtggatataaacctggagagtggctctatgccgatggccgcaacagattttatgcaaatgcacccacacccagcagtttaccatcccaaacagcttgttatgagagatcaggtgatagatgcaaataagagaccaaatatggaatctgacacttattttatgggaggcagtatgcatgtggggtagtttgtctacttctgtgatcctttatgttcggaattcagagaggcatccttcctttacatcgacatgtaatcatgcatgttcttagagctggcagtacaactaaacagctaggccttagtattgcagatcaaacttgactgttggtagttctgttgtaaccttttacctttttagcagttgtagcaagctggatgcccattatcttgtgcatagtgaataacctatcttaccatctagttagaactttggaaatgagatggctttagatgcaagattctgctgacatttctggtttcttttgttgactgataatatacatttgctgcatgcctatcttgcaacctattccttatggttagtgcatggtgtcatttgcatttgtcatttttcatttactgaagtctgagctcatcatctgtgcatgggaaatggatgactattttcatttattgaagggcaggcctggtgcagtgagctgtctcgttgggtcaccgaatcttgggttcgaactttgaagcagcctctcgccctctcttgcatttgtggggggacggtttggcttggtttattcctttctcagaccccactcatgtggtagcctctagcactaggtctacctttttttatataattatgcaacatgatattgttctggcagtctgttaaaatttgtctggcttctccatctctttcttggtaatgcacttttttgagataattggtgagatcaggaaagggaaattttggctgtagctgtgttacaacaagatgtaccttgctaattttattgtttagagatggtgatttttacagctctctgttgcacgtaaaggcgctagatcatcagtggacatgtcctgctattgcttg

SEQ ID NO: 156468 - DNA, 3277 bp, Zea Mays
gtggtgtggcgcacgcgcgcgcaagagggtgtgtgtaaatagtctaggggcagagcatgagggcgggttcgaagaggcgggccaccggggctcaaaaccctagcctcgagtccgacgaggaggaggcgcggcaggtcaagggggagcttgctgacgacctcaacggataccctgcggaggaggatgaggacgaggtggtcgtggaggacgatgaggtggccatcccctccgacgacgacgaggacggtggcggcggggacaccgtcttcgtccccaacacgctggaggaggccctcgtgccgcgggttggcatggtgttcgactccgtggacgaggccttcgcgctatacaaggcctacgcctaccgcacggggttccatgccgtgcgccgcacttgccacaactacgaaggactccgctaccgctccaccttcacctgcacttacggcggcaaatctgggactagcgctggctcctctgttgtctcaggtacccgctacccactccgcagcaagcgggagttgactgccaaggagaagaagtctcaccgtggcaccaccgagaagacgggatgtagggcaatgctgatcattcgggataagcgtgtggatggaaggtggaaggtagagtctgtcgacttggagcataatcatccttgtactccagatatggtgaggttcttaaaggcgtacagagagatgcctgagccaacaaagaagaaggccaagattacggatgagatggatgagatggtggagaaatcgctgagcgagattgctgagacaaggaagtttccgacacgacccaagaggggtgctaacgttgggtctgctgttggtagccagaggttgagtaggctcgagagttttatgcagcgtttcggggaggatgacctcaactcacttaagaagttcattgacaagatgcaacacagaaaaccaaacttcatccacagctgggatcttgatccggaaagtcatgtgaagaatttcttctggactgattctagggcccaggcgcaataccgctactttggtgacgtcattacatttgatgttatgtatttacagcattcacgtgccagccgcccattagccacactccttggggtgaacaaccatggccaccttgtgcttcttggctgtggtctcctgtccggtgacagcaaggagaactatgtttggttgttgaagaggtggttgagctgtatgaatggcaaatcgccagaagcgatcacgaccggctattcagatgtcatcacagaggccgtggctgaggtgtttccaaatgcaagacaccgcttttgcttttggcatatcttgaagaagctacttgaaaatgtgggacgcacacatgagaaagaggcaatttcctcaaggttcaaggaggttgtatatgatagtgtcactctcaccgactttgaaaaagagtggggagcaatggttgaccagtatagtctcaaagacaacaagtggttctctgctttgtacagctgtcggaagcaatgggcacctgggtatgtcaatcattcattctgggctggcacctctgctatcaggaaggctgaaaaaactgatccatactttgatagtgttgtgagtaaaaccacccttccagttttccttgagcaatatgagactaccctgaaagagaagttggaaagggaagcatatgatgatttgcgctcatactattctagactcactttgctgtcgggattgccatttgaggagcaacttgtggagctctatacagtaactatgtttcaaacgttccaggacgagattaagcaattgatgcatgttatttgtaaagaggtagacagaagtgggaactcaattacttacatggtcagtgagttaatacagggaaagaaggttgactatacagttgtttatgacaattctgacaaggatgtttggtgcatttgtcgctcctttccctcgaggggtattctttgcagtcatgctctggctgttctgaagcaagagaatgtactgatgcttccgcctaagtacatcctgaaccgctggaggaaggattttagaatactcaattcatctgcaaatgttaattgtatggaatcagataggaatttgggtttttatgatgatctctattttcgtgcacatgagtattttgaagatgtcattgacattggagcaagagaacctgagctgaaggagtttgtgttgtcagccatgaaggaagcaaaggacagactgattaggcctgatcacagccagcaaagtgatcaacggtttgatgtaaatatgactgtgattggtcaggtgtctgcagatacaggagttgatatgaacatggcatcacatacctcagcttcgattcacggggatagaagggttgatgcggatatagcaccaaatgcgccagccttagtccatggtgataccatgacatctaatacaactgccctgattcatagggacagaagagttgagataaaaatgccgatgactcaccttattcatggagagggaagacttgacatgaacatgacatctcctcacttgatgcagagggaaagaagagtggacatgaacatggcatcacctcacctgatacaggggggcagaagaattgatatgaacttgtcatcaccccacttcatacacggtgacagaagagttgatatgaatctggcatctccgcatttgatacatggggacagaagggttgatatgaacataacatcccctcacctgatacagagcgatgccagagtggatatgaatatggtatcgacttctcagaatgggatgcacactttcgatttggtggatataaacctggagagtggctctatgccgatggccgcaacagattttatgcaaatgcacccacacccagcagtttaccatcccaaacagcttgttatgagagatcaggtgatagatgcaaataagagaccaaatatggaatctgacacttattttatgggaggcagtatgcatgtggggtagtttgtctacttctgtgatcctttatgttcggaattcagagaggcatccttcctttacatcgacatgtaatcatgcatgttcttagagctggcagtacaactaaacagctaggccttagtattgcagatcaaacttgactgttggtagttctgttgtaaccttttacctttttagcagttgtagcaagctggatgcccattatcttgtgcatagtgaataacctatcttaccatctagttagaactttggaaatgagatggctttagatgcaagattctgctgacatttctggt

SEQ ID NO: 156469 - DNA, 839 bp, Zea Mays
cccagcccgagcctcccccaatttcccttctcttccccggcgacgtccccactccccacgccaaccgccctggcccagatcgacgctgctcctccagtgccccacgccacctcccccgctcccgcgtaccgtcgcctgcgctgaaccctcttcattccgtgccgcggggtatccgccccactgtaccagtgtacctctagtgtttaatgctggtggtgtggcgcacgcgcgcgcaagagggtgtgtgtaaatagtctaggggcagagcatgagggcgggttcgaagaggcgggccaccggggctcaaaaccctagcctcgagtccgacgaggaggaggcgcggcaggtcaagggggagcttgctgacgacctcaacggataccctgcggaggaggatgaggacgaggtggtcgtggaggacgatgaggtggccatcccctccgacgacgacgaggacggtggcggcggggacaccgtcttcgtccccaacacgctggaggaggccctcgtgccgcgggttggcatggtgttcgactccgtggacgaggccttcgcgctatacaaggcctacgcctaccgcacggggttccatgccgtgcgccgcacttgccacaactacgaaggtagagtctgtcgacttggagcataatcatccttgtactccagatatggtgaggttcttaaaggcgtacagagagatgcctgagccaacaaagaagaaggccaagattacggatgagatggatgagatggtggagaaatcgctgagcgagattgctgagacaaggaagtttccgacacgacccaagaggggtgctaacgttgggtctgctgttggt

SEQ ID NO: 156470 - DNA, 2183 bp, Zea Mays
cacatccgggagaagagtagtggatgcggagcgtctcctgtaagcggtctcccaaacgccacgcttgtactcactttgtttctaataaaaaattgctgtggtggaggccatagattccaagtggtggtttagagaagtcccaaacataccctttgtttggggagaagaatcgagagggagatagctaaactagggttaagggaattaggggccgagaggagcgcaatgagcatcgtgcccaaggagacgatcgaggtcatcgctcagagcgtcggcatccccagcctcggtgccgatgtcgccgtcgcgctcgcccctgacgtcgaataccgcctccgcgagatcatgcaggaatccattaaatgtatgcggcatgcaaagcggactgttctgacggcggatgatgttgacagtgccctgggcctcaggaatgttgagcccgtatatggatttgcctctggtgatccattacgttttaagagagctgttggacataaggatctcttctatcttgatgatcgggaggtagacttcaaagagattattgactgtcctctgcctaaagccccactggacacatcagttgtagcccattggctagcgattgagggggtacagcctgcaataccggagaatcctgctattgacgcaattgtaccaccaactgaaaataaaaggtctgagcatgggaaagatgatggacttccagctgatgtcaagcttcctgttaagcatgtattatctagagaactacagatgtactttgataaaatagctgaacttactatgagtagatctgatacgtccctttttaaagaagctttagtgagcttggcaaaagattctggtcttcatcctttagttccttacttttcctacttcattgcagacgaggttgtacagtagctttcttgcttttggtgggtttctttttatatgacattacttagtgtgtatccatttgaatttcaggttacccggagtttgggtgatcttcctgttttacttgctctaatgagagtagtccaaagtcttctccgtaatccacatattcatattgaaccttatttgcaccagctgatgccatcaatgatcacttgcattgttgcgaaaaggctagggcataggctctcagataaccactgggaacttagggacttctctgccaatttggttgccttggtatgtcagaggtttggtcatgtctatcacaaccttcaaaatcggttaactaaaacattgatccatgcatttcttgatcctgccaaatcactgacacaacattatggtgctgtccaagggatatctgcactggggcccagcgcgattagactccttcttttgcccaaccttgtgacatatatgcaacttctggagccggaactgcagcttgagaagcagaaaaacgagatgaaaaggaaggaagcttggcgtgtttatggtgccttgctgtgtgctgcaggcaaatgcttgtatgatcggttgaaactatttcctggtttgctttctccgtcgatgcggcctcttttacagagcaacaaaagggtcttaaccaacaacccaaataagcgaaaatctagcacagatctctctgcaactcagccacctctgaagaagatggcaacggacgcaacagccaactccatggcctcagcttccatgggaggaaacatgcaaggtgccatggatggctttcccaaccagttaggcaaccctggcatgatgcaggcctcgtcctctgggcagacggtggagagcatcccatcagctgcggtccggagggatcagggcagtgatctcgcgcagagagtttctgcagtgcttaggcaagcctggaaggaggaccaggacaccggtcatctcttggggtctctgtacgaggtcttcggggaagccatcttctcctttgtccaaccaccagagatatccttgtttgtgtagagagagagagagagaggaaatgcatagactctaggttttattattctacgctgttgtacaactagggatgttttgaagagttcacgaaacccggtttgacattgtcaaagtaatgtgactgaagttgtagtttactcagttgctgtgctgtgctgctatccaatgcatgctatttatgatggcgttggcattcagatggcatagtttgcttttgtaagcgcttgccattttccaactctatg

SEQ ID NO: 156471 - DNA, 2249 bp, Zea Mays
ctccggcgcccgcgcgagctcttcttcctttccgacgccagcgcggtatcctcgtcgtcgccagtgcgcgagcgtctcctcctcctccttgcggcctcccgcgcctccgccccccccccccccccccccccccacccacacacacacatccgggagaagagtagtggatgcggagcgtctcctgtaagcggtctcccaaacgccacgcttgtactcactttgtttctaataaaaaattgctgtggtggaggccatagattccaagtggtggtttagagaagtcccaaacataccctttgtttggggagaagaatcgagagggagatagctaaactagggttaagggaattaggggccgagaggagcgcaatgagcatcgtgcccaaggagacgatcgaggtcatcgctcagagcgtcggcatccccagcctcggtgccgatgtcgccgtcgcgctcgcccctgacgtcgaataccgcctccgcgagatcatgcaggaatccattaaatgtatgcggcatgcaaagcggactgttctgacggcggatgatgttgacagtgccctgggcctcaggaatgttgagcccgtatatggatttgcctctggtgatccattacgttttaagagagctgttggacataaggatctcttctatcttgatgatcgggaggtagacttcaaagagattattgactgtcctctgcctaaagccccactggacacatcagttgtagcccattggctagcgattgagggggtacagcctgcaataccggagaatcctgctattgacgcaattgtaccaccaactgaaaataaaaggtctgagcatgggaaagatgatggacttccagctgatgtcaagcttcctgttaagcatgtattatctagagaactacagatgtactttgataaaatagctgaacttactatgagtagatctgatacgtccctttttaaagaagctttagtgagcttggcaaaagattctggtcttcatcctttagttccttacttttcctacttcattgcagacgaggttacccggagtttgggtgatcttcctgttttacttgctctaatgagagtagtccaaagtcttctccgtaatccacatattcatattgaaccttatttgcaccagctgatgccatcaatgatcacttgcattgttgcgaaaaggctagggcataggctctcagataaccactgggaacttagggacttctctgccaatttggttgccttggtatgtcagaggtttggtcatgtctatcacaaccttcaaaatcggttaactaaaacattgatccatgcatttcttgatcctgccaaatcactgacacaacattatggtgctgtccaagggatatctgcactggggcccagcgcgattagactccttcttttgcccaaccttgtgacatatatgcaacttctggagccggaactgcagcttgagaagcagaaaaacgagatgaaaaggaaggaagcttggcgtgtttatggtgccttgctgtgtgctgcaggcaaatgcttgtatgatcggttgaaactatttcctggtttgctttctccgtcgatgcggcctcttttacagagcaacaaaagggtcttaaccaacaacccaaataagcgaaaatctagcacagatctctctgcaactcagccacctctgaagaagatggcaacggacgcaacagccaactccatggcctcagcttccatgggaggaaacatgcaaggtgccatggatggctttcccaaccagttaggcaaccctggcatgatgcaggcctcgtcctctgggcagacggtggagagcatcccatcagctgcggtccggagggatcagggcagtgatctcgcgcagagagtttctgcagtgcttaggcaagcctggaaggaggaccaggacaccggtcatctcttggggtctctgtacgaggtcttcggggaagccatcttctcctttgtccaaccaccagagatatccttgtttgtgtagagagagagagagagaggaaatgcatagactctaggttttattattctacgctgttgtacaactagggatgttttgaagagttcacgaaacccggtttgacattgtcaaagtaatgtgactgaagttgtagtttactcagttgctgtgctgtgctgctatccaatgcatgctatttatgatggcgttggcattcagatggcatagtttgcttttgtaagcgcttgccattttccaactctatg

SEQ ID NO: 156472 - DNA, 2291 bp, Zea Mays
ctccggcgcccgcgcgagctcttcttcctttccgacgccagcgcggtatcctcgtcgtcgccagtgcgcgagcgtctcctcctcctccttgcggcctcccgcgcctccgccccccccccccccccccccccccacccacacacacacatccgggagaagagtagtggatgcggagcgtctcctgtaagcggtctcccaaacgccacgcttgtactcactttgtttctaataaaaaattgctgtggtggaggccatagattccaagtggtggtttagagaagtcccaaacataccctttgtttggggagaagaatcgagagggagatagctaaactagggttaagggaattaggggccgagaggagcgcaatgagcatcgtgcccaaggagacgatcgaggtcatcgctcagagcgtcggcatccccagcctcggtgccgatgtcgccgtcgcgctcgcccctgacgtcgaataccgcctccgcgagatcatgcaggaatccattaaatgtatgcggcatgcaaagcggactgttctgacggcggatgatgttgacagtgccctgggcctcaggaatgttgagcccgtatatggatttgcctctggtgatccattacgttttaagagagctgttggacataaggatctcttctatcttgatgatcgggaggtagacttcaaagagattattgactgtcctctgcctaaagccccactggacacatcagttgtagcccattggctagcgattgagggggtacagcctgcaataccggagaatcctgctattgacgcaattgtaccaccaactgaaaataaaaggtctgagcatgggaaagatgatggacttccagctgatgtcaagcttcctgttaagcatgtattatctagagaactacagatgtactttgataaaatagctgaacttactatgagtagatctgatacgtccctttttaaagaagctttagtgagcttggcaaaagattctggtcttcatcctttagttccttacttttcctacttcattgcagacgaggttacccggagtttgggtgatcttcctgttttacttgctctaatgagagtagtccaaagtcttctccgtaatccacatattcatattgaaccttatttgcaccagctgatgccatcaatgatcacttgcattgttgcgaaaaggctagggcataggctctcagataaccactgggaacttagggacttctctgccaatttggttgccttggtatgtcagaggtttggtcatgtctatcacaaccttcaaaatcggttaactaaaacattgatccatgcatttcttgatcctgccaaatcactgacacaacattatggtgctgtccaagggatatctgcactggggcccagcgcgattagactccttcttttgcccaaccttgtgacatatatgcaacttctggagccggaactgcagcttgagaagcagaaaaacgagatgaaaaggaaggaagcttggcgtgtttatggtgccttgctgtgtgctgcaggcaaatgcttgtatgatcggttgaaactatttcctggtttgctttctccgtcgatgcggcctcttttacagagcaacaaaagggtcttaaccaacaacccaagtgagtgttgaatataagcacagtatcagttgaatatatgccactagacacgtgttgactggcaattaagtgcaaagtggttcttactgtcagcagttggattagtcgagtttgaaagtaaagattatgttgcgctgcaaatttcagataagcgaaaatctagcacagatctctctgcaactcagccacctctgaagaagatggcaacggacgcaacagccaactccatggcctcagcttccatgggaggaaacatgcaaggtgccatggatggctttcccaaccagttaggcaaccctggcatgatgcaggcctcgtcctctgggcagacggtggagagcatcccatcagctgcggtccggagggatcagggcagtgatctcgcgcagagagtttctgcagtgcttaggcaagcctggaaggaggaccaggacaccggtcatctcttggggtctctgtacgaggtcttcggggaagccatcttctcctttgtccaaccaccagagatatccttgtttgtgtagagagagagagagagaggaaatgcatagactctaggttttattattctacgctgttgtacaactagggatgttttgaagagttcacgaaacccggtttgacattgtcaaagtaatgtgactgaagttgtagtttactc

SEQ ID NO: 156473 - DNA, 1634 bp, Zea Mays
cttcagcgttccaggaaattgttgatgcatatggtgtagccaaatatcaagaagcaaatcctggagtattcaccatcgtgactttcccttttctatttgccgtcatgtttggtgattggggccatgggatttgcttgttacttgcaacactttatctgataatacgggagaagaaactagcttcacagaaacttggagacataatggagatgatgtttggtgggcgttatgtaattatgatgatggcagttttttcaatctacacaggattaatatacaatgaatttttctctgttccatttgggctttttggtaaatctgcctatgcatgccgtgattcttcttgtagtgatgctactactgaaggactaattaaggtaagagatgcatacccttttggtgtggaccctgtttggcatggtagccgcagcgagctgccgtttctcaattcactgaagatgaagatgtccattcttcttggagttgcacaaatgaaccttgggattgtgatcagctacttcaatgcaaaattttttaggaacagtcttaatgtgtggtaccagttcattccccagctgatcttcttgaacagcttatttggttacctgtccttgcttattattattaagtggtgcacggggtcaaaagcagatctataccatgttatgatctacatgttccttagcccaacagatgagattggtgaaaaccagttgtttagtggccagaagacagtgcagcttgttctacttctgcttgctctggtgtctgtgccttggatgttgattccaaaacctcttctattgaagaagcaacatcagcaaaggcatcaaggtcaccagtacgcaatgcttcagggcgttgatgaatcagtgggagcagagctgggggaacatcatgaggaagcacatgaccatgaggagtttgagttcagcgaagtttttgttcaccagctgattcacacgatcgaatttgttcttggtgcagtctcaaacacagcttcgtaccttcgcctttgggctctgagtcttgcacactccgagttgtccactgtattctacgataaagtactactcatggcatgggggtttaacaatgtcatcatccttattattggcatcatcgtcttcatatttgccacggttggtgtcctgcttgttatggagaccctgagtgcattccttcacgcactgaggcttcactgggtggagttccagaacaagttctatgaaggtgatggttacaagttcgccccattctcctttgcgctgattcgtgaggaagaagattgagatcgtcccatgtagccgatgtacaatctttgatggcctttgttcccggaacaaatcattttttcatctgttgtctcggatggatcataaacctcagtcccctttgtttagacatgggacgaacagcaccatttttccttgtttagctatgcagaggatttttgggtcggttggcggcaaacatggggggtgatatcaccattgtatgatgctaataagtagttgccgattgggcggtgtgttggatataaataagcactgtattgaaggttaaacattccgctacgttcgttgtcaataaagagtgctatttacgctgctggcgttagtcatttcctggtc

SEQ ID NO: 156474 - DNA, 1634 bp, Zea Mays; identical to SEQ ID NO: 156473

SEQ ID NO: 156475 - DNA, 585 bp, Zea Mays
cttcagcgttccaggaaattgttgatgcatatggtgtagccaaatatcaagaagcaaatcctggagtattcaccatcgtgactttcccttttctatttgccgtcatgtttggtgattggggccatgggatttgcttgttacttgcaacactttatctgataatacgggagaagaaactagcttcacagaaacttggagacataatggagatgatgtttggtgggcgttatgtaattatgatgatggcagttttttcaatctacacaggattaatatacaatgaatttttctctgttccatttgggctttttggtaaatctgcctatgcatgccgtgattcttcttgtaggtaaggaaaatgaaataaataaacctatgcttatttatttatagaactgcacatttatctggctcattaatttccccacttgttcatagtgatgctactactgaaggactaattaaggtaagagatgcatacccttttggtgtggaccctgtttggcatggtagccgcagcgagctgccgtttctcaattcactgaagatgaagatgtccattcttcttggagttgcacaaatgaa

SEQ ID NO: 156476 - DNA, 103 bp, Zea Mays
tttttttgttttttcacattgtgagtccaatagcagatcaactaccttgatagatgcaattgttttttgtcctttttctgaccatttatctatttaacttgtg

SEQ ID NO: 156477 - DNA, 971 bp, Zea Mays
agcaaattcatcactagactagatcattccgatgccatagaatgtactaactttccatcttaccttgtgcgcctacaacatgccggaagataccattatctgatcaagtgtccgctgacaccacccccagacctgaatttatatttatgaaccgtgtttgttgttctgcagtctgtgttaatatatctatccttcggtgtcagaggttcaaggatgcatgaacgttcttattgaagcaaactgatatattcaattattctttggatgtgcataggttgatggaatggggtttgctcccggtggatgtggctagaaaatgttttgagaagaaacaaggtcagaaggttaagtcaccagtcaaagcaattgtggcgaagagaattccttcttctccagccaagacactgccttcatctgcaaagaagttagttatgccttcaaacagtgctggaaagctgaagtctcagaagaaaaggaaggcaagtgatgacacagatgatgacgacgacgacgatgattttgtagcttctaaagcaaagaccaagaggcacaaggcctagttaggtcctagcatctcattatcctagtaatgagacgtgttcttcagacaatttctagctcggatgaccttggatgattgttccttccattggtttgctcatttggggcgcgcaactaaattatgtgaagtagcgtgttgtgttgtgtcaagaagtaccacttgtcgatggccttttcagatctggaatgaaggtaagttcctgcaaactttcacttggttagcatttgactccagtgaaacatctggttggttagcatttgactccagtgaaacatctggttggatgactgtatttgcacggggtaacatatttcgccgagctcgacgtaggcgcatccccaagcaaaacagaatttagaataattattaggttgccgtcgatgatacgtaattctgaaaagcttgaacg

SEQ ID NO: 156478 - DNA, 1611 bp, Zea Mays
agataccgtccttttttttcttcgtcttttggaccgagggatttacagaggcagtcgactgtcaaggttccaggcgcttctggtccactgaccataattaagcacctctgtgggtccgaagggggcccattacaggatcgtttctatatgggccggttcgccgagccgcgccatgctcgtcttcaggctccggagtccggacggagtcgcgggccgtggccctgcctcagtatttcctcttccccgcgataggcaacagaaaccgcagcataacaaggaaagcgaagcgaaccctcgccgcgcgagttagcgatggccggagaggacgccgccgccgcgaggaggcccccgaaggaggaggaggaggaggaagatgacgacgatttggacaacgttccgctggcactttccagggccaagaaaccgggtaatgcgagcgcctccaaggtcaagaaggaggaggaggacgatgacgacgacttggacaacgttccgctcgcactttccagggctaagaagggaaacgagaagcagaaaggcaacaatagcaatatgaaggcttcttcgaaagtcaagaaagaagtcagttctgatgatgattttgtcatgccaacggcgcagaagaaaagtgcaggtgctgctggaagtaatgccaagacatccaaggttaaaaaaattaaagatgaagatttggaagatctcaaggaggacaagaaaaggaagaaacgagtgggtgtcaaagaagaggcaaagttggccttggccattgtaaagggagagaaggttaagaaagagaggaaagtgtatggtttgccagggcagaagcatgatcctcctgaagaaagggatccattgaggatattctatgaatcactctatgagcaggtccccaccagtgacatggctgcaacctggttgatggaatggggtttgctcccggtggatgtggctagaaaatgttttgagaagaaacaaggtcagaaggttaagtcaccagtcaaagcaattgtggcgaagagaattccttcttctccagccaagacactgccttcatctgcaaagaagttagttatgccttcaaacagtgctggaaagctgaagtctcagaagaaaaggaaggcaagtgatgacacagatgatgacgacgacgacgatgattttgtagcttctaaagcaaagaccaagaggcacaaggcctagttaggtcctagcatctcattatcctagtaatgagacgtgttcttcagacaatttctagctcggatgaccttggatgattgttccttccattggtttgctcatttggggcgcgcaactaaattatgtgaagtagcgtgttgtgttgtgtcaagaagtaccacttgtcgatggccttttcagatctggaatgaaggtaagttcctgcaaactttcacttggttagcatttgactccagtgaaacatctggttggttagcatttgactccagtgaaacatctggttggatgactgtatttgcacggggtaacatatttcgccgagctcgacgtaggcgcatccccaagcaaaacagaatttagaataattattaggttgccgtcgatgatacgtaattctgaaaagcttgaacg

SEQ ID NO: 156479 - DNA, 1584 bp, Zea Mays
agataccgtccttttttttcttcgtcttttggaccgagggatttacagaggcagtcgactgtcaaggttccaggcgcttctggtccactgaccataattaagcacctctgtgggtccgaagggggcccattacaggatcgtttctatatgggccggttcgccgagccgcgccatgctcgtcttcaggctccggagtccggacggagtcgcgggccgtggccctgcctcagtatttcctcttccccgcgataggcaacagaaaccgcagcataacaaggaaagcgaagcgaaccctcgccgcgcgagttagcgatggccggagaggacgccgccgccgcgaggaggcccccgaaggaggaggaggaggaggaagatgacgacgatttggacaacgttccgctggcactttccagggccaagaaaccgggtaatgcgagcgcctccaaggtcaagaaggaggaggaggacgatgacgacgacttggacaacgttccgctcgcactttccagggctaagaagggaaacgagaagcagaaaggcaacaatagcaatatgaaggcttcttcgaaagtcaagaaagaaccaacggcgcagaagaaaagtgcaggtgctgctggaagtaatgccaagacatccaaggttaaaaaaattaaagatgaagatttggaagatctcaaggaggacaagaaaaggaagaaacgagtgggtgtcaaagaagaggcaaagttggccttggccattgtaaagggagagaaggttaagaaagagaggaaagtgtatggtttgccagggcagaagcatgatcctcctgaagaaagggatccattgaggatattctatgaatcactctatgagcaggtccccaccagtgacatggctgcaacctggttgatggaatggggtttgctcccggtggatgtggctagaaaatgttttgagaagaaacaaggtcagaaggttaagtcaccagtcaaagcaattgtggcgaagagaattccttcttctccagccaagacactgccttcatctgcaaagaagttagttatgccttcaaacagtgctggaaagctgaagtctcagaagaaaaggaaggcaagtgatgacacagatgatgacgacgacgacgatgattttgtagcttctaaagcaaagaccaagaggcacaaggcctagttaggtcctagcatctcattatcctagtaatgagacgtgttcttcagacaatttctagctcggatgaccttggatgattgttccttccattggtttgctcatttggggcgcgcaactaaattatgtgaagtagcgtgttgtgttgtgtcaagaagtaccacttgtcgatggccttttcagatctggaatgaaggtaagttcctgcaaactttcacttggttagcatttgactccagtgaaacatctggttggttagcatttgactccagtgaaacatctggttggatgactgtatttgcacggggtaacatatttcgccgagctcgacgtaggcgcatccccaagcaaaacagaatttagaataattattaggttgccgtcgatgatacgtaattctgaaaagcttgaacg

SEQ ID NO: 156480 - DNA, 385 bp, Zea Mays
ccacatgtcgtggatggtggagtggaagctggcgagcacgaggaggaggaggacgagcaaggcgacgccccagggcgagctgccctcggcggggccccgctcgtagcggcccttccagcggctctccctcgggtagaagcccaggtagccctcgaaggagtcgacggaggagatccagcggatgaggaggacgagcgcgatgggcacgcccagcagcgcccagctcagctgctgcgacgcctcctcgatgaagtcgtcgtacgtgaagaaccacgaggcgcccagcagcagcgtcaccatcagcagcaccaggatcaccgggtacggcagcggcgacagcgtgaacgcctccacgatcgacgactccgcgcgccggtcgccgtag

SEQ ID NO: 156481 - DNA, 1244 bp, Zea Mays
aggccgttaaaagcctggtttcagttgggcaaacccgttaacttgcaatataaattgcctggaacccatcttcgggcggaaaccctagcttgccgcgccgcctggatcgagcagccgagcgactaagcgaagactcccttttccccgagcacaagagaaccatggcggcggcggcagtatacggcggcttcaaggggaagcttggcgtcgaggatgcccccgagctgcagctcaaccgcatccgcatcacactctcatccaagaacgtcaagaacttggagaaagtttgtgcggatttggtaaagggagccaaggacaagcatttgagggttaagggacctgtcaggatccctactaaggttctccacatcaccactcgcaagtccccttgcggtgaaggaacaaacacatgggatcggtttgagttccgcattcacaagagggtgattgacctaatcagctcccctgatgtggtgaagcagatcacctccatcacaattgagcccggtgttgaggttgaggtgaccattgccgacgtgtaaggacgtgaagttcagcaatgtcatcgacaatctttttctttgtgctccctgtgtgctcgcaagagagattttgagttattattagcatacaagacttcttcccccctataattctatgttagctgtttgtctgatctatggcctgttcaacttgaaattttgattcagtaatctttatgtggtgctaattgaacttggatcgcaccaatcgtcttgtggatcattgtgtacaaactggttgtcgaactttatgtggtggctgcttggttggttaataatacgttttagcctgctaaagaaaacctattttttggcaacaatgtttaataaatatatgtccgaaaattgcccacacgcgcgaagtatgccaatttctatctatcacatgatgaagactatgactatagtattgacggttaataagaaagtgataggagtcgtcttagttttttatcttttaccggagatattcttttaacatatcaattgttggctttagctctttactagagatagcaattaggccagatccttgattcttcctccattaggggaagtttctctccatacgaggatgtaaatgttaagtaaccctagttagggttacgtggacaaatacctgctttgcccctgaggggtctcatatctctatataaggaacctgtacaccatctcataagatagagaaaagaaagaggccag

SEQ ID NO: 156482 - DNA, 2022 bp, Zea Mays
aggccgttaaaagcctggtttcagttgggcaaacccgttaacttgcaatataaattgcctggaacccatcttcgggcggaaaccctagcttgccgcgccgcctggatcgagcagccgagcgactaagcgaagactcccttttccccgagcacaagagaaccatggcggcggcggcagtatacggcggcttcaaggggaagcttggcgtcgaggatgcccccgagctgcagctcaaccgcatccgcatcacactctcatccaagaacgtcaagaacttggagaaagtttgtgcggatttggtaaagggagccaaggacaagcatttgagggttaagggacctgtcaggatccctactaaggttctccacatcaccactcgcaagtccccttgcggtgaaggtatcaagctctttcctagcctctgctgttgaaattgtctgctggttggctttgtttaattttactgattgagtttttagtgctttcattaataggaatacataatacattgatctgttcactattcactaatttaaacatgtattaagcattaaagtgctcgcagttcacacaatattatgctattgttaattttagtttaattggtttggtgttctggataccatttttttcttaaaaagatttttcttactactataacatgtaaaactactgtatctatcctgcaccatgggaggtgatttttgttatttaagttattatctactccttgtgttcctaattattggtcactttggctttttctatagttccatagcttttggtatgcacctagatatacaaagtatctctatgtatctagaatctaaaaaaccaaaacgagctataatctgaagcagaggtgaaggctttaccaatataccttgttttaccctgttttccgggtagctatttgtgtcaaattgtggtgggaatgggattcgtcattcatgccatctaaagtacactgtagcgcggtgactatctgtttcaaattgtggtgggatgggattcatcattcatgccaccttagtaactttagacttcatcttctggatagtaacacctggtcctgtttgacactctagtaccctctagttgttgacgaatgttatctagaatgtttgacaccatgggtttttattgatgactttctcgtctctaactctgacaggccaaggtctcttctcattttcaaattcttgaaaaaaacagttgttttaagtgaacaactttgtcaatagatagtgattatataggttgcccaccttcatgactgtcatcaagctcttctattgcacgtggaatataatggggtgttgataccggatttttgttgtggatttggctgattactttctaattttttggtcaggaacaaacacatgggatcggtttgagttccgcattcacaagagggtgattgacctaatcagctcccctgatgtggtgaagcagatcacctccatcacaattgagcccggtgttgaggttgaggtgaccattgccgacgtgtaaggacgtgaagttcagcaatgtcatcgacaatctttttctttgtgctccctgtgtgctcgcaagagagattttgagttattattagcatacaagacttcttcccccctataattctatgttagctgtttgtctgatctatggcctgttcaacttgaaattttgattcagtaatctttatgtggtgctaattgaacttggatcgcaccaatcgtcttgtggatcattgtgtacaaactggttgtcgaactttatgtggtggctgcttggttggttaataatacgttttagcctgctaaagaaaacctattttttggcaacaatgtttaataaatatatgtccgaaaattgcccacacgcgcgaagtatgccaatttctatctatcacatgatgaagactatgactatagtattgacggttaataagaaagtgataggagtcgtcttagttttttatcttttaccggagatattcttttaacatatcaattgttggctttagctctt

SEQ ID NO: 156483 - DNA, 693 bp, Zea Mays
tctcgcctacccgcgcacccgccccccccctctctccctttgcctaccgagcgactaagcgaagactcccttttccccgagcacaagagaaccatggcggcggcggcagtatacggcggcttcaaggggaagcttggcgtcgaggatgcccccgagctgcagctcaaccgcatccgcatcacactctcatccaagaacgtcaagaacttggagaaagtttgtgcggatttggtaaagggagccaaggacaagcatttgagggttaagggacctgtcaggatccctactaaggttctccacatcaccactcgcaagtccccttgcggtgaaggaacaaacacatgggatcggtttgagttccgcattcacaagagggtgattgacctaatcagctcccctgatgtggtgaagcagatcacctccatcacaattgagcccggtgttgaggttgaggtgaccattgccgacgtgtaaggacgtgaagttcagcaatgtcatcgacaatctttttctttgtgctccctgtgtgctcgcaagagagattttgagttattattagcatacaagacttcttcccccctataattctatgttagctgtttgtctgatctatggcctgttcaacttgaaattttgattcagtaatctttatgtggtgctaattgaacttggatcgcaccaatcgtcttgtgg

SEQ ID NO: 156484 - DNA, 625 bp, Zea Mays
aggccgttaaaagcctggtttcagttgggcaaacccgttaacttgcaatataaattgcctggaacccatcttcgggcggaaaccctagcttgccgcgccgcctggatcgagcagccgagcgactaagcgaagactcccttttccccgagcacaagagaaccatggcggcggcggcagtatacggcggcttcaaggggaagcttggcgtcgaggatgcccccgagctgcagctcaaccgcatccgcatcacactctcatccaagaacgtcaagaacttggagaaaggtataaccaaacctcatgaattcacatatctttctcaagtggtctaatatcttagctaatctcgatcgtatggagtatatagtagtggcgtatacaagctttcattgacggataattcgtatattgtttacgattatgctttagatctgcctgtcgaatttgttgcttcccgtcctagtctcgagaacatgtacaaatctatctcggagacagttagtcgcggattacaatggctgggtgtgcgaacccattttctatgcgccattcgatttgctatttgcctatgcacaagcggtggtgcagtgcctaagtgctttgtttgttctgttggatggtattg

SEQ ID NO: 156485 - DNA, 60 bp, Zea Mays
gttcttaaggaatcaagtgacgagaaaagggagcaagctgaagagatgatgaagtactag

SEQ ID NO: 156486 - DNA, 627 bp, Zea Mays
atgcagatcatcattggatggctaatggatagtgtcaggtttctctccaattgcagaggtttaaggacatgtacatgcaaacaagagatccaggctgatgcccctctggtcactgaagatgtttatgaaatcatcatgaagaatgctgctcgcttggacagtgagataatttatgatagggatttcgactacgactattttggcttcaaaactctagagaggtcttacctgttgaagcttgatggtaagttaagcagctgttttcttatatgcatgaaagatgacatcattgagggaatctatgaaaccctcaaagagtgtgctgtaataagcaaatctgctggaggaattggtgtctcagttcataatgtctgtgctactgagagttatattcgaggaacaaatggaacatcaaatggaattgttcttatgttacgtgtctttaatgatactgctcgctatgttgatcagggtggtggcaaaagaaaggtgcattttgctgtatacttggagccttggcatgctgatatttttgagttccttgatctgagaaagaaccccgggaaggttcttaaggaatcaagtgacgaggaaagggagcaagctgaagagaagatgaagtactag

SEQ ID NO: 156487 - DNA, 102 bp, Zea Mays
gttcggaggagcaatggcagagaccaagcatctttatttttttctcgttctcaaaaagtgtaccaccaatttgcaatgactcctgaatcaaacaatgtcaag

SEQ ID NO: 156488 - DNA, 1839 bp, Zea Mays
gacgggagcagggcattaaccacgcaccaacgacccgacctgaccgcattcaagtcgagcggcgcgggccatcaccagcacaccaccagcacctcaccaccaccgcaagcgccccacaggcggacaggccacagcgcagcgctatcgcgacgtcgccaccaggacaaggcacacggcagacggcggcacacggggacgggaagggcgcccgccgcctcacacagcaggctagtagccagtaccccaagaaaacccctagtcactcagatcccaatcaaaagaggagcatcgcagagctgtagtacgtagcacgcaggacggcaggaggcagcggtcatccgcggtggccggtgagcggtggccatggtcttgtctccttcccctcccctgcccaccgctgcctccgagccgaagcagcagcgaggcggcaccaacgcagcgccggagaagtccgacaagaagtacgcgcacgtcccgacgccgctccaccacggccaccgctgcgccagcaagaaggcaccccgcggtggcaagggcggcgacgtcgccgaccccgctgcgtacgtcgcggcggtgtcctgctcggactgccgcttcaagcagcgcgccctcgcgccggcgtcgcccggcgccgtcatccgctcgctgttcgtctccctcacccgccgctccaccccgcgctcgtcgccgtcggcctcgggaggcgccgccgacgccggggacgtcgagcagtggcgcctcgccgcggccgacctctcccgccgtctcgccgcggccacgcgcacgcgggacgaggcgctggaggataccacgcgcctgaagcactccctcgccgagctggagctcaagctcgcgcgcctcgaggcgcgcgcgctcccggcccccgccttccccgtcgactccttcctccgcgccgtctcgacctcgcgcgccgccgtgcggaacctcgcgcgcgcgctgtccacccacctccgcagcccctccagccaaggaccgagcctcgagggcttcctcaaccgcgccttccacgccgacttcgagctggacaccgacgccggcgtccacaccccggacccggcgggccggtgccaggccaacctcgcggcgtaccacgccgtcgcggtgctcacgtgggaggaggtcctgctccacggcaccaagcactacagcgaggggctcagccgcttctgcgacgccaagatgagcgaggtggtgtcctcgctcgggtgggcgcgcgcgcgcccgtggcctgagccgctgctgcaggccttcttccttgccgccaaggccgtgtggggcgtccgcctcctggcgcgctccgtccacccgccgctccccgttgtgcgcgcggaccgcggcgcgcgcttcgacccgcgcttcatggaggacgccgcggccagccgggcggggaggctggagccggccagcgtcaatatgatggtggcgccagggttccacgtctacctggccggcgcgggcgtggtgaagtgcagggtcgtctgcttctacagcagcaataacggccgcaccgccggccacagagatggcgggagcagcgccaacggcagcgtggggatggggagtagctgtagtggcatgaatgggagtgctacagacgtggttgatagctgtaacagcagtagggcagggtagggtagttgcacttgcacaggtagaaagaacacggggattttaacttgttcgttaaaaacacgattactgctgcttgtgtgaatatggggttgaattattaatcacgaacagattctgttaattttgattactccctctgttccaaatcggtacagtgtgtttcgaatcagagcatttttcggaggc

SEQ ID NO: 156489 - DNA, 2054 bp, Zea Mays
gatctgtggatggcgtagcagtatgtgcctgtagcacgtactgcgtgcttcgagcactcgtgtcccgacagacgcttcggtgtgacacgttgcagcatagaacagacggtacgagggggacaggaagcgtacgtagtagtagtagtacgtagcaacagtgttcgtttgcccctgcctgatgccctccaagaacgcaggagctatattggagaaatatagaatgtgatccttaaaaacagattaatctgtctctacttggagacagtacttagagatgctaagcaagattcagggaggacgagagaggaggaacgaggaagacgggagcagggcattaaccacgcaccaacgacccgacctgaccgcattcaagtcgagcggcgcgggccatcaccagcacaccaccagcacctcaccaccaccgcaagcgccccacaggcggacaggccacagcgcagcgctatcgcgacgtcgccaccaggacaaggcacacggcagacggcggcacacggggacgggaagggcgcccgccgcctcacacagcaggctagtagccagtaccccaagaaaacccctagtcactcagatcccaatcaaaagaggagcatcgcagagctgtagtacgtagcacgcaggacggcaggaggcagcggtcatccgcggtggccggtgagcggtggccatggtcttgtctccttcccctcccctgcccaccgctgtaagtgcgcctcgtctcctctgttacgacggttctgccgtgcccgagttgctgagttcattgcacaatggtgcgccgtcaggcctccgagccgaagcagcagcgaggcggcaccaacgcagcgccggagaagtccgacaagaagtacgcgcacgtcccgacgccgctccaccacggccaccgctgcgccagcaagaaggcaccccgcggtggcaagggcggcgacgtcgccgaccccgctgcgtacgtcgcggcggtgtcctgctcggactgccgcttcaagcagcgcgccctcgcgccggcgtcgcccggcgccgtcatccgctcgctgttcgtctccctcacccgccgctccaccccgcgctcgtcgccgtcggcctcgggaggcgccgccgacgccggggacgtcgagcagtggcgcctcgccgcggccgacctctcccgccgtctcgccgcggccacgcgcacgcgggacgaggcgctggaggataccacgcgcctgaagcactccctcgccgagctggagctcaagctcgcgcgcctcgaggcgcgcgcgctcccggcccccgccttccccgtcgactccttcctccgcgccgtctcgacctcgcgcgccgccgtgcggaacctcgcgcgcgcgctgtccacccacctccgcagcccctccagccaaggaccgagcctcgagggcttcctcaaccgcgccttccacgccgacttcgagctggacaccgacgccggcgtccacaccccggacccggcgggccggtgccaggccaacctcgcggcgtaccacgccgtcgcggtgctcacgtgggaggaggtcctgctccacggcaccaagcactacagcgaggggctcagccgcttctgcgacgccaagatgagcgaggtggtgtcctcgctcgggtgggcgcgcgcgcgcccgtggcctgagccgctgctgcaggccttcttccttgccgccaaggccgtgtggggcgtccgcctcctggcgcgctccgtccacccgccgctccccgttgtgcgcgcggaccgcggcgcgcgcttcgacccgcgcttcatggaggacgccgcggccagccgggcggggaggctggagccggccagcgtcaatatgatggtggcgccagggttccacgtctacctggccggcgcgggcgtggtgaagtgcagggtcgtctgcttctacagcagcaataacggccgcaccgccggccacagagatggcgggagcagcgccaacggcagcgtggggatggggagtagctgtagtggcatgaatgggagtgctacagacgtggttgatagctgtaacagcagtagggcagggtag

SEQ ID NO: 156490 - DNA, 2294 bp, Zea Mays
accagtactagcagtggcgcaaaaacttttttattacaacttcccggcaggacccgtttcgttcggtccaagtctccaacccctagcagcccacccacatacaattccgtttgcccgggtcctctcctcgcccgcgaccgccgtttgactcccggacccgacccactcccaccaatcggaggcaaagatcgcgtgaaatcccgggtctcgcgcgcccatttcagccggacgctgaccaagacaaccccggcgatccccacacccgcacacacaaagacgcagaccacacaacggctcggcaagcggcagcaagcccagaccagagcgaaaacccaccgttccagcacccgattttgaaccaccgcgacactcccaagtcccaaccaaatctacgacccctccgaccgaaacgagatctccgcctcccctcacggaaaggaaagaaacgctctccccccggggcaaagggaaccgtcgccgcgtcgcggaaaactgaagcggggcacaggaggaggagaggccgaggcagggagagggttccggcggcgatggagcggtacaacccctccgaggtgtacgagctcttcgtgcgccacatgaacaacccgagggtggtggtggacaacggcgcgtgcgcgacggcgacgctggtgcaggtgcacagcgcgaggaagcacggcgtgctgctcgacgcggtggcggccctgtccgaccacggcgtctgcgtccgcaaaggctacatctcctccgacgacggccgctggttcatggacgtcttccacgtcgtcgacgccgcgggcggcaaggtggccgacgccggcgccctgctggcgcgcctcgagtcctcgctctccgccgacgcattgccgccccgcccgccgcccgccgccgcgggggccgggacgcccaccctgctcgagctcgtcggcgccgaccgcccgggcctcctctccgaggtcttcgccgtgctgcacgacctccgctgcggcaccgtcgacgccagggcctggacgcacgccggccgcgtcgccgcgctcgtgttcgtgcgcgacgaggagaccggctcgccgatcgacgacgcggcgcgggtcaggcgcgtggagtccaggctccggcacgtcctccgcggcggcgcgctcggcgcgaggatggtccgggcagacgcctccgccgtcaacatggaccggaggctccaccagcttctcaacgaggacggggaggccgggagccgcgccgaccgggcggagtcggaggcggaggcgcccacgcccacagcggtcgccgtgcaggattgggtggagagggggtactcggtggtgacagtgagctgccgcgaccggcccaagctgctcttcgacgtcgtctgcaccttgacagacttggattacgtggtgtaccacggcacgttccacacagacgacgatcacgcccgccaggagttctacatcaggcggttggacgagcggccaattagctcggcgaccgagaggcggcgcgtgatccaatgcttggaagcggccatcgagaggcgcgcatccgagggagtgaggctggagctgcgcatcaccgaccgccgcgggctgctcgcctacgtcacgcgtgtgttcagggagaacagcctctcggtcacgcacgccgagatcaccaccagggggcgacatggccatgaacgtgttccacgtcaccgacgtggccggccgacccgcggaccccaagaccatcgacgaggtgatccagaggatcggcacggagagcctccgggtggacgaggagcggtggccgcgcctgtgctcgacggagggcgacgctggccgcggcggcggcggtgcggggatcttctcgctcgggagccttgtcaagaagaacctggtcagtcttggcctcataagatcctgctcgtgaggacgcgatcaatggggggcatgtgctccatgggatccttgtgtaaatatgggatggtgcatgggttagtttgtaaatggagtaggggtttaaatcgccgtttctagttctaggtttaagttgccacgtgtacatagtagcaagtggagatggaaggttttaaaagttgctggtcggcaacagcaaggataatggacctctctggtgggtcgtgccatgtgtctatctaacttttacgtaagaaaaagtattatacatggatcgctgaaacagagtacttgtttcgcaagaccaaaaatggatcaacaatactatacttgacccattcacctcaaaaggtcaaatctgagatcacacaacggaatagtgcacggagtatgacggttggtttg

SEQ ID NO: 156491 - DNA, 101 bp, Zea Mays
cccagttatatgatatgacacaacctctccagatctctcgtacccgccgctgtacccccatatggcaaaaagtctgtgcttccctcgcaagcaaacccagg

SEQ ID NO: 156492 - DNA, 867 bp, Zea Mays
caagcattggacctattgtctcatgggacaggatggcagcagagtgcgaggataggaagatgctcatgggtgatagcccaaagtgtgacaagtggatgcttaaggatgatgtgggtgattttgatgcaaagagtattcttaactgtggggatgatgatggcgtggaggattccaaggtcatcaagccgttgatgcatgacgataccatggtaactgacccaaatttggttcatcagcaatgtttgcgatgtgcagcctttcagcaaggttattgtcaagcactgacatcggatggtataccaccagttcaaggattcttcccatgccagtaggaaggttttgtgcactcacactgtaggggtgatcccattgaacactacatcattcctcgttttctaaagggtccatgcccctaaaatgaccaagatgttgaaaccattccgcacaccgttgctcattcgatcatttgattgctgccatcgtaagaagaaattgatactgtccgtttggggtgtgagtccggaatcccaaaatatcgccatagctgatgccaaaagtgccgagtgaagacacacaccaagagtagatggttaatcgtctcatcttcctggtcacaacagtgatctggatggggaaggccatgacatgccatcctgtccgttgtctttgttggattgtgtaaaatagatgatacggtacagtagatgatactgtttaacactgtttacagagtaaagtttgaaatagatgataagataaaggatgagacaggggagctgctagagacaacctcagcaacggttgtgggccactagctataggaaaaacttacatttccttggagtccatattttcaaaatcattact

SEQ ID NO: 156493 - DNA, 734 bp, Zea Mays
caagcattggacctattgtctcatgggacaggatggcagcagagtgcgaggataggaagatgctcatgggtgatagcccaaagtgtgacaagtggatgcttaaggatgatgtgggtgattttgatgcaaagagtattcttaactgtggggatgatgatggcgtggaggattccaaggtcatcaagccgttgatgcatgacgataccatggttcatcagcaatgtttgcgatgtgcagcctttcagcaaggttattgtcaagcactgacatcggatggtataccaccagttcaaggattcttcccatgccagtaggaaggttttgtgcactcacactgtaggggtgatcccattgaacactacatcattcctcgttttctaaagggtccatgcccctaaaatgaccaagatgttgaaaccattccgcacaccgttgctcattcgatcatttgattgctgccatcgtaagaagaaattgatactgtccgtttggggtgtgagtccggaatcccaaaatatcgccatagctgatgccaaaagtgccgagtgaagacacacaccaagagtagatggttaatcgtctcatcttcctggtcacaacagtgatctggatggggaaggccatgacatgccatcctgtccgttgtctttgttggattgtgtaaaatagatgatacggtacagtagatgatactgtttaacactgtttacagagtaaagtttgaaatagatgat

SEQ ID NO: 156494 - DNA, 2444 bp, Zea Mays
gatcacctcgtcgccgtctcccaccatctcggccatgaatcccctcctcccctcctcctttccgaaatcaccccacccgccggacccaaaccctagctccccgaatcctagcccctgcagctacctcctccacgccgacaccgacgacgaggcgctgattcaaatccccggtcagaaccctaccctggtgggcgcctccgcccccttcgcgttgctgccgtctatcgacccggtcccgcacgtctcgtcgcagttctacaccttcagcgccgcctcctacgggctcatggtacgctgcatccgagcaggccgctccgcatcttccgacgaggtccgcggcgccacgtcgctctccgtgctcgcctcctggcgggcggtctggaaggatcggaacgaggacactgcctacctcaccgcgtggaagcgcatccaggacaagctcgccgcttcggccgacggccggcaccttcacttcaagtccaacaccgcgcagcgcgtctcccacgtcggcatgtggagggacatagtctcggaggcgcacgccgaccccgacctgctccggcacctcgcgttcaaggacaccgtcgaccgcatcaagcagtcttggactgtgggggccaaaatctacggtattccagaatcatttatccgtgcatgtgtcgctgcatgccccgtttgtaaagctgcgcctgctagccaacctgatcccgctacctcatcacctaaacgtgggaagcggcgccgcaggtttgtatatactgagacattggatgtgcctgctcgagatgtgccttggaggttacaacaattggctgccaagcataaggttgtactttgtataaggcagaagtatatacggtataagcccttcatggctgaggtgaaagattatgcctgcgaccgtgctggagtgcccacatcaagtagtgggagtgctgcatcctcagccaataattccgagggtaagaaggcgcgggttctaaagcgagagccataccagtcaaagaggtgtggttgtggattccgtattcgggcaattgtgccgatagctaactataatgaaaaagacaagacttttgtgtacttggaggagggcactgcagtgttcaagctttacgctgtgcattcagggcatgaaccagggccacttgatggcaatgcacgaattgttcacaggttggttggtcataagggagctcttgagtttgatccagacatttatggtgtcagtgaggaaggtgatcctaccttttcagcgaagggggatgaagatgttgatattgacgactcacaccaggcagtcttgcggcaagtacggtatctgagatcagaagttctctcgctagaagggaaggtggctaagatgcacccagaattgttagggtcactgtccactgagttgtctgaggttttgcacaggattaggaagtttaatttggaaggcaatgtctaccaacagcagatattgatggtaggcaatgaagaagtcaggggatgggggtcaggggatgtatctcaccaattagaccagcatgatcgaccattctgcaaggatgatgagatgcttgatgatgatgatactgactttggctcaagcattggacctattgtctcatgggacaggatggcagcagagtgcgaggataggaagatgctcatgggtgatagcccaaagtgtgacaagtggatgcttaaggatgatgtgggtgattttgatgcaaagagtattcttaactgtggggatgatgatggcgtggaggattccaaggtcatcaagccgttgatgcatgacgataccatggtaactgacccaaatttggtaggtattcatgtagaaggattttacactggaacaaaatggtatgattcaccaggtttagattccaatgttgatggaggggatagcagttttaggcatggtggaatcttgtgagttgtgataacctgatacctggaaggttctgtaaattctgtatactagtgtatttagcttacaccaatttgattaagtgtctgtaggtggagcttcagtcaaagtaatctgtttgccctgatatatacaggctgcactttcaagtcaacttttgttttaacttgtatatagtccctgtatgaagggcaggcttggtgaagttgtgtgagctgtctcattgagtctctaggtcgcaggttcaaagctctacccctgcatttgcgggggaaggtttgcctcgagttatcccttccccagaccctaccctactcatgtgggagcctcgagtctgcccttccccctttatagtccctgcttgcttcaatacattaaagctatggttctgttgggggcatgccttaatattttgtgagttactgtgtgtgggcctgcgtgtgagtttagcaacattttagtcacaattatatgttagtttcctcataacttcacaaggttgcattattttcgttct

SEQ ID NO: 156495 - DNA, 3099 bp, Zea Mays
atggatcgacgcagctggccttggaagaagaaatcatctgacaaatcatcaaatgcggatgtgctgcagaattttaatcatgcagaacaggaagataaagctccaaaatttgtgcaaatttcacctgaaacatatgcacatcttaccgagtcagaggaaaaagtaaaaaaattagaagaaaacgtgaaggtcttgaatgaaaaactctctgcagcgcaatctgagatcacaactaaagatgctcttgtgaagcagcatgcaaaagttgctgaagaagctgtatcaggttgggagaaagctgaagcagaggcctccgcgctcaagcttcagctagaaactgttacattatctaagctagccgctgaagaaagagctgcacatctggatggtgcattgaaagaatgcatgaagcaagtaagggctgttaaggaagaaggtgagcagaagctacatgatgtagtctttgcaaaaaccaaacagtgggagaagataaaggccgagttagaagcaaaattacttgaatttgaacaggaactcataagggctggtgctgagaatgatgcactcacaagagcacttcaagaacgggcagaactgttgatgaaaattgatgaggaaaaagctcaagcagaagctgagattgaaatcttaaagagcacaatccaatcaggcgaaagggaaataaattcacttaaatacgaattgcatgttgtctccaaagagcttgaaatccgcaatgaagaaaagaacatgagtgtgcgctcagctgatgtagcaactaaacagcaccaggaagatgtcaagaaaatatcaaaacttgaagctgaatgccaaagattacgtggccttgttcgaaagaagttacctggtcctgcagcactagctcaaatgaaaatggaggtggagagcttgggtagagagtatggagaccacagagtacgacgatctcctgcaaagaattctagtttccatcggcccatgtctcctatgtctcctgttcctgattacgcaatcgagaacatacagtacatgcagagagagaatgagtttctgactgctcgtttattaacaatggaagaagaaaccaagatgcttaaagaggcattgacaaagcgaaacagtgagctgcaatcttcaagaagcatgtatgctaagacagcaggaaagctccgaagctttgaagttcatatgttgactggaaaccaacataagagtccaactatgaacatggatattcattttgatggtgcactgagccaaaatggaagcaacccacctagcatgacttccatgtctgaagatggggttgatgatgaaggaagttgtacagaatcttgggccaacactctggtgtctgagctctctcagttcaaaaaagagaaggctgccaagagcagtgcgacagaaagctccaataggttggaactcatggatgacttcttagagatggagagattagcatgtctgtcttctgatgttaatggcaatggcagcactattgacaaaatgaagatagatgaagttggggctactttgtctgactttactgaaagagatggtgttaaagatttgcagtcagcttcaccaatgacagaaagtccatctaataaacagcgtttgtctgagaaatcttcgctttcgaaattccagtcaagaatatctttattactggattctgaatcagcagagaataatgctgaggtacttgatagtatcagaaacattctaaaggatattgaagatgaggcagattcggtgaacacaaatggaactcatcattcaggcaggaccttaagtttagatagcaaatgtgccatcgatcaagaacttaagaatgccatattgaagattcaagactttgttaagttacttgatcaagaagtctccaagtttcaaggccagtcatctgattataatgggctaagtgagaaaacacaacagttctctgcattggttgacaaagttctgtcaaacgatgatgtcctaaatgatattgtcatggcactgtctgttatcttgtcagaaactagccagattaagttgacactgttgagagacaacaacaatgaagcagaaagtaataacttagattgtgttgataaagtgactctacttgaaaataaggtgcagcctgagccagtaaaagacaatggttctggtctctgcccactgttgcctcattcatcttctgatcctgagtttgaggggcctactgatgctggatttgatgttaaggctgcagtgaaggtatgctcgccggaggaatatgaacaacttaaatctgagaggacaaatttggagggagagttagcaaagtgcaacaaaataatagaagaaacaaaggttagattaagtgatatggagaaaaacctggaaaacctcacatctaagttggctgacagtgagaaatcaaatagcttgagtgagacacagttgaagtgtatggctgaatcctacaagtcacttgaatcaaggaaacttgaattagaaaatgagatagaagtgctaaggtccaaaatagatgctttaacagctgaactctctgatgaaaggcaaagtcatcaggacgacttagttaaatacagagatctcgaggagaagatggaaaggtatgagatggagaggagttcaatgcttgtggatggggacccagacaccaagtcaaagcaggataaagagataggggctgcagcagagaaactggcagagtgccaggagaccatattgattcttggccgtcagctgcaagctatgcgtcctccagccgagtcactcggctcttcacctaatcggcaaggcacggagaactttctacaggacgtggtaggaacaaccgcaggagaatattcccagaagccttcaggccaacctgatacagaccaggatatgcttgggacaggaaatgtctctccggtcaatggatacaagacacacatgatcccttctgatgcagacggaagccctttcctttctccgaacagctccaagcgcccgaagcatcgatcgagatcctcttcgtcttcgtcattcaccaaccaccagttgccagacaaacagagccgaggattcagtcggttctttgcgaagaccaaagagtga

SEQ ID NO: 156496 - DNA, 700 bp, Zea Mays
cataccatctgccaatacctgcaattctgagtgtcaggattccttttcccaggttttagaatcccatcaagctggcaagctggatacatctggtacagctaaagacgtgattgcttgttttgagaaactaggtgtgtcatatgatatgaaccggatggttaagattagagatccagaacagcagcttgagatggtgggtgtccctgaagaacacatccaagggcatgcattccatctgtatcatctcacttctcctgatgacagtgtttcatttgagttccagcacaatgtttgtggccgttcaatctatgccgaaggaactattgacgcggcaatgtttctgcataggaaggtgcaatcaaaggattctaagagaatatataatatggatgatgtcctgcgagaagaaacttgccataaagcctactgattagctgctgataaataatactccctccgttcttttttatttttcgctgtttagttcaaaaataaactagcgagcgacaaatattcaaggatggaggcaatattaagcacagcgctgttgtttttaccgttttttgttagaataatgcactgcgcaccttcacccattttagacttttgtgtaattgggttgaatatgagaggttcaataggaaaaaaatgacatgcttctagtgatggcaatcataatttaatattctcgacttcttgc

SEQ ID NO: 156497 - DNA, 1394 bp, Zea Mays
tattgggcccgatttaggagatactcccccggttctactggagataaaccgttcgtctagcttggctcgtccctgtccggtacccttctctcaagccgcgcagttgtcgaagtcgaaactatccgctgctgtagtagagatgctctcgatgcggccacccagcaccaccttgtcgcgccccttgatttggccgagacggggtcgcctcgggggagccgccgcgccgcaatatgttagcgccgcggcaccggcgcccgctctggagccagctgcgcctccggagagcgtctcctttccgattctggtgaatggctgcactggtaacatggggttatctgtcgctgaggctgctgctctgaggggccttcacctagtccctgtttcattcagtagtagagagaaggttgaaaaaacaatacaagttggacaaacagacattcaaatatatggtccttctaaaagagaagatgttgtttcatctattgctgatgaattcccagatgtcattgttgtggactacacaggacccaattctgtgaactctaatgctgagctctattgcaagcttggcttgccatttgtgatgggcacaactggtgggaacaagcatttgctctacaagtcagtgcaagattcaaaaaattatgcactaatatctccacagatgggcaaacaagtggttgcatttgttgctgctatgaaaatcatggctgagcagtttccaggggccttttcaggttatcatttagaggttttagaatcccatcaagctggcaagctggatacatctggtacagctaaagacgtgattgcttgttttgagaaactaggtgtgtcatatgatatgaaccggatggttaagattagagatccagaacagcagcttgagatggtgggtgtccctgaagaacacatccaagggcatgcattccatctgtatcatctcacttctcctgatgacagtgtttcatttgagttccagcacaatgtttgtggccgttcaatctatgccgaaggaactattgacgcggcaatgtttctgcataggaaggtgcaatcaaaggattctaagagaatatataatatggatgatgtcctgcgagaagaaacttgccataaagcctactgattagctgctgataaataatactccctccgttcttttttatttttcgctgtttagttcaaaaataaactagcgagcgacaaatattcaaggatggaggcaatattaagcacagcgctgttgtttttaccgttttttgttagaataatgcactgcgcaccttcacccattttagacttttgtgtaattgggttgaatatgagaggttcaataggaaaaaaatgacatgcttctagtgatggcaatcataatttaatattctcgactt

SEQ ID NO: 156498 - DNA, 872 bp, Zea Mays
ataaaccgttcgtctagcttggctcgtccctgtccggtacccttctctcaagccgcgcagttgtcgaagtcgaaactatccgctgctgtagtagagatgctctcgatgcggccacccagcaccaccttgtcgcgccccttgatttggccgagacggggtcgcctcgggggagccgccgcgccgcaatatgttagcgccgcggcaccggcgcccgctctggagccagctgcgcctccggagagcgtctcctttccgattctggtgaatggctgcactggtaacatggggttatctgtcgctgaggctgctgctctgaggggccttcacctagtccctgtttcattcagtagtagagagaaggttgaaaaaacaatacaagttggacaaacagacattcaaatatatggtccttctaaaagagaagatgttgtttcatctattgctgatgaattcccagatgtcattgttgtggactacacaggacccaattctgtgaactgtaaacagtttaaccttgttattttctcaatacactagataaagttcttagtacatgttatgatcactttaccttacgcaatcatgatattccagtttgagaaatttgaagtcttcttgctagtttgtcctaattactaaacctgctgttataaaatcattttgctgctatattcacatcaaaatgtatattcaggagttttgttgtagatttttttgtcatgtttatgctaaggattacatttctgttcttacatggtaggataacaattataagacaaatacattttttatgcctgtcaaatttcatgtagaacatctaggaagctgtcacatttagttcaatattgctgaaagccttgaactattgattt

SEQ ID NO: 156499 - DNA, 1964 bp, Zea Mays
agctcctactccgctagcgaggatttccgtagacgatggaaaatctcaaaactcaaagaccggtgagacaagcacatcacgtaaccaaaccccacgagcgaacttctcttttcctgctcagttcagcttccaggtttcttcccgcgtcaataacccccctgctcaggtagcccaatatttcccgtcccgcactaccatctataaaaatggaggtcccgacgagcaggtaataccagctccgatcggtagctcaccggcgttgatatattttggaagtcggtgagggaactgagcccgtgccgacgttggctgagaggctgacatctgggccttagtgtcagtcggtccaggacgggcagatacaaactccccttcgcttcgtccctctcctatacaaattcaagtggccgccgtcaaagatcggtcgtcccccttccatcccgttgcggcccattaccattacaacaaaggcagcggaagccagcagagtgagccggagagcttagagctaagtcctcgtgtgaaagatggaaatggcgcgaagcccagctcatgttgctctctgctcgcttgctctgctcctcctgcttacagccgcgcgatcggcgacgttcacgctgaccaacaactgcgggtacacggtgtggccggggctgctgtcgggcgccggcacggccccgctgccgacgacggggttcgcgctggcgcgcggcgcgtcggcggcggtggacgcgccggcgggctggtcggggcggatgtgggcgcgcacgctctgcgccacggacggcgccaccggcaggttcgcctgcgccacgggcgactgcggctcgggcggcgtccagtgcggcggagccggcgccgccccgcccgccacgctggccgagttcacgctggacggctccggcggcctggacttcttcgacgtcagcctcgtcgacggctacaacgtcccgatgctcatcgtcccgcagggcgcgggcggcggcggcggaggcggaggcaacggatccgccggcgccgagtcgagcaagtgtatggccacaggctgcctcgtggacctcaacggcgcgtgccccgctgacctgagggtcatggccgcgtcgtcgtccggcggcggcggcggcggggccgtggcgtgccggagcgcgtgcgaggcgttcgggacgccgcagtactgctgcagcggcgcttatgggaaccccagcacgtgccggccgtcgacgtactcgcagttcttcaagaacgcctgcccgcgcgcctacagctacgcctacgacgactccacctccaccttcacctgcgccaccggcatcggatacgccatcaccttctgcccgagcaccaccagcgggaagtactccggcgagaacccgcaggccgcctcggctaccagctcgatggtctacctcggcggcgagcagctcgccaccggcgcctccgccacggcgacccgagcgtctcagctcctcgtggccgccgccgccgccgccgcagtcgcgctcctctgagcttgccgatgtacgtcggcgtgtgaaaatggcgcgtggcaggagtcgtatatgtctttgttcagtcacgcctcttccggcatgacgggggcagcgataagattcgacaagagaaaagggggttcgccgcccgtgcccatgagaccaaaggctggcgagtcacgacagggctgctgctacggctaaccgaagaaaacaacgatatctccgcgtaccggatggcatcgtcctatactttataggtagcttaggtcatagggtttaggataactagtagcatgtgataacctttgcatgcttctagtccacgcttcctcgatttgccgttgagcctatgctcgacgtgctaaaatagattacagcaattatgattatttactttacctgttcaacattagtggaaaagaacgaaaagggtaaaatcattgttcacacaaaactacgtttcctttgact

SEQ ID NO: 156500 - DNA, 1045 bp, Zea Mays
atttctagtgaccaccagattaaagatgatgtagaaaagaggattcccttgaactaaatgacattgaggcttcgaacaaatacaatatcgacactactggactagtatgttgttggccatcggaagaggttcttgcctactactgtattaaccactcggatgtgttcaggtccaagaaagtgcttgaacttggatctggttatggattggctggacttgttattgcagccagtacaaatgctgacgaggttgttatttctgatggcaacccacaagtagctgagtaagaacatatccatcaatgcagagacttttggtgagaccaaggttaaatctttgatactgcattgggacaaagagcaagcttcagaaatgttgaatacttttgacatcattgttgcaagtgactgcacatttttcaagcaattccataagggccttgcccgaacagtcaaatccttgctgaagcattcggcaacctcacaggccatcttcctgagccccaaaagaggtgattctctagacaaattcctgggaattattaaagagaatggtctcagttgtgagttgatagagaattatgatcctactgtctggaatctgcacaaaaaattggtggctggtgaggatagaacctggcctaattatgacaaggagcattgctaccctcttctggttagaattggctattttagtgagttctaattttcttacatttttttatcttggatgatctattttgacatgaaggaggcagcaaaatgagatttagaagtatggaatctacttaattgtctagacctgaatatatgagtgaatggaaaacagttattcatgtgtctgaacattgatcggtggcttctcttatgtttcaactctagtctacacgcaaaccactagtaaagacttaaccgatatgggatggatatattatcttaacttcttgtgccattagataccgatggttgttttatcggaaaaaaaatattgatggttgtacataattctagtttggaaatgattttgtttaggtaacttaaaaggt

SEQ ID NO: 156501 - DNA, 1458 bp, Zea Mays
aatccgaatgaccaaatcgaactagtcctcaatatctctcaggtgctcgccacgaacaaacgtgacgcatctcgagctccgagcctccgatggactcttcctctccatccccatcgtcagcgcccagtggatcccgtgccgcctccaatgccacccagcggtggagcatccttcgccgcgcgctgcttgctcgttcctcctccgcgcgcgccctagggggaatttctagtgaccaccagattaaagatggtaccaataacatttcaagaaaggcttcacgtggttttaacctgatcgaatgccactccttgccaatttcacagctactgaaatcacttgggaattcattaaacgaaaatgattttgaatgccagaaggatgtttatgtatgttataagctgccttgtagaggttcctctaaacttgatctggtatgtagaaaagaggattcccttgaactaaatgacattgaggcttcgaacaaatacaatatcgacactactggactagtatgttgttggccatcggaagaggttcttgcctactactgtattaaccactcggatgtgttcaggtccaagaaagtgcttgaacttggatctggttatggattggctggacttgttattgcagccagtacaaatgctgacgaggttgttatttctgatggcaacccacaagtagctgagtacattcagaagaacatatccatcaatgcagagacttttggtgagaccaaggttaaatctttgatactgcattgggacaaagagcaagcttcagaaatgttgaatacttttgacatcattgttgcaagtgactgcacatttttcaagcaattccataagggccttgcccgaacagtcaaatccttgctgaagcattcggcaacctcacaggccatcttcctgagccccaaaagaggtgattctctagacaaattcctgggaattattaaagagaatggtctcagttgtgagttgatagagaattatgatcctactgtctggaatctgcacaaaaaattggtggctggtgaggatagaacctggcctaattatgacaaggagcattgctaccctcttctggttagaattggctattttagtgagttctaattttcttacatttttttatcttggatgatctattttgacatgaaggaggcagcaaaatgagatttagaagtatggaatctacttaattgtctagacctgaatatatgagtgaatggaaaacagttattcatgtgtctgaacattgatcggtggcttctcttatgtttcaactctagtctacacgcaaaccactagtaaagacttaaccgatatgggatggatatattatcttaacttcttgtgccattagataccgatggttgttttatcggaaaaaaaatattgatggttgtacataattctagtttggaaatgattttgtttaggtaacttaaaaggt

SEQ ID NO: 156502 - DNA, 1546 bp, Zea Mays
aatccgaatgaccaaatcgaactagtcctcaatatctctcaggtgctcgccacgaacaaacgtgacgcatctcgagctccgagcctccgatggactcttcctctccatccccatcgtcagcgcccagtggatcccgtgccgcctccaatgccacccagcggtggagcatccttcgccgcgcgctgcttgctcgttcctcctccgcgcgcgccctagggggaatttctagtgaccaccagattaaagatggtaccaataacatttcaagaaaggcttcacgtggttttaacctgatcgaatgccactccttgccaatttcacagctactgaaatcacttgggaattcattaaacgaaaatgattttgaatgccagaaggatgtttatgtatgttataagctgccttgtagaggttcctctaaacttgatctggtgtaagtagtctattatttgcccctagttcgctggcacactgaatgtagttatccctacctgtaccccccccccctcctcctggtataactgggaatcatattgttttataatctctgttgtgacaacaaattaagccatcatgaattgtttaaccaacaactcaacaagaaaggttgacatgctattttcagttgcttattgttttagttcatgattccagatgtagaaaagaggattcccttgaactaaatgacattgaggcttcgaacaaatacaatatcgacactactggactagttgttggccatcggaagaggttcttgcctactactgtattaaccactcggatgtgttcaggtccaagaaagtgcttgaacttggatctggttatggattggctggacttgttattgcagccagtacaaatgctgacgaggttgttatttctgatggcaacccacaagtagctgagtaagaacatatccatcaatgcagagacttttggtgagaccaaggttaaatctttgatactgcattgggacaaagagcaagcttcagaaatgttgaatacttttgacatcattgttgcaagtgactgcacatttttcaagcaattccataagggccttgcccgaacagtcaaatccttgctgaagcattcggcaacctcacaggccatcttcctgagccccaaaagagaacctggcctaattatgacaaggagcattgctaccctcttctggttagaattggctattttagtgagttctaattttcttacatttttttatcttggatgatctattttgacatgaaggaggcagcaaaatgagatttagaagtatggaatctacttaattgtctagacctgaatatatgagtgaatggaaaacagttattcatgtgtctgaacattgatcggtggcttctcttatgtttcaactctagtctacacgcaaaccactagtaaagacttaaccgatatgggatggatatattatcttaacttcttgtgccattagataccgatggttgttttatcggaaaaaaaatattgatggttgtacataattctagtttggaaatgattttgtttaggtaacttaaaaggt

SEQ ID NO: 156503 - DNA, 1407 bp, Zea Mays
aatccgaatgaccaaatcgaactagtcctcaatatctctcaggtgctcgccacgaacaaacgtgacgcatctcgagctccgagcctccgatggactcttcctctccatccccatcgtcagcgcccagtggatcccgtgccgcctccaatgccacccagcggtggagcatccttcgccgcgcgctgcttgctcgttcctcctccgcgcgcgccctagggggaatttctagtgaccaccagattaaagatggtaccaataacatttcaagaaaggcttcacgtggttttaacctgatcgaatgccactccttgccaatttcacagctactgaaatcacttgggaattcattaaacgaaaatgattttgaatgccagaaggatgtttatgtatgttataagctgccttgtagaggttcctctaaacttgatctggtgtaagtagtctattatttgcccctagttcgctggcacactgaatgtagttatccctacctgtaccccccccccctcctcctggtataactgggaatcatattgttttataatctctgttgtgacaacaaattaagccatcatgaattgtttaaccaacaactcaacaagaaaggttgacatgctattttcagttgcttattgttttagttcatgattccagatgtagaaaagaggattcccttgaactaaatgacattgaggcttcgaacaaatacaatatcgacactactggactagtatgtccaagaaagtgcttgaacttggatctggttatggattggctggacttgttattgcagccagtacaaatgctgacgaggttgttatttctgatggcaacccacaagtagctgagtacattcagaagaacatatccatcaatgcagagacttttggtgagaccaaggttaaatctttgatactgcattgggacaaagagcaagcttcagaaatgttgaatacttttgacatcattgttgcaagtgactgcacatttttcaagcaattccataagggccttgcccgaacagtcaaatccttgctgaagcattcggcaacctcacaggccatcttcctgagccccaaaagaggtgattctctagacaaattcctgggaattattaaagagaatggtctcagttgtgagttgatagagaattatgatcctactgtctggaatctgcacaaaaaattggtggctggtgaggatagaacctggcctaattatgacaaggagcattgctaccctcttctggttagaattggctattttagtgagttctaattttcttacatttttttatcttggatgatctattttgacatgaaggaggcagcaaaatgagatttagaagtatggaatctacttaattgtctagacctgaatatatgagtgaatggaaaacagttattc

SEQ ID NO: 156504 - DNA, 1649 bp, Zea Mays
caccgaatgcgggccctttcgtaattcaacttagcacagcacttttgggcccagtccgtgagaatgtgagatctataggcccaaaaaactcctggaagcccaacatgcgcggcggctgcgcctctggcgagtggcgactggcgatgtgagccgagagaacagagaagccgagctcgatccgccaaagaaggcggcgttatcgatccctgcaactgcaagctctaaggtgctcgccacgaacaaacgtgacgcatctcgagctccgagcctccgatggactcttcctctccatccccatcgtcagcgcccagtggatcccgtgccgcctccaatgccacccagcggtggagcatccttcgccgcgcgctgcttgctcgttcctcctccgcgcgcgccctagggggaatttctagtgaccaccagattaaagatggtaccaataacatttcaagaaaggcttcacgtggttttaacctgatcgaatgccactccttgccaatttcacagctactgaaatcacttgggaattcattaaacgaaaatgattttgaatgccagaaggatgtttatgtatgttataagctgccttgtagaggttcctctaaacttgatctggtatgtagaaaagaggattcccttgaactaaatgacattgaggcttcgaacaaatacaatatcgacactactggactagtatgaactcaggaagatgatgacactgaccaacacagttcaagacgatgacactgaacaacaagatgatgcagcttctcaggaagacgatgaagaagaagaacatccactacaatctgacggaagatcaatggaaggggaagaatctgtcctaggtggtgttggcgggtcagctactgctgatgcattccatttggattaggatctgctactttaggtcttgttgttggccatcggaagaggttcttgcctactactgtattaaccactcggatgtgttcaggtccaagaaagtgcttgaacttggatctggttatggattggctggacttgttattgcagccagtacaaatgctgacgaggttgttatttctgatggcaacccacaagtagctgagtacattcagaagaacatatccatcaatgcagagacttttggtgagaccaaggttaaatctttgatactgcattgggacaaagagcaagcttcagaaatgttgaatacttttgacatcattgttgcaagtgactgcacatttttcaagcaattccataagggccttgcccgaacagtcaaatccttgctgaagcattcggcaacctcacaggccatcttcctgagccccaaaagaggtgattctctagacaaattcctgggaattattaaagagaatggtctcagttgtgagttgatagagaattatgatcctactgtctggaatctgcacaaaaaattggtggctggtgaggatagaacctggcctaattatgacaaggagcattgctaccctcttctggttagaattggctattttagtgagttctaattttcttacatttttttatcttggatgatctattttgacatgaaggaggcagcaaaatgagatttagaagtatggaatctacttaattgtctagacctgaatatatgagtgaatggaaaacagttattc

SEQ ID NO: 156505 - DNA, 1560 bp, Zea Mays
caccgaatgcgggccctttcgtaattcaacttagcacagcacttttgggcccagtccgtgagaatgtgagatctataggcccaaaaaactcctggaagcccaacatgcgcggcggctgcgcctctggcgagtggcgactggcgatgtgagccgagagaacagagaagccgagctcgatccgccaaagaaggcggcgttatcgatccctgcaactgcaagctctaaggtgctcgccacgaacaaacgtgacgcatctcgagctccgagcctccgatggactcttcctctccatccccatcgtcagcgcccagtggatcccgtgccgcctccaatgccacccagcggtggagcatccttcgccgcgcgctgcttgctcgttcctcctccgcgcgcgccctagggggaatttctagtgaccaccagattaaagatggtaccaataacatttcaagaaaggcttcacgtggttttaacctgatcgaatgccactccttgccaatttcacagctactgaaatcacttgggaattcattaaacgaaaatgattttgaatgccagaaggatgtttatgtatgttataagctgccttgtagaggttcctctaaacttgatctggtgtaagtagtctattatttgcccctagttcgctggcacactgaatgtagttatccctacctgtaccccccccccctcctcctggtataactgggaatcatattgttttataatctctgttgtgacaacaaattaagccatcatgaattgtttaaccaacaactcaacaagaaaggttgacatgctattttcagttgcttattgttttagttcatgattccagatgtagaaaagaggattcccttgaactaaatgacattgaggcttcgaacaaatacaatatcgacactactggactagtatgttgttggccatcggaagaggttcttgcctactactgtattaaccactcggatgtgttcagttcattacaggtccaagaaagtgcttgaacttggatctggttatggattggctggacttgttattgcagccagtacaaatgctgacgaggttgttatttctgatggcaacccacaagtagctgagtacattcagaagaacatatccatcaatgcagagacttttggtgagaccaaggttaaatctttgatactgcattgggacaaagagcaagcttcagaaatgttgaatacttttgacatcattgttgcaagtgactgcacatttttcaagcaattccataagggccttgcccgaacagtcaaatccttgctgaagcattcggcaacctcacaggccatcttcctgagccccaaaagaggtgattctctagacaaattcctgggaattattaaagagaatggtctcagttgtgagttgatagagaattatgatcctactgtctggaatctgcacaaaaaattggtggctggtgaggatagaacctggcctaattatgacaaggagcattgctaccctcttctggttagaattggctattttagtgagttctaattttcttacatttttttatcttggatg

SEQ ID NO: 156506 - DNA, 1321 bp, Zea Mays
caccgaatgcgggccctttcgtaattcaacttagcacagcacttttgggcccagtccgtgagaatgtgagatctataggcccaaaaaactcctggaagcccaacatgcgcggcggctgcgcctctggcgagtggcgactggcgatgtgagccgagagaacagagaagccgagctcgatccgccaaagaaggcggcgttatcgatccctgcaactgcaagctctaaggtgctcgccacgaacaaacgtgacgcatctcgagctccgagcctccgatggactcttcctctccatccccatcgtcagcgcccagtggatcccgtgccgcctccaatgccacccagcggtggagcatccttcgccgcgcgctgcttgctcgttcctcctccgcgcgcgccctagggggaatttctagtgaccaccagattaaagatggtaccaataacatttcaagaaaggcttcacgtggttttaacctgatcgaatgccactccttgccaatttcacagctactgaaatcacttgggaattcattaaacgaaaatgattttgaatgccagaaggatgtttatgtatgttataagctgccttgtagaggttcctctaaacttgatctggtatgtagaaaagaggattcccttgaactaaatgacattgaggcttcgaacaaatacaatatcgacactactggactagtatgttgttggccatcggaagaggttcttgcctactactgtattaaccactcggatgtgttcaggtccaagaaagtgcttgaacttggatctggttatggattggctggacttgttattgcagccagtacaaatgctgacgaggttgttatttctgatggcaacccacaagtagctgagtaagaacatatccatcaatgcagagacttttggtgagaccaaggttaaatctttgatactgcattgggacaaagagcaagcttcagaaatgttgaatacttttgacatcattgttgcaagtgactgcacatttttcaagcaattccataagggccttgcccgaacagtcaaatccttgctgaagcattcggcaacctcacaggccatcttcctgagccccaaaagaggtgattctctagacaaattcctgggaattattaaagagaatggtctcagttgtgagttgatagagaattatgatcctactgtctggaatctgcacaaaaaattggtggctggtgaggatagaacctggcctaattatgacaaggagcattgctaccctcttctggttagaattggctattttagtgagttctaattttcttacatttttttatcttggatg

SEQ ID NO: 156507 - DNA, 1504 bp, Zea Mays
aatccgaatgaccaaatcgaactagtcctcaatatctctcaggtgctcgccacgaacaaacgtgacgcatctcgagctccgagcctccgatggactcttcctctccatccccatcgtcagcgcccagtggatcccgtgccgcctccaatgccacccagcggtggagcatccttcgccgcgcgctgcttgctcgttcctcctccgcgcgcgccctagggggaatttctagtgaccaccagattaaagatggtaccaataacatttcaagaaaggcttcacgtggttttaacctgatcgaatgccactccttgccaatttcacagctactgaaatcacttgggaattcattaaacgaaaatgattttgaatgccagaaggatgtttatgtatgttataagctgccttgtagaggttcctctaaacttgatctggtgtaagtagtctattatttgcccctagttcgctggcacactgaatgtagttatccctacctgtaccccccccccctcctcctggtataactgggaatcatattgttttataatctctgttgtgacaacaaattaagccatcatgaattgtttaaccaacaactcaacaagaaaggttgacatgctattttcagttgcttattgttttagttcatgattccagatgtagaaaagaggattcccttgaactaaatgacattgaggcttcgaacaaatacaatatcgacactactggactagtatcggatcctctctccttactggcggcggctcctccctgatcaacctccggcagctcctccctgatcaataaccggctacaggaactcaggaagatgatgacactgaccaacacagttcaagacgatgacactgaacaacaagatgatgcagcttctcaggaagacgatgaagaagaagaacatccactacaatctgacggaagatcaatggaaggggaagaatctgtcctaggtggtgttggcgggtccaagaaagtgcttgaacttggatctggttatggattggctggacttgttattgcagccagtacaaatgctgacgaggttgttatttctgatggcaacccacaaaagaacatatccatcaatgcagagacttttggtgagaccaaggttaaatctttgatactgcattgggacaaagagcaagcttcagaaatgttgaatacttttgacatcattgttgcaagtgactgcacatttttcaagcaattccataagggccttgcccgaacagtcaaatccttgctgaagcattcggcaacctcacaggccatcttcctgagccccaaaagaggtgattctctagacaaattcctgggaattattaaagagaatggtctcagttgtgagttgatagagaattatgatcctactgtctggaatctgcacaaaaaattggtggctggtgaggatagaacctggcctaattatgacaaggagcattgctaccctcttctggttagaattggctattttagtgagttctaa

SEQ ID NO: 156508 - DNA, 1560 bp, Zea Mays
gattcacgtctttggccacgctgtcgcggccattcccggcctccgttgtcggtgcccgaaccctccactccatccctccacggctgaggtaccattcccgtcgcagcgaattgcgccaatgagggtggctcttgtcgaggcctgatccggagacctaaccaccggggctttttgtcggcgccgtcgggttcgagcggcggcggcgatgttttggaaggatagcggcagccggagcagcagtggcagcggtcgggatcagaacggcgtcggccccttcggccaagtgcgcgtcctcattgtcggtgattcaggtgttgggaaatcttcattggtgcatctcattttgaaaagttctgccattgctcgaccatctcaaacagtaggatgcactgtgggcattaaacatgttacttacggaagtgcaggcggttcatctaataacatcagtgacgctgaaaggaacttctttgttgagctttgggatgtctcaggacacgaacggtacaaggcatgccggtcgattttctatacacaaataaatggcgtcatatttgtttacgatctctctcagaggaagaccaagacgaatttgaataaatgggcagttgaagttgctgaaactggcaccttttcagctccattgggatctggtggaccaggaggacttccagtgccctatctggtaattgctaataaagtggatatcgttccaagggatggggcaagagcaagcagggggaatcttgttgatcttgctcgccaatgggctgagaagcagggccttcttcggtgcagcgaagaacttccactcacagagagctttcctgggaactccggtcttgtgtcggctgctaaacaagcaagatatgacaaagaagccgtgatcaagtttttccgcttgcttattagaagaagatacttctcaaacgaacctcctgccccaagtccctggtcccttgctccaagagaagataccatccttcctatggagactcttggagatggcgcagatagcttccaaaggaaaagccttagtggtgagggttttttgtacaacggactggtcccactcccagcgcagaggaacctgacgccgccaccgactctgaatccgcagcagcccgtgtcgcccttggataactacagatatcatcgattctcctcctcgtcgcttccggacgtgagcagcagcagaacaagccgagaagatattattaatctatgatgtggtaggcatctgagagaggtcatacgccacaacattacctgcaaaacgtgggaagcatatggtgcctgggaattgtgttcctgtggcatcttgaactgcttaaagcctttgcttgcagcatttggaatgctgccagggtgagctttttgttctgttttaaatgtcatgtcgttgtcagatcactaggaagtggttctttctccttttcgtttcctttccatcctccacctgcattcatttagaatacgtgttgactgggatggaggcaatacatgatacgccagtataccttcaaaggcaaatgtaagtttttttatgtactgtttctttta

SEQ ID NO: 156509 - DNA, 1648 bp, Zea Mays
gattcacgtctttggccacgctgtcgcggccattcccggcctccgttgtcggtgcccgaaccctccactccatccctccacggctgaggtaccattcccgtcgcagcgaattgcgccaatgagggtggctcttgtcgaggcctgatccggagacctaaccaccggggctttttgtcggcgccgtcgggttcgagcggcggcggcgatgttttggaaggatagcggcagccggagcagcagtggcagcggtcgggatcagaacggcgtcggccccttcggccaagtgcgcgtcctcattgtcggtgattcaggtgttgggaaatcttcattggtgcatctcattttgaaaagttctgccattgctcgaccatctcaaacagtaggatgcactgtgggcattaaacatgttacttacggaagtgcaggcggttcatctaataacatcagtgacgctgaaaggaacttctttgttgagctttgggatgtctcaggacacgaacggtacaaggcatgccggtcgattttctatacacaaataaatggcgtcatatttgtttacgatctctctcagaggaagaccaagacgaatttgaataaatgggcagttgaagttgctgaaactggcaccttttcagctccattgggatctggtggaccaggaggacttccagtgccctatctggtaattgctaataaagtggatatcgttccaagggatggggcaagagcaagcagggggaatcttgttgatcttgctcgccaatgggctgagaagcagggccttcttcggtgcagcgaagaacttccactcacagagagctttcctgggaactccggtcttgtgtcggctgctaaacaagcaagatatgacaaagaagccgtgatcaagtttttccgcttggtttgttatcagaacagttccgttggtttattttatccactccgtatgttttcacctttaatgcgatgctactgaaatgcatttttcagcttattagaagaagatacttctcaaacgaacctcctgccccaagtccctggtcccttgctccaagagaagataccatccttcctatggagactcttggagatggcgcagatagcttccaaaggaaaagccttagtggtgagggttttttgtacaacggactggtcccactcccagcgcagaggaacctgacgccgccaccgactctgaatccgcagcagcccgtgtcgcccttggataactacagatatcatcgattctcctcctcgtcgcttccggacgtgagcagcagcagaacaagccgagaagatattattaatctatgatgtggtaggcatctgagagaggtcatacgccacaacattacctgcaaaacgtgggaagcatatggtgcctgggaattgtgttcctgtggcatcttgaactgcttaaagcctttgcttgcagcatttggaatgctgccagggtgagctttttgttctgttttaaatgtcatgtcgttgtcagatcactaggaagtggttctttctccttttcgtttcctttccatcctccacctgcattcatttagaatacgtgttgactgggatggaggcaatacatgatacgccagtataccttcaaaggcaaatgtaagtttttttatgtactgtttctttt

SEQ ID NO: 156510 - DNA, 2407 bp, Zea Mays
cgctctttctccctctcccggtcagtttccctcacggcctcaccgactgaaacccagccaaagtgccaaacccctcccaagcgcggggagcaaaacaaaccctcacaatatcgctagtcgtgcagatttccgagctctagcccttggcccttgaaattgctatccccgctatcaccattccgccaatggggaagcgaccgcaggtcgttgttctgtcctcttcctctggggaagatgacggcggggggcgccgcggccctcgggcgcggaggccgaggacgcccgcgacggctccggcgcaggctcaggcaacaggcgcctcgaggaaaaagccgcgtcgcgagagcagcgcggggagaggacgtcgccgcgccgcaaaactagcgccgtccgtctccttgaaggctgaatttgatacgctctctgaagatttttcagaatgttttaatgacttcagcattccagggcctatacggaaaacgaaagagctttgggttgacaagtacacaccccactcgttggctgagcttgctgttcataaaaagaagattgaagatgtaaagaaatggatggaagagaagctgaaggcaccaaaggcaacggttggaggatggacccttgtcctaactgggcaaactggtgttggaaaatcagcaactgtgagagcaattgctgatgaccttggagcagacttatgtgagtggacgactccagtaccaacactgtgggctgaacatgttcatgctaattcaggattacgctatacatccaagcttgaagaatttgaaacttttgtagagaagataaggaagtattcaatgctttgtccaaccaacaccaggtcccaaaggaatctcattatcattttgattgatgacatccctgtaacaagtggaaatgttgcttttgcaagactagggaaatgcctaactggtttaattcgaagtactcaagtaccaactgtcatttcactcactcactaccacaaaagtgagagtaacgatactgcaatgtggaactctgaggaccttgagtccttacttcaagatgctggtgctcacaagattggtttcaatccagtaaccacaaattctatcaagaagatccttgttcgagtatgcaaagaagaaagctgccatgcatctgaagaattattgcatcaaatagccacctctagtggaggtgatattagacatgcaataatgtctcttcaatactattgtcttgaccccagaaggcatagttctgcattggcaacaagttctagttctactgtcccaaagaaccttgattctctggttccagggcatgagagctatggccctagcagtgcattaccttccccatgtggaagagatgagacactttcactatttcatgccttggggaaatttttgcacaacaagagggaaactaatagtgatgctgatatcgacctggattcgtgtcctcttaaagaaacctaagaagaaatgcactcaaaatggatgttccagaaaagattctttcacaagcacacggaaaagtacgaacagttgtggattttctttatgtaaatgttattgatttcattgacagtgaagctgttgatgatgcatgggctgtggtatcatatttgggtgaggcggattgtcttcttactggtggtccagtcgcatcatacaactcagaaaacatagcacagctcattgctgcctctgttgcggcacggggagttctttttggaaatgctcatgtcacaccatcaaggtggcatacaatccggagcccgaggctctggcaaactgatcaatcatctcgatccaataaggaccacattctgaaggaaagatttgattgttcaaggacgtgtggtttttgcaacttcgctgacttggtcacagaattcagaccattggagagatggattggtcctcgtaatggtgggcatagaagcagctgcttgccccacggcgtaggttgctcgcccatgggagtcgctgatggaaataattctgaagaggatgacgatatgatagaagattgttaatcgtgagtcgcattatgagatgccaacatatcattatggatgctgactagctgattcaaatagtggctcgctgtttaagggtgccattgatatttaagttttatgaagctaattgttgcacttaccagtttcatgcgtcacgtccgaagcgtgtagagtagctcggtttttctttcccatatgtcgtctaacaatcaaggagttaccagctgcgagaaaacatctaagtctaacatggcatgaagttacatagatgtagcactcatggtatcacttcgctagctgaactgaggatgattgattgaccgagttataaaaaagtgtagcatctacaatttaatatttagtatgtggctcatatgtccactttaattttaa

SEQ ID NO: 156511 - DNA, 706 bp, Zea Mays
cgctctttctccctctcccggtcagtttccctcacggcctcaccgactgaaacccagccaaagtgccaaacccctcccaagcgcggggagcaaaacaaaccctcacaatatcgctagtcgtgcagatttccgagctctagcccttggcccttgaaattgctatccccgctatcaccattccgccaatggggaagcgaccgcaggtcgttgttctgtcctcttcctctggggaagatgacggcggggggcgccgcggccctcgggcgcggaggccgaggacgcccgcgacggctccggcgcaggctcaggcaacaggcgcctcgaggaaaaagccgcgtcgcgagagcagcgcggggagaggacgtcgccgcgccgcaaaactagcgccgtccgtctccttgaaggctgaatttgatacgctctctgaagatttttcagaatgttttaatgacttcagcattccagggcctatacggaaaacgaaagagctttgggttgacaagtacacaccccactcgttggctgagcttgctgttcataaaaagaagattgaagatgtaaagaaatggatggaagagaagctgaaggcaccaaaggcaacggttggaggatggacccttgtcctaactgggcaaactggtgttggaaaatcagtatgttcatccctcgcacttcgaacatgttgtacccaaatgatgaaagcgag

SEQ ID NO: 156512 - DNA, 111 bp, Zea Mays
tggctaaatgtgccatactttgcctaaggttagtcgttcgaattgaagaactaaccttaggcagaaaagttaggcaaaatgtgacaacttaggtagtgaaccaaacatacc

SEQ ID NO: 156513 - DNA, 93 bp, Zea Mays
cctaagtgtatacctatttgtcatgatgatcatatagttgttgtctttgtaaagattcaatcaggatttggtattgctcataagctatttgac

SEQ ID NO: 156514 - DNA, 1542 bp, Zea Mays
cgtcaggggcgaggatccctgatggagattttcctctctgcagtcctaggcgagctcgcctctagatccataaatctactcatcagcagaaggtcggccaggccaacggcgctggatgtgggagacagcctgcaaagcgctctcctccgagcgcaggtcatcgttgatgaggctatgggacggcacatcgcaaaccaagccatgctccagcagctagacatgctgagagacgccatgcaccgggcctgctacgtcctcgacacctccaggtgccagtcccacgacgaggaggacgccgaagatcaggttgtgaatcattctctgtcgctgcaaaaactaacttctcttaaaggaataagctttgcttccaatagaaagacgccgccgcttctggaacagctgcaagagtcgcttcagaacttgagctctatgatccttgacgcgagagagctagtggtgttcttcagaagctaccctcctcgcctttactctcagccctacagcatgcatctcctgctaggtaactgcatgtttggcttccagatggaaactgagctcgtcatcaacttcctactgcacgcggaaccacctcctggttctgaagaactagacgtcctaccgatcattggccctagcaaagttggcaaaacaacccttgttgctcatgtctgtaggaaccagagagtgcgcgaccatttctcgggaatcctgttgctgcacgatcacgattttgcggacgacggcgacgacgacatctcaacgacgttcggacagcgatgtgcaacgaagcttcaacttcgcatgccagattcaaacaaggatgggagactgctagtcgtcgtcgacttggttggtgaccttggcgaagctgcatggaatgtgctgtactccacgtgtaaacagcgcagcatggcaagcagaagcaagatcatcctcacaagccggtcagacaagatcgtcaagttcggaacaaggccagctctgcgtctcagctacgtgtccagcgaagcgttctggtatttcttcaagactatcacatttggcagcacggatcccaaggtgcacccaaggctcctgcaccttgccatggacatagccaagatgctggacaggtctctcatcggagcaaacatcaccgcttgtttgctgagggagaacttcgacgtccactactggtccaaagttcggaccttcttgagaggcctcgtccagaagcacatctccaaattcggtgttcatccagctcatcttttagagcaagacagacctctgcaggtcgggagaatggctacaactttggaagacctcgtgttcttctatgagtgccaacggtcatcgcaagaggaggttccggaaatgagattccaagatgtgatgtatggaaatgttaaggcggttgggaaattcaaggccttgggatggaggtctcaaataccgccctattacagttatgttattagttgccagattattgggcaagaaacagctagagctaccaaaaggaaacgttcagtaagaaacagaaccaacagttttgcataa

SEQ ID NO: 156515 - DNA, 186 bp, Zea Mays
tttcagtggatgcttcaaactcctgttgcaacaagttacatggtatgcgtcggaaaggacaagtttggtgaggaaatgaagaaaaatgctcaagctgcaggcgttaaggctcattactacaaggatgagactgcttctactggctcatgtggtgtatgtgttgttggtgaaaggtttgttgtataa

SEQ ID NO: 156516 - DNA, 1805 bp, Zea Mays
gagactctttcatttccttctaccgcagcctcagaattcccccctcccccgtagcgaaaccctagccgccacgccaaaaccaaatcccgccgagcccgaaaaattccggcgggttccttgccgcgaatcgattgatttcgagcgattcgattccttgtgatctctcggcggggtagagcgcggtcgaccgtcggccatgtcgaggtgcttcccctacccgccaccggggtacgtgcggaacccagtggccgtggccgagccggagtcgaccgctaagctcctgaaagaaaaggaaaaggccgaaaagaagaaagagaaaaggagtgacaggaaagatcccaagcagtgtgagacgtccaaacactcaaagcacagccataagaagagaaagcttgaagatgtcatcaaagctgagcagggtcccaaaagagtacccaaagaatcagttgagcagttggagaagagtggactctcagaagagcatggagctccttcttttgtacatacgatacgggactctcctgagagctcacaggacagcggcaagagacgaaaggttgtcctgtccagtcctagccaacctaagaatggaaacattcttcgcttcaagattaaaagtagtcaagatccccaatcagctgttctggagaaaccaagggttcttgagcaaccattggtccaacaaatgggatcaggttcatccctgtctggcaagcaaaattcaagccatcataagatgaatgtgagatctacctctggtcagcggagggtcaatggtgactcccaagcagtacaaaaatgtttgattacagaatccccggcaaagaccatgcatagacttgtcccccagcctgcagctaaggacacacatcctgttgatccccagtcagctgttaaggtgccagttggaagatcgggcctacctctgaagttttcgggaagtgtggacccttcgcctgctagagttatgagaagatttgatcctccacctgttaagatgatgtcacagagagttcaccatccagcttccatggtgtcgcagaaagttgatcctccgttaccgaaggtattacataaggaaaccggatctgttgttcgcctaccagaagctgcccggcctactgttcttcaaaaacccaaggacttgccttctatcaagcagcaggagatcaggacctcttcctcaaaagaagagccctgcttctctggtaggaatgcagaagctgttcaagtgcaggatactaagctctcccggtcagatatgaagaaaatccgcaaagctgagaaaaaagataagaagttcagagatctgtttgttacctggaatccggtattgatagagaatgaaggttcagatcttggtgatgaagactggctgttcagcagtaaaaggaactccgatgctatcatggttcaaagcagagctactgatagttcagtgccgatccatccaatggtgcagcagaagccttctttacaacccagggcaacatttttgccggaccttaatatgtaccagctgccatatgtcgtaccattttaaacatctggcgaggtagatgagaattagatgagatgttgggagagagctgtgtggatgtgggagataatgggttccctgccgcagttttccagctttgttccatagtgtttctttgaggccaatagagttctggcagaacttataatgtaatattgattaattatttcgctcatgtatgtaagcagttgaactgcaaaatcttgtttctaggatgttactgttttatgacacgcagtatttgttatattgaccttttgcctcg

SEQ ID NO: 156517 - DNA, 1290 bp, Zea Mays
gagactctttcatttccttctaccgcagcctcagaattcccccctcccccgtagcgaaaccctagccgccacgccaaaaccaaatcccgccgagcccgaaaaattccggcgggttccttgccgcgaatcgattgatttcgagcgattcgattccttgtgatctctcggcggggtagagcgcggtcgaccgtcggccatgtcgaggtgcttcccctacccgccaccggggtacgtgcggaacccagtggccgtggccgagccggagtcgaccgctaaggtttgttgaaccttcggatttacacacgcacgtgccagatcgtttgttcaatatgtaggttttgcgcggatctgtggtttgcgcgtgcgtgatgtgggtattgcccgtgcctaagctaaccgagctgaggaagtgtatggatcttgtgtagctgaacgaggtcctccaaatcgattgaaaaatttaagttgtatggccggtaggccaagattgggttagtccggttttcgaaaactggtagcatggttatcggggacattgaaagaatgatagaacatcaaattcgattcaaaactgtgctagatttgcatatttagtcgccctaaaattacgtggacgtgggtgatccgaattggttgttgtatgatggttggaatatgagccatctagtgcttccgtgactggccaattttttttgtttctcaaagttttctttgaaaaactgtttgtcgagcgtcaattcgtatttacctgaatttactaattcttaatacagtatgtcgttattttgggctaagcttgtgtaagaagggtcgtttgacattttgtactgtattaatgctgttttgtgtttctttgttcggagcagcattcaatgctccttttgttgtttgagagaatctgatatttgccatcgtaccgaaagtccgaaaccaactattcaaattgggatttcatttctttttttttctactgtttttagagttctctttttcgctgctgtgctcttgtgggtcagtacgtgcatttctctctttttttcttttttttttctgatgttactcttctgttgaccaaaggagttcagaattattttggccctgtatatcaatttgcaaccaacaccatttattgagcccatttttagttttcttgttctgtagagttatgcattgtttcaggtcttaactgttgtcagggaagtaacgtgttcaacatgattgtaaacgaatacaattctgttgctaactgtgtaatgatgagaaggataattgaatagtctttgtgaagta

SEQ ID NO: 156518 - DNA, 985 bp, Zea Mays
ccggatatatatagcgcgaaggaaccctaaccgcctccagcctcggcctctgctcccggctcccccacggtactccagccgctagcctgcgattccgccagtacgccaccaccaccgagcctggactaccgccgccgcccttcgccgatatcttcagcggcgaacagcgcccaccagatcccgcccctgcgatggagtccgtggtgaacccgaaggcatacccgctggctgatgcgcagctgacgatgggtatcctcgatatcatccagcaggccgccaactacaaacagcttaagaagggagcgaatgaagcgacgaagaccctgaataggggcatatcggagtttgtagtgatggcggcggacacagagcctctcgagatcctgctccacctccccttgttagctgaggataagaacgtgccatatgtgtttgttccatcgaagcaagctcttggccgtgcttgtggtgtgacaagaccggttattgcttgctcagtgaccagtaatgagggtagccagctgaaactacagatacagggtctcaaggactccattgagaagcttctcatctgatctgccgaagacctttcagtgtgatgggcctcatcgacacttttttcagaggcttggactggtgatggtgtcttgtttactttgcgcttttcaaactatatttgaacactgttaagtcgatcatacttgaattgtactgcatcttatgtttgtgattgtcatgtaatctgaagatgcctctgtattgtggtggcttgtttctgctgagattccgaccacatcattgtgacggctgattactacgttttgagtactgtatcgtcaccatggttgcaacttccatgtgaccacgtcacgataaaattatatctgggtgcagggattacattattgttttgcatttttcgaaaacagttttgttcattgactttcatatttttaaattctagaccagaacacaaacaaaaaaa

SEQ ID NO: 156519 - DNA, 1443 bp, Zea Mays
ctcgctcaccctgccctaccccgtcgctgccaccccatcgattcgtgagatctgccgctcaggtttctccctaggccatcgatgccttgtcgtacgtcgtcgactaggtttgccccttttccttgcccttcttccgcattctgatgtcctccccgccaccctgcaccacctccctcagtcgccttccccattcgcaccttgtcagggatcaggttgtccacttcccagcctccctccccagtctacatcttcccctgcacacccattacaaacgagggagacaagtaccatggctttttctctcagggatcgattactggaaacgatgatcccactgattctgtcaacgacagactacccatctttcgatcgtcctttgctcgcacatgatcggcaacgggaaaccttgacctcgattttcagcaatcagcatgctaccttcccctaccttggcttgtactccggattacttcaacccgaagcagacatagctgaccagggacttcccctatggccctaacaaatgcgtgttggagggcgtggcagagccaggcaacccaactctacgggaaatggattttttgtggaaggtgcggatgaggatgacgatgagaacccctcacatatgaggaaaccagagtacaggaagttctggtaatgtgtaccatattacctggaatatctacaagaaatgttccatggttatgttgttgacggacgttccacatgcaatactggagggagtaatgtaccagtacaagtagatgatgaaaatgaagaacacgatgatgatgctaccctcaacagcccaatgagtatcggttatcataaaagtcctagtagcacatctaacgttgtatcaagtccacttaataaaaacataaaagttccatgttcaacatgatgcaagggatgttggacaacctgaaccaaaatggtactgctcaatgggaaacattagttgaaatatctaaagaaagggcagatcaaaggaggagggaaattgtagttgatatgcaaaacaaaattgaagacataggaaggtgtttgaaactagatgtggactatggcatatcagaagtttcagatgagtattgggtggcaacatagttgtttgacaaaaaagtacaaccgatcagttttctcaagctttagaacatatgagggaaggataggttggttgcagaggtggtgcagacagttcagtggttgaaggtgtttgtgttatgaaagttaaatttgtgtaataagtctttatctgtgtgtgtgaacaaatttgaagtatgttgatttctagacttttttatggaataaataaacttgggtgtttattgtttctattgagttatttgctattcctgctgtttgcgactgagtcatcattttgttgtttggggatgcaaccaaaatgcattaataaaagggaacttgtaaattttgcta

SEQ ID NO: 156520 - DNA, 1638 bp, Zea Mays
ctcgctcaccctgccctaccccgtcgctgccaccccatcgattcgtgagatctgccgctcaggtttctccctaggccatcgatgccttgtcgtacgtcgtcgactaggtttgccccttttccttgcccttcttccgcattctgatgtcctccccgccaccctgcaccacctccctcagtcgccttccccattcgcaccttgtcagggatcaggttgtccacttcccagcctccctccccagtctacatcttcccctgcacacccattacaaacgagggagacaagtaccatggctttttctctcagggatcgattactggaaacgatgatcccactgattctgtcaacgacagactacccatctttcgatcgtcctttgctcgcacatgatcggcaacgggaaaccttgacctcgattttcagcaatcagcatgctaccttcccctaccttggcttgtactccggattacttcaacccgaagcagacatagctgaccagggacttcccctatggccctaacaagtagatctcgacatggctccttcattcctcctagactgaacgttggcggaagccggtctacgcatggtcttgcacgcccatctagtagacatgctactacaacaaatttcagagctaggtctagtaggcactgctccaaggaatggaggtgcccgtccatttcaaggttctcatgtgcattctcctcttcctcagatgcgtgttggagggcgtggcagagccaggcaacccaactctacgggaaatggattttttgtggaaggtgcggatgaggatgacgatgagaacccctcacatatgaggaaaccagagtacaggaagttctggtaatgtgtaccatattacctggaatatctacaagaaatgttccatggttatgttgttgacggacgttccacatgcaatactggagggagtaatgtaccagtacaagtagatgatgaaaatgaagaacacgatgatgatgctaccctcaacagcccaatgagtatcggttatcataaaagtcctagtagcacatctaacgttgtatcaagtccacttaataaaaacataaaagttccatgttcaacatgatgcaagggatgttggacaacctgaaccaaaatggtactgctcaatgggaaacattagttgaaatatctaaagaaagggcagatcaaaggaggagggaaattgtagttgatatgcaaaacaaaattgaagacataggaaggtgtttgaaactagatgtggactatggcatatcagaagtttcagatgagtattgggtggcaacatagttgtttgacaaaaaagtacaaccgatcagttttctcaagctttagaacatatgagggaaggataggttggttgcagaggtggtgcagacagttcagtggttgaaggtgtttgtgttatgaaagttaaatttgtgtaataagtctttatctgtgtgtgtgaacaaatttgaagtatgttgatttctagacttttttatggaataaataaacttgggtgtttattgtttctattgagttatttgctattcctgctgtttgcgactgagtcatcattttgttgtttggggatgcaaccaaaatgcattaataaaagggaacttgtaaattttgcta

SEQ ID NO: 156521 - DNA, 1027 bp, Zea Mays
ctcgctcaccctgccctaccccgtcgctgccaccccatcgattcgtgagatctgccgctcaggtttctccctaggccatcgatgccttgtcgtacgtcgtcgactagatgcgtgttggagggcgtggcagagccaggcaacccaactctacgggaaatggattttttgtggaaggtgcggatgaggatgacgatgagaacccctcacatatgaggaaaccagagtacaggaagttctggtaatgtgtaccatattacctggaatatctacaagaaatgttccatggttatgttgttgacggacgttccacatgcaatactggagggagtaatgtaccagtacaagtagatgatgaaaatgaagaacacgatgatgatgctaccctcaacagcccaatgagtatcggttatcataaaagtcctagtagcacatctaacgttgtatcaagtccacttaataaaaacataaaagttccatgttcaacatgatgcaagggatgttggacaacctgaaccaaaatggtactgctcaatgggaaacattagttgaaatatctaaagaaagggcagatcaaaggaggagggaaattgtagttgatatgcaaaacaaaattgaagacataggaaggtgtttgaaactagatgtggactatggcatatcagaagtttcagatgagtattgggtggcaacatagttgtttgacaaaaaagtacaaccgatcagttttctcaagctttagaacatatgagggaaggataggttggttgcagaggtggtgcagacagttcagtggttgaaggtgtttgtgttatgaaagttaaatttgtgtaataagtctttatctgtgtgtgtgaacaaatttgaagtatgttgatttctagacttttttatggaataaataaacttgggtgtttattgtttctattgagttatttgctattcctgctgtttgcgactgagtcatcattttgttgtttggggatgcaaccaaaatgcattaataaaagggaacttgtaaattttgcta

SEQ ID NO: 156522 - DNA, 1113 bp, Zea Mays
ttttgggctatagttgagaaagataaacttgttttttttttcaatccggtctcgcaagtcgcaaacaaacgcccgttaaaagatccaaactttgtgccgccgcctcctgtttgcacagaggggaagagagagagagagacggaaagggggagatgagccggagcctggggatcccggtgaagttgctccatgaggcagcgggtcatgtggtgacggtggagctcaagaccggcgaagtgtaccgggggtccatggtcgagtgcgaggataactggaattgccagctcgagaacattaccttcaccgccaaggatgggaaggtttcgcagctggagcacgtcttcatcagaggaagcagagtgagatttatgattatacctgatatgctcaagaacgctcccatgttcaagcgcttggaagcgagaattaggggcaaaggatcagctattggagttgggcgtggacgtgcagttgcaatgcgtgctcgggctgcttctggtcgtggtggtggtcctgttgggcgaggcagcgcgcctcctgtgaggaggtagattttatggtgtcatgcggcttttcttgtctggctgaggatgttgcagtctgatgttaggacgctgtcttggtagtcaaaactgccgtaatgtataattcaacggcttaaggagtatgagtgtgcaacctcttattgttgaatgtaatgtgttgacggtggttgttttccttgctctattcggatggctggaccaaaaaatatcatgtgttctcgtcgacaaattagcttttgtcttagtcctgcaggtttttttttgtgtagatgttttgatttgtcataaactcatgatacatgtacctgagcctgagtatttcttctctcgataaggtgatatggtacatatgctacacgggtgaattctcttcgtcccgtctaggaattagatcctcggcagttggcttcggcaacatcacggagcagtcgtagaaggatcacattttgcctaattaggtcacacccagtgagtcttattttttacattcattgagctgctatgttggattaatgtgggcttggcccaaattaatactcaataatagtcaatgctaatggcccacttt

SEQ ID NO: 156523 - DNA, 648 bp, Zea Mays
gctggtctcctccctacgtgcgcgcagggcacctggatgccggcgtggagctcgctccctcgttcttatctccaattacatactcatgtctcctttcatctgctacacgcgtgcgtccctggcgctcacctcctacttctctttcctgccccatctgcctgttgatcgctgtccgctccagctcgcggatgctgcgcgcctaggtgatgctcgtcctccccttcgcacggttggccgggtggccctgtcgccgttcctcaggccgtctcagcttcgctcgatgctgagttcctctccagcgcgcggattcctccctgcgtcgcgcgtgagttcggcgtcgaactccccaacgcgcaactcactgagctcgtccctgcgcgccatgatcaccagtcgtcggcgcttgctcggattctcgtccctgcatgcaagctgtctgtcggccgagctccatccctagttgtgctcgcgcccaactcctgcgtcacgcacctgtaccgtttggttcagatatttgtaacgtaatgagtaagtgataacgttaaatcatgtttgttttagtcccaccgtaatcagatactatactaaaaattgataccggactattcaaacttgttaccgacagtaatcgaatgtaaaccattacca

SEQ ID NO: 156524 - DNA, 3103 bp, Zea Mays
attttaaaaatatttataaaatatattatcatagcatatattcaaataatacagcattgacaggaatataagattgcacccatcatgaattcaccgtcacagaaaagaaaccggaacccaaaaggctctccgccgacacgccggctacggcgattctccaatctgaaacccttcctgccgacgattcctttccaccttccgctccatcgcgtggccgccgccgctctccacccgattggttcccgtgcctgccgccccaccgattcactccgcgcccgcgcgacccctgccgtccatgaacctctccgaggattggcgctccgtcttcccggtttgtgccgtcttcgctgcgccgtccgttgacccgctgcctgccgccgccgcctcccgcggccccctccacttctcccctctcccgccgcgcaccccgttgctctccctcccctaccccatcccattgccgcgctcctccacccgcggcctgaaccgcttcctccgctcttttgtccgaggcacctccttcctcccgcgctccgactttgactacctcgctgacacactcatcccccaaccgtcttcatcttctccgccttccaatctgctcgccgtcctccggctctcgtgctctctcattctctttttcccctacggcgagaatgcggagcatgttgcctttgttactctggatgccaccactgtcactggttccacgcctctctcgccggtcgttcagagtgatgggtttatgcacccgggccaccgcatccagcagcttgttaccactgctaatgagtcgtcatggccgtcgcagctggaagacaaccctgaggggttcctgcttgctgtgacaatgtactccctgaattggttcagggttgagtcacaggatttggggacttctgtcttagtgcctattgccaagcagcaggttgactctgtaattgtgcatgcttgttggagcaggcatttgccatccgaatgtgttgtgttgctggagagtggggagctgtgctggttcaatctggacacacgtcaaggtggaaagataaaaattgatgttggcagcaaggatgacactggggaatggctaagctgtgactatggggcacaaccatggatgataatcgtcgcgagttcaaaatccatccttttgatcgacttaagatttggggatcgtggtcaatacaaggttttggcgagagttggaatgccaggactgcttgaaactgatccttttgctgaggcagatcagtaccttgcattctgcaggggtgggcttgatcatttccatttctcagtggtgacaaagcgatacttgattctcctcgatttgagacagccattgacgcctgtgttggcgtggcagcatgagctgaaaagtcctagtaatgttgctatgtttcgactttctgaattgaggccttccaaggagcatgagtgggcatcaaattctggttttgctattttggttggttcgttcaagacaggggagttcagtgttttctgttatggacctaaagagcaaggctgtccagataactctcacctgtatgcttgggatcttccttcacggttttcgctgacaggtcatcactgcagctgcagcagcggaagaatgaaagatgtattctcaatgcctgtttcaagagatgaatatgcttcaaaatggagtaaaaactccattattggctactatgtgcttccaaaccacctctcagtttcagagacatcatttactggctttgctttggtctgcttgacagccatggggaaattagaaatgcaaaggtaccgtgcatctgcagattcacacaatgatatcccatgtgatgaatcaaaacatacagccagggctagtaatttagctatatttcctgacactccgtatgacaatttctcccttagatatagtttaatgaagttgcgtttcctatctgagtatcttgaaggcaatctgtgcaatgcattggtaaagcatggttctagtatcaataaagagatgggccatattattatcagtgaagctgtgtcggaatatgcaaaagagaactctagttcattgccccacccagtttcagattttttatgcaatgttagtattcccatgaacatttttgaaatttcttgccagagaatattgaatggcctgccatcagacatcctgcatgtcaccttctccaaatacagtgacatgctagcatgcagcacagagaagaccttatgtgaacatttagatgttcctacctgtttgacgaacactaaacttagacctttcctgttggcaaaaccttcaagcataagttacaatctgactagcaaagtacgctctccagatgcccttgttggtccagtactacccatacctgttctgcttgcgctggaagagaaaagcaaggatgcagaaagctcttctcagggagtacccatagaaactgattccataaatgatcgatgtagagaagtttttgaagccctggatcctgtaatatccattgctgacactgacaacggcaatggatggcctgcttcacaagaactggatgaaggaaagtcctattttagttatgagcctcagattgaacataggttcagtatgggtagaagtaccagaaaggaggagaaagaagatcaaaaccaagatgatctgcataggtcttcaacgctatatgaggataaggtcttcacaacatttgtttgcggaaaagccaaagttcctgattcacctgaacaagctgcaactttgttcgatttcggcccagtgaggatagattttgataccccagccatggaaattcagcctgccgaggaaaaggtgtacaaatgtttgaggaaacaatttgtaacatggcgaaacaatttcaagccataccaagatttttgtagcacacataaaataccaaagctgaggcaatgagcccttccatccttcattcagtttcaacagggcttgtagatttacgcatatggctgcttgccttttttttttgttccgttttttttttggaagggtaagagcgaactaaaaatcaaatatacgctcttatgctatttctgatgtacatacatatggcctgctgttgaatataaatgctgttttcttcta

SEQ ID NO: 156525 - DNA, 642 bp, Zea Mays
tcacagcctgagcgtcagatcgggctcctcccgggcgtgcacggcgacgccgccggccgagtccgccggcgcagcggcgtctggcctgaagctaccgggccagccgaagagcatctcctcgtcgtcggccacgaggaacggcatggggctcagcagcccccgcgcgggcctcctcagctcgtcggcgccggcgcgcgcgtcctcgtgctccgggagcgctgccgccgacgcgtgcgcctggatgccgatggggtacaggcaggagccgtacagcggcagcgacgccacgtcggcgtagtagccgtagccgtagccgtagtaggggcccgctgcgtcgagccgcagcgcgcgccgggccagcgtgcgctcccgccggtgcgcgttctggtgcccgcccagcgcctgcgagctgaagaacttgcgctggcagtagttgcacgtgaacacgcgggacggctcgcgggcggcgtcggcctgcgcgccgccgctgttgctgttgttaccgttgctgttgtcggtaacggagagcgagaggtcgaggctgaccgggccggaggagttggacgcctcctggctgctgatctcggtctcggacagctcgtcgcactgctcctggcacatcatctccttgtcgttcatctc

SEQ ID NO: 156526 - DNA, 2777 bp, Zea Mays
accttgccactccatttccgcgtggcgtgggtgctgcggcgtgcagaagtcaaccgagcgcagcgcccgccaccccggcccggccccgctccgccggtcccttccccgccggccgaacaaaaaaaaaagggcaacgaaatccgaccgcgctcgccccggatccagcgacgatgttcggcgactccgacggatccaaggacgccagcgccgccgcgccagggtccaacccgccggagccgcccttccccagccgggagctcacgctcagcagctacctctgcgacaaggcgccgcccgccgcggcggggccatcctcgccgcccaaccccgaggcggcggctggcccggccgaagacgccgcggccagcgccaagctgtgcgtcgagcgggatttcctccacctcaccgcgcccaaacgcggggacccgcccggcgacgactcctccgtggtagggggtaagaagccccgcctagagtcgctccagctctcgctctccctctccaccgacgcgcccgcgccgccgccagcctcccagcagccgtcctcctccctgctgcctccgtcgcagctcgcgtcattcctcccggtcgatggcgatctgcggtgcgggagcgccgcgcccgccgccgccgccgcagtgcctgccgcgcccgcgccgcccccgaggcggacctacagcgccaacacggggcgcacccggagcatcaactccgacgacatgtcgtattcctactcggtgttctcgcacaacccgagctgctccctcacgcacaactccaccgacatctacgccgccggggagggcacgaacggctccgtccacagccggttcaacttccgccccatgggtgacggcagcgtcgccttcgccccggcgcagctcaaggagggcaccgcgtccttcttccccacggagctccctgcgagggcggcagcggcgctcagcgctggcggcagctttgacggcagccgtggagggatgcactcgtcacggcctgataggatcttgcgggagatcgtgtcggactccgtgcctgccgtggctcaggtcctgcaggatttccccagcgaaaccctggaggtgctgcgggagacagtgcggagcatggttgatgctccggagaagagggacgagctgtcaagcctgcagcggaagctggagcgtcgctcggacctgactgcggaggtattggggcgggcaaacaagacgcagctggagatcctggtggccatcaagaccggcatggccacttttgtcactggtaagggccgagtttcgggcagcgagcttgtggagatgtttctaatgacacgttgccgcaacatgaactgcaagagtgccgtccctgtggacgattgtgagtgtaagatttgctccaccaagaaggggttctgcagtgcatgtatgtgtccggtgtgccagaagtttgattgtgctgcaaatacatgcagctgggttggatgtgatgtctgctcccattggtgccatgctgcatgcgcgctagagaagaacttgataaggccagggccgacattgaagggagcgatgggcacaaccgagatgcagttccagtgcctcggctgcaatcatgcttctgagatgtttgggtttgttaaggaggtgtttaattgctgtgcggagaactggagtgctgagacgcagatgaaagagctagactttgttaggaagatatttgctgctagtgaggatttcgaggggaaggggcttcatgccaaggcagaagaggtcctcagcatgcttgtaaagaaaaccatttccccttctgatgctacgaaaaccatgctacaattctttaaatatggtgtaacagactattctgttactggcagcaagtcaaaaggaatactggcggctcagacaagcaaatctacagatatgctccatcttcagaccccaaccatcactccaccaaagtcctcgttcaacttcaagcccagcacctccattcttgattcacagatcaatgtgctcaaggccagcccaaaaccactctccatagaaccccatttcagctccagctcgaaggaggacgactcctccagcctcgagaccattgtgaagtgcaaggaagccgaggcaaaactgttccagaaactggccaatgatgcccggaaggaagtagacagctaccggcagatcgtgcgcgccaagacccataaactggaggaggagtacgccgcgaaggtcgcgaagctgtgcttccaggagacggaggagaagaggaggaagaaagtcgaagagctgaaggtgctcgagaactcgcactacgactaccacaagatgaagctgcggatgcagaccgagatccagggcttgcttgagcggatggaagccacaaagaagatgtgggtataggctccggttaacaattgcatgttgctgctgcttaatttcttcgggtatagactccagctaacaactgtctgctgctgctgctgaatacctgagatttggtgttgttcattaggagagtttgcccattgttatgtttcttaacatcttgtgttacaatctacctgcttttgtaacttgtaagtggatgcctagccttgcgcttgctgatataacttgccagcattcagttagtggtttgccagtttgtgctgctatatcattgcagatattttttataagcagattggagttgctagttgttgggtcacggcttggacgtgttgacccggtgttgtagaaaccctcgaaccttgagcgcccgttgaggaatcatatgggccagcacaaaaacaaaaaaaa

SEQ ID NO: 156527 - DNA, 667 bp, Zea Mays
tcctccgggatcaggacaccctctgcctcatcagacgatgccagcttctcatggccatggcgaacccagctccccacaaggttcatctgcttacctgcataataagatcactggcaaggagatgtcgaatggcagtctttctcctaagaactcgccaacaaagagatctgacacagctgaggaaaaaccagaatgcaatgggagctcaaacggtggtggcggctctgctgatgagaagttagctgtaggtatggagtagcagaatggtagtctgaacaatgttgggagcagcgaggtccagccacatggacatgccacgtagagggggagttctagtacatagacaacagaaaactggaggtatgacagcttaattttttttcgggccgtgaatttgcggtagcgcgcagagcttagcacagtgcacaggtcttcgctggcaactctcttcgttgacaagaaacctcgttgcttgtgactgaatatggtgtcctaaattttgtagctgctctgttgcaaatctggatttatcacattgccttaagttatcatctgctaccataaccgagttgtgggcagtgaaaaccatttctgatgtatatgttgcacaaatcttatcttacctggtacatccgaaatggaaaaatgcggtcgaaacttgttgcat

SEQ ID NO: 156528 - DNA, 671 bp, Zea Mays
aaacacataggaagcgaagtccacgcaacacgacgactgtgcacctgataagcccggtgaactcgatgaagagatcgaagtggcaatcgaagaaggactccacagcgtcgcggaggcgctcgcggacgggcacgaacgggagcaggaggtggccgcagccggtggccgccaggtgcggcagagatgtcgatatcaccgaggggcggtaccccgctgcgccgcagctccggtgcacgaactccagctcctgccgcacgcacgcgccgcgcccgtgaagcgattccagaccgaaccgagcagctaaggtttagggttctaagcgccaagcttcagtggaacagtggtttcgggaaggaaggagagtaccttgcatgtctcacgggagaggaaacctcggagcagaacgcggggatggtccccggcggccggcggcggaggcgaggtggtggtactggacatagggatccctaaagcccgattccttggtcacagtgttgtacggagtactgttgttgccaatcctgttttaagataattgaacttttgtcactcacaatgtcttcttgttatgtatataaactgtgagtccagttggttctataaaatatgggtctgatgacaattttacaaatctgtttcttgctgataacaaatatcagattttatcgtcc

SEQ ID NO: 156529 - DNA, 3055 bp, Zea Mays
tttgataataagtttagtccattccagatcaacagcatcgacttcttctacatcaatgggcatgatcactgcctggaaacacacaagcagcaggcacagtccaattcaatacttcacaagcagagaccgttcaagagcatggagaggattcttccagccaaatgaaaacaagctcaagttcttttatgatgggcaagggtcatgtccatccagctataccaggaccaagctgaattcaccttctacgatgctgatggaaatatattgtaccagtattcccagtggagcttgagagaaacatatctacgccacagctatgtcgcataagaatgaggcagtccaaatcaccattggagagttagattggttcggctctctgtatcaaatttgaatgagacattgtggtaagtggcattagaaagttaaaaaatgcaaggatgtaatgtggtgtatgtgtatggtttaactgccaaagaaacatggagcgactacaggagttgtaatgtgtatgcgctgatgtgcaagcaggtccaaccaccgggaactatttatgcaatataggattagaccttaagaatactttctacaaattcaacaaattatgaaccatgtggccctggtgttggtatgggagcaaaagacagcgtggtaactttgtcagctgatattatttccaggaataaccaaccaatggcaagcagctcctctgccgtaacgcccggcagctgccaggcggggccaggccgtggccgggcccacgtgtcagccagatgtgcgcagctacgtctgcccatgttacggcagaggatctcctcgcccaaccactggcctgccaatgcttcaggccacagggtggttcttcctagtaaatttgggtgcctcaagcatgaaaattacacacaacaggacaattccatgatgaagcttcaaactgcatgcacaataaagcgacccctggcgataggtgttgtaccacctcgcctagaacctaggtgttttgctctaggctttttccgtgtggaggtattttggcttgatgcatgcatagaaatggggcaaaattagagagggaaaaggatgaattacgattattactcagggatgcataacaaaatcatatttttattctgatatgcaacttttcctctatgtatcatagcattattctaactgtgcgcaaaaagtataaacgcctagcaaagtctagtctctaggcagaggcgcagagcccaaccacctaaatagcgcctagtgccttttgatacactgggtgctgtaaaagattcttgatcatgccaaatgaaattatctaaatgcaattagcacaaactggttaccatggtgtcttatactcctacggaccccaaatacaagtccatgtggacttgagcacacaaatgaaggtaaaacgtacaatgacactattgcccatcaaatattgctatagtcaggtttattgcatttatgatgcatttgaggatgaaagaataaatcaaaaggtcgcatgtcattgacttatatttggtgcatttggaagaaagctctatggacttatggacttttattgggggtcagatggagtaccccatttttaagagagattattcaaatggaacagaactctttgagagctgcatttaatccaacagcgacaatctaaatcaaaaacattcatggctaaaaaggaaaggtcaaggtaaagcagcttgaaatgtgatatagattatttaattccaattcatcagatccttgttcagcttcttacatacctgcagctcagaggtatcaacaacataaatggtttcattggacaaccaatatggcaaaaatgtcaacaactgtttctttaactcttctgaatatttttcccacatagcaacagctaatgcaaaatcattccactggacaatctcctcagtattatatgatccaaatatagtttgtgcaagtgcgtgattgcatggtaatggtaattctgttccttttgaatgatgtgtaactggacagcagactgttcctgaactaacaacactttgttccctccttgctgccagctcatgttttttccagtagtagaattgcaccacctatttaagagatagatagatgtaacaaccacagacatgtgaacttaacatgacattattgtgcacctatggttagtgcttcgctgaaaaaacaaggacaaaaggtgaaaatagtactttacacctcattttaaagaataacattaagataagtgcatcctgaacgtgcaacgtgttggtaacaaatgatgaaaggacgactgatatatgatgttgacgtctttcagtcgacagcaaaaattaaggccactcaaagaatgaacatacctgaagagcatgtaagctgttagaaaatattttctcaaagacatcatctcccctcccgagccgcagttgctttccaagcaactctattgggtcatcttcagctggtgacgcagatatattgcattcaccactacttgagtgaaaactaaaccccagaatatgcactctagcacatcgtatgtcaaaaccagactgatcacaagaaaagcgatacatgttatcagaagctggtacaggaatataagaattttgctcagttggttcacagctcaatgatgtctgagacagaaagttaagaagttttggatcctcatcataagcacggtctctagtgaaccaaagagtcagggtcaacctttccccttcagttacctgtaaagcaaaacatgttgtaactgttggtaaaaatggaagggcatgcgagatccttcacaaagatcgaaaataattgataacaacaaggctgcaaagaattgatttttaccccaaaaaatgtgcaaggaaaaaacagaaatttgggatgactgttgataatgaaatgtcatattcaccattaactgtatagtacagttcatgaaagagttgatatgcatccaaatatccaacaaaaagtgaagaataaaataaaaagaaacagtgaataatgcagacaacaggacatacctcatttacacaatgaacattacgagtatcagccgtgt

SEQ ID NO: 156530 - DNA, 454 bp, Zea Mays
tttgataataagtttagtccattccagatcaacagcatcgacttcttctacatcaatgggcatgatcactgcctggaaacacacaagcagcaggcacagtccaattcaatacttcacaagcagagaccgttcaagagcatggagaggattcttccagccaaatgaaaacaagctcaagttcttttatgatgggcaagggtcatgtccatccagctataccaggaccaagctgaattcaccttctacgatgctgatggaaatatattgtaccagtattcccagtggagcttgagagaaacatatctacgccacagctatgtcgcataagaatgaggcagtccaaatcaccattggagagttagattggttcggctctctgtatcaaatttgaatgagacattgtggtaagtggcattagaaagttaaaaaatgcaaggatgtaatgtggtgtatg

SEQ ID NO: 156531 - DNA, 306 bp, Zea Mays
ctcatgctatgctggtggccccaccattcagcctatggtttctttctggaaggagatctagacaggtgctagataggaggtgttgtatttcttttgtgtttcctgctaccagcaaactttgcaatatagatagaaggtaatcctatcttcagctcttctctttgcctgacaaggcgcctttccttgtccactttattttaattttaccaatataatattattggctggtttggggaaatcctcccaaattagggctaacaaaaagtttttctggcaggttcaactaattgtttcttagggaaaaat

SEQ ID NO: 156532 - DNA, 316 bp, Zea Mays
cttgggactccctgaactcgtcggcgaacttggtgcccagatggaggccctgcattgccggaaccgatggggtcgccgccttataccatgaagccttgatgttgcggtggaacacagtgctgtcgtagtagccgctagcgtagagggccaagaagttctctgccgtgcggggcacctggttgcagaacacctcgcacttgatgtcgcccaggttcatatgcagcgttaccgactaccacacagccaccgtgaatcagggacttggcacgggatagggtatgataggatgcaggttgagcgaggggacgaatcatag

SEQ ID NO: 156533 - DNA, 92 bp, Zea Mays
aaataacgggaaagcaccgtacctgctgcgtggatatccgcaaggatagtgtcaaatttacaccaatagcaatagtagatgtgtgtgtgctc

SEQ ID NO: 156534 - DNA, 2347 bp, Zea Mays
cggaccagtactccgtcgccaccttccaccaccgaacctgagaacgccattcgaggagttcaggtctccaagccaaacccgacccagaccttcagatctcccttcccttccgttcctgttcctctctattaagcagcaagcaaagcgccactctcaatccacctcaggcctcgctcagatctctccgcccgggtccatcttcccaccccaaaccttctcccgcctctctcgtcaacgccgcccgacgagagggatggcggccttgcgggctccggccgcaacgctcctcgtcctcctcgccctagcggcggccggcggcgtggcggccgacggctccgatcaccggtacaagattcgcgagcccgtcccgctctacgccaacaaggtcggcccatttcacaatcccagtgaaacatatcgatatttcgacctgcctttctgctctcctgacaaagtgaaggagaagagcgaggcccttggggaggttctcaatggggatcggttagttgatgcgccttacaagcttgatttccgtgacgaagttgagtccaaggcagtttgctcaaagaagcttactacagaggatgtagtgaagttccggaatgcagtggctaaggactactacttccagatgtactatgatgatctcccactgtggggcttcatcggtaaagttgagaagggcggcaaggatgatccgagcgagtggaaatactatctgtacaggcacatcatcttcgacatcctatacaacaacgaccgggtgatcgaaatcaatgtgcacactgatcagagtgcattggttgacctgacagaggataaggagaccaatgtggaattcctgtactcagccaagtggaaggagacaccaacaccattcgagaagaggatggagaagtactccagctcctccaacatgccacaccacctggaggttcattggttctcaattataaactcttgtgttactgtcctcctcctcacagggttccttgcaactatcctcatgcgagtattgaagaatgattttgtcaagtatgcccatgatgaggaagcagccgatgaccaggaagagtctggatggaagtatatccatggtgatgtcttcaggttcccaaagaataagtcgctattttccgctgctcttggcacaggaactcaactatttgctctcacaacctttatattccttcttgcacttgtcggagtattctatccttacaaccgtggtgcactatttactgcattggttgtcatttatgcactcacttcaggaattgctggatacattgctacctctttctattgtcagttggaggggacaaactgggtgaggaacttgctattgacaggatgcctattctgtggacctctcttcctgacattttgcttcttgaacaccgttgctattgcttatagtgccacagcagcactgccctttggcactatctgtgtcattgtgctcatctggaccttggtcacatttcctttgcttgttttgggaggtattgctggcaaaaacagcaaaagtgaattccaagctccttgccgtaccacaaaataccccagggagattcctccacttccgtggtaccggagaactattccacagatggctatggccgggtttttgcctttcagtgccatatacatcgagctgtactacatctttgctagtgtttggggccacaggatttacacaatctacagcattctgtttattgtctttatcatcctccttatcgtcactgcattcatcacagttgcactgacatacttccagcttgctgctgaggaccatgagtggtggtggaggtcattcctatgcggaggatcaactggatttttcgtatacggctactgcctgtactactactatgcgcgatcggatatgtctggcttcatgcagacatctttcttctttggctacatggcctgcatctgctatgcattcttcttgatgcttgggatggtgggcttccgtgcctccttgttctttgtccgccacatatacaaatctatcaagtgtgagtgagctgttgttggaagatcaagagcagcagagctgtacccgtttttggtgccaccgagaagtcccaaatatagaaaaaaaatggtttgctctcgcgtgcaacaggagcagctagtgattgccatgtttcagattaggccattatttatagtaacagctaatgaacctataaatttgttccgttcatgggactgctatgataaaatcgtctttttttgtccgatgtattatctcccagtgacgtcagacggcatataactttgttggaaccgtggcatgccagcggtaattgctgaatatctctaagtcgttaca

SEQ ID NO: 156535 - DNA, 2172 bp, Zea Mays
tcgaaaccatcccgaaccctaaattcgaatgcggaactcaaatttcggtttccctcgcgtcctgcccacatcgtccgcatccgccgagcctagccccaagcggaggagaataggagaggccaccgatccgccgccggagatgagggaggaggcactggagcggctgcgcggggtggtgcgggacagcgccggtaagcacctctacacgtcggccatcttcctcgctgacaaggtggctgcggccacgggggatcctggcgacgtctacatgctcgcgcaggcactctttctcggccgccaattccgccgcgcgctccacctcctcaacaattctcgtctgctccgcgacctccggttcagattcctcgccgccaagtgcctcgaggagttgaaagagtggcatcagtgtttgttgatgcttggggatgcaaaagtggatgagcatggaaatgtccttgatcatgatgttggcagtgatatatattttgacaaggacgctgaagatcatgagatcaatatcaaatcagctctatgtttcttacgtggcaaggcgtatgaagcactggataaccgtgatcttgctcgccaatggtacaaggcagctgttaaagccgatcctctgtgttatgaggctattgaatgtcttgttgataattatatgttgacatgtgaggaagaagttgagttattgtcctctctgcaattcggtgaagaagatgggtggctatcagcattctattcatgtttggtcacgaagcatgaaaaagaatatttagttgaagcaaaattcaaggaacttgagcaagaagcttgtagtatttcgtcctcgagttctggtgaaacaatgaaaaataacattgatgttttggtttgcaaagctgaatactaccaccagagtggagagtaccaaaaatgttttaaactcacatcctcgttacttgagagagaccctttccatttaaagtgcacattagttcatttggcaactgcaatggagcttggtcattgcaatgatctttatcttttggcatgcaacttagtgaaggattatcctcaaaaagctctttcatggtttgctgttggttgctattactactgtatcaagaagtatgatcaagcgcgaagatacttcggcaaagctacaggtttagatggggcatttcctcctgcttggattggtacaggcattgcctatgctgctcaagaggagggtgaccaagcaatggctgcgtttcggacggcagctcggttatttcctggatgccatctgccaactttatacatgggcatgcagtatgtgcgaatgcacaatttcaaacttgcagagcagttcttcacacaagcaaaatccatctgcccatctgatccacttattcacaatgagttgggggtcgttgcatataatatgaaggagtaccgaaaggcagttcagttgtttgagttaacattggaccatacttcatcctctctgaatgaaatgtgggaaccaacattggtgaatcttgggcatgcacttcggaaactcaaggaataccagaaagcagtatcatattatgcaaaggcactcacttttccaaccaaaagtttgagtgcatttgctggtcttgcttacacttatcatcttatggatgattttgaggctgccataaattattaccataaggctctatggttgaaaccagacgaccagttttgcacagacatgctaacatatgctcttgagtccatctgccaaatcactgctcgtagaaagcctggtcgaggtttgctaaccgcaacaggtggtgtcacatgctagggtattattttccttacagacatagtagtagctaattatatgtaaatttgttggtgtacaatatgtaattgctcaagttcatttcagtcactcgaggctgatcgtagtgtaaagccagacattttctgtaccttttaatttatactagaaataggcagcgtccgaggacgctttgtaccagccacctacactatggaaaaactggggagagaccggagttgcaagatcaggttgttcagaggtatttttgcaaatcctaatagaaatgcatttacagaaatagagcatcgtgtcagacaagaaataggttagtgatgctcaggaaattgaagttttcctcttcctgaatattcattctcctgtgtgttagagtt

SEQ ID NO: 156536 - DNA, 189 bp, Zea Mays
atgggcgacgacaccacgcccaacaccgcggcgttccggcgcgccgtcgtggagctgggcgcgagggccgccgatgggggaggggccaggctcgacgtgccccccgggaggtggctcacaggcagcttcaacctcaccagccgcttcaccctcttcctgcaccgcggcgcggtcatcatcggctcctag

SEQ ID NO: 156537 - DNA, 1934 bp, Zea Mays
cggccgcggtacccctgccacagacacacaacacacaatcccctgcaactgcaagtcgtcttcttccccaagcctaaaaccaacaacagtttggcagatcgcccggctcgatcgatcgcagccatggtgctctccaaggccgtctccgagagtgacatgtccgtgcactccacgttcgcgtcgcgctacgtccgctcgtctctcccaaggtaccgcatgccggagaactccatccccaaggaggcggcgtaccagatcatcaacgacgagctcatgctcgacgggaacccgcgcctcaacctggcgtccttcgtcaccacctggatggagcccgagtgcgacaagctcatcatggccgccatcaacaagaactacgtcgacatggacgagtaccccgtcaccaccgagctccagaaccggtgcgtgaacatgatcgcgcatctcttcaacgcgccgttgggcgagtccgagacggcggtgggcgtcggcacggtgggctcgtcggaggccatcatgcttgccgggctggccttcaagcgcaggtggcagaacaagcgcagggccgagggcaagccgttcgacaagcccaacattgtcaccggcgccaacgtccaggtttgctgggagaagttcgcgaggtacttcgaggtggagctcagggaggtgaagctgcgcgacggctactacgtgatggaccccgagaaggcggtggagatggtggacgagaacaccatctgcgtcgccgcgatcctgggctccacgctcaacggcgagttcgaggacgtgaagctgctcaacgacctgctccaagccaagaacagggagacccggtgggagacgcccatccacgtggacgcggcgagcggcggcttcatcgcgcccttcctgtacccggacctggagtgggacttccgcctgccgctggtcaagagcatcaacgtcagcggccacaagtacggcctcgtctacgccggcatcggctggtgcatctggcgcagcaaggaggacctgccggaggaactcatcttccacatcaactacctcggcgccgaccagcccacgttcacgctcaacttctccaagggctccagccaagtcatcgcgcagtactaccagctcatccgccacggcttcgaggggtacaggaacatcatggagaactgccacgagaacgccatggtgctcaaggagggcctggagaagacgggccgcttcgacatcgtgtccaaggacgaaggcgtcccgctggtggccttctccctcaaggaccgcagccggcacgacgagttcgagatctcggacatgctgcgccgcttcggctggatcgtgccggcatacaccatgccccccgacgcgcagcacgtcacggtgctccgcgtcgtcatccgggaggagttcagccgcaccctcgccgagcgcctcgttctcgacatcgagaaggtgatgtaccagctggacgcgctcccgtccaggctcccgccccctcccccggcggcgccgctgctcaggaaaaagacggagctggagacgcagaggtcggtcacggaggcgtggaagaagtttgtgctcgccaagaagaccaacggcgtctgctagtgacgcttccaccgctacacacaacactaccatggtcaacgggccttcttccgtgctgatttgagtgagcaccgcgatatctaggtagtctaatatgcttcgtgtctttccgtaatttgtgcatgcagttgctatgcaccgagtgagttgctatatatgttcgatagcaacagtttttttctccccaatgcaaggaagagagtaatagttgaggctggtgtcgattattgttatccatgcccatgcgcgtgcagttattacctccattctaaactgtaatctattttaatttcttcagagagtcaaagcacctcaagatttattaaaactataagaat

SEQ ID NO: 156538 - DNA, 1847 bp, Zea Mays
gtttccaggagtaggaactctgtactgctacacggcacggcccctccctgctccctcgggtcaaaactcaaaagccttcattttgatcacggccagccggtcagatcgcccggctcgatcgatcgcagccatggtgctctccaaggccgtctccgagagtgacatgtccgtgcactccacgttcgcgtcgcgctacgtccgctcgtctctcccaaggtaccgcatgccggagaactccatccccaaggaggcggcgtaccagatcatcaacgacgagctcatgctcgacgggaacccgcgcctcaacctggcgtccttcgtcaccacctggatggagcccgagtgcgacaagctcatcatggccgccatcaacaagaactacgtcgacatggacgagtaccccgtcaccaccgagctccagaaccggtgcgtgaacatgatcgcgcatctcttcaacgcgccgttgggcgagtccgagacggcggtgggcgtcggcacggtgggctcgtcggaggccatcatgcttgccgggctggccttcaagcgcaggtggcagaacaagcgcagggccgagggcaagccgttcgacaagcccaacattgtcaccggcgccaacgtccaggtttgctgggagaagttcgcgaggtacttcgaggtggagctcagggaggtgaagctgcgcgacggctactacgtgatggaccccgagaaggcggtggagatggtggacgagaacaccatctgcgtcgccgcgatcctgggctccacgctcaacggcgagttcgaggacgtgaagctgctcaacgacctgctccaagccaagaacagggagacccggtgggagacgcccatccacgtggacgcggcgagcggcggcttcatcgcgcccttcctgtacccggacctggagtgggacttccgcctgccgctggtcaagagcatcaacgtcagcggccacaagtacggcctcgtctacgccggcatcggctggtgcatctggcgcagcaaggaggacctgccggaggaactcatcttccacatcaactacctcggcgccgaccagcccacgttcacgctcaacttctccaagggctccagccaagtcatcgcgcagtactaccagctcatccgccacggcttcgaggggtacaggaacatcatggagaactgccacgagaacgccatggtgctcaaggagggcctggagaagacgggccgcttcgacatcgtgtccaaggacgaaggcgtcccgctggtggccttctccctcaaggaccgcagccggcacgacgagttcgagatctcggacatgctgcgccgcttcggctggatcgtgccggcatacaccatgccccccgacgcgcagcacgtcacggtgctccgcgtcgtcatccgggaggagttcagccgcaccctcgccgagcgcctcgttctcgacatcgagaaggtgatgtaccagctggacgcgctcccgtccaggctcccgccccctcccccggcggcgccgctgctcaggaaaaagacggagctggagacgcagaggtcggtcacggaggcgtggaagaagtttgtgctcgccaagaagaccaacggcgtctgctagtgacgcttccaccgctacacacaacactaccatggtcaacgggccttcttccgtgctgatttgagtgagcaccgcgatatctaggtagtctaatatgcttcgtgtctttccgtaatttgtgcatgcagttgctatgcaccgagtgagttgctatatatgttcgatagcaacagtttttttctccccaatgcaaggaagagagtaatagttgaggctggtgtcgattattgttatccatgcccat

SEQ ID NO: 156539 - DNA, 2471 bp, Zea Mays
tcaaaaaaaaaaggttagaaaaaaaatgaaccaaacagtacaaagcctgaccgtgccgcaatcagtactcgttgggtagtctttgggtactctcaatgtctcatacactttgacggaccacagcagccatgctggcatgccgtcgcgagccgctatccgcatgaagcccccttccttctcggtgtccttaaccacggcgtcccagctccacgacgccatcgaccgcctcctatcgctcctacgcgccgacgcctcccacgcccccgccgctcgcgcgattgccgcggccgtcgcctcgctccggccgccctccactctcctgtccaaccgcatcctccatctcctctcctcccacccggccactctcccggacgcgctcgccctcctctcttctctcccaagcaccgatgtatgctcctacaacaccctcgtcgcagcgctcggccgatccccacgcggcctcgcctccgcgcgcgcgctgttcgaccgaatgcctcggagggaccacttctcttggtccgccatcgtctccgcccacgtgcgccacggccagcctcgcgccgcgctcgcgatctaccgccggatgctgcgggagccggggggctccggcgcggacaacgagttcaccgcgtccagcgcgctcgccgcggccacggccgcccggtgcgcgcgcgcggggagggagctgcactgccacgtggtcaggcgagggatcgacgcggatgccgtcgtctggagcgctctcgcagacatgtacgccaagttcgggcgcctggacgacgcgaggagcgtgttcgataggatgcctgttcgggacgtcgtgtcttggacggccatgctggacaggtattttgatgccgggcgcgatggcgaaggcttcaggctgtttgtgcgcatgatgaggagtggcattctacccaatgagttcacatacgccggggtactgcgtgcttgcgcagaattcacctccgagaagctcgggaagcaggtgcatggtcgaatggcaaagagcaggacaggggactcatgctttgcagggagtgcgcttgtgcacatgtactccaagtacggggacatgggaactgcaatgcgtgtctttagggggatgccaaagccggacttggtgtcgtggacggccatgatctctggctatgcgcagaatgggcagccagatgaggcattgcattgcttcgacatgttattgagctctggattcaggcctgatcatgtcaccttcgttggcgttctatctgcatgtgctcatgctggcctggtcgataaaggtctgggcatcttccattcgataaaggacaaatatggtattgagcacactgctgatcattatgcttgtgtaattgatctcctcagccggtcaggcctgtttgagcgagcagaagatatgatcaacacaatgcctgtaaagcctaacaagttcctatgggcgtccttgcttggtggctgccgtattcataagaatgtgcggcttgcatggtgggcagcagaagcactgtttgaaattgaacctgaaaatccagcaacatatgttactctagccaatatttatgcatccgttggtttgtttgatgaagttgagaatatgagacggaccatggaattaaggggcataactaaaatgccagcctcaagttggattgaagttgggacaagagtgcatgtgtttctggttggggataagtcgcatcctcaagctgaagaaatatatgcgcttctgaagaagctgtatgtgaaaatgagggaagaagggtatgtggcagacaccggatttgttctccatgatgtagaagacgagcagaagcagcaggacattggttatcacagcgagcggcttgctgttgcatttggaatcattgccactccgaagggttctcctatcaaggttttcaagaatctgcgcatttgtggggactgtcataccactattaagttaatatcaaagattgtgcaaagagagatcattgtcagggactctaataggttccatcacttcaagaacgggagttgttcttgcagggattattggtgatctgtgctgaatatacaagaaaattgttttgactttttaagactggaaatgactaaggtcaatgtacggaagtactgatattgtggcattatctgggaatttaacttttttgctgcacctatgcaaattgcaacaaaatggcacttgaacctttccttctgcaatttctgcaagtgtttcttttgtcaaatgctaaagaaaggcgacagactcgcaacctgacgaatatctgttacgcaaatcgacattgatgtaggctttactaaaccttgcacatcccatctgtttgctaagactatctctaacagtttatctatcctcatacctatattcaaacttcactctgagaacaatgtatatgggtaaactttggataatctgctggagtcggcctaattgccaaagtcaatatctttctttttgctgc

SEQ ID NO: 156540 - DNA, 1365 bp, Zea Mays
ttgcaagtaacaactactcttctccggactctcggggtttcccgacgtccaccacccatcctcgcttctctcgagtcctcaatccatcctccggctgttccctcccagcgacgaaaccctagcccgtcacctcgacgcctagcccgccaccttgccgcccgtcgctgcaggtttatggcgcctgtgtgatcggatcagcagtccgctccgtctccctcggcccacgcatctgatgttcctctcccgcatcgtactccgcgacctggattccatcgactctccggcctccatggcgtcctcgaagaaggttgtgacccgtgacgagtgggagctgaagctccgcgacgtcaagatccgcaaggaggacatgaaccgcctcgtcatgaacttcctcgtcaccgagggcttcgtcgacgccgccgacaagtttcgcatcgagtccggcacccagccggagattgacctagcgaccatcactgatcgaatggaggttaagagagcagtacagtcgggtaatgttcaggaggcgatcgagaaaatcaacgaccttaaccccacgattttggacacgaatccccaactatactttcatctccagcaacagaaactaatagagttgattcgcgtgggaaaaataaatgaagctttggagttcgctcaagaagaacttgcaccgagaggcgaagaaaatcaaacatttctcgaggaaatagaaaaaactgtagcactactggtttttgaagatgtaaaaaattgcccttatggggaactattggatgtttctcaacgtttgaagactgcaagtgaagttaatgctgctattcttacaagccaaagccatgagaaagatccgaagcttccaagcttgttaaagatgttgaaatggacccaaaatcaactggacgaaaaggcggcttatcctcgaatcaacgatttcaccactgccgcgctggaagatccatcgatatgaatctgctgtgaaggaactgagggtatgcaccaagcctgcctggtgcctacacgtggttgccccggatctgtcaatagatcatcgtctgcagcgattgagttcaccccttgcactagtgtttaagatcaatgcaagcaattgatccgaaaacatcacctgtgttctacctgtacatgatgtagaagacatgtttgaaacctttttaagttagtgaaatgttggatttttttcatggacatatattcgtttcaaacctgtggtacttgcaacacgcaaattgtttcagtcatgctttgggccttgaattcacggtcctactgtcagtttgatgcaactgtgcaaagaagctcattttttttcaatgtcagaaccaattagcggctacagatttttag

SEQ ID NO: 156541 - DNA, 1445 bp, Zea Mays
ttgcaagtaacaactactcttctccggactctcggggtttcccgacgtccaccacccatcctcgcttctctcgagtcctcaatccatcctccggctgttccctcccagcgacgaaaccctagcccgtcacctcgacgcctagcccgccaccttgccgcccgtcgctgcaggtttatggcgcctgtgtgatcggatcagcagtccgctccgtctccctcggcccacgcatctgatgttcctctcccgcatcgtactccgcgacctggattccatcgactctccggcctccatggcgtcctcgaagaaggttgtgacccgtgacgagtgggagctgaagctccgcgacgtcaagatccgcaaggaggacatgaaccgcctcgtcatgaacttcctcgtcaccgagggcttcgtcgacgccgccgacaagtttcgcatcgagtccggcacccagcgtattacacgcttctctttctctcttccgctgttgaacttccttgggaattcgtccgaattcctgattttatttctgcagcggagattgacctagcgaccatcactgatcgaatggaggttaagagagcagtacagtcgggtaatgttcaggaggcgatcgagaaaatcaacgaccttaaccccacgattttggacacgaatccccaactatactttcatctccagcaacagaaactaatagagttgattcgcgtgggaaaaataaatgaagctttggagttcgctcaagaagaacttgcaccgagaggcgaagaaaatcaaacatttctcgaggaaatagaaaaaactgtagcactactggtttttgaagatgtaaaaaattgcccttatggggaactattggatgtttctcaacgtttgaagactgcaagtgaagttaatgctgctattcttacaagccaaagccatgagaaagatccgaagcttccaagcttgttaaagatgttgaaatggacccaaaatcaactggacgaaaaggcggcttatcctcgaatcaacgatttcaccactgccgcgctggaagatccatcgatatgaatctgctgtgaaggaactgagggtatgcaccaagcctgcctggtgcctacacgtggttgccccggatctgtcaatagatcatcgtctgcagcgattgagttcaccccttgcactagtgtttaagatcaatgcaagcaattgatccgaaaacatcacctgtgttctacctgtacatgatgtagaagacatgtttgaaacctttttaagttagtgaaatgttggatttttttcatggacatatattcgtttcaaacctgtggtacttgcaacacgcaaattgtttcagtcatgctttgggccttgaattcacggtcctactgtcagtttgatgcaactgtgcaaagaagctcattttttttcaatgtcagaaccaattagcggctacagatttttag

SEQ ID NO: 156542 - DNA, 224 bp, Zea Mays
tttttttttctttgttctctaacttggtatttgcatttgcaaggaccgtcgcaaaggtaggtgagcgtttcaatttgcgctcagtcgaacgcattgtgacttatctggcttctagtagttgctccttgatctgatcatcgattgttagctccagctttggagttctcggcttctcgagccgtgtcggtgttcctgagacgtaaatcaaatctatggatccagaa

SEQ ID NO: 156543 - DNA, 89 bp, Zea Mays
gtccatggaactgactagcagcagcacctcagttcttgatcttcttcttggccctcagctggttgctgtgaccacacttcttcttgcgg

SEQ ID NO: 156544 - DNA, 228 bp, Zea Mays
atgcgcttcagttccttcagatccttgaattcacggataacattccttcgacactctcggcaaaatctcttactatcaaacctgtacataagtttttcaatgaaatcttcctccttcatccgcagaagagatgatctagttccttcaccaagcgctgaccagaaatccaccagtgtagtacatgaaaggtgggcagtgtgtagagcacacatttctcttattccatga

SEQ ID NO: 156545 - DNA, 114 bp, Zea Mays
gaagagaaaagcgacagagttgtacatgctaattaaatcgctttaccgcgacatctggtcggacaaagtttttattaatatatatcagccaatttcggagaagcatttttttac

SEQ ID NO: 156546 - DNA, 104 bp, Zea Mays
gattttatcctctatattttcttcatctccagcaacgttctctatatttagtcctctatatctacagtattatcaaacttcgaattttgcattgtgtttcacct

SEQ ID NO: 156547 - DNA, 1725 bp, Zea Mays
ttccgctcgtcccgccaatcgccattattaacagctccgcggtccctccctccctcggtcggtcggcgtcggtccctccctccccacccagttagtcctcagcctatcccgtgcccgcgcagagcaccgcctctgctcgacccaccaccctctgtgcagagttaattaaccttgaggtttccgattgcccttcccttccgctcctctcgcccattcgcggcgagattcagcggcaaggatgcgcctgcacgcggaggtgcgggatgagatggaggaggggagcgaggagggggctgtgacggcttcggcggggctgtcgccaccgccactcatcggtgcggcggcgccggttccccggctagtggtggggttcgccctcacgaagaagaaggtgaagagcttcctgcagcccaagctgctcctgctggccaggaagaatggaatcagttttgtatctattgatgagtctcttcccctctcagaacaaggcccttttgatgttattttacacaagattactaggaaggagtggcagaaggttctggaggactatcacgaagaacatccagaagttactgtccttgacccaccaaatgctatcgagcatctgaacaatcgacaatcaatgcttgaagaagtagctgatttgaacctgtcaaatttctatggagaagtttgtatcccacgccagctggtcattacgaaagatccatcctctataccaacttctgtagctatggctggactaactttgcccttggttgccaagccattggttgttgatgggacgtctaaaggtcatgaactatatcttgcatatgacgaggcatccttgtcaatgcttgatccgcctctggttctacaggaattcataaaccatggcgggatcctctttaaggtgtatatcattggtgaaacaatacaggttgtccgcaggttctctcttcctgatgttaacacatatgacttactaaacaacgttggcatctatcgattgccaagagtttcatgtgctgcagctagtgcggatgatgcagatcttgaccctcttattgcagagcttcctccaaggccacttctagagaaactgggcagggagcttcgtggccggcttggtttgagattgttcaatatagatatgattagagaacttggaaccaaagatcggtactacataattgatatcaactacttcccaggttacggcaaaatgccaggatatgagcgcatgttcacagacttcttactaagtctcgcacaaagcaagtacaaaaggtacttaagcgggacatgaggtgcaaggaagtttgtgaagaccatgctactgacgagatggcatataacggtggcaggtatgcttccccaccgcgccaatgtacatttgctggagacataagcataagcgggaggcttgaggaagttggcaagtctcagtgtgtgtgttcaaaatcggtggcacatgctggactggagtaggaaataaccaaggaaacgcttggatgcgctgtactcatgttgtaaaatgtttaactgaatgaacaccttcctcgtgatggctccctccatcgtaatttggcaaccatgagaattaattctgcagcttggtagtgaacggtgttttgttgtgtgtatttggtaggtttgaggtctacgcaagtcaggagaccaccaaatagctgttgatgatcggatcatattaatctacatacaatctttctagcagtc

SEQ ID NO: 156548 - DNA, 1522 bp, Zea Mays
ttccgctcgtcccgccaatcgccattattaacagctccgcggtccctccctccctcggtcggtcggcgtcggtccctccctccccacccagttagtcctcagcctatcccgtgcccgcgcagagcaccgcctctgctcgacccaccaccctctgtgcagagttaattaaccttgaggtttccgattgcccttcccttccgctcctctcgcccattcgcggcgagattcagcggcaaggatgcgcctgcacgcggaggtgcgggatgagatggaggaggggagcgaggagggggctgtgacggcttcggcggggctgtcgccaccgccactcatcggtgcggcggcgccggttccccggctagtggtggggttcgccctcacgaagaagaaggtgaagagcttcctgcagcccaagctgctcctgctggccaggaagaatggaatcagttttgtatctattgatgagtctcttcccctctcagaacaaggcccttttgatgttattttacacaagattactaggaaggagtggcagaaggttctggaggactatcacgaagaacatccagaagttactgtccttgacccaccaaatgctatcgagcatctgaacaatcgacaatcaatgcttgaagaagtagctgatttgaacctgtcaaatttctatggagaagtttgtatcccacgccagctggtcattacgaaagatccatcctctataccaacttctgtagctatggctggactaactttgcccttggttgccaagccattggttgttgatgggacgtctaaaggtcatgaactatatcttgcatatgacgaggcatccttgtcaatgcttgatccgcctctggttctacaggaattcataaaccatggcgggatcctctttaaggtgtatatcattggtgaaacaatacaggttgtccgcaggttctctcttcctgatgttaacacatatgacttactaaacaacgttggcatctatcgattgccaagagtttcatgtgctgcagctagtgcggatgatgcagatcttgaccctcttattgcagagcttcctccaaggccacttctagagaaactgggcagggagcttcgtggccggcttggtttgagattgttcaatatagatatgattagagaacttggaaccaaagatcggtactacataattgatatcaactacttcccaggttacggcaaaatgccaggatatgagcgcatgttcacagacttcttactaagtctcgcacaaagcaagtacaaaaggtatgcttccccaccgcgccaatgtacatttgctggagacataagcataagcgggaggcttgaggaagttggcaagtctcagtgtgtgtgttcaaaatcggtggcacatgctggactggagtaggaaataaccaaggaaacgcttggatgcgctgtactcatgttgtaaaatgtttaactgaatgaacaccttcctcgtgatggctccctccatcgtaatttggcaaccatgagaattaattctgca

SEQ ID NO: 156549 - DNA, 936 bp, Zea Mays
tactaccacttaatcaactactgccctcgctcggacgattattattatactaacctgtgtctgtgtgagacaagaccaaaaaaaaagaagacaaatgaagaagctacgtagaactcctatcgagaagggaaggggagggatgatgagcaagtagaccggccgatcgagagggaccgaattacagcatgcatgcgcaaaaatatacatggatggatggatggacggaccggctattttgactactacctcctcctatcaagcctatgattgatcgatcgatcgatcgattagctgatgggaacactgacaagtaactttaacccctccggatcaagaaataaaatagctagaggatcggaggatcacatgttacttgtgacgtacgcgaggtggatggatcgtcggaggagtgtatacctacgtacgtggtagctagtatctgcggtacggtggtgggcggtgccgctatctgttcgcgcgctgccgccgctgcgtgttgcttgctcatgcatcatgcacgcgcacgtacgccaaggtagatgcgcgtgctggtgcgcagctgcagcgcaggcgcgcgcaagcaaaatcatcattcagcaggcggcggagtgggtgaaggggttgaagaagcggtgggtggctgcctggggcctgtcgggctcggccttgggcccgccgcgcaggcgctcgcaggacgggcagaggctcagcgtggcggccggcatcggcagctgcatctgcatctgcacgtacaacggcggcggcaccggcaccggcaccggcacgccctgcgtcgcggcggcgggcgacgacgacggcgcctgatgtgggtgcgggccggcgagctgcttgagcgcgcggagctcctgtagctcccgctgcagccgccggttctcctcgctcagcgactcgcagcagcgcttcagcagctcgcag

SEQ ID NO: 156550 - DNA, 2148 bp, Zea Mays
ctcctctccagctctcctcccatataaaacgcggaagaatctcgaagagacgcctcgtcccatcgttcctctctctctgccccgcctacgcctcgccccagacgcatcaaaccgctctcctctccctccctgcccccctcgcaaccctgaagaagcccccacacgcaaggccgcaaacgcgccgcgcaccgcaaggtcccagggagcgacacgaggcggcctcattgcagcatggctgctatggccgccgctggcggcgtcgggctccacctcattggcgctgccacggccacgctcatcgtggcggtccttgttgcggccgtgctggggcgccgccgccgggcccgggcccgggcccaggcgcctccggtggaagggaaacccgcgccggaggcaggctgcgcggtcggtgacggcgcgggtcccgacgtcgggacggacgtcatcatcgtcggcgccggagtggctggatctgcgctggcgtacacgctcggaaaggatggccgccgggtgcatgtcatcgagagggatctgacagaacctgacagaattgtgggcgagctgttgcaacctggaggttacttgaaattaattgagttaggcctccaagattgtgtggaagaaattgatgcccaacgtgtgcttggttacgcattattcaaagatggaagaaacacaaagcttgcttatcccttagagaagttccattctgatgttgctggtaggagctttcacaatgggaggtttatacagaggatgcgtcagaaagctgcgtctttgcccaatgttcaattagaacaaggaactgttacatcacttctcgaagaaaatggtactgttaaaggtgttcaatacaaaaccaagtcaggtgaagaactaaaagcttatgcgcccttgacgattgtatgtgatggctgcttttcaaatctacggcgtgccctttgctctccaaaagttgatgttccatcatgttttattgggctggtattggagaattgccaacttccacatccaaaccatggccatgttatcttggccaatccttcgccaatactattttacccaattagcagcacagaggtgcgctgtttggttgatgtcccaggtcagaaggtgccttccatagctagcggtgaaatggcaaattatctcaaaaccgtcgttgcaccccagattcctccagaaatctatgactctttcatagcggccattgataagggaagcataagaacaatgccaaacaggagcatgccagcggctccacttcctacccctggcgcacttctgatgggggatgccttcaatatgagacaccctttaactggtggaggaatgactgttgcattatccgacatcgttgtcctacgtaatcttctcaagcctctccgcaatctccacgacgcatcttccctgtgcaagtacctcgaatcgttctatacgctgcggaagccggttgcctccaccataaacacgttggccggtgctctgtacaaggtcttcagcgcctcgcctgatcaagctaggaacgagatgcgccaggcctgttttgattacttgagcctcggaggcgtcttctcgaatgggcctattgccttactctcgggtcttaatcctcggccactgagtttagttgcacacttcttcgctgtcgctatctacggtgttggtcgcttgatgctccctcttccttcgcctaaacggatgtggattggagccaggctgatttctggtgcatgcggcatcatcctcccgatcatcaaagctgaaggcgtgagacagatgttcttccctgccactgtgcccgcatattaccgggctgcgcctacgggagaataagtaaagcgagaaccgattccgggctgctgcagtgctgctgatcccaccatgatctgatggcaactgatgtgtcatggatggcatttttttcctgtgttagtggttgttaggtggtttgttgtgctgctgtcattggaatgaggaacctgtatagtgtgcccctgggtactggtcaaagttgggaaatatgttgggtcctaccgtagccatgtcgattactgccaagctgtatatgattctgtcgaactagtgaaacctctccccatctttaacgcgtatcaatcttgtttgctcccccccccgagtacagca

SEQ ID NO: 156551 - DNA, 2014 bp, Zea Mays
ggtgcatggttgttagtagtactagtaccggcaattctgttccacgactggatttccgcttttgcccttgcgtttgcctacttcaccaggcttacttagccttttcactttggacaatctttatgtaaggctgcaagggttaagttgttccttgttgagccttgcaaggaattgaccgtgtccagctctccatctactccaccctttaaaagtaaagatggttcagttggcagacctggcaagttagaaggtcaccactagtcattcccaaaaatgatcgccacatcgcactgagtccaggtaccagagcaggatgatgtattcccctccacgcaccgatcctgacagagaggatgagcagtgcttcgcaattggagctaacctgctttcttcactagatcatactatgaagtttgatgagcctatcgcctttccaatgaacaatgtaggcatgcaagagagggttcagctctacaattctactggagatgctcaactaagtagaaatgcgaacacagggaagtgttcaaagggtggcaaaaggaagagttctggagggatcaattcatcactgcattctctagtaaggaagctagaagctaccgttgctttgtttcaccggctgcaccatacctcactccctctgtttcatcctactgtacatataaatgtattactgcaggacgaagccagggcattgttgcagcgagaagtcagcatggagtgtgctgatgagaacgctgctggagccaagagagaggactacgcgcatgtccgggcaaagcgaggccaagccaccaacagccacagccttgcagaaagatttcgaagggaaaagataaatgtaaggatgaagcttcttcaggaccttgtcccgggttgcaacaagattacaggcaaggccatgatgcttgacgagatcataaactatgtgcaatctctgcagcgtcaggttgagttcctttcgatgaagctctcagcgatcagaccagggttcaaccgtgacctcgaactgcaagatgtaagattgcgagatcctttgcacacaagatgccagctccggttttctcggatacagcctgcgagcgagcgatgtgcatcttaatctgtatatagcatctgaagaatgtttctcgcacaggatcatccctaatcctgcaaatgttcatgtgacaagaaacggccagcaatctgcatttcctcagagaggagttatctggaacgaggaacttcgcagcatcgctccaaatgctttcgcttcagataccgttgctggttcaatggaagtggagtgacgagtcggcagtttaatggtaaatcttgacaggtttatggctaaatgtgccacactttgcctaaagttaaggcctgtttggtttgtgactaaatgtgccacactttgactaaggttagtcgttcgaattgaataactaaacttaggcagaaaagttaggcaaagcgtggcaactgaagtagtgaatcaaacatgtcattagtcatccaaattgaataactaaccttaggcaaaaaagttaggcaaagtgtggcaattgaggtaaggaaccaaatatgccctagtctgttgggttgctactggtcaactggtgtgcctttgtaagttgcattggtggcgcggatgagctagtcaactttggtctttggtgcccacacaccatgtacagttataataactaatcaaaggagcagagcacggtgatttttttctcttcttttttgggcgaacttatggacaaaataatgtgcaatgatcgtctggaatttactaaccaagatgtttttttagtgctactaccgagttgcagaatcaaccccacaggcttgtgcgtttgtgtctctctaaagctgcagcgatggtaaaatcttggtttattcgaattgactagaaagaaaatagttaatagaatgtttgccatttggcagtctgtcatataggcttgtaactctgcctatagaagcagcgagacgagtagtagtatgtcagtgttaacactag

SEQ ID NO: 156552 - DNA, 115 bp, Zea Mays
gtgctctttgggaacagtttttgcgttcaggataagtacaggtgcatggtaccttatttagtttttttctttctttctttgctgctaccactgcagtatgattttctgtttgaag

SEQ ID NO: 156553 - DNA, 627 bp, Zea Mays
ctctggatctgggagtccagatgttcaaacaagcttaaagtcttcgcctggctgctgttgatggacaggctgaacaccagaaacagcctaaagagaaagaactttaaggttcaaggcgacaactacaactgtgctctttgtcaacttcaaagagaagaaactgccttccatttgttcttcaattgccctttcaaccaagactgttggagacatctgaatattcagtggaaccaccagattgacttcttttcgacctttcaacaagccagggacttgcatggttcaccattctttatggaggtctttatcatagcagcttggcaaatctggaagcaaagaaacaattttatctttgacaggggacgaccatctttcattggctggaaaaaagaattccgcgtcgaagctcttctgcaagctaaccgtttttctgaagagaaatcaactcttttctcctcgcttgtgaattcctatagatagcggatgttcttttccctgtgctttagttagtttccttctggtttatgtcttgggagcgactgctattgctctttatctattttcttctttatattaataaatatctaccacagcaggggcttcccctgctgtacattttcaaaaaaa

SEQ ID NO: 156554 - DNA, 1539 bp, Zea Mays
gttttgtttatatatttttgaaatggtgattctggggtttgccatgactgaatgtgattggctgcatgcgccacacagtatatctaggtggttacgacaccgaagacaaggccgcgagggcttatgatctggctgctctgaaatactggggtccagctactcacgtcaatttccccgtagaaaactaccgagatgagctcgaggagatgaaaggcatgacaaggcaagaattcgttgcgcatctgagaaggagaagcagcggattttctcgaggtgcttccatctaccgaggggtgacaaggcaccaccagcaaggaagatggcagtctcggattggaagagtcgctggaaacaaggatctatacctcggcactttcacaactcaagaagaagcagccgaggcgtacgacatagcggccatcaagttccgcggcctgaacgcggtgacgaacttcgacatagcaagatacgacgtggacaagatcatggagagcagcacgctgctggccgtggaggaagcgcgcaaggtcaaggcggtcgaggcagcgagcagtgctcctatgacgcacacgcacagcggtggcaaggagcagctcaacgctaccaccgccgaggagacaagcagcgcgggctggaggatggtactccatggttctccccaccagctggaagccgcgcgttgcccagaagcagctgatctccagagcgcaatcatgaacaacgactctcatcctcgtccatccctgcatggcatcgctggactcgacatcgagtgcgcggtgcatgatcaccacgaccacctcgacgttcctgctggcagcaggacgacggctgctgggagcatcaacttctcgaactcgtcctcgcaggtgacaagcctgggaaactccagggaggggagccccgagaggctgggcttggccatgatgtacggcaagcagccgagcagcgctgtaagcctggcggccaccatgagcccctggacgccggtggcggcgcaaacagtggcacacgtgctgaagcagcagccgaacgtcgtcgtttctcatcgacctgtctttgccgcctgggcggatgcctagctacccgagggagttggagcttagtagccgctcgatcgatcttgctcgccattgctggttttttttttggtagactggagcaagattggcagcaccaggttaggtcaactagctggaatagcaaggctcgttagttagcacgatggctggtgtaatgctatgcatgcactgcagtagaagataggccttaatcagtctacagcttatgcacaatctcagtagtgctgctgctagctggtggtagctagcgttgttttgagccccttttgggtgacagattggttagaatgtagcatggcttcctttgaagaacgttgcatgaaacaaggccgttgcgagagagagagaaggaaaaggttcacgaaatgagatggctcgtctttgtttgtacgggccattcaggtctcgtcagtgggacctgcctttggctatgcgcacagatgaagatcttttgacc

SEQ ID NO: 156555 - DNA, 1193 bp, Zea Mays
gcttagtgcctctttagctctgagagctaaggtatgcaatgtaagctttgcaacactcttcagtacactatgacgttgcctcctctgcggtattgatcatatggcacaggtggactgggagatacgaagcccacctctgggacaacagctgcaggaaggatgggcagactagaaaaggcagacaagtatatctaggtggttacgacaccgaagacaaggccgcgagggcttatgatctggctgctctgaaatactggggtccagctactcacgtcaatttccccgtagaaaactaccgagatgagctcgaggagatgaaaggcatgacaaggcaagaattcgttgcgcatctgagaaggagaagcagcggattttctcgaggtgcttccatctaccgaggggtgacaaggcaccaccagcaaggaagatggcagtctcggattggaagagtcgctggaaacaaggatctatacctcggcactttcacaactcaagaagaagcagccgaggcgtacgacatagcggccatcaagttccgcggcctgaacgcggtgacgaacttcgacatagcaagatacgacgtggacaagatcatggagagcagcacgctgctggccgtggaggaagcgcgcaaggtcaaggcggtcgaggcagcgagcagtgctcctatgacgcacacgcacagcggtggcaaggagcagctcaacgctaccaccgccgaggagacaagcagcgcgggctggaggatggtactccatggttctccccaccagctggaagccgcgcgttgcccagaagcagctgatctccagagcgcaatcatgaacaacgactctcatcctcgtccatccctgcatggcatcgctggactcgacatcgagtgcgcggtgcatgatcaccacgaccacctcgacgttcctgctggcagcaggacgacggctgctgggagcatcaacttctcgaactcgtcctcgcaggtgacaagcctgggaaactccagggaggggagccccgagaggctgggcttggccatgatgtacggcaagcagccgagcagcgctgtaagcctggcggccaccatgagcccctggacgccggtggcggcgcaaacagtggcacacgtgctgaagcagcagccgaacgtcgtcgtttctcatcgacctgtctttgccgcctgggcggatgcctagcta

SEQ ID NO: 156556 - DNA, 2101 bp, Zea Mays
ccgccgggccttctcatctgttcacttggtacttggtagctctcccatttgtagtggcagcactggactagtcgtgttcaagcgcaccacaaaaggagagcgagctcgagagtaacaagggcttgcgtgtgcatggttgataggggaaatggctaatggcagcaactggctaggcttctccctctccccgcatacggccatggaggtgccctccgtttctgaacccgcttctacccatcacgctccacctccaccttcttccagtaccacgatctcctcttccagtaccaacaacaccatcagttccaacttcctcttctcaccgatggcctctccctatcctggttactactgtgtgggcggcgcgtatggcgatggcaccagtgctgccggcgtctactactcccacttgcctgctatgcccaacaagtccgacgacggcaccctctgcaacatggaaggcatggtgccgtcgtccccaccgaagctagaggacttcttgggtggtggcaatggcggtgggcaagaaacggccacctactacagccaccagcagcagggccaggaagagggggcaagcagggattaccgccagtaccactaccaacaccagcagctcgtcccctacaacttccagcccctgacggaagcagagatgctccaagaaggcgcagcgccaatggaggaggcgatggcggcggccaagaacttcctcctggcgagctacggcgcttgctacagcaacgaggagacgcgccctctgagcctgtcgatgatgagccccgggactcagctgagcagctgcgtgagcgcggccccgcagcagcagcaccagatggccgctactgtagccaccgctgccactgcggccgcagccctggggcgcagtaatggcgatggtgagcagtgcgttgggcggaagaggagcaccgggaagggaggccacaagcagaccgtgcaccgcaagtccatcgacacgtttgggcagagaacctcccggtataggggcgtcaccagcaggcacaggtggactgggagatacgaagcccacctctgggacaacagctgcaggaaggatgggcagactagaaaaggcagacaaggtggttacgacaccgaagacaaggccgcgagggcttatgatctggctgctctgaaatactggggtccagctactcacgtcaatttccccgtagaaaactaccgagatgagctcgaggagatgaaaggcatgacaaggcaagaattcgttgcgcatctgagaaggagaagcagcggattttctcgaggtgcttccatctaccgaggggtgacaaggcaccaccagcaaggaagatggcagtctcggattggaagagtcgctggaaacaaggatctatacctcggcactttcacaactcaagaagaagcagccgaggcgtacgacatagcggccatcaagttccgcggcctgaacgcggtgacgaacttcgacatagcaagatacgacgtggacaagatcatggagagcagcacgctgctggccgtggaggaagcgcgcaaggtcaaggcggtcgaggcagcgagcagtgctcctatgacgcacacgcacagcggtggcaaggagcagctcaacgctaccaccgccgaggagacaagcagcgcgggctggaggatggtactccatggttctccccaccagctggaagccgcgcgttgcccagaagcagctgatctccagagcgcaatcatgaacaacgactctcatcctcgtccatccctgcatggcatcgctggactcgacatcgagtgcgcggtgcatgatcaccacgaccacctcgacgttcctgctggcagcaggacgacggctgctgggagcatcaacttctcgaactcgtcctcgcaggtgacaagcctgggaaactccagggaggggagccccgagaggctgggcttggccatgatgtacggcaagcagccgagcagcgctgtaagcctggcggccaccatgagcccctggacgccggtggcggcgcaaacagtggcacacgtgctgaagcagcagccgaacgtcgtcgtttctcatcgacctgtctttgccgcctgggcggatgcctagcta

SEQ ID NO: 156557 - DNA, 2408 bp, Zea Mays
cagtttcccactccccctgggtcttccccatcccccctccactccccccctgggttttccccttcctttaccccccatcagatcttcccccatatctctgtcctgcatcactcgccgccatccactcccgatccaaacccgagagctcccacctccgccgccctgttcgctcgtccgccttttcactccccgtagctagctgctgtcgcggagcaaccccgcgattccaagaaaagcaacttggtcaagaaagagtgcaagaaaggaggacggtgctgacgatgatggcgataagccaccccatgattcgccccatcattccgtcgcctccggggcctgcgcgctagctgctagaagggcctcgccgtccgtcgtggtggtggtggtggtggtgtgcgcggggcgggaggggaggggaggggagtcgtcactgcgccgccacaatgccacagtaccaggagctgccctgcggcgggcaggagctcgatatcgacaccgcgctcaaggatggcatcctcgggggcgcgctggagcccgtgggtgcggcggcgggggacgatggcaagcagcccgtggagctgcgcaggatgatggacgagctggacgcggcggccggggacggcggcggcggcggcggggacgaggcggtgccggcggtcttcatctgcccgatctcgctcgagcccatggtggatccggtgacgctctgcacggggcagacgtacgagcgggccaacatctcgcggtggctagccctgggccaccggacctgcccgaccacgatgcaggagctctgggacgacgcgctcaccccaaacgccaccctccggcagctcatcgccgcctggttctcccgccggtacacgaggtttaagaagcgctccgccgacttccacggccgcgccgccgacctcgtcggcagcctccgcggcacggcggtgcccaggcggcagcccctcaagggccaggcccgcgtcgcggcgctgcgggagctgcgcaccctcgccgccgcccaccagtccgtcaccaaggccatcgccgaggccggcggcgtggccctgctcacgtcgctgctcggacccttcacgtcccacgccgtgggggccgaggccgtcgcgatactcgtcagcggggtgctgcttgacgctgacaccaaggccgcgctcatgcagccggcgaaggtgtcgctcgtggtcgacatgctcaacgagggcgccgcggacaccaagatcaactgtgtccgcctcatccgcatcctcatggtcgagaggggtttccggccggagacggtggcgagcctcagcctcttggtcggcgtcatgcgcctcatccgggacaagcggcatccggacggtgtggccgcggggctcgagctgctgaattcgatctgcgcggtgcacaggccagcgaggtgtatggttgttagcatcggtgcggtgccgcagctggtggaattgttgccggagctagcgacggagtgtgtcgagccggctttggacatcttggatgccctgtctgcggttccagaggggaggatggctcttaaggattgtccgcggacgatccccaatgctgtccggttgctgatgagagtttcagaggcatgcactagacgcgcgctgtcgatgctgtggacggtgtgtcggatggctccggaagaatgtgcacctgctgcagtggaggctgggttggcggcgaagcttctgcttgtcatccaaagtggttgtgcgccggagctgaagcagaaggcgtcggagctgctcaagctgtgccgcctcaactacaccgacaccctcttcatctccaagtgcaaactcacaaggacaattcagtgagagatgcaaatgatgctggtctgatctgatttggttcgatgatgcgtggtttgttgattgaccttgctgagttcagagttccaaggaaatggagttggcaaattgacgaatgatggcaagactggtggttaccacaacaatttccggggagacaagaagcgatgcagcctaatgactggcaagttagatggcaagcaggcgggtgtacatgcaaattgttgagaatttgatcagctcaataagcacatgaggctgggtggtaagtacagccagttttgccattaggagtagctagcattaagcaaaaccagcaaacttagatttttggcaatgtgggtatctcagagctgtagatgtcgttcccttccttgtaattacacagtactgttgcttctacactggaatatacattgccattgctccgggaaaaaaaattgaattgtcatcttgatcgagtactgcctagtcaaattgtggaagtgtgtgctctttcatctccaacaattatgtaaatttagcaaccctaaattatagatttagaagctgctaaagcattttaataagtaaaaaaaa

SEQ ID NO: 156558 - DNA, 2531 bp, Zea Mays
ctctccacaccacccactatagctttggacttggatctcaaattctcccagtttcccactccccctgggtcttccccatcccccctccactccccccctgggttttccccttcctttaccccccatcagatcttcccccatatctctgtcctgcatcactcgccgccatccactcccgatccaaacccgagagctcccacctccgccgccctgttcgctcgtccgccttttcactccccgtagctagctgctgtcgcggagcaaccccgcgattccaagaaaagcaacttggtcaagaaagagtgcaagaaaggaggacggtgctgacgatgatggcgataagccaccccatgattcgccccatcattccgtcgcctccggggcctgcgcgctagctgctagaagggcctcgccgtccgtcgtggtggtggtggtggtggtgtgcgcggggcgggaggggaggggaggggagtcgtcactgcgccgccacaatgccacagtaccaggagctgccctgcggcgggcaggagctcgatatcgacaccgcgctcaaggatggcatcctcgggggcgcgctggagcccgtgggtgcggcggcgggggacgatggcaagcagcccgtggagctgcgcaggatgatggacgagctggacgcggcggccggggacggcggcggcggcggcggggacgaggcggtgccggcggtcttcatctgcccgatctcgctcgagcccatggtggatccggtgacgctctgcacggggcagacgtacgagcgggccaacatctcgcggtggctagccctgggccaccggacctgcccgaccacgatgcaggagctctgggacgacgcgctcaccccaaacgccaccctccggcagctcatcgccgcctggttctcccgccggtacacgaggtttaagaagcgctccgccgacttccacggccgcgccgccgacctcgtcggcagcctccgcggcacggcggtgcccaggcggcagcccctcaagggccaggcccgcgtcgcggcgctgcgggagctgcgcaccctcgccgccgcccaccagtccgtcaccaaggccatcgccgaggccggcggcgtggccctgctcacgtcgctgctcggacccttcacgtcccacgccgtgggggccgaggccgtcgcgatactcgtcagcggggtgctgcttgacgctgacaccaaggccgcgctcatgcagccggcgaaggtgtcgctcgtggtcgacatgctcaacgagggcgccgcggacaccaagatcaactgtgtccgcctcatccgcatcctcatggtcgagaggggtttccggccggagacggtggcgagcctcagcctcttggtcggcgtcatgcgcctcatccgggacaagcggcatccggacggtgtggccgcggggctcgagctgctgaattcgatctgcgcggtgcacaggccagcgaggtgtatggttgttagcatcggtgcggtgccgcagctggtggaattgttgccggagctagcgacggagtgtgtcgagccggctttggacatcttggatgccctgtctgcggttccagaggggaggatggctcttaaggattgtccgcggacgatccccaatgctgtccggttgctgatgagagtttcagaggcatgcactagacgcgcgctgtcgatgctgtggacggtgtgtcggatggctccggaagaatgtgcacctgctgcagtggaggctgggttggcggcgaagcttctgcttgtcatccaaagtggttgtgcgccggagctgaagcagaaggcgtcggagctgctcaagctgtgccgcctcaactacaccgacaccctcttcatctccaagtgcaaactcacaaggacaattcagtgagagatgcaaatgatgctggtctgatctgatttggttcgatgatgcgtggtttgttgattgaccttgctgagttcagagttccaaggaaatggagttggcaaattgacgaatggtaatgtgcatgtatagataaacttgcagttttagctctagcatcttatctgaagagatttgggtggttgagcagatggcaagactggtggttaccacaacaatttccggggagacaagaagcgatgcagcctaatgactggcaagttagatggcaagcaggcgggtgtacatgcaaattgttgagaatttgatcagctcaataagcacatgaggctgggtggtaagtacagccagttttgccattaggagtagctagcattaagcaaaaccagcaaacttagatttttggcaatgtgggtatctcagagctgtagatgtcgttcccttccttgtaattacacagtactgttgcttctacactggaatatacattgccattgctccgggaaaaaaaattgaattgtcatcttgatcgagtactgcctagtcaaattgtggaagtgtgtgctctttcatctccaacaattatgtaaatttagcaaccctaaattatagatttagaagctgctaaagcattttaataagtaaaaaaaa

SEQ ID NO: 156559 - DNA, 1671 bp, Zea Mays
atgccacagtaccaggagctgccctgcggcgggcaggagctcgatatcgacaccgcgctcaaggatggcatcctcgggggcgcgctggagcccgtgggtgcggcggcgggggacgatggcaagcagcccgtggagctgcgcaggatgatggacgagctggacgcggcggccggggacggcggcggcggcggcggggacgaggcggtgccggcggtcttcatctgcccgatctcgctcgagcccatggtggatccggtgacgctctgcacggggcagacgtacgagcgggccaacatctcgcggtggctagccctgggccaccggacctgcccgaccacgatgcaggagctctgggacgacgcgctcaccccaaacgccaccctccggcagctcatcgccgcctggttctcccgccggtacacgaggtttaagaagcgctccgccgacttccacggccgcgccgccgacctcgtcggcagcctccgcggcacggcggtgcccaggcggcagcccctcaagggccaggcccgcgtcgcggcgctgcgggagctgcgcaccctcgccgccgcccaccagtccgtcaccaaggccatcgccgaggccggcggcgtggccctgctcacgtcgctgctcggacccttcacgtcccacgccgtgggggccgaggccgtcgcgatactcgtcagcggggtgctgcttgacgctgacaccaaggccgcgctcatgcagccggcgaaggtgtcgctcgtggtcgacatgctcaacgagggcgccgcggacaccaagatcaactgtgtccgcctcatccgcatcctcatggtcgagaggggtttccggccggagacggtggcgagcctcagcctcttggtcggcgtcatgcgcctcatccgggacaagcggcatccggacggtgtggccgcggggctcgagctgctgaattcgatctgcgcggtgcacaggccagcgaggtgtatggttgttagcatcggtgcggtgccgcagctggtggaattgttgccggagctagcgacggagtgtgtcgagccggctttggacatcttggatgccctgtctgcggttccagaggggaggatggctcttaaggattgtccgcggacgatccccaatgctgtccggttgctgatgagagtttcagaggcatgcactagacgcgcgctgtcgatgctgtggacggtgtgtcggatggctccggaagaatgtgcacctgctgcagtggaggctgggttggcggcgaagcttctgcttgtcatccaaagtggttgtgcgccggagctgaagcagaaggcgtcggagctgctcaagctgtgccgcctcaactacaccgacaccctcttcatctccaagtgcaaactcacaaggacaattcagaagcgatgcagcctaatgactggcaagttagatggcaagcaggcgggtgtacatgcaaattgttgagaatttgatcagctcaataagcacatgaggctgggtggtaagtacagccagttttgccattaggagtagctagcattaagcaaaaccagcaaacttagatttttggcaatgtgggtatctcagagctgtagatgtcgttcccttccttgtaattacacagtactgttgcttctacactggaatatacattgccattgctccgggaaaaaaaattga

SEQ ID NO: 156560 - DNA, 1482 bp, Zea Mays
aaaaaaaaaatatctcacaagaacattgctaccaccaagtgtcaggacccatggttctcgctcctgcgctcctcgtcgtggcggcgctcctggcccagccgctcgggagccgttccggcgacgacgccggggccgcgaacctgcacccggtcgtgctcgtgccgggctacggctccaaccagctggaggcgatgctgacggcggcgtacgagcccccggcgcctgcctgtgccggctccgcggaccagggttggttccctctctggccaaaccacacggcgatgcgcgacgctagccaggtcccctgcttcgccgaccagatgagcctcgtctacgacgccggcgccgacgactaccgcaacgccgacggcgtcgctacccggaccccgttcttcggctcggcgcgcgccctcatcgggtgggacaggctggtgcagcagctggaaggcatgggctaccgcgacggcgagaccctccacgccgcgccgtacgacttccgctacgccgtggcgcctcccggccacccgtccgcggtgggggaccgctacttccgcgacctcgggcgcctcatccaggagagccgcctcatccatggccgcccggccatcgtggtcgcgcacagcttcggctgcgcgctcacctaccagctcctcctgtcccgcccgctcccctggcgccgccgctacgtgaagcacgtcgtcctcctgggccccgcgctcggcgggttcgcgcatgggatgcgcctcctcagcgccggcatggactacggcctcccgaacgtcccgcggccggcgatgctccggatggcgcggacccagcagagcgccctgtggcgcctgcccacgccgctcgtcttcggggaccggccgctggcgatgaccagcgccgcggcctactcggcgcgcaacgtgtcggcgttcctcgaggccatcggtttccaggaaggcgtgcggccgtacctgacgcgggtgctgccgatgtgggaggcgctgccgccgccgatggtgccggtcaccagcgtcgtcgggttcggcgtcagcacgcccgagacgtacgtgttcggggccgacgggctcgagggggaggccgaggtgctgtacggcgacggcgacggggagatcaacatggtgagcctggcggctgtcgagagatggtcggaggtggaaggccaggtcctgaaggtcgttaggctgcgcggcgtccatcacgacggtttcttcagcatcgatttcgcgttgaatagcacacttgctgagatatcggaggcaggagaaagcgtcattgaacagatcggcattgtatcgtgtcagcagaaatgcagtgattactgagaatttggtggacgggtcctaaaacgtgtcctgcctcacgattgactgattgagaataaaaatggtaggtgatgctagtgcgaattgtattagtgcaccgcacccttgcgctgagagcaacagagtcaagagaggcatcaaaatggaagat

SEQ ID NO: 156561 - DNA, 98 bp, Zea Mays
cttattccatatcttattttaaacttcattatacaaataataccatctacaatgtaagttttccaagatcatatatacggtccgttagacacaagacc

SEQ ID NO: 156562 - DNA, 1587 bp, Zea Mays
caactattaagacccaaatgtagactgcccccgcccgctaccgcacggctcccgcgtgaaacgcccgcagcgcacactacgcgaatcccaccgcgaaacgctcgcctgcctacgccgcgaatcctgccgctaccgcacgcccgcccgcgagaaccgcctccgcaacacccttccccaaacccattctccccacgcgcggcgcctccgcaacagcaaccgccgcgcccgagcccaaacccaaacccaaccatggcgtgcatgccggctgtgtctgccccctccgtcctcgcgtcggccccggcgtcgacccgcacccacctctgctactcaacggaaatgcgacgcggcgcgctctccctccgtcccgcccgcgctatccccacgttgaggctcggcggccaccgcgacgcccgtggcgctgtcgtcgtccgcgccactgcggcagagggagccgtggagctgcaggccaaggtgacgagcaagtgcttcttcgacgtggaggtcggcggggagcctgcgggccgcatcgtcatcgggctcttcggagaggtcgtacctaagaccgtcaacaacttccgtgcgctctgcactggtgagaaagggtacggctacaagggctgctccttccaccggatcatcaaggactttatgattcaaggcggggacttccagcaaaacaatgttgccatgtgcgtctgggttgtgctctgtcggcctggcacccatgcgagtagcggtgcaagcagcggtagtagccctgctgagcccaactcctgcctctctgatcgcggggcgacggtgggcatgctgctcggcggcgaggacatgcacaggttcccggtgcgctccccgcggatggaccgcgacgacctcatccgtagtcccgccgcgcggcaaatcgtgtccaactacttcgggtacccagagcacacgccgccattattggcacccctgctccgcttgttccgtttcgtttccactagccgttcaataacgttgccccgccatcgatggaccgagcagcatgttcgggccgatgtaggacgtgcgcatcccgtaccagcagaagcgcatgttcggcttcgtcaccttcgtgtacgccgagacggtgaaggccatcctgagcaagggcaacccgcacttcgtgtgcgacgcgcgctcgtcaagccctacaaggagaagggtaaggtccccggcaggttcaggaagctgcagcacgcgcaccatggcggagccgagttcgctggttgcgcgtcgcccaccggattgctggattccagggacccctacgccctcctgcttctttcaagtgcccaggttttctcctgagcatgaagccattgggctatgatgtgtgaggtgcacatagcaaaaaaaaggggagggccccctccattcctctaatctgggagtaagtgtcaacaacaaccctccttgtgcctgtctttctgatagtgctgtaaccattaataataagctagctgctgctcccatgaccatgatgcatgtttatgccagcatagatcctgaatcatgatggtcataatctgtgtgttgacgggctgttgtgcgcaggggaatactaat

SEQ ID NO: 156563 - DNA, 1287 bp, Zea Mays
aggtgcagaggcagcagagctgcttccagtctgatgcggatacttcggctaaagaaaagcgccactacccacacccacaccacacctgaaaccgtgcaccgatttatctcagccactgcacctcgtacatgaggtgcccactgcccacgaccacggcgcttgcgcgctgaccgtgccttcctcccgattctcaacgaactccgacgtttcctccggggttcccacctaatctccatctcccttgcgtcccgtccgttacccagatcaacagaactaccacaccttacaaagaatcagcagtcttactgcctgcacattcctcttccagctccagctatttccaccgcacattgtccacgtctgccattggcccattgccggttcctctcgtcaagccctagctccaaccaacccgtttccatgggagccatacgagttgcaagccttctactcctcgctggggtaatctggctgtcgcgggcgatgttcggcgcggaggccgccggcacgacggtgttcacgctgcacaacaactgcacccacacggtctggccggccacactgtccgggaacagcgcggcggccgtcgggggcgggggcttcgagctgtcgcccggcgccaccgtctcgttcccggcgccggcgggctggtcgggccgcctgtgggcgcgcacgggctgcgtcgcgtcgtcgtcgtcccccgccggccgcctctcgtgcgccacgggcgactgcagcggcgccgcgagctgctccctgggcggggcgccgcccgtcacgctggcggagttcaccctgggcggcgccgacggcaaggacttctacgacgtgagcctggtggacgggtacaacgtcggcatcggcgtggcggcggcgggcgccagggtcaaccgcgccacgtgcgggtacgccggctgcgtcggggacgtgaacgcgctgtgcccgcccgagctgcggacggccgcggcggcgggcggcgagggggcgccggcggtggcgtgccggagcgcgtgcgaggcgttcgggtcgcccgagtactgctgcacgggggcgcacggtgggccgaacacctgcgggcccaccaagtactcgaggctgttcaaggcggcctgccccgcggcctacagctacgcgtacgacgaccccaccagcaccttcacgtgcggcaccggcgcgcagtacctcgtcaccttctgcccgggtcgccagtagtgggcggagttgtgtccgtgcccgttgatcgttctgttcatcttatgtcttaaaaagatgctttctaatttgcat

SEQ ID NO: 156564 - DNA, 310 bp, Zea Mays
actattaagagaggagtgtagactgcccccgcctccctaccccgcccgcccgccctcctcccctcccgacgtcaagccgcacctgctcgccgacgtcgatgtgaagccgctgcttcttctcccgccgccgctccacctcccgggctacggcgcgctcgtgcccgtgaagaccgaggagcccgtgcccgtggccaccgtctcgtctccgcccagggcgctcccgccgccgtgcctctgccaccagttctggaagtccgaagactacgtcgtcgcgcgcgcaactccgatgcggtcgaccccagtaggctag

SEQ ID NO: 156565 - DNA, 1917 bp, Zea Mays
atggaaccccgccatttctgccgcgctttgctgctgctcctcgtcgtcctcctcctcggcttccggcgggccggtgcccaggacagcacgaactacaccgtccccgcgcgattcgcctgtaacgtgtcgtcgccgtgcgacacgtacgtcgtgtaccggacgcagtcccccggctacctggacctcggcagcatctcggacctcttcggcacgagccaggcccggatcgccagcgccaacggtctcagctccgaggacggtgtgctgcagccaggccagccgctgctcgtgcccgtcaggtgcggctgcacgggcgcctggtccttcgccaacgccacgtaccccatccggcagggcgacaccttctacaacctcgccaggctctcctacgagaacctcaccgagtaccacctcatccacgacctcaacccgaggtcggagcccaccagcctacagatcgggcaggaggtcacggtgccgctcctctgccggtgcccgccggctcgcgctgtgcagagcttcatcacctacgtgtggcagccaggggacaccttgtcccaggtgagcaagctgatgaacgccaccgcggacgagatcgccgaggcgaacaacgtcacgagcagctccgtctcctccgcgtccgctgcggggctgccgatgctgatcccagttcagcagcggccgcgccttccgccgctgctctacgccgctagtgcgggcgagggcaggtcgtcccggtcgcgacgtcgggctctcatcatcataggcgccagcgtctcggggtctctcgtcgcgctcgctgccttgctcgtggcgatcatggcgcaacgaaggtaccgaagaaagaagccgtcgatgcgcctgggctcaccgttcgccgtgaacaccaagctttcttggtccgtgaaccagtacggccatggcagcagcaattccttcgctcacgtgatgaaaggtgggaagctgctcacgggcgtgtcgcagttcatcgacaagcctatcatcttcgtggaagaggagatcgtggaggccacgatgaaccttgacgagcggtgcaagatcggcagcacgtactaccgggcgaagctcgacggggaggtgtttgcggtgaagccagcgaaaggtgacgtgtcggcggagctgaggatgatgcagatggtcaaccacgccaacctgatcaagctggccggcatatccataggcgctgacggggactacgccttcctggtgtacgagttcgccgaaaaggcctcgctcgacaagtggctgtaccacaaccaccagaagccaccgtccgccctgctgccatcgtcgtcgtgcaccgtgccaaccaccctctcgtggggccagaggctcagcatcgcactggacgtcgcgaacggcctgctctacatgcacgagcacacgcagccgagcatggtgcacggcgacatccgcgcgcggaacatcctcctgacggcggatttcagggcgaagatatcgagcttctccctggccaagccagccacggccgacgccgccgcgacgagctccgacgtcttcgccttcgggctgctgctcctggagcttatgtccggcaggagggcgatggaggcgcgcatcggctccgagatcggcatgctgtggagggagatccgtgccgtgctggaagccggcgacaagagggaggcgaagctgaggaagtggatggaccccgctctgggaagcgagtaccagatggacgcggctcttagcctggccggcatggcgagggcctgcaccgacgaggacgcggcgcggcggccgaacatgaccgaggtcgtgttcagcctctccatgctggcgcagccgttgtcagtggctgacgggttcgagaagctgtggcaacccagttcggaggacaacatccggattgccggctcggtggcagctcgataa

SEQ ID NO: 156566 - DNA, 128 bp, Zea Mays
atgtgtttccccgtttcgtcgtttttcggttctcctttgcctttgtctcccttttcttttctttgggggttgagctctgaggttttcatatgggtttcatctctagcctaccccaacgtgcttgggac

SEQ ID NO: 156567 - DNA, 1016 bp, Zea Mays
tcgatgtaacaggctgaagaacgctacatctttattcagtagctatataatcacaagaagcaaaggcagcacacaggctctcgatcacaagataacaatacacgctccctccagagagaaattgctaaagcgcaagaccacacgggacatctgtgacggcgctgcgtcatgggttaaacactggtcgcaatcgccactactaggcatcgggcttcatctcccgcttgatggccgccaccagctggctgtaggcctcggcccaggctttcttcatctcgaggctccacatgtcagcggggagcgcctccttgatcgtctcaagcagcgcgaaccccgtcacctgtatgtattcaagcgcgtgtttcaatctcaatgctttcgttcttgctgcctttccaagccagagtcaggaatagaggtgaattgacatgttgggcgggcggttttgacttgcctcgaagtgtccatctgcgacgccgtacctcaagtgcgtggcgcccagcctcttgagcgtggtctccctcacggtgaccttcccggccttgcgaagctgcgccgccgcctcgcaggtctgcagcagcattgacaatgacagcgagagacacacagtcctgtcagtcagtcctttttgccgctcgatcatcacatctcgatcgatcgatcgatgctagctagcgtgggagctagcatgagaacgtacgtaccatgacgaagacggacatggcgtgcgtcttgagcttggggttcttctccagcggcacgtcggagtcgcgcaggaacgagaacatctgcttcgccgacggcgcgatctcgaagaccctgcgaaagaagcggaggcccaggttggcggcgtccttcttcatgacggcccacgacttgagcaccagcgcctcctgctcctcgccgaagaccaccgcgccgtcgtcggcctccgcgagtgccatgcctgctgtctgctgatcgggcttgtcaagcaggagtcgacgggtcgtgctcgtttccgaacatcgacggga

SEQ ID NO: 156568 - DNA, 2380 bp, Zea Mays
gaacagaatagtaggagcactgtatatttcaccatcagcactgtagctggatcggctcacatccacaacaggccacggcgcacgcggaacacacgtagcagtaccacgtggtccacggccctctctggctcgctcgccgcgccgcgccgggctatttgtaccctcgcccgcccttgcgttacccaacaacgcctcctccagtccttcttcgtaagccttcaaaccgacgaatttgagcaactgcacccagagcgcgatccattgccggggaagaagcaacttgttgcgagcctcctctatggcgagctccgaccatggttccaccaccgcccccaaggacgtgccgggcagctacggcctgccgctggtgggcgccgtgcgcgaccgcctcgacttctactacttccaggggcaggacaagtacttcgagtcccgcgtggagcgctacggctccaccgtggtgcgcatgaacgtgccgccgggccccttcatggcgcgcgacccgcgggtggtggcggtcctggacgccaagagcttccccgtgctcttcgacatggacaaggtggagaagaaggacctgttcacgggcacctacatgccgtccacctccctcaccggcggctaccgcgtctgctcgtacctggacccctccgagcccacccacaccaaggtgaagcagctgctcttctccctcctgctctcccgcaaggacgacgtgatccccaccttccgctccaacttctcctcgctcctcgccaccgtggaggcggagctggccaagggcggcaaggccgagttcaacaagctcaacgacgtgacctccttcgacttcatcggcgaggcctacttcggcgtgcgcccctcggcgaccgagctcggcaagggcgggccgagcaaggcggccaagtggctcatctggcagctccacccgctggtcacgctcggcctccccatggtcctggaggagccgctgctccacacgttccacctcccgcctttcctcgtcaagggcgactacagggcgctgtacaagtacttctccacggtggcgaagcaggcgctggacaccgccgagggcctgggcctgtcgcgcgaggaggcctgccacaacctcctcttcgccaccaccttcaacagctacggcggcctcaaggtgctgttcccgggcctgctggccaacgtggccagcggcggcgagaagctccacgagcggctggtggccgagatccgcggcgccgtggccgacgccggcggcaaggtcaccctcgcggcggtggagaggatggagctggccaagtcggtggtgtgggagtcgctgcgcctggacccgcccgtcaagttccagtacgggcacgccaagaaggacctgctggtggagagccacgacgcggtgttccaggtgaggaaaggcgagatgctgttcggctaccagccgtgcgccaccaaggacccccgcgtgttcggcgacacggccggggacttcgtgcccgaccgcttcctcggcgaggagggcagcaagctgctgcagtacgtgtactggtccaacggccgcgagaccgacaaccccagcgtcgacaacaagcagtgccccgggaagaacttcgtggtgctcgtcggcaggctcctcctcgtcgagctcttcctccgctacgacacattcaccgccgaggtcggcaaggagctgctcggcaccagcgtcatcttcaccggtgtcacgaaagctacctccggtccgggcagcgagtaaaccgcccggccggcgcgcgtcgttggatatatgatgagtggacgtgacagagtgtccgactatttcttaatttcgtcattttcctccttccttctaataagatttctctctcaccctcggccccccttcacgtgcgattgtaggtgtttgacgcttttgtaataatgcatgctggcatgttgcataaattgctccccaaaaaaatcttatctttcacaagaaatctataatcccttagcagccttgcctttcatacttttcaagcccgtggacttgattggcttactactaccaccaaactgatgagcaacgacttcacgacgatctagactctagagtatatataggggacctttaccgtctgcagactgccttctctcgcgacctacgtggccacgtgggctccagggaaacgacgccctacatacgtgcatgcacgactttttttgtgtgtgtgcgtgtgcgtgtggctggctgtgtgcaaattggatccggcgaggcacgccgtgaaaacacgcaagtgcacgtccatacgcacgtgcgggtgcaccttaacgtcaagctaaggccactcgtgcttgtacatttaccacagagatcatgcatgagggcatgtacagtggtgtttaatgt

SEQ ID NO: 156569 - DNA, 1689 bp, Zea Mays
atgggccaggaggttgctacaagctatgtaaacaacctgcgctctatgatcgaagtacatattcgtgcccttgtcgataaagaagttgacaacattcttaggaaatgtggactgtcaaataagatgccatacataaaggagtacggtagcaaggttgatgcaagaaggttcctttgcctgaatttgagcaactgcagggttccaaggttacgttcaaatgcctgctatggtttggcaagagctctagcagaatcttataacaattatcctgacccaagttttaagtttcttaaaattagacagtcggtaccaactaaaataggcgggcactcactatatcgatttgatggcgttcctccggtcccccaccatcgcgttggcatcttcgcagatttccgtatcaactcgagttgttcgtcttcggttccaagatcaagtgcaaccaagatggattcagcagactccatagccgacaagacaattggaaggatgcaagagattgcggacaagctattttccgtagcccgggaaacaatccgtccaggacgcgggttgacctcatttgacgccaccaaacttcgtgtagcattggaggacatagcttgcatgcttgagcaagactctctgctgttgcaagagaatttggacaacgtgaacaacgttaacaacccgggtgacagcagctacgaaccgtcagccttgtcctcaccacccccagctgacgactaccttactccagattgggactttgcggagcactttgaaaacttctggggtctagaatatgactcggaccagatgccttcgtttagtgacaatgagatggacaagtctggcaaagtgattgcaaagtgggatagtagagcaacaaaaatttacacagaaatttgtgtagaagaggtcaatgcacggaacatgccacaacaatttctaaatgccgaagggtattctaacctcataagaaagtttaaggaacgcactggtcgcacttacaccagggatcaaatgaagaataggtgggacaccttaaagagaatgttcacacagtggaaaactcttaatgaaagggctacaggtcttggtcgagaccctcatactggttcaatcagtgctccagatgagtggaaataccatgttgctgtaggcaatgccagggtgtattatgttcaaaacagccccctagagaatgaggacgagctaaaggttatgtttggacccattgtctgcacaaatcaaacaacccttgttcctggcgtcgaggatgcaaattcatcatctgatgatcatgtcgaagccactttaggtgggggtgaaaacagcacacctgatccatgctcaaatgcgactaggaagcgtaaggtgcgtcatgattctccaaaaccaaagaagaaaaaagatacgagggaagagtacatgaaacgcctagtcgaggcttttgagtcgcgttcaatgaccactaacaagtccatcacctctgctgagaccgaccctgtccgtgttgaggttaatgcgcagttgcaacaagtgatcgatgatggtgcacctgaaggcaacgacctacatttgtttgccactcatctgttgattgagaaaaagtttagagatgtatttgcaacactgaagaccaaagaaggaaggaacgcttggctgcacagtgctttcgagatacatgttaaaaagtcgacttag

SEQ ID NO: 156570 - DNA, 924 bp, Zea Mays
cgagctgctctatccgtgctggttctctcgagcgcctctccggtctccactcctccctctctctctgatccttaaacccgattcgccagcttcgtcgtcgccgaccaggccgacgtcgggcccggcgcgctgctgttggactgcctcagcccgcgctaccacggcacccgggcggcggtgagcgcgcatgcaggcacgcacactacgccgtcgtcgacctcgcgctcgacacgctcgccgccgcacgctccttcggagtggaggagctcctgctgctcacccagtacatggacaaatctcgaagagggaagcattcgattcgaccaaaggcttaggcaaactgtgccactgtcatcagacggtcagagtgtgtgaagtggagggatgttatcgttccctatggcaagccagtgccatcatcagttacgagctctgaactcctgcacaatcactacaacgtctacaacgcatcccaggtccatcgtatgaactgcagaaaaggatttaccttcctggcaacccacaagtacctgggtttatccttcttaatctgagttattaaaacctgaccgagtttgggcgcctccccgcactccacggagcttcagccagcgcgcgtgcgacccttggcgactgctcaaattgggcaaacttttagaaatgaggtttgtgttttctatcacatttctacaaatggctactactaattgctgtgttatatgacattccactcaattatggcatgtctcggtcgctgcttattcagtgcctcaaaggttaaaacttactgacaatttttttctttccaatttgatatattccttttgttcttttgtttatatatgcttgttaccctggatggaattgtaagctattacactactgctatttacagagaactgttaataatgagacacttggtca

SEQ ID NO: 156571 - DNA, 1203 bp, Zea Mays
cgagctgctctatccgtgctggttctctcgagcgcctctccggtctccactcctccctctctctctgatccttaaacccgattcgccagcttcgtcgtcgccgaccaggccgacgtcgggcccggcgcgctgctgttggactgcctcagcccgcgctaccagtccggcggcacccgggcggcggtgagcgcgcatgcaggcacgcacactacgccgtcgtcgacctcgcgctcgacacgctcgccgccgcacgctccttcggagtggaggagctcctgctgctcacccaggtaaccataccagaccaaccaattcaagcgtctccctcctccctcccaactacaatccttgacatgctggtttcttctcgaggtaatcctattcttcctcctctcatctggatgaaagataaataagaaataaataaataaataaaatggacaaaacggttgggaaaacaacatcgatttcttgcttccagtttattttttatgtctgctacttgagggaattgtccatgtttatgatctcgtggcagtttgccattgatgcttgttgctgtagtacatggacaaatctcgaagagggaagcattcgattcgaccaaaggcttaggcaaactgtgccactgtcatcagacggtcagagtgtgtgaagtggagggatgttatcgttccctatggcaagccagtgccatcatcagttacgagctctgaactcctgcacaatcactacaacgtctacaacgcatcccaggtccatcgtatgaactgcagaaaaggatttaccttcctggcaacccacaagtacctgggtttatccttcttaatctgagttattaaaacctgaccgagtttgggcgcctccccgcactccacggagcttcagccagcgcgcgtgcgacccttggcgactgctcaaattgggcaaacttttagaaatgaggtttgtgttttctatcacatttctacaaatggctactactaattgctgtgttatatgacattccactcaattatggcatgtctcggtcgctgcttattcagtgcctcaaaggttaaaacttactgacaatttttttctttccaatttgatatattccttttgttcttttgtttatatatgcttgttaccctggatggaattgtaagctattacactactgctatttacagagaactgttaataatgagacacttggtc

SEQ ID NO: 156572 - DNA, 2193 bp, Zea Mays
atgctaactgtcatggagcatggtgaaaagctctctggaatggcacaccttagggagttacaaaacacacttattcagcatggctcaagcacccatttttcacctcagtcgaaaacccaaggtactggtgccctttggaaccttattcagttggttggtgagaaagctcgaagaaacatggttcttttaatggatcgtgataatgctgaagtgttctacagtagggtttctgatatagaggatctattttattgtttatctcatgaacttcaatacatcattagtagagaagaacacccttctgttcagatgcaacgtgcacttgagttagcaaatgcttgtatcaccatagttcaggcagcatcacactacaagaaggatcacaaggaatggtatccatctcctgaaggactgataacatggaacagccaacctgttctacggtctggaatctggaatttggcatccttgattatggagcttttgggagaatcaggagctgcagacatgtcaatgaaatccagtctatggtctcagctggaaggacttacagatattctactggaggcatatatgtgccttttaactgcccaatttgaacgtgggcaggaacatggtgtgctagtgcaagaatattgtgaacgaagagatgaacttctcagatccctctacaaccttgctaaacaaatagtggaggccaaataccaggagtcaagaaatggtgcggacaagccagatctgaaggaatctatacttagagaggttatttctcctattttagcgacagccaaacgacatgaagggtaccaaacactgtggcagatttgctatgatctagatgattcaggtctcctccgcagcctaatgcatgatagcgtagggcctcatgggggattcagtttctttgtctttaaggagttagtcaacagaggagactactctaatctgttaaggctaggtgaagaattccaggaagagcttgcaagctttctgaaagagcggagtgatctgctgtgggttcatgagatatgcttaaaccagttctcatctgcttccgacacccttcatacctatgctctgcgtcgtagtcctgatggagatgccagcttcacaaccagcagaaagccactatcctttgctgaaagaagacgtcttctttatctctctaaaattgctgcaacagcaggtaaggacattgattatgaagtgaaggttgcacggatagaagcggacattcggattctaaaactgcaggaagaaattgttcagcatgatccagaatatgcacaagtcaaatctacaaacacattgcttggtccatcagaactgattgagatgtgcttgaggagagaccgagagctctcccttaaagcctttgaagtatttgctttgacaagctcatcgttccgaagttccaacagaggccttctagaggcatgctggatgaatgcaactgaccaagatgattgggtaaagctttcagaggcatccatgtcagaaggttggagtgacgaggtcatcgaagaatctcttcaagcaactgtcctcttcaaagcttccaggttgtgttacagcccggatgctgtggtgtatgacggcacctttgaggatgttctgcctgtgaagaaagaggatgtacatctgagaggtttggagagtaaatgtttgtcagttgaagaagtgttgatgcagcacgaggattttccagatgctggtaaattgatgatgactgcagtgattaggggcaaggaaccaatttttacagccacagaacccgtggagatggactcatgaatacccgttttagatttctatatgatagactgccaccatatcgcagtcatttcattgtaattcatccatcgggtagtttcatcatcgtaaaaatcttgtcttagcgacaaggggtctgtactctgtagttttggttgtttctgttctgcgcagtcacagaaacttgattccgtagcacaagaatcagttcacgccgggttttagcatgagctatatcttctaatggttagtttggaaattagcaggaaatttgctcatttttctcgcagggaatcctggggatttaaatttccaaactagcttttgagtttttttaaggaaaatgccttctgtgttaatcagcttagagtaaagtacatttctggttctggtagaggtgtcaattctgcctataaattt

SEQ ID NO: 156573 - DNA, 1556 bp, Zea Mays
aaatactctagtactaaaaccctaacccaccccccaccgcccaccggagagagcgctgatagccagaagtctggtcggagaaggcaacgtcctagcagactagccatcgcgctccgccgccgaagatgttctctccggcaatcaggaggccccacctccctaaccgcagggacatggcggaggaattccaatcacctcctcctgctgctcccgcccattccctatcgcctcgcggattcgccgtgcccgaccgccctgccaccggcactccggccccatggaactcctccctcctcactaggatttcgacgtcgaaacgagctgacaggactggtgattcggaccagatccaaccagtgcacgtagcagattttcccagagttgttcggaatgcccaagccagcctgaagaatttctctggcaagaacatgcttgctggtggcattgataaagaaacatcccttgcgtggatgatatgcggaaatgagctttttatatggaactacttagtttctgttgcaaaagactgtattgtacttgacattccatcttctctcatcggatacaatgatgtgaaacccctcctcagtattcagtggacagtttgtataatgagatggcacaatagtggtgcatcaacaaggaacagtggagagatgttacatagaaaaagttcaactggcgtgattctctgcaacaaaagaacacaagctgttgcttattggcctgatatcagtgctgaatctagtaggagcccagttcttagttcatcagaccatggtgaggtgtccacatgtggtgctgcatctgattttctgaggtttaattcgcttattgcggctgcagttccaggatgtattcacgagtgcattgcaatagcttctgagcctgcaggtgctttgtggctgttccagtgttcaccggaaggaattcgtcaaagaaaagttcatgcagatacattaggagatggtgggtctgatctttatcagaaatgtgatggtggaaggtccttggtttggttaccaagtaatgtctcatctgagggttctgaccggaagttctttttattgacaaataatgaggtgcaatgttggagcatctcactcttgcatgacatcaatgtaaaaaagttagggtctcacgaaattgttggtactgacggagatgtgggcattaagaaagatatagctggacagaaaaacatatggcttttggacatgcagatagatgagcatgggaaggaatttagcattcttgttgctacattatgcaaagatagggttagtgggtcaaactacactcaatattctcttctaacaatgatgtacaaacctaaccagaagttttcatctgaagataatgtagctaaagttgaaaggtttttggagaaaaaagctccctctcaggtgataattcctaaggctagggtagaggatgataaattcttgttctccatgaggctaaaaactggtggtgatggaacagcaacagtggccatgtattggagaggttccacccgactttatcagtttgatctgccttgggatgctgaaaag

SEQ ID NO: 156574 - DNA, 291 bp, Zea Mays
tggaaatccaacaaaggttgcacgcataaaaacttgcttcttactggcgttgcggcgatgttttggtcgatttggctttgccgtaatgatgtggtgtttaatcataaatctataccgtcaattatacagactatcttcagggacacacactggttcagattttggagactattgcagaaagaagaaacacagcagcaaatcctcgtcgtgtgccagtctttggaggatgtggccatggagttctttgcgagtcacaggtggcggttccatgcaagaattaaagaggcttag

SEQ ID NO: 156575 - DNA, 1651 bp, Zea Mays
ataatatcgtgacatcgtctgtccgccaccgggtatctctttctccgggtagtgcaccagcggaacggcgaggtgcagtcgtgcagacgggaacggggatgggaagcacaggggcgctgctttggcacccgtcgccgcaggtgcactccggtggcgtcctcttccgccagagccggcgcatcgtacgccagcgcaacttgcctctattatcgctagctgacgcggcgcttgagcccgagcgccgccgcgggcagcgcctccgctgcgctgccggcgacggggacggcgggccccgggaggctcagaaggagtctccgagcggcatcggcgcagcactcgaggatccgtctccaggacctcctgtggaaaacggttccttcagaagcccctcacaggaagaacagagtgctctgtataattttctctatccaagcaaagacttacttccagatgataaggagatgagtatatttgatcatctggaggagcttcgcgagaggattttcatctcagttttggctgttggggctgcgatactaggctgttttgctttttcaaaagatctggttctttttctagaggcaccagtgactgttcagggtgttcggtttttgcagctctcgcctggggaatttttctttacaacattaaagcaatgtacaatgcacttgaacaagccctttcttacttcatggttctagcgatgtgtaatcaatccggaggtaattgtggttccacatggtgtgcagcgggtgcatcagtgcatgtatctgaggttgtgtgactttttatcatatttgtccaaactacatccgctggtagtcctaaagaccaaacagatggaaatcttctcagttctcacacatgattggaaagcttaactgcaaagtccatatacctaggtttcaggttattgtggccttttacttggaagtcctatcattttatatgagatcattgcatttgttatcccaggtttaacaagggatgagcggaaatttctcgggcctattgtgttgggttcttctgttctattctacctaggcattttcttctcctacacggttctcagccctgctgcgttgaacttctttgtgaattatgcagatggggcagtggaatcgttgtggtcaatagaccagtacttcgaattcatacttgtgctgatgtttagcacagggttgtcctttcaggtccctgttatccagcttctgctaggacaacttggattggtttctagtgaccaaatgctttcgatctggagatatgttgttgttggcgctgtcgtcgctgctgctgtgcttacaccttcgacggatccgttgacacaaatgttgttggctggtcctttgcttggtttgtacttgggtggcgcatggatggtcaagctaactgggcgataagtgagtggttcatgcaaggcaatgatgctccgggaagcaagagcgccactgtaacctagtcttgtaaaaatgaattcactctgttcatcagatgatattgttaccatttctctttctgaagttcatgagcagtagaaaatagaggaaacggttagttagtttcatctacagatcttgaagtaacaaatgaatgcgttgtggtacagcccgaattaatcattgttgaatagactataagatgcaagttc

SEQ ID NO: 156576 - DNA, 1382 bp, Zea Mays
ataatatcgtgacatcgtctgtccgccaccgggtatctctttctccgggtagtgcaccagcggaacggcgaggtgcagtcgtgcagacgggaacggggatgggaagcacaggggcgctgctttggcacccgtcgccgcaggtgcactccggtggcgtcctcttccgccagagccggcgcatcgtacgccagcgcaacttgcctctattatcgctagctgacgcggcgcttgagcccgagcgccgccgcgggcagcgcctccgctgcgctgccggcgacggggacggcgggccccgggaggctcagaaggagtctccgagcggcatcggcgcagcactcgaggatccgtctccaggacctcctgtggaaaacggttccttcagaagcccctcacaggaagaacagagtgctctgtataattttctctatccaagcaaagacttacttccagatgataaggagatgagtatatttgatcatctggaggagcttcgcgagaggattttcatctcagttttggctgttggggctgcgatactaggctgttttgctttttcaaaagatctggttctttttctagaggcaccagtgactgttcagggtgttcggtttttgcagctctcgcctggggaatttttctttacaacattaaaggtttcaggttattgtggccttttacttggaagtcctatcattttatatgagatcattgcatttgttatcccaggtttaacaagggatgagcggaaatttctcgggcctattgtgttgggttcttctgttctattctacctaggcattttcttctcctacacggttctcagccctgctgcgttgaacttctttgtgaattatgcagatggggcagtggaatcgttgtggtcaatagaccagtacttcgaattcatacttgtgctgatgtttagcacagggttgtcctttcaggtccctgttatccagcttctgctaggacaacttggattggtttctagtgaccaaatgctttcgatctggagatatgttgttgttggcgctgtcgtcgctgctgctgtgcttacaccttcgacggatccgttgacacaaatgttgttggctggtcctttgcttggtttgtacttgggtggcgcatggatggtcaagctaactgggcgataagtgagtggttcatgcaaggcaatgatgctccgggaagcaagagcgccactgtaacctagtcttgtaaaaatgaattcactctgttcatcagatgatattgttaccatttctctttctgaagttcatgagcagtagaaaatagaggaaacggttagttagtttcatctacagatcttgaagtaacaaatgaatgcgttgtggtacagcccgaattaatcattgttgaat

SEQ ID NO: 156577 - DNA, 1222 bp, Zea Mays
ataatatcgtgacatcgtctgtccgccaccgggtatctctttctccgggtagtgcaccagcggaacggcgaggtgcagtcgtgcagacgggaacggggatgggaagcacaggggcgctgctttggcacccgtcgccgcaggtgcactccggtggcgtcctcttccgccagagccggcgcatcgtacgccagcgcaacttgcctctattatcgctagctgacgcggcgcttgagcccgagcgccgccgcgggcagcgcctccgctgcgctgccggcgacggggacggcgggccccgggaggctcagaaggagtctccgagcggcatcggcgcagcactcgaggatccgtctccaggacctcctgtggaaaacggttccttcagaagcccctcacaggaagaacagagtgctctgtataattttctctatccaagcaaagacttacttccagatgataaggagatgagtatatttgatcatctggaggagcttcgcgagaggattttcatctcagttttggctgttggggctgcgatactaggctgttttgctttttcaaaagatctggttctttttctagaggcaccagtgactgttcagggtgttcggtttttgcagctctcgcctggggaatttttctttacaacattaaaggtttcaggttattgtggccttttacttggaagtcctatcattttatatgagatcattgcatttgttatcccagatggggcagtggaatcgttgtggtcaatagaccagtacttcgaattcatacttgtgctgatgtttagcacagggttgtcctttcaggtccctgttatccagcttctgctaggacaacttggattggtttctagtgaccaaatgctttcgatctggagatatgttgttgttggcgctgtcgtcgctgctgctgtgcttacaccttcgacggatccgttgacacaaatgttgttggctggtcctttgcttggtttgtacttgggtggcgcatggatggtcaagctaactgggcgataagtgagtggttcatgcaaggcaatgatgctccgggaagcaagagcgccactgtaacctagtcttgtaaaaatgaattcactctgttcatcagatgatattgttaccatttctctttctgaagttcatgagcagtagaaaatagaggaaacggttagttagtttcatctacagatcttgaagtaacaaatgaatgcgttgtg

SEQ ID NO: 156578 - DNA, 1076 bp, Zea Mays
gcaagcacggtgtaactaactgtaaattcaaaatactatgttgatatgaccattctggaccctggatggctatgtaactaactcttgttttggtaagttgtaagcatggcatggagtagaagccaatctcccaaaatgtagaagctggtccctaggctacgtcttcatcctccactatgcaggtgacaatatcgaggctgccacaaccacacaaccataataatgttcagttggacatagacacacaacgagtgtgtcatgtttcatgcccattaatggtgttccattaggaatgaaaataattagtcatcatcttaaaataacttgaaagatcctagacaatattttcaacctctgtcctgtttgaaatcaagttgtagtaatcagcaggctggagctcataaaagttgtcatctttcactgcaagaacgatgctttaatgtcactgtagaactagaataaatacaaggcagatttggtaaagacaaaaaaatgacatttaggtaccatgatctgcactaggcaactttctggattgtagagcaaagttcttacttgaaaaaaacttgaatctcatgtccaagttcatctgactcctgggattttccaaagaaaacacatttacacgttgtattgcatcaacctatccgactggtggagaattcagaatacaacggtttaataaaaaaggaagtatgatcattattcccaaaacatgaacagtttcaaaaccaatagtatttggatgtgggaaaaatcacatccgttgcttgcaataattatttgtatgcatccacaattcagtcaaattctaattatcacatgtaggctaatttccaacactaaactacctcaaaatgtgtcagagattcattttttgattcttcatcaatagcctccttaccctcatcaaaaagatcactcaacagtcgtcctggaacagggcatccatcatttcaaacataaatctgttcacgtatagttagccccatgaagttagcagatattaaggccttagaaaattctgatgaatactaaagtgacaaaaccatgacacactaatataaataggaaat

SEQ ID NO: 156579 - DNA, 340 bp, Zea Mays
gtatttattcaatgactaaccagcaaaataaacagttatgcagtagtagtagtgactaaccaacaaaataaacatttatacagtactagaataaacattcatatcccggcaaacaaaaataaacatttatgcagtaaacaaaaaaccaatttagcgtaagtagatcaccaatttagcgtaagtagatcttaacatgcctggtaagacgtcggcacacgatgatgataaagaaaatgtacccaatggtaatacaaatttgcaagtcaaggaaacacacaatgacgaagacgatggaactggatctgatgggtttgaactgatagatgtgaaggaaaaattt

SEQ ID NO: 156580 - DNA, 1364 bp, Zea Mays
cgtaaccctaactaccaccacctcctccggcggcctctcggcgacagcagagaccttaaggaaggatgggccacaggaagagaaagacgggcgaccgtcatggaagggtcaagccatcagtggagctggaaggaagcgaagatccggatcagattcagatgggggatctagagatcgtgtgcggcggtgacggcgatccgctgatgcaagaaacagaacatctcgacccgacgaggatcgtcagcgatgagttgtatgaaggccaggtctgatctgcctaccttgtggcatgccactgggattggtctaggaattccatgccctacgtcgtgtacaagatgggcgtcgccacttcctttccttcgcgggtgaagcggaagagcctgcaccgagttacccgtctgaccaccgttgctggcggtatgaccttcacgtccctacggtcagtgcaccgcgcgtggatcattagggtcgggggtgatccgggtgacaccgtcatcttcgacaccaagacgaagaaggtcattcacgggccgactctcaattctacaaagtggtgccctgtcctaacaacaatgggggacaaggtttatgctctgtgcaagactctctgctggttcacagaccccgatttcccaccctggttcgaggtactcgatctttccaaagccaaagttgtcattgttgacgaccgctcccacctggagggatgctcctggattgagctaccacatccaccttgcttcccttggaagattaccccatttgtttataccatgctgccagttgtacttatcacgtcttatgtggtggtcgacacctacatactggtatcattcaatcaactttggggcacatatgcatttgacaccaattcagtcgagtggcacaaaattgacaccaaggggctaccattcgttggtcgcgccaccccacatggctctttattccttggcttgtcagagggaaatggatccatcaatgcttattgcatcagtgtcactactactgacaatgatcgtgctcctaacttatccatcactatgctcccggtgaaatacatggataatgaaattgatgcagggccctgcttcttttccttggaggatggatgcttttgttcgttcagtttttcgcttgataaatgcagttggactcttcatcccaagaagctcgaattgtttccaaaggagacacatttaaacctgagaacatatcagacagagaatctttcatccctggaggttccagaggaaacattgttggctgtgaagccgaagattgcagtccacagccattgggagtagaccttcaagatttagtgttcatcccatgggttcagtcaatttgcttccgtccttcta

SEQ ID NO: 156581 - DNA, 1209 bp, Zea Mays
atattaaattatgttaaatgctacaaaggttttgatggaaccggtcgtattgaaccgtgaaagagccgcaacggaccgcctaaaaaggatgcctatgtaagttattatataaaaatacagtattgtctatcaaagttatgaccgttatatttagtcgtatgtttaatatagcttcaggttgttcgacgactaccgtgatgaagatttttatgggctaccgcggaaatacagtattgtcgctcgggtagaagttaaattcccgattgaaccacgttttcgtgacagacaacatttcgttttatctgacatcaatgtaagccaacaattctttaagtttcattttcaaagttacacgatcttcataccatcgcctcttctcctactgaaatactattagggagccaagatcgaggccataacatatatgtatgagacagtcaaacatttcgataatttgctccatgaaaagcatgtttacaagatgcataatgtaaaattcagccttcatccgggtgaatttaattttcgtcatctaaatggttccatggaattgtatcttgaccaacaaactatcgtggagccatacacggttccaattcaaatggcgccattcccaaaacaaatacttttgaaccttgctgatgttgccgagttgccaaacaggactttagtcgacattatggctattgtagtccactttgatacaattcatcgcacaatgtggggccctttcagaaagattgttataatggatgctaggggatatttacatatcattaaagtttggggtgacctactaaacaaaaatgcactccgctgggtgttggctaaggaggattatggcataataattggtactatgtttagacggttcagaagacaagagtgcctcgagtcttcggatcataccgcaatacacttcaatctgttccatcacaacacccatcattttggaccaattcaaaaagctttggtggcgcggaacaaccgtcagtttgttgttacatttcttgaagaacaaaggcgtagatagattctacaaattcgcaaagagcaataattgggactatgtttaagcgtgttattgatcaaccaaaagcaacatgaggcaaacttgaatgtctatgaattttgtttgtaatacctatgacatgggtttaataagagatattttgtgaaatttttgatcgtgcaaatgattaataaata

SEQ ID NO: 156582 - DNA, 750 bp, Zea Mays
ctggatttgttggcacgccccgattcctacggtgaggacgacgcccctgacccgcccacagtcagaagaggagcgccattgacacgagaacaccgcaagggaagggcgctggcgagcaggcctcgatcatcattggcaccaatgcgcgtgggcgcgaagactgggctggcacggtgatgtggtcggttgggcagaatcggcccacaggcgtccacacaggcgctgttctgcccgccgcgagcacgccgcgatttctccacgcgcagcccccgcaatccgctgcctttccatccgcgcccgcaatcctttccatccacggctgcaatccgccgcgccaaatccaccgccacgcccctgcgcccgcaacgcccgcccctgcgccaaatcctccttggacgcgccccgacggctggcgcaaccctgctcgtgccacgacttgcgtagaatggaaggtatgtggcgcaactcctccttgattgagcggagaatggaaggtcaccgtacggcattggtcgagaggaggaggttgaggatggatgcccgcaacgccactgcgccaaccccgtgaaatccgcaacgcccgcccctgcgccaatggaaggtctgttgccaaatcccgcggatggaaggtggcggatgggaggtggcacgcaccttccatccccgcggtgcgcaccttcatcctccgcgaccgcccgcggatctccaaagcagcacggcgcacgtgttgagggcgtggggaggaggtgc

SEQ ID NO: 156583 - DNA, 513 bp, Zea Mays
gtctttgatgaatgtaatcctaggttggtcacaacccttagggtggctaaggaagaggcaatgctttggtccttgactggagccaaggccctgtctttcttccaggtagaagagaatgtaaatcttgctaaagtagttttaaggcttggtggtgggaacatggtggtgaatgcaattctgcgtgaacttgtattgttaaaggagacaaactctcttcctcttccaaagatagaaggtgatgatcgtgcccaatctcgtgctcttttcataatgtattcttatcatttttggatgctgagaaaatggatactattccatggaaaagatgaagctctaagattgattagttggaataacagtgatccccatttgtctaatgttttagccaatgttattatgtacggcaatgcctctgtgccttgttggatgattttatatacttttcttcatagggtgaacacatcaaaaggatatacaaggtctgaccttgtaaaacaattggaaagtttacat

SEQ ID NO: 156584 - DNA, 2538 bp, Zea Mays
atgagaagattctttttctttgggtcctccgctgcaaatgctggcgacgaaaacgggacaccgggcagtgatagcgggactacgcataaaaagacactggtggcagatgtgggcaacgaaagttctggttcctgcagcacaaggttgtcaagatccagaagccgtggtcaaaagcggaataaggaggaaccagccaatccgaagcagctcaggaggtccatgtcattctcgtctccggccacaaacacttgcttagacgaacgatgctttagtttctctggtgatgttccatgcactttgtatgatggatttgatgcacctcagaatgtcaaagatgttgcgtcaacaagactaagcaatctattaagcaagaatgaagtactagatcgatacattgatagagggcatgaagatgcaatggtaaatgagaaacagaggcagtatccctccgccgcatctatggtttctactttgggaaggccacctcgaccccaatcaacagtaccatccataccaaaatcaatgaaagggaatacagagtgctacccagatgtagacataaaagaagactgcctttggcaagttgctcaagagggtacaagagataactgcaagattacaactatgtgcgatgcaggtagaaaccacgtaagcatgccagatgcttttgagagagacagtgctacatctgttgtagatatttgtgaagatttgcaagaagtgagacctccaaatgttatttgcccctccgcttgggagcaagaaaccaatgacatgttgctgcaaagagctaaagaagttgagtcaaggttcattgttcattgtggagatgaatatgaattcaacattatcagagataagcgaatgagctcaaatgacatgtttcagttgatccagcagttgacagaagataggaaacagttaacgcatgaactgtcttcacatataagagcacacgttgcagaaagatctgctgccaaacagcaatacaaacaatcaaagaaagaactagataccagaactaggaggttggagaaggagaagagtgaaagacaaactacactggagagagagatggacagaaggtcacatgattggtctgtcaaactatcaagatttcaatctgaagaagagagactacatgaacgggtgagagaacttgcagagcagaatgtgtcatttcaaagagaagttgcctttcttgaagcaaataaggctgaagcttcaaccaaagttgctagtttggaattgcaaaacaacaaattaaatgacgatctagagaaacttagaaacgagcatgagaagctccataattcctcagtagataaggatgctcgttttgctgaggttgttgaggaaagggaccacaccagggaatacttgaaggacaaggagggagagaacaaagcattgcacaaagtgattgccagactacaaacaacatgtaatgaacaggaaagagcaatcacaagtctaagacagggatgcaaagctcaattagacaagaaatttgttgagtgtgacagtgataaaatgaggaaattgcgaatggaactgattagactgacaggggtggagcaaaagttgagatgtgaaattcgttcttgtcatcttgaagttgggtccctcagacaagagaacattgcactcttaaatcgtttacaagttgttggaaatggagcacccttctcaattcgccttgaccaagagcttcaggctagagtggacaacctgcaggtgcaaggcttgtcattgcttaataagaccagccaactttgcaccaaattgttggatttgatgaaacacaagaaacttgaaaatgagtctttcagtggcaatgatgtgttgatagtcagtaattacacttttgagtaccaaagcatcaaaggaggaattgaaagtttgaagcgaagtttgaagacaataaattctgtactgaatgaaaagcaaagtgtaaaagaaaaatctggtgagactgcagctagaggtagttcttccagggagcaaacggatgattttggactcaagctgaaagaagaggctatgctcagtagagtattaaaggaggcactcttgtcaaaggaacttgacaatgggcaattggagtctgatctgtcatcttcacttcgtatccaagatgttatgagaaatgagacccagagagttcaggatgaactttcttgcatcacccacaaggctaagcagttagagcttcaggtatccaagaaggatgaagcgatcaatgagctccaacaggacttgcaggaatctgccaaggagcttgcgtctctacgcggaacactgaaaacagtgactgaggagagggacctttcctggcaggaatccaagcagctcagacgaaacatcaacatcatgcagaacgaggtcgtgtcactgaagaagaagattgaagccttggacgaagacatactcctcaaggaagggcagataacaatactgcaggatagcatcgacaagccgttcgacatcatttgcagccctaggtccatgagagagtttgacatggagtgaagagtg

SEQ ID NO: 156585 - DNA, 1840 bp, Zea Mays
ccgtactgtactgctcgtcgtcaaatcaaaggaaaattgaacgaaagcagcccaaccaaaatcccctcgccgcatctccccttcctgttcccgtgttccgttccgtcccgtccctgctcgacttctcgcgtcccgacgtcgcctcaatctcgaagcctctccggcgcagccgccgcaatctcgactccaaggcctctccgaccaaaattcatctagggttttcgcttcgtccgtcgcgatgggctccaagaagcggtcgccccagcatcccgcgtccccagccggcggagaggtcggtgctcaggcggcggggaaggccacgccggtgacggcggcgccggaaacggcgcccgtggcggtggtgccgaagcctcccgacgtggcgccattcctgaccaaggtctacgacatggtctccgacccggccaccgacgcggtcatctcctggagcgccggcggcggcagcttcgtgatctgggactcgcacgtttttgagcgcgacctgcttccgcgacacttcaagcacaaccacttcaccagcttcatacgccagctcaacacctacggatttcataaagttgatccagatagatgggaatgggccaatgaaggttttattaagggccaaaaacatcttctgaagaccatcaagagaaagaagaaatcctctcaggatgtacctagtgatctgcagtcggtgcctgtcaaaactgcacctggcactgagaatatcgagataggaaaatatggaggccttgaaaaggaggttgagacacttaagagggacaaggcccttctaatgcagcagcttgtagatttaaggcagtaccagcaaacatctagtcttgaagtgcagagtttaattcaacgcctccgtgtgatggaacagaaccagcagcagatgatggcacttttggcaatagttgtccacaatccggatttcctcaaccagctcgtgcagcagcagtgcaggagtaactggtggaatgatgatgggaacaggaaaagaaggttccaagctttggaacatggccctgtagatgattctgagacttctggtggaggcgcgcaaattattcaatattgtcctcctgttcctgaaacttccaatcaaccaacaccagcaaatgaagctttctgttcaagccctgtacaatcagtttcaagccatgcacttgagatgcccatggatgtagaaatggcttcaaacaatgttggtacacttgattcaactgggaatgattttactgacacctctgctctatgtgaatgggatgacatggatatatttggtggcggactagagcacatccttcaacagacagagcaagactttcaagtggaccctctaacaattgaagattacggttatgaccgtccatggttagagcaggactgccaggtagaagcgcaacagaattgcaaaaatcctcaatatgctgatgtcataactgaagcatgagcggtggtcccagagaattttgtccaataacggtcaagcattcatttgactccttaactatacaatagcttccttccaaaacacagtttctgcagatttgtggtgaacagaatcttgagactggcaggttagccaccattgggaacctgaagaccgggattgctcagaatttactatactgatactaaaaaaatacagtaactcatattggtaaggcataattcgtttttcgtattcgctcgatcaaggcaacaggacaagggttttgtttttgtcccaggtctcattgtcctagccacacccataacacaaggtagcattgctcatgttgtatagaatatcgtattggatgaatgaagcacttttgaactttttttt

SEQ ID NO: 156586 - DNA, 1831 bp, Zea Mays
ccgtactgtactgctcgtcgtcaaatcaaaggaaaattgaacgaaagcagcccaaccaaaatcccctcgccgcatctccccttcctgttcccgtgttccgttccgtcccgtccctgctcgacttctcgcgtcccgacgtcgcctcaatctcgaagcctctccggcgcagccgccgcaatctcgactccaaggcctctccgaccaaaattcatctagggttttcgcttcgtccgtcgcgatgggctccaagaagcggtcgccccagcatcccgcgtccccagccggcggagaggtcggtgctcaggcggcggggaaggccacgccggtgacggcggcgccggaaacggcgcccgtggcggtggtgccgaagcctcccgacgtggcgccattcctgaccaaggtctacgacatggtctccgacccggccaccgacgcggtcatctcctggagcgccggcggcggcagcttcgtgatctgggactcgcacgtttttgagcgcgacctgcttccgcgacacttcaagcacaaccacttcaccagcttcatacgccagctcaacacctacggatttcataaagttgatccagatagatgggaatgggccaatgaaggttttattaagggccaaaaacatcttctgaagaccatcaagagaaagaagaaatcctctcaggatgtacctagtgatctgcagtcggtgcctgtcaaaactgcacctggcactgagaatatcgagataggaaaatatggaggccttgaaaaggaggttgagacacttaagagggacaaggcccttctaatgcagcagcttgtagatttaaggcagtaccagcaaacatctagtcttgaagtgcagagtttaattcaacgcctccgtgtgatggaacagaaccagcagcagatgatggcacttttggcaatagttgtccacaatccggatttcctcaaccagctcgtgcagcagcagtgcaggagtaactggtggaatgatgatgggaacaggaaaagaaggttccaagctttggaacatggccctgtagatgattctgagacttctggtggaggcgcgcaaattattcaatattgtcctcctgttcctgaaacttccaatcaaccaacaccagcaaatgaagctttctgttcaagccctgtacaatcagtttcaagccatgcacttgagatgcccatggatgtagaaatggcttcaaacaatgttggtacacttgattcaactgggaatgattttactgacacctctgctctatgtgaatgggatgacatggatatatttggtggcggactagagcacatccttcaacagacagagcaagactttcaagtggaccctctaacaattgaagattacggttatgaccgtccatggttagagcaggactgccaggtagaagcgcaacagaattgcaaaaatcctcaatatgctgatgtcataactgaagcatgagcggtggtcccagagaattttgtccaataacggtcaagcattcatttgactccttaactatacaatagcttccttccaaaacacagatttgtggtgaacagaatcttgagactggcaggttagccaccattgggaacctgaagaccgggattgctcagaatttactatactgatactaaaaaaatacagtaactcatattggtaaggcataattcgtttttcgtattcgctcgatcaaggcaacaggacaagggttttgtttttgtcccaggtctcattgtcctagccacacccataacacaaggtagcattgctcatgttgtatagaatatcgtattggatgaatgaagcacttttgaactttttttt

SEQ ID NO: 156587 - DNA, 1771 bp, Zea Mays
ccgtactgtactgctcgtcgtcaaatcaaaggaaaattgaacgaaagcagcccaaccaaaatcccctcgccgcatctccccttcctgttcccgtgttccgttccgtcccgtccctgctcgacttctcgcgtcccgacgtcgcctcaatctcgaagcctctccggcgcagccgccgcaatctcgactccaaggcctctccgaccaaaattcatctagggttttcgcttcgtccgtcgcgatgggctccaagaagcggtcgccccagcatcccgcgtccccagccggcggagaggtcggtgctcaggcggcggggaaggccacgccggtgacggcggcgccggaaacggcgcccgtggcggtggtgccgaagcctcccgacgtggcgccattcctgaccaaggtctacgacatggtctccgacccggccaccgacgcggtcatctcctggagcgccggcggcggcagcttcgtgatctgggactcgcacgtttttgagcgcgacctgcttccgcgacacttcaagcacaaccacttcaccagcttcatacgccagctcaacacctacggatttcataaagttgatccagatagatgggaatgggccaatgaaggttttattaagggccaaaaacatcttctgaagaccatcaagagaaagaagaaatcctctcaggatgtacctagtgatctgcagtcggtgcctgtcaaaactgcacctggcactgagaatatcgagataggaaaatatggaggccttgaaaaggaggttgagacacttaagagggacaaggcccttctaatgcagcagcttgtagatttaaggcagtaccagcaaacatctagtcttgaagtgcagagtttaattcaacgcctccgtgtgatggaacagaaccagcagcagatgatggcacttttggcaatagttgtccacaatccggatttcctcaaccagctcgtgcagcagcagtgcaggagtaactggtggaatgatgatgggaacaggaaaagaaggttccaagctttggaacatggccctgtagatgattctgagacttctggtggaggcgcgcaaattattcaatattgtcctcctgttcctgaaacttccaatcaaccaacaccagcaaatgaagctttctgttcaagccctgtacaatcagtttcaagccatgcacttgagatgcccatggatgtagaaatggcttcaaacaatgttggtacacttgattcaactgggaatgattttactgacacctctgctctatgtgaatgggatgacatggatatatttggtggcggactagagcacatccttcaacagacagagcaagactttcaagtggaccctctaacaattgaagattacggttatgaccgtccatggttagagcaggactgccaggtagaagcgcaacagaattgcaaaaatcctcaatatgctgatgtcataactgaagcatgagcggtggtcccagagaattttgtccaataacatttgtggtgaacagaatcttgagactggcaggttagccaccattgggaacctgaagaccgggattgctcagaatttactatactgatactaaaaaaatacagtaactcatattggtaaggcataattcgtttttcgtattcgctcgatcaaggcaacaggacaagggttttgtttttgtcccaggtctcattgtcctagccacacccataacacaaggtagcattgctcatgttgtatagaatatcgtattggatgaatgaagcacttttgaacttt

SEQ ID NO: 156588 - DNA, 1919 bp, Zea Mays
ccgtactgtactgctcgtcgtcaaatcaaaggaaaattgaacgaaagcagcccaaccaaaatcccctcgccgcatctccccttcctgttcccgtgttccgttccgtcccgtccctgctcgacttctcgcgtcccgacgtcgcctcaatctcgaagcctctccggcgcagccgccgcaatctcgactccaaggcctctccgaccaaaattcatctagggttttcgcttcgtccgtcgcgatgggctccaagaagcggtcgccccagcatcccgcgtccccagccggcggagaggtcggtgctcaggcggcggggaaggccacgccggtgacggcggcgccggaaacggcgcccgtggcggtggtgccgaagcctcccgacgtggcgccattcctgaccaaggtctacgacatggtctccgacccggccaccgacgcggtcatctcctggagcgccggcggcggcagcttcgtgatctgggactcgcacgtttttgagcgcgacctgcttccgcgacacttcaagcacaaccacttcaccagcttcatacgccagctcaacacctacggatttcataaagttgatccagatagatgggaatgggccaatgaaggttttattaagggccaaaaacatcttctgaagaccatcaagagaaagaagaaatcctctcaggatgtacctagtgatctgcagtcggtgcctgtcaaaactgcacctggcactgagaatatcgagataggaaaatatggaggccttgaaaaggaggttgagacacttaagagggacaaggcccttctaatgcagcagcttgtagatttaaggcagtaccagcaaacatctagtcttgaagtgcagagtttaattcaacgcctccgtgtgatggaacagaaccagcagcagatgatggcacttttggcaatagttgtccacaatccggatttcctcaaccagctcgtgcagcagcagtgcaggagtaactggtggaatgatgatgggaacaggaaaagaaggttccaagctttggaacatggccctgtagatgattctgagacttctggtggaggcgcgcaaattattcaatattgtcctcctgttcctgaaacttccaatcaaccaacaccagcaaatgaagctttctgttcaagccctgtacaatcagtttcaagccatgcacttgagatgcccatggatgtagaaatggcttcaaacaatgttggtacacttgattcaactgggaatgattttactgacacctctgctctatgtgaatgggatgacatggatatatttggtggcggactagagcacatccttcaacagacagagcaagactttcaagtggaccctctaacaattgaagattacggttatgaccgtccatggttagagcaggactgccaggtagaagcgcaacagaattgcaaaaatcctcaatatgctgatgtcataactgaagcatgagcggtggtcccagagaattttgtccaataacgtaagtggatagaggtgctttgcaattaaaaagccctttgcgctttgttctattcatgaactttactattacttggcatgatcaaacacaaaccagggtcaagcattcatttgactccttaactatacaatagcttccttccaaaacacagatttgtggtgaacagaatcttgagactggcaggttagccaccattgggaacctgaagaccgggattgctcagaatttactatactgatactaaaaaaatacagtaactcatattggtaaggcataattcgtttttcgtattcgctcgatcaaggcaacaggacaagggttttgtttttgtcccaggtctcattgtcctagccacacccataacacaaggtagcattgctcatgttgtatagaatatcgtattggatgaatgaagcacttttgaac

SEQ ID NO: 156589 - DNA, 625 bp, Zea Mays
tttttttcggaattttccagcatgtgattttttcgcatcgcctgtacatctctggataaggattacttatttttgtattttttggacgctttaaaatttttttgggttagatggtgttggaagacagttgagattaacgatttggtctctcgaacgaatccaccattttctatgcacatgttatgtattagtaatatataataatagagagccgacagtctgtcttttccacacactagattttagggttttcctgtgaggctgtgaaaaaaccctttatgtaaggaaaaaatatttcatgagtaagcatgccgcgtcaactaaatcgagtggatattgtgaattgtgaactttgagtatgttaacttgtgatctttatgaacttgttatactgtgaacttgttatattgtgaacttgtgatctttgtaaactttttatattataaatttgtgatccttgtgaacttgttatatcatgaattgtgaacttgtggtatttgtgatgttttgtcaattttgttttattgtgaagtttgatatgtttaccgatcgtattttagatttcgaccgttaccggtgtattttccgcaccgaactttcgtttccgatgtttccgaaataccga

SEQ ID NO: 156590 - DNA, 219 bp, Zea Mays
atgtatgaagatattgggaacacacgagatgatcattgggctcagtctagtggtactacaccacaaattctggagggtgaaaccactcagaacaccgatgacaaggatggagactatgaggctaatgatgacaaggatgaagactatgaagaatgtgaagaggtttcacctacaactgctaaaggaaagtgtcatattttggatattgtgtcgtgctag

SEQ ID NO: 156591 - DNA, 2524 bp, Zea Mays
cgcccctacctggggcatctgcctctgaatcgcggcggctcccgaggcgccgcctggcgagcggctaggcgccggtctacggcgacgatggaggtgtgatttggacgggagagagcgtggtggtgaggtctcggttttctcgatataggagatggcggcggcaaaggcgcggggaggggagttccccgtgggcatgaaggtgctggttgtggacgacgacccgacgtgcctcgttgtgctcaagaggatgctccttgagtgccgatatgacgtgacaacatgtcctcaggctacaagagcactaactatgttgcgagagaataggcgtggttttgatgttataataagtgatgtccacatgccggatatggacggattcaggctacttgaacttgtaggccttgagatggaccttccagttatcatgatgtctgctgattcaagaacggatattgtaatgaacggaattaagcatggagcatgtgactatttaataaaacctgtcagaatggaggagctgaaaaacatctggcaacatgttattaggaaaaaatttaatgaaaacaaggaccatgagcattctggtagcctagatgacaccgatcgtaacagaccaaccaataatgataatgaatacgcttcctccgcgaatgatggaggtgatggcagctggaaatctcagagaaagaaaagagagaaagaagatgatgaaactgacctcgaaaatggtgatccttcttctacatcaaagaaaccaagagttgtttggtcagttgagcttcatcaacaatttgtgaatgcagtcaatcacctcgggatagacaaagctgtcccaaagaaaattttggaattgatgaatgtcccaggcttaaccagggaaaatgttgccagccatttgcagaaattcagactctacctgaagagaattgctcagcatcatgcaggaatacctcatccatttgttgcgcctgtatctagtgctaacgttgctccgttaggaggactggaattccaagctttggctgcttctggtcagatccctcctcaagctctggctgctttgcaggatgaactccttggtcgacctacaagcagtttggcgttgcctggaagggaccagtcatctttgcgagtggctgcaatcaaaggaaacaagcaccatgaagaaagagaaatagcatttggtcaacccatatacaagtgtcagaataatgcatatggtgcattccctcaaaacagcccagcagttggaggattgcaaccttttgcagcttggcccaataacaaagttggtatgactgattcaacaagcacattgggaaatgtgggcaattctcaaaatagcaatatgctattgcatgaattgcagcaacagccagacaccttgctgttaggaacccttcacaatattgatgccaaaccttctggtgtagttatgccatctcagtcgttaaatacattcccggctagtgagggtatctcacctaatcaaaatcccttgattataccatctcaacccccaagttttgtgtcatcaattcctccatccatgaaacatgaatctcttcttggattaccttcaacgtcaaccagtctgttgggcgggcttgatatggttaatcaagcttcaacaagtcaggctttgattagtagccatggaacaaatcttcctggtctcatgaaccgtagctcaaatgcaatcccttcaccaggaattagtaattttcaaagtggaaatattcattatgttgttaatcagaacgctatgggagttagctctaagccaccaggtgttctaaagaccgagagcactgactcactgagttgtagttatggctatattggtggtagcaccagtgtggactctggcttgttctcttctcagtccaaaaatccacagtatgatctactgcagaatcaaaatgatgttaacggcagctggtcgccttcacaagattttgatagttttggaaattctcttgggcaaggccaccctggtaccacttcatctaacttccagagttccgcccttgggaagttgcctgaccaaggacgagggagaaatcatgggtttgtcgggaaaggcacttgcattccaagccgctttgcagtggatgaggttgaatctccaactaacaacttgagccacagcattggaaacagtggagacatagtgaaccccgacatatttggatttagtggacatatgtgaaactttcttgaatttgtaagtagcgttgatcagtgagcactggaaacaaatctagtggtttgatgaatggttgctagtaatttcgtttcttcttcttttttcttctgtaattggtttataaagggaataatctatgtggcagcatgtggaatcttactttatagaagtttgttcagttcaaaggacttaaaattggtcagtcccttgtcatatagcttcttttctttgttctctttttctgtaattaccaattgtagcattatttttatgaccgtcgtaattcagcctagtcgatttattcccggccatata

SEQ ID NO: 156592 - DNA, 2516 bp, Zea Mays
cgcccctacctggggcatctgcctctgaatcgcggcggctcccgaggcgccgcctggcgagcggctaggcgccggtctacggcgacgatggaggtgtgatttggacgggagagagcgtggtggtgaggtctcggttttctcgatataggagatggcggcggcaaaggcgcggggaggggagttccccgtgggcatgaaggtgctggttgtggacgacgacccgacgtgcctcgttgtgctcaagaggatgctccttgagtgccgatatgacgtgacaacatgtcctcaggctacaagagcactaactatgttgcgagagaataggcgtggttttgatgttataataagtgatgtccacatgccggatatggacggattcaggctacttgaacttgtaggccttgagatggaccttccagttatcatgatgtctgctgattcaagaacggatattgtaatgaacggaattaagcatggagcatgtgactatttaataaaacctgtcagaatggaggagctgaaaaacatctggcaacatgttattaggaaaaaatttaatgaaaacaaggaccatgagcattctggtagcctagatgacaccgatcgtaacagaccaaccaataatgataatgaatacgcttcctccgcgaatgatggaggtgatggcagctggaaatctcagagaaagaaaagagagaaagaagatgatgaaactgacctcgaaaatggtgatccttcttctacatcaaagaaaccaagagttgtttggtcagttgagcttcatcaacaatttgtgaatgcagtcaatcacctcgggatagacaaagctgtcccaaagaaaattttggaattgatgaatgtcccaggcttaaccagggaaaatgttgccagccatttgcagaaattcagactctacctgaagagaattgctcagcatcatgcaggaatacctcatccatttgttgcgcctgtatctagtgctaacgttgctccgttaggaggactggaattccaagctttggctgcttctggtcagatccctcctcaagctctggctgctttgcaggatgaactccttggtcgacctacaagcagtttggcgttgcctggaagggaccagtcatctttgcgagtggctgcaatcaaaggaaacaagcaccatgaagaaagagaaatagcatttggtcaacccatatacaagtgtcagaataatgcatatggtgcattccctcaaaacagcccagcagttggaggattgcaaccttttgcagcttggcccaataacaaagttggtatgactgattcaacaagcacattgggaaatgtgggcaattctcaaaatagcaatatgctattgcatgaattgcagcaacagccagacaccttgctgttaggaacccttcacaatattgatgccaaaccttctggtgtagttatgccatctcagtcgttaaatacattcccggctagtgagggtatctcacctaatcaaaatcccttgattataccatctcaacccccaagttttgtgtcatcaattcctccatccatgaaacatgaatctcttcttggattaccttcaacgtcaaccagtctgttgggcgggcttgatatggttaatcaagcttcaacaagtcaggctttgattagtagccatggaacaaatcttcctggtctcatgaaccgtagctcaaatgcaatcccttcaccaggaattagtaattttcaaagtggaaatattcattatgttgttaatcagaacgctatgggagttagctctaagccaccaggtgttctaaagaccgagagcactgactcactgagttgtagttatggctatattggtggtagcaccagtgtggactctggcttgttctcttctcagtccaaaaatccacagtatgatctactgcagaatcaaaatgatgttaacggcagctggtcgccttcacaagattttgatagttttggaaattctcttgggcaaggccaccctggtaccacttcatctaacttccagagttccgcccttgggaagttgcctgaccaaggacgagggagaaatcatgggtttgtcgggaaaggcacttgcattccaagccgctttgcagtggatgaggttgaatctccaactaacaacttgagccacagcattggaaacagtggagacatagtgaaccccgacatatttggatttagtggacatatgtgaaactttcttgaatttcgttgatcagtgagcactggaaacaaatctagtggtttgatgaatggttgctagtaatttcgtttcttcttcttttttcttctgtaattggtttataaagggaataatctatgtggcagcatgtggaatcttactttatagaagtttgttcagttcaaaggacttaaaattggtcagtcccttgtcatatagcttcttttctttgttctctttttctgtaattaccaattgtagcattatttttatgaccgtcgtaattcagcctagtcgatttattcccggccatata

SEQ ID NO: 156593 - DNA, 1651 bp, Zea Mays
tctaagcaccttccattgatcatggttcgggcagtttcttcagttacatctggagctgctaagttgcatgatttaagtgcacctatcttgactagtcaaacaaagtatctcgagctcctagctagatactatgttcgcaagggggagcgtattgctgctgccaggatgtttttaatattggcagagagacagtgctccaattctgaagaagttccaactcttgacaagaggtatgaatatctcagagatgcagtgcttcaggccaaaagcgcaggcatagaggctgattcgtctagaaaacctattgacagtagcacagtggatttgcttgaaggcaaacttaccgtgctacgcttccaaatgcaaatcaaacaagaattggagctcatgactgcacgggttgaaaatatttcgagcagttctgaatcccctagtggtctgttccctcgtgacaacattcttgctgatgcagaggctgctaaggctgctaaggataaggcaaaagaactatcattgaatctcaagagcatcactcaactgtataatgattatgctgttccatttgagctctgggaggtttgcctggaaatgctgagcttcgctaattactctggagatgctgatagcaaaattcttcgagaaatttgggctagactccttgatgaggcacttacaaaaggtggtgttgcagaagcatgttctgtagtgaaaagagtaggctcgaaacttgatcctgcagatggagcttgtttacctttagatataatatgccttcatcttgagaaggctgcattggatagattaagttcaggagaagaattagtcggtgatgatgatgttgcaagagctcttcttggtgcatgtaaaggtcttcctgaacctgtacttgctgtgtatgatcaactgttattgaacggtgcaataataccctcactaaatctgaagttgcgcttgctgcgatcagttcttgcgatcctccgtgagtgggggatatctgtcattgcacataggcttggcaccacaagtactggggcttcaatctttcttgatggaacattttcactgaaccaaacagggactgcgaatcaaggtgctcgagataaaataattagtttggctaacaggtacatgactgaggtgaggcgattaaaccttccacagaaccaaacggagaatgtctaccgtggtttccgtgaacttgaggagaaattactatctccttattaggcaattttcagttgttcttcaagattgtaaaagaagagtcgaaggctctggattcactgcagcatgatctctattgttctgtacatatatctgcaagaacccaaggcttctttaatcattattaattagaggttattcatgacggtgtgcagccttcttttatttgacttagagccagtatggattacagagctgttgttgtggaaattgtctagctgtcttcattacttcttaataatcttttggtagatgctgttgatcctgttttacctgaatttaggaaacagctagagaactcaggcaggactttccaccagaaatacaagttggttttcatgttggaaatcgaaatttagtatgtaccatgacattgtacagttcgttagtagattatttagagtgttgtaagccttgtagcttatgt

SEQ ID NO: 156594 - DNA, 4867 bp, Zea Mays
atggcgtggggagaggacgaggctatcggccccgacgtggcctcggcgggtcttcacgtctcggagcggatcggccgcgacgccgccgcgcagcccgacctggaggaggcccttgaagcctcgcgctacgcgtctcacccctactcctcgcaccccaaggaatggcctcctttggtggaagttgcagaaattcgtcaactccctcctatgttgattgaaagatataacacagctgctggtgaaggaacagctctttgtgggattttttctgacatacatcgggcctgggcaacagttgacaattcatttttcgtctggcattttgataaatgggatgggcagtgccaagagcataatgtcgatgagcaagcaatttgtgctgttggccttgctagggcaaagtctgggattttcattgaagccattcaataccttttagttttagcaacacctgttgagctgatacttgttggagcttgctgttctgctagtgctgatggaacagacccatacgctgagctttcattacaacctttacctgagtacatgattgccactgatggtgtcacaatgacatgcatcacatgtacagaaaagggccaaatttttctagctggtcgtgatggccatatatatgaattgcagtatacaactggttcaggttggcgtaaacgctgccgtaaagtttgtcttactactggtattggcagccttctttctaggtgggtagtgccaaacacattcaaattttcaactgttgatccaatagttgatatggtcatggatgaggagagaaatactatctatacgcgtactgagggcatgaaaatgcaattatttgatctaggagctaatggtgatggccctttgacaaaaattactgaagaaaagaacattgttgatccactggatgcaccttatggtggccggaggactaatgcaccgccaccaagaactgcacgatcaccaaaaccatcaattgtttgcatctcacctctatccgctatggaatcgaaatggctccatgctgttgttgttttatcagatgggaagagattattcctcactacatcaggtgggattggttcttcagttggattgaacagtggtctgcggaggcccacctgtttaaaaattgttgctactaggccgtccccacctctgggggttggtggcgggcttacatttggtgctgtttctgcagctggcagagttcatcctgaggacctagctttgaaagttgagtctgcgttctattctgctggtgctcttataatgtcagattcatccgctacagccatgtcatctctgctggctgtgcagaaaggttcagctgcacagctatcccttcccagtacctttggaacagcttctagagcctcccgagctctacgggaaacagtatctgctttgcctgttgagggtcgaatgctttgtgcctctgatgttttaccacttcctgacgctgcttacatgttgcagtctttgtatgctgatgtggaatgcttcacaggtttcagaaaaccttttgagaaggcatgtataaaactttgggcaaaaggagatcttcctacccagcatatcttgcctcggaggagggttgttgtattcaatactatgggtttgatggaggtaatttttaacaggcctgttgatattctaaggaaattgtttgatgggaacaccttgagatcacaaatcgaagaattctttaatcgctttggtgctggagaggctgctgcaatgtgcttaatgatagctgcgaagctactttatgctgaagatagtctgataagcaattctgtttctgagaaagccgctgaggcatttgaggaccctgggcttgttgggatgcctcaaattgctggtaccactgctttatctaatacacgaactcaggctggaggctttagtatgggccaagttgttcaagaagcagaacctttgttttctggtgcatatgaagggctttgtttgtgctcgtcaagactactttatcccatatgggagtttcctattatggtgattcgaagaccggctggtactaataaatgcgaggatggtgtaattgtttgcaggctttcagctggggccatggaaattcttgagagcaagattcattcactggaaacatttttaagatctagaagaaataagagaaggggcctttatggttatgttgccggccttggtgattctggttccatactctacaaaacagggcctattattggtcctggagggcatagcaatgggaggagtccatataactcccaaattcaagatatggaccctgcggacaaatcagcatcaaataaaaagccaaggttgctttatacatcagcagaactagccgctatggaggtgagggcaatggagtgtcttaggcggttgcttaggagatctggtgaagcactctttctgcttcaacttatttgccagcataatgttgcccgcttggctcagacactgggcaatgatttacacaagaaattagttcaattaacatttcatcagttggtatgttcagaagatggtgatcagcttgcaatgtgtcttatttctgcactcatggagtactatattggcccagagggcagaggaactgttgaagaaattagcactaaattgaaggagggttgccctagttacttcaatgaatcagattacaaatattacttggcagtggagtgccttgagagagcagcatctatggctaataaccctgatgagagagatattcttgctagagatgctttcaaccttttgactaaaattccagaatctgctgatttgagtgccatatgcaagagatttgagaacctaagattttatgaggctgtagtccggttgcctctgcagaaagctcaagcacttgactccaatgctgatattaccaatggtcaaattgatccaaggcatcatgataccataatgttgcagcgtgaacaatgctatgagattgttatgaatgctctgcgcactctcaagggcgtcgggcatagtcgaatgcaaagtgcagacaagtcatctggtgtagcaactgctgttgatccagcttctcgaaccaagtatatcaaacaaattctccaacttagtgtccaatggccagacacagttttccatgaacatctatacaagacacttattgagctcggtctggaaaatgagcttttggagtatggtggttctgatttggcttcttttctgcagagtgctggtcgtaagcatcaagaagaggttcgggcagtttcttcagttacatctggagctgctaagttgcatgatttaagtgcacctatcttgactagtcaaacaaagtatctcgagctcctagctagatactatgttcgcaagggggagcgtattgctgctgccaggatgtttttaatattggcagagagacagtgctccaattctgaagaagttccaactcttgacaagaggtatgaatatctcagagatgcagtgcttcaggccaaaagcgcaggcatagaggctgattcgtctagaaaacctattgacagtagcacagtggatttgcttgaaggcaaacttaccgtgctacgcttccaaatgcaaatcaaacaagaattggagctcatgactgcacgggttgaaaatatttcgagcagttctgaatcccctagtggtctgttccctcgtgacaacattcttgctgatgcagaggctgctaaggctgctaaggataaggcaaaagaactatcattgaatctcaagagcatcactcaactgtataatgattatgctgttccatttgagctctgggaggtttgcctggaaatgctgagcttcgctaattactctggagatgctgatagcaaaattcttcgagaaatttgggctagactccttgatgaggcacttacaaaaggtggtgttgcagaagcatgttctgtagtgaaaagagtaggctcgaaacttgatcctgcagatggagcttgtttacctttagatataatatgccttcatcttgagaaggctgcattggatagattaagttcaggagaagaattagtcggtgatgatgatgttgcaagagctcttcttggtgcatgtaaaggtcttcctgaacctgtacttgctgtgtatgatcaactgttattgaacggtgcaataataccctcactaaatctgaagttgcgcttgctgcgatcagttcttgcgatcctccgtgagtgggggatatctgtcattgcacataggcttggcaccacaagtactggggcttcaatctttcttgatggaacattttcactgaaccaaacagggactgcgaatcaaggtgctcgagataaaataattagtttggctaacaggtacatgactgaggtgaggcgattaaaccttccacagaaccaaacggagaatgtctaccgtggtttccgtgaacttgaggagaaattactatctccttattaggcaattttcagttgttcttcaagattgtaaaagaagagtcgaaggctctggattcactgcagcatgatctctattgttctgtacatatatctgcaagaacccaaggcttctttaatcattattaattagaggttattcatgacggtgtgcagccttcttttatttgacttagagccagtatggattacagagctgttgttgtggaaattgtctagctgtcttcattacttcttaataatcttttggtagatgctgttgatcctgttttacctgaatttaggaaacagctagagaactcaggcaggactttccaccagaaatacaagttggttttcatgttggaaatcgaaatttagtatgtaccatgacattgtacagttcgttagtagattatttagagtgttgtaagccttgtagcttatgt

SEQ ID NO: 156595 - DNA, 137 bp, Zea Mays
cggtatgttcgggtttatgaaatttcgggttctgaaaaacgagaaccgaatttttcaaaaaatattttaggaaccgaacccaaatggactcacaatttcggttcggtataccgaatagaccgaattgtagagagact

SEQ ID NO: 156596 - DNA, 963 bp, Zea Mays
atgcatgcgtgcaggagaagaacagtggttttatcagtttcccttccacaggatggtggtgtcggcgatcatgccggtgacgacgtaggggtccatgttggaagccggcctgcggtcctcgaaatatcccttgccctccttctcggtgtcgcggccgacgcggatggacgcgccgcggttcgccacgccccatttgaaggtgttgatgtcggcggtctcgtggcggcccgtgaggcggcgctcgttgccctcgccgtacgcggcgatgtgctccctgtgcctcttccccagcttctcgatcgcctccttgatcacctcgtagccaccggcctccctcatcgacttggtgctgtagttggtgtgagcgccggcgccgttccagtcacccttgatcggcttcgggtcgagggagagaacgattccggccatctcagtgatcctctggaaaatgtagcgggcgacccatatctcgtcgccggcagagatcccaacggacggcccgacttggaactcccactgtccaggcatgacttcgccgttgatgccgctgatgttgatgccggcgtagaggcaggctttgtagtgggcgtcaaccacgtcgcgcccaaaggccttatcggcaccggcagcacagtagtatggtccctggggaccagggtatccaccaacaggccagccaaggggccagctcacatccttctgaaggagagtgtactcctgctcaataccgtaccatggcacctcagctgcaacatcggggtggctgaaaaccgtggcagctttgtacctcttgttactggggattggctcgccttgtggcgtgtagcagtcacacatcacccttgctttgctcctgaggtctatgccggatcctccaaccctgatgtactcggcgatgatcctgtcggtgcagtcactcaggtcgaggttgacgaggtcagtgaggctggccatcactcgtag

SEQ ID NO: 156597 - DNA, 2349 bp, Zea Mays
catgatagtgctgcctctgagctaaggtgctctcacctacccacccgctcaccctgaccccagtccccgccggcgatggccgcaatgccggcgccggcagcgggcttggccgtcctggtgctcttcgccgccgccctgccggccctttctgccgatgacctcaacaccgacgcacaggcgctgcaggcgctgcgctcggcggtcggccgctccgcgctgccatcgtggaacagcaccacgcccacgtgccagtggcagggcgtcacctgcgagagcggccgcgtcgtcgagctccgcctcccgggggccgggctcatgggcaacctcccctcgggcgtgctcggcaacctgtcggcgctccgcacgctgtccctccggtacaacgcgctcacggggcccatccccgacgacctctcccgcctgtccgagctccgggcgatctacttccagcacaacagcttctctggcgaggtcccagcgtcgctgttcgagctcaagaacctcgtgaggctggacatcgcagggaacaagttcagcggcaagatctcgccggacttcaacaagctgatccgcctcgggacgctgtacatggacgggaacagcttcaccggtgagatcccaaagctgcagctgcctgcattggagcagttcaacgtgtcgtacaaccagctcaacgggtccatccccaacacgctccggaagatgccgaaagactcgttcttaggcaacacgggcctctgcggcggtccactcggcctgtgccccggcgagtccgcgcccacggcggccgggtcgccggagtcgcagccaggcgcgggcggcgcagccgacgtcggtggcggcaagaagaagaagctctccggcggcgccatcgctggcattgccatcggctccgtgttcggcgtgctgctcttgctcgccctgcttttcttcctctgccggaagaggtctagcgcgccccggtcggcggcggcggtggagaaggggcaggaactcggcatggggccgatggatgtcgagccaaagggacagaacggctcagcatcagcaggtggcgcaggcagccacaacggctctgcggcggccatggcagttcctgccgccgccgccgccgccgctacggcggcagcgaagaccggcgggtcgaccgggtccaagaagctcatcttcttcggccccatggcggcggccccgccgttcgacctcgaggacctgctgcgcgcttcagcggaggtgctggggaagggcgcgttcgggacggcgtacaaggcggtgatggagaacgggtccgccgtggcggtgaaacggctcaaggacgtggacctcccggagcctgagttccgggagcgcatcgcggtcataggcgcagtgcagcacgagctggtggtgcccctccgcgcctactacttcagcaaggacgagaagctcctcgtatacgactacatgtccatgggcagcctctccgccctgctgcacgggaaccgcgcctccggccggacgccgctggactgggagacgcggtcggcggtcgcgctggcggcggctcgcggcgtggcgcacatccactccacggggcccacggcgtcgcacggcaacatcaagtcctccaacgtccttctcaccaagaactacgaggcgcgcgtgtcggaccacggcctccccacgctcgtcggcccctccttctcgcccaccagggtgtccggctaccgcgcaccggaggtcaccgacatccgccgcgtctcgcagaaggccgacgtctacagcttcggcgtcctcctgctggagctgctcacggggaaggcgcccacgcacgccgtcgtcaacgaggaggggctcgacctgccgcgctgggtgcagtccgtcgtgcgggaggagtggaccgccgaggtgttcgaccaggagctcctcaggtaccaaaacgtcgaggaggagatggtgcagctcctccagctcgccatcgactgctccgcgcagcaccccgacaggaggcccgccatgtccgaggtggccacgcggatcgacgagatccgccgctccagcctcggcgaccggcaggtggccgacagcgccgaaggcgacgagccatctctataaccgccatagcagtagctcctcccctgatccaccatcacacgtactgtgtcaatctcagtgaatgaaaattgcttagttctttgcatggatcgatattgctcttgcttcacatcagcaacttgtgcatgtatgctttttctctttttcttctcttctttatctttttttttggcctctttctcacgggctttgatgattctattctatagcacatgtcactgtactcttttattcttggaaagcaacatttggtga

SEQ ID NO: 156598 - DNA, 2848 bp, Zea Mays
cttcacacctgtgtctctgcctccactcctctcccttcccttcgcgtctcttcttcccccttccacttcttggccgagcccctcttggtctcggcatcctgctcgatcgaagaatgctggatcaggcatattggaggttgcagtaaaggcggtaggtgcttttcttcttccccgttggtggctagagggactggccggggagaactacaacatattggaggctgcaagttctcgggaggagccgggcttctcttgcggcggcaaacatgaggaagctcttcttcgtctacttcgtcctcctgctggccgctgcagtagttcacggtgaagatggtgcgtacattggcgtgaacattggcacggccatgtcgtcggtcccggcgccgacgcagatcaccacgctgctccgctcgcagaacatccgccacgtccgcctctacgacgccgaccccgccatgctagcggcgctctccaacaccggcatccgcgtcatcgtgtccgtgcctaacgagcagctgctggccatcggcaactccaacgcgacggcggccaactgggtggcgcgcaacgtggccgcgcacttccccgccgtcaacatcacggccatcgccgtgggctccgaggtgctctccgcgcagcccaacgcggcgccgctgctcatgcccgccatgcgctacctccagaacgcgctggtggccgcggcgctggaccggtacatcaagatctcgacgccgcactcgtcgtccatcatcctcgactccttcccgccgtcgcaggccttcttcaacaggtcgctggacagcgtgctggtgccgatgctcaagttcctgcagtccacggggtcgccgctcatgctcaacgtgtacccttactacgactacatgcgctccaacggcgtcatcccgctggactacgcgctgttccggccgctgccggccaacaaggaggccgtggacgccaacaccctgctgcactacaccaacgtgttcgacgcggtggtggacgccgcctacttcgccatggcgtacctcaatgtcaccaacgtgccggtgatggtgacggagaccgggtggccgcacaagggcgacccttcctcggagcccgacgccacctccgacaacgccgacacgtacaacagcaacctcatccggcacgtgatgaacagcaccggcacgccgaagcaccccagggtggccgtgccgacctacatctacgagctgtacgacgaggacacccggcccggctccacgtcggagaagtactggggcctgttcgacatgaacggcgtcccggcctacaccctgcacctgacgggctccggcgtcctgctggccaacgacacgacgaaccagacctactgcgtggcgcgggagggcgcggaccccaagatgttgcaggcggcgctggactgggcgtgcggccccgggaaggtggactgctccgtgctgatgcagggccagccgtgctacgacccggacaccgtggaggcgcacgccacgtacgccttcaacgcctactaccacggcatgggaatgggctccgggacgtgctacttcagcggcgtcgcggtcgtcacgacgaccgacccgagccacggatcttgtgtttatggtgggaagaacgggacgtcgttgatgaacggcacctcgctggcgccgtcgtcgaactccacggagggaggctccggcgcgcaccgggagttcggcgacgtctcgtcactcgtccgcatcgtctccgcagcgctgctcttcagcgccctcctcctgttgtagttactactagagctactaggcaccctggaatcaatgcagtctttgcagagttaggcattcgtcgtgaaggagggatgattctttttgctgtggaacggaggcggatgtgcttctgttctgatgctcttgtcatctgctgggtttctctattggcatcgaacggaaattggtttgcttccccgcaattgctccggttgatcgtgatgactgagcaaagaggatgcttagggtttcaggtagagattgttacaacacacaacgctagggtcggaaaatactggccattgttcaccaccgacttgtgtcgaaaccagtgtgttgcagcaaaggttaatcagcatcgaagttcagaactaacaaagcacaacaccagctaccccgggcgggagtaatcaggtgtatcgtgttcatcctttttagagacgaagcagctacggtccattggcatccaaagacggcaacggccctgcacgcctctgtcaacgtgcggcggcgtgcctcagctagatgggatgggccgaccacaatcattttttggcccacgcggccggaatgggtgtagctgtaatttgcccttttcagccgtgcgagcgccctgtatataacagggcaaaggccaaagggcatcggtctggtttttcctccgcgtcgccgccttcatcaccctgcaacgatctccttgcaacgaccacaaccattttttttgttgctttgtttttcgagtcgctatgctcacgtagggtgaaatcttgttctcgtttcttcgattggtttacttcaagacgttctctgctcgggcactcttcgagttttgaaagttctgaagccctggtcgcagctgtgcgcatcctggctttggttaccgaagagatgcgagatcatacacctggacctctggacatgcgtcttctttctatagctcctcgcgttttctctcgtgggtccaacaattcccttcccttacacttgtgaataacgagatttgttgttggttgtttgcatctatttttgttgttgtttttctctaaatgattttgtttggattaatcagttatatcttgaatccgtgacgacga

SEQ ID NO: 156599 - DNA, 2065 bp, Zea Mays
cttcacacctgtgtctctgcctccactcctctcccttcccttcgcgtctcttcttcccccttccacttcttggccgagcccctcttggtctcggcatcctgctcgatcgaagaatgctggatcaggcatattggaggttgcagtaaaggcggtaggtgcttttcttcttccccgttggtggctagagggactggccggggagaactacaacatattggaggctgcaagttctcgggaggagccgggcttctcttgcggcggcaaacatgaggaagctcttcttcgtctacttcgtcctcctgctggccgctgcagtagttcacggtgaagatggtgcgtacattggcgtgaacattggcacggccatgtcgtcggtcccggcgccgacgcagatcaccacgctgctccgctcgcagaacatccgccacgtccgcctctacgacgccgaccccgccatgctagcggcgctctccaacaccggcatccgcgtcatcgtgtccgtgcctaacgagcagctgctggccatcggcaactccaacgcgacggcggccaactgggtggcgcgcaacgtggccgcgcacttccccgccgtcaacatcacggccatcgccgtgggctccgaggtgctctccgcgcagcccaacgcggcgccgctgctcatgcccgccatgcgctacctccagaacgcgctggtggccgcggcgctggaccggtacatcaagatctcgacgccgcactcgtcgtccatcatcctcgactccttcccgccgtcgcaggccttcttcaacaggtcgctggacagcgtgctggtgccgatgctcaagttcctgcagtccacggggtcgccgctcatgctcaacgtgtacccttactacgactacatgcgctccaacggcgtcatcccgctggactacgcgctgttccggccgctgccggccaacaaggaggccgtggacgccaacaccctgctgcactacaccaacgtgttcgacgcggtggtggacgccgcctacttcgccatggcgtacctcaatgtcaccaacgtgccggtgatggtgacggagaccgggtggccgcacaagggcgacccttcctcggagcccgacgccacctccgacaacgccgacacgtacaacagcaacctcatccggcacgtgatgaacagcaccggcacgccgaagcaccccagggtggccgtgccgacctacatctacgagctgtacgacgaggacacccggcccggctccacgtcggagaagtactggggcctgttcgacatgaacggcgtcccggcctacaccctgcacctgacgggctccggcgtcctgctggccaacgacacgacgaaccagacctactgcgtggcgcgggagggcgcggaccccaagatgttgcaggcggcgctggactgggcgtgcggccccgggaaggtggactgctccgtgctgatgcagggccagccgtgctacgacccggacaccgtggaggcgcacgccacgtacgccttcaacgcctactaccacggcatgggaatgggctccgggacgtgctacttcagcggcgtcgcggtcgtcacgacgaccgacccgagccacggatcttgtgtttatggtgggaagaacgggacgtcgttgatgaacggcacctcgctggcgccgtcgtcgaactccacggagggaggctccggcgcgcaccgggagttcggcgacgtctcgtcactcgtccgcatcgtctccgcagcgctgctcttcagcgccctcctcctgttgtagttactactagagctactaggcaccctggaatcaatgcagtctttgcagagttaggcattcgtcgtgaaggagggatgattctttttgctgtggaacggaggcggatgtgcttctgttctgatgctcttgtcatctgctgggtttctctattggcatcgaacggaaattggtttgcttccccgcaattgctccggttgatcgtgatgactgagcaaagaggatgcttagggtttcaggtagagattgttacaacacacaacgctagggtcggaaaatactggccattgttcacc

SEQ ID NO: 156600 - DNA, 2253 bp, Zea Mays
ttctacaagcaagtgacaggaaaaaatgtatgtatatcccctttcaccggtttacaacgacatggattacaatattcctgggagatgtcaattttgacagtacgcccacgtgagcatccagcaggaagcagttcgtttgatctcccgtccgcctgtgatggtcattcctcgtgtgatacttccaacaacaatcggagtatatatagggaagagaagaaaatagggaagagaagagaccagctgagaagaaggaacaagaaagaaaaaagttgtaatcttctttaagcgaaatgcttcgccggagaacgtatatgttgtagccggagagttcagaggctgacgacctccggcacgtcgacggggtagcggtggatgcagtcgtcccagggcccgctggtgggcgtgttgacgctgcggaggcacttccagacggcgctgttgcacttgaagccgctgccgaagccgatctgccagacgcggtcgccgcggcgcatgcgtcccttggcctcgatgtatgcgagctcgtaccagagggagctgctggacgtgttgccgaagcggtgcagcgtcatgcgggacgcctccacgtggcgcggcgacagctgcaggttcttctgcagctcgtcgatgacggcgcggccgcccgcgtggatgcagaagtggtcgaacgccagcttgaagtccgggatgtagggcttccatcccccgttgaggagcttgcgccccaccaggcggaagaagaagagcagctgctccgacatgggcagcaccagcgggccgatggtggtgatgttggacttgagcgcgtcgcccgcgatggccatgagctccttggacagcgagatgcccgagaacccctgctggtcctcctcctggtacacgcacctgtacgcgcggtcgtccgcgcccttgtgcgtcctcaccacgtgcaccagccggtacttggcgcgcggggcctcgcgccgccggttggacagcaggatcgccgccgcgcccatccggaacaggcagttggggagcagcatgtcgcgccggctcccccggtagaagtttggggtgatgatctcggtggacaccaccagcgcgttcgagtttgggtgcacctgcagcatgtccctggcgaggtcgatggagatgagcccggcgctgcaccccatcccggacaggttgaagctccggacgttgctccggagcttgtacctgttgacgaccatggcggacagcgagggcgtcggggagaagaggctgcagttgacgacgaggatgtcgacgtccttgggcttggtccccgtgcggcggaggaggtcgtcgatggcggagaagacgacgagctgcgcctcggcgcgggaggcctccatgctggggttgggcgggatgaagtggttggcgggcgggaggcacgtgtcctcgcccagccccgaccgctccaggatccgggtctggaaccgcacgctcctgtcgtcgtcgctgatgaggcgcgtgtgctccatgaaggtggcgaagggcacgcggcagctgccggggggcttgtagcaggcgtagtccaccaggtacacgggcctggggcgcgacatcgcgtacacggtgccggcgaagacggccacgaacgcggagcagaggatgtggaccaggtccagctccagcgaccgccacagcgacagcagctcgccagggcccaggcgcgccagctccagcgccgtggcggccatgaccggcaccagcagcagcgtcaggaggtggtccagcaggtaccggtaccccagcttgacgtgcttcaggttcaccgacccggagaacacgccgccggtcggcatggtgccggactgccggcccgcgctcgcctgctgctgctgctatcctgctctcggcagcgtcttggcgctgcaaccaaaccagcgtgccggctcgcgctcgcctgctgctgcggctatcctgctcttgcggtgcggtgtttgtgcttgtgtttgtttgcggaggtggtggtgccgtggtggggtcttaatatagtgggcaagccgcgaggggcgcccgtaatcaagtcgggggcagctgggtagttaaatgagagcccgactaccgccaccaaccagagcccggagagttcagagggtttggcgtggcgcctggtcttgttgtagtagcagtagcagggacccccctgactggctgctccgggccgctggggcgcttcgctcgcgccttgcaggccgcagctctgcccactgcacagtgcacgcgcgcgcacggggtaat

SEQ ID NO: 156601 - DNA, 849 bp, Zea Mays
atggcgtctctccgaccaagcctcggcggccataaccgacggcgtggtacgcggccaggcgcggcggtcctgtggcgcgcgtcacaacggccagcacgggacccgacgtggccttggccagcgcagggcgcagccccggcggcgcgagcgcggccgcccggccacggcacgggcgtgtgggcggcggcacgggcccgacgcggtggcccccgtccccgacgagtgcgaggcgcggcccttggcggcgcgaacgcgaccccggaggcatgcgggcgcggcggccccgacaatcctgtcgagggcgcagagtggcgtacgggcgcgcggcggcgcagcgccagcctcgccacggcgtgtgcgacccccggccccgcggcttgggcgcggctccccgcgccagcctcgacgtgcgggagcactcctccggcagcgcggtcccggcctggcgggcggacacggcgcggctcgggcggccccagccacgacgcacacgggtgcggcctccctgacgacgcgggcgaggccccagcggcgcgggtgcgcggcatccccggctgcgcgggctcggcacgctgccccgggtacccagcacgggcatggatgcccggcgcgcggcaagggcggcgcgaccgcgtggctcgcggcaacagcggcgcttgcgtgtgcaacggcccagaggcatggcgcgaggcaacagcggccacggcgtggccccggccccgccctcggagcgggagcgcgctcgggtgcggcgtccctagcccctgcgcgggagcgacgcgtgaacctcggcgcgggcatggcagcccgacccagcctccgagcgcgggcacggcgaccccgacatga

SEQ ID NO: 156602 - DNA, 1109 bp, Zea Mays
atggctttcggtggcatggaagttccggttcatatgcagtatcttgaagctggtgcggacgtcatcatttcatcatcttaccaggcaacaatcccgggtttcatagctagaggaatgtctgtcgctgaggcagaagatttactgcgaacaagtgtaaaactggccaatgaagctcgagatgaattttggaagtcaacactgaggaagtccaaacctatttacaaccgtgctctggttgctgcatccattggtagctacggagcctatcttgctgatggatcggagtacagtggatcatacggtgctgacatcacagccgagaagctgaaggacttccacaggcgccggctgcaggttcttgcaagtgccggtcctgacctgattgcgtttgaggccattcctaaccaaatggaggcacaggcattggttgagcttctggaggaagagaaagtccagatcccttcctggatctgcttcagctccgtggacggtaagaacctgtgctctggggagagttttgcggactgccttaagatcctcaacgcgagcgagaaggtggccgttgtaggcgtgaactgcacacctcctcagttcatcgagggcatcatatgtgaatttaggaagcaaaccaagaaggcgattgcagtttacccgaacagcggcgaagtttgggacgggagagcgaagaggtggctgccggttgagtgcttgggtcacaaaagcttcgacgctctcgcgaagagatggcaggaggcgggggccagcctcatcggagggtgctgccggacaacgccttcaactattagggctgtttccaagatcctcaaaggaaggacggggcattgatttgtttattataattgagctgttgttgcattatgtcactagccagaataacattcagaatatgtatcctgttgctcttccgttcccctttctaaaataaggtatcaatataattttgcagtgtaaaacgtaatactagtttgtagcgctgacccacagtattgcttagtctccgattatgttgtttgggtatggttaccaagttaagtatggatttaaacaagactactaaattttcttatccaataattagtcttgtgaag

SEQ ID NO: 156603 - DNA, 1302 bp, Zea Mays
ctcgtctacggctctccaccctccaatcctccatagccacccctcattctccgatggcatcagccgtctgcgccgaatcggcagctcgagctcggcattctcctcgccacagcctccgttcactagcaggtgtaatgcaatagcaaacatggaataaatgggaggtacaaccatgcaactcaagcacgcctggttgactgacaccaaaggaaaataaccatgcatccagatcgatgactcaatactcagcttcctcgtcctcatcttcaacttcagctccgacttcctcataatccttctccagtgctgcaagatcctcccttgcctctgagaactccccttcttccatcccttcaccgacataccaatgaacgaatgcacgtttggcatacatgagatcaaacttgcggtcaatacgagagaagacctcagccacggctgtgttgttgctgatcatgcagactgctcgttgcaccttggccaggtcccctccagggactacagttggtggttggtagtttatcccacacttgaaaccagtagggcacctgtgcatgagacagcagagaaagacattcatgtctcgcgcagctatcttttcagtggaagattacaatctataatctgatataacttggtaagagttgtgagcatataccaatcaacaaactgcactgctctcttggtcttgattgaatggacagcagcattcacatcttttggaacaacgtcgccacggtacatcaaacagcatgccatgtactttccatgcctgggatcacattttgccatcacacttgatggctcaaacacagaatttgtgatctcaggaacagagtgttgttcatggtaggccttttccactgagataattggagcatacgaagagagcataaagtgtatgcggggataaggcacaaggttggtctggaactcagttatgtcaacattaatagctccttcaaacctcagagaggtagtcagagatgatataacttgtgatataagcctgttcagattggtgtatgttggacgctcaatgtcgagggacctcttgcatatgtcatagatagcttcattgtcaagaagcacaacaacatctgtgtgttcaatcaaggaatgtgtggagagcacgctgttataaggctcgaccacagcagtcgagatctgcaatgaaaatggtttcagtacagagttcttgtacattacaatgacaggtaaacctcctttgcaagcttttgttttccgattgagaaggcaagtatatgccttcatttaggtatacataaatagtactgttgc

SEQ ID NO: 156604 - DNA, 1522 bp, Zea Mays
cacgcacagccgctgcgctgcgtcgagtctacggctctacgcccggcctgggaggaggggcggtggcctggggccctgggttcgtgtccccccgcggcctcgctccggtcgggccgcgttgccatgccgcattgccgctgctgcttccgcgtgtgccgtggtccccgggccttgaccggacgaacgctttcggtagcctgcttgtttggccgcccggtggcaggcagacaccgtccccttttgggggcaggtcgttcttctcctcccctcgcccctcggctgctcgctacctcgctggcttcccgccggtgcagtttgaatcgagtagtggttggagtagcaaaaaaatgattgatgagctcgctgtcgctgctgcgggaaagtgcgggccgtggatggaatcggggggaaaaaaagggggaggagtcaggagtgggttggttgatggccgatgattgacgaatctcttcgcggcgcaggctttttccgatcggcgtcggctttcctcaacctgctcatgggcacgctcaagatcgtcgccgactactaccccggccgcctccaccgcgccttcgtcatcgacgcgccctccctcttctccgtcctctggaagggagtgaggccgttcgtggagctggcgccggcgacggcggtggtgtgctccctggacttcgaggactcactggaggacgcctccttcacggcgtacccgcggaccgcgtccctgcggttcgagccgccgccggcggcggtcacggggaaggccggcgtggggtcagcctcgtcgcggttctccgtcacccccaccgacaaccccgtcaagccgtggtacctctgcaccatccccgcctcggtgggctcccgctccgtggtacccacctccagcagcagcccgtcgctggtcggcgcgtccccgctctccgcgcgctccttctccttcgcctcgcccgccgcgctgcgctcgacgccgttcccgcgcggcgggggcgcccccccgacgccttcctccgccgtcacgggccacaagatcccgccgccgccgcagttcccgcggacgccgcggccgtcgttcctgcagtcgccgtcgacgctgttcgcgttccggaaggacgggcagcagaccagccgcgtggagcgcgagcgcgggtccttcctcccgtacctccgcttctaccgccgcccctacgacgagatttcctaccgcgccatgatgcgcccgccgctcggcggcctgatacccatcgtcgagaagttcaagcacaagccggtgcagcagacgctgcgtcgacacgctgggctccaccagcatcagcagcagcagcaccaccattaccaacagcagcagaggatctgagtctcgtctctcagtcggtactgcatggcgacccgagaattttctccatacagcataaaggcgatgctatattatgctaagttaatcttttgccaagtatgatattcttaaaggcatgtataataacatcccaaaaaaatgtgagtaaaatggactcctttctgcacc

SEQ ID NO: 156605 - DNA, 1383 bp, Zea Mays
gtagcgccgtagcggtaccgcctccgccggtcagacacgcacatgcggctggctcggtgaagcctctactctcagacgctcagacagacacacgcacagccgctgcgctgcgtcgagtctacggctctacgcccggcctgggaggaggggcggtggcctggggccctgggttcgtgtccccccgcggcctcgctccggtcgggccgcgttgccatgccgcattgccgctgctgcttccgcgtgtgccgtggtccccgggccttgaccggacgaacgctttcggtagcctgcttgtttggccgcccggtggcaggcagacaccgtccccttttgggggcaggctttttccgatcggcgtcggctttcctcaacctgctcatgggcacgctcaagatcgtcgccgactactaccccggccgcctccaccgcgccttcgtcatcgacgcgccctccctcttctccgtcctctggaagggagtgaggccgttcgtggagctggcgccggcgacggcggtggtgtgctccctggacttcgaggactcactggaggacgcctccttcacggcgtacccgcggaccgcgtccctgcggttcgagccgccgccggcggcggtcacggggaaggccggcgtggggtcagcctcgtcgcggttctccgtcacccccaccgacaaccccgtcaagccgtggtacctctgcaccatccccgcctcggtgggctcccgctccgtggtacccacctccagcagcagcccgtcgctggtcggcgcgtccccgctctccgcgcgctccttctccttcgcctcgcccgccgcgctgcgctcgacgccgttcccgcgcggcgggggcgcccccccgacgccttcctccgccgtcacgggccacaagatcccgccgccgccgcagttcccgcggacgccgcggccgtcgttcctgcagtcgccgtcgacgctgttcgcgttccggaaggacgggcagcagaccagccgcgtggagcgcgagcgcgggtccttcctcccgtacctccgcttctaccgccgcccctacgacgagatttcctaccgcgccatgatgcgcccgccgctcggcggcctgatacccatcgtcgagaagttcaagcacaagccggtgcagcagacgctgcgtcgacacgctgggctccaccagcatcagcagcagcagcaccaccattaccaacagcagcagaggatctgagtctcgtctctcagtcggtactgcatggcgacccgagaattttctccatacagcataaaggcgatgctatattatgctaagttaatcttttgccaagtatgatattcttaaaggcatgtataataacatcccaaaaaaatgtgagtaaaatggactcctttctgcacc

SEQ ID NO: 156606 - DNA, 1613 bp, Zea Mays
ctcggtccgtcgctccgacactccccttcggcatctcctctcctttcagttctttctcgccactccgtttgcccgttcacgctcccctctccctctcccacctcctattcttcgtcttcgtggagactactgagatggccgtcgacaagcaggcggacgccaaggagagggagaagatcgacgccgttcgcaagctgctgcgcaagcaggcgccgctctccataaagcaggcgcagtactgcgacgacgcgtgcgtggagcggttcctgcggtggcgcggggagagcgtcaagaaggcggcgaagcacctgaggaccgtcctgtcatggagggagaccgtcggagctgaccacatcatggccgacgagttctccgccgagctcgccgacggcgtggcgttcgtctccggccacgacgacgacggccgcccggtagtggtgtttcgaatcaagcaggaataccccaagttccgctcgccgaaatcgttcgtgcgcctgctggtgttgacactggaggtggccgtggcgtgcatgtcccggtccgtggaccagctcgtcctcctcttcgatgcaagctttttccgatcggcgtcggctttcctcaacctgctcatgggcacgctcaagatcgtcgccgactactaccccggccgcctccaccgcgccttcgtcatcgacgcgccctccctcttctccgtcctctggaagggagtgaggccgttcgtggagctggcgccggcgacggcggtggtgtgctccctggacttcgaggactcactggaggacgcctccttcacggcgtacccgcggaccgcgtccctgcggttcgagccgccgccggcggcggtcacggggaaggccggcgtggggtcagcctcgtcgcggttctccgtcacccccaccgacaaccccgtcaagccgtggtacctctgcaccatccccgcctcggtgggctcccgctccgtggtacccacctccagcagcagcccgtcgctggtcggcgcgtccccgctctccgcgcgctccttctccttcgcctcgcccgccgcgctgcgctcgacgccgttcccgcgcggcgggggcgcccccccgacgccttcctccgccgtcacgggccacaagatcccgccgccgccgcagttcccgcggacgccgcggccgtcgttcctgcagtcgccgtcgacgctgttcgcgttccggaaggacgggcagcagaccagccgcgtggagcgcgagcgcgggtccttcctcccgtacctccgcttctaccgccgcccctacgacgagatttcctaccgcgccatgatgcgcccgccgctcggcggcctgatacccatcgtcgagaagttcaagcacaagccggtgcagcagacgctgcgtcgacacgctgggctccaccagcatcagcagcagcagcaccaccattaccaacagcagcagaggatctgagtctcgtctctcagtcggtactgcatggcgacccgagaattttctccatacagcataaaggcgatgctatattatgctaagttaatcttttgccaagtatgatattcttaaaggcatgtataataacatcccaaaaaaatgtgagtaaaatggactcctttctgc

SEQ ID NO: 156607 - DNA, 398 bp, Zea Mays
atagatcttatgatccaaacattttttattgttatatatgaacatatgttgtgtctccgtaaaatttcacgattttttgaggctatttatatattattaatttcttgtcatagaaaatcatcaaaatacaattaaatccttaaaatattgtagtatcaaccgaaaaatacaaataagttatcaatactaataaatagtcaataaaaagataaccttaagttcccacgtggagataactttaagcccacacataaaaatggtaaagtctattaatttgatataaatttggacattatttcaatgattttggtctaaagatatgtttaaacaaaaaattgatgtattagaaacttatagatctcttcaacctctacaattttcatataaactttatcttc

SEQ ID NO: 156608 - DNA, 2465 bp, Zea Mays
cccaccagtgcccctccgcagtccgcacgccatgtcgtcccggagctccctcctcccgctcccgctcctgctcctctgcgccgccgccgccgccgcgtcgtcgcgcaacgccgagctggacgcgctgatggagctgaaggcggcgctagacccagcggggcgcgctctggcctcgtgggcgcgcggcggcgacccctgcggccgcggcgactacttcgagggcgtcgcctgcgacgcccgtggcagggtcgccaccatctcgctccaggggaaggggctcgctggcgccgtccctcccgcgctcgccatgctcccggccctcaccggcctctacctacactacaacgccctgcgcggggagataccgcgcgagctcggcgccctccctggcctcgccgagctctacctcggtgtcaacaacctttccggccccatccccgtcgagctgggccgactcggtagcctccaagtgctgcagctcggctacaaccagctcacagggagcattccaacccagctgggccacctaaacaagctcactgttctcgcccttcagtccaaccagctcagcggcgcgatcccggcatccctcggggacttgccggcgctggcacggctagacttgagctccaaccaactcttcggctcaatcccctccaagctcgctgagatccctcgtcttgcaacgctagacctccggaacaacacactttcaggaagtgttccatctggtctgaagaagctgaacgaggggtttctgtacgagaacaatccggagctctgtggagcgcagttcgattctctgaaagcttgtcctaacgatggcaacgatgacggcagaacgccccggaaacctgaatcgacctctgtcaagccccagcagattcaaaagacggccgacctcaaccggaactgcggcgacggaggctgctcgaagccttcgacgctctctacaggggctgttgttgccggaacagtcgtcatcgtggcaggagcagcggcctgtggcctgtccgcgttctcatggcaccgccgccagaagcagaaggtcggcagcagttcggtcgagcatctggaaggccggcctagcctggaccggtcgaaggaagcataccagagaagcgccgtgtcgtcactgatgaacgtcgagtactccagtggcggctgggacacttcatccgaggggtcacagtcacagcatggggtggcgaggctgtcgtcgtcgacagagggtggttccccgagcgtgaggtcgttcaacctcgaggaggtggagtgcgccacgcagtacttctcggacgcgaacctgatcggcaagagcggtttcgccgcgacgtacaagggggtcttgcgggacgggacggctgttgcggtgaagagcatcagcaagaacagctgcaagtcggaggaggccgacttcctgaggggcctccgcacgctgacgtcgctgcggcacgagaacctcgtcggcctgaggggattctgccggtcccgggcgagcggggggtgcttcctcgtctacgagttcatggccaacggaagcctttctcggtacctcgacgccaaggaaggcgatgcggcggacgccgccgccgtcctcgactggcctacacgggtctccatcatcaaaggcgtcgccaagggcatcgagtacctgcacagcagcaagctggcgcaccagagcatctcggcggacaaggtcctgctcgaccacctctacgcgccgcgcctctccggcgcgggcctgcacaggctgctggccgacgacgtggtgttcgcggcgctcaaggacagcgcggccatggggtacctggctcccgagtacgcgacgacggggcggtccacggacaagcagggcgacgtgtacgcgttcggcgtggtggtgctgcaggtgctggcggggcggcgcgccgtgtcgccgccccacctccagcagggcggcggcggcggcgggcggctggacgacctcgtggacccgcgcctgcgcgggcggttctcgcgcgccgaggccgccaagctcgccggcgtcgcgctgctctgcaccgccgaggcgcccgcgcagcggcccaccatgaccgccgtgctgcagcagctcggcaccagcagccagtgatcgtcgtcggcggccggtacggtggtgggccggagtcggagctcgctggctacctggccggcgtggtgactgatttgtgttgagttagttaaccgctactgatctcggctactcgcatggtagctgcatttgctccttgtttgagctgagccccggctccttcctcgggagctcggttgatgtagttgtagtaaagtaagccggtgtgattgcattgtgacggagagtttttattagttaactaccgtctcatggcactgatgttgtatcgaattgtactgtctgtacccttaagatctatctatatgtcgaggatttgttggaaacgcggaaatgtcacgacgagttgcgc

SEQ ID NO: 156609 - DNA, 681 bp, Zea Mays
ggatgaaactctcagtttcgtactgcacaccagcagtccagcagtcaacaaatcctgaaaactatgaagtacaaacatccgcaacattcatctcacatgtacgagacattattgcacaaggatgaaactggtagttcagttctgaagactgcccaacaccaacagcacatagacagcgcccacacaagacgggggacagtgacacagtgaatactgaacactgagcatccgctacattcgcacaacgcaccagctacttacgaggcctcggaaggccacatatcatggctgcagcttcttcggaagaacagcaaggtcgagaatcctcccatacatctttgctagagcttgcccacaccaaccatggccatcgtccagcgttggcatcctcacctcgatgaacggtggaatggctgggccttgaggcttgacgacccctgcgaacaccctgaggacattggcagcatcgatatccatgcatacactgatatcaactgctcccttaggggctgccggaattccagtaatcttgaagtaccctaacagatggttatcttcagcacgttccccttctccttcatacacagcaattagggcttcggtctgcttgtcgtgtgtcgttgtgaacagcatgtccctccttgctggaaccgtcgtgttcctagggatgatcgcagcgaa

SEQ ID NO: 156610 - DNA, 4598 bp, Zea Mays
cggaagcaagcggaggcggctggagggacggcagcggatgcggtgaccatctcgcgcacgcctttccccgtgagcgctggtcctggctttccttatctccccgagcaaccccaccgcacccttctcggtggatccgagggctggagtctcggcggcggcatgaagcggcagaggtcgtacggcgacggtctggacgacgaccggcggaggttctacgaccgcggccccccgccgcgggactacgacggcgataggttcgatcgcaggaaggggttcggtggcggcggcgggttccacgacagccggtaccgagactacccctccccaagggggtatggtggggatcgggccttgcaccggtccgagagtttctctggcttccgtcgggagttccccaagggtttccggtcggagcgtgacaggtcgcggcgggatggtgacggcagctcgacgtggcgtcggccgggaagcgggtggacggacgccgagtgttttgaggagtacagggcacccgccaggctgggagcgtcatcgctgcctgggcagccgcggcggtcacggtcacggtcgcccagtgagccgaggaggaggtttgaggttgccaaggcagagaagccgaggaagcacagtgccggcatcaatgaggtggaggaaggtgagctctcaccagttgctgagcccaaggccaggcctgctgccgtggagcatcggaagcaggttgagtcaagtcgtgtaaaggagaagggactggagcaaggtaaggcgaagaaactgaattctggggtccaagcaaatttgggagctcgagctaatggatcctctagtgcatctgatcctaacaatgcagcgagggaggaaggcaagaaaagggatgacatactggtagctgaagcaatggatgaagtgcgtgagaagtcttcaacaatggttacagaggaagtcgtcagtggaggacatcaggtacaagcactacatgcggctaccactgattctagtgagtttgggctaaccacttcacccatgcagcaaggagtgctgcaggaggaagtgaagccacaagaggagactaccaattcggttgacatggttggggagaacacttcctctaccatgctgaaggagggtattcaggaagaagcaacaacaagagataaaactaacaatgataccgatgaagtcagagagagtgcttcatccaattttagtcaagcagtgcaggaagaagtgacggcattacacaagactggcaatgctgctattgaggttggaaagaacatttcacctctcatgcagcaagaagtgctacaggatgcggtggtggagttagacgatactgcacatgcagttgatgaggttgtgaagagtgcttcctctgatatgctgaaggaagttattcaggaagaagtggtgcaacataatggaagtgccgatgttgttgatatggttgacactgacacttctgatctgccatgggaggcaatgcaggaaaaaacagtaatactggatggaaatgaccataattttgatactgtggaacctgtcagttattctggtatgctgaaggaagcgatgcacgaaggagagttgacaagggatgaaactgccattaacactattgtagcaggacaaggtaattcaactgatatggtggatgaagtgatgctcggtaaagcagctgtgcgggaagtaatctccagtgctgttaattcagttggcgagagcaatatgtctaccgggctgcagggagaggtgatggtttctcaaaaccaacaggctcctgaaagtaaagaatttgaaaaaataactgtaatggcagagatggatgagccagcagaagatatcacacctcagcctgtagaagtggaactcgagatacatcattgcaaagaaagaggtacatcagaggaaactcttgtagtagaaaaggatgcatctgctatgcatgacaatgttgagaaagaagtaaaaggatttgatatcgaggccaaagctgaccgtgcctttatgttccataaacccatgaaagaacatgctgggggtagtaaggaaagaagttgccaatccaaatcttatgacaagggatttgactgaaagataaaagaaatggcatagaatttgatgtccttagtaagaaaagttaaaagtagatcattcatgttcactgggaagaggtctttgactcaacattgcagcgtggtgtagaaccaacacaaacatcaaaatctgcttcaaccactgttgtaaagacagaacatgatacaatcaagctagagaagcttgatctgtcattgagcttatcagtttgtttgcagaattctgaatctaagtcttcgattcctaaaactgcttctctagtccatgcagcattctctcagccgttatcatcatcatctttccacaccaactcagatggggttcccaacttcaataccattgaccaattctgaaacacttgatcacaatcctagttgctcactcacccaacaatcattggacaattatgagcattcagtaggcagcaaacctttctttatgggagttgatcagatgagcaatcacacaagaagacaagctcagttgtctagtgaatctacacagaaggggagtgctaccccactccttcagagagtactccaaaatggccatatggcagatactagcacttctgcgataaaaaagcatactagtggaatatccactgacctacagaggcaaatctcaggagttttgttgccaacacatagtcattgttctcacaactctggattggaacataatagacatagaaggcaacttacaagagagagaagtagtaacagccttacaagggatgaacggcaggaggggggacaactagttgttaatggtgctggtgttattgagaggattatttccaaggttgtttcagaacctttgcatcttacaggaaggatgcttcaagaaatgacagaaaattctataacatatttgagggaggccatttctgaaatcatagtcgatccagataaaagaggacagataattgctttgcaggaggcactcaagaaaagatctgacttcaatattgatatgttgcgatcatgtccacgtgtgttgatggagatacttgtttctataaggactggccttccatattttataaagaaaagcagtagtgttgctacatctaatttggtcgacatttttctcaacttgaaatgccgaaatctctcatgccaaagcattcttccagtggacgattgtgattgtaaaatttgtcagaggatgactggtttctgtagttcttgcatgtgcattgtctgctcaaagtttgactcagcatctaatacttgtagttgggttggttgtgatgtatgtcttcattggtgccacacagattgtggtctacgccactctctgattcgaaaggggcaaagtgcttcaagggcatatggaactactgagatgcagtttcactgttctgcctgtggatatccatcggagatgtttggttttgtgaaggaagtatttcgaacatgtgcacaacaatggaggatagacatgctggttagagagttacagtatgtagaaagaattttttctgcaagtgaagatgtaaggggcaagagggtccgggacttcgtgaagcagatgctaattaagtcagaaaacaaggcctatcatgctgaagttgtcagatgtgtcattgcattcttttctgatgatggtgctaaccttggcagtgatccatcagtaccactgaaaggcattccatgcagcatttctgaagctgttgatgggattcctagttcaagtcggaaggcatggataccatttaccttagagggacttccagttttagacaaaacaactcttcctaccacaagcacagggagcccatctgtgcctagaaaatctggtgaagctgagtttcagacaattgataataagcctgccactgatgaactggatagcttgatcaggttaaagcaggctgaagcatatatgtaccaggaacgtgcaaatgatgcacggaatgaggttgacaatctgagacacattgttatggtaaaaaatgcacgaattgaggaagattatggcacccatatcgctgatcttgacataaatgagttacaagagcggcgcaagcgaaggattgaagaactccaagtaattgaaaggacacaccatgaatttctcagcatgaaaactaggatggtagctagcattggggagttattgtcaaaaatggaggcactgaaacaaaaccgaagcacatgaactgaggttactattgcagaaatcgaagttgctcaacttgtttaaggaagcctgcacatattgttcttacaggaatgcgcaaagcatcgacatgtgaggggtaaccgaatgtctcactggggatgagccaccccagggccccccacgagtagccgaaggaggagaggtgcagacggacgacgaccatgatggtcagaatgtaacataggtagatatagaggatgtttggtttccatgaccaaagtttagttcatgtaatattaaatatttgaatatcaattataactaataaatgtagacttaattatatttaataaatttgtctcgtctttatctgt

SEQ ID NO: 156611 - DNA, 4550 bp, Zea Mays
cggaagcaagcggaggcggctggagggacggcagcggatgcggtgaccatctcgcgcacgcctttccccgtgagcgctggtcctggctttccttatctccccgagcaaccccaccgcacccttctcggtggatccgagggctggagtctcggcggcggcatgaagcggcagaggtcgtacggcgacggtctggacgacgaccggcggaggttctacgaccgcggccccccgccgcgggactacgacggcgataggttcgatcgcaggaaggggttcggtggcggcggcgggttccacgacagccggtaccgagactacccctccccaagggggtatggtggggatcgggccttgcaccggtccgagagtttctctggcttccgtcgggagttccccaagggtttccggtcggagcgtgacaggtcgcggcgggatggtgacggcagctcgacgtggcgtcggccgggaagcgggtggacggacgccgagtgttttgaggagtacagggcacccgccaggctgggagcgtcatcgctgcctgggcagccgcggcggtcacggtcacggtcgcccagtgagccgaggaggaggtttgaggttgccaaggcagagaagccgaggaagcacagtgccggcatcaatgaggtggaggaaggtgagctctcaccagttgctgagcccaaggccaggcctgctgccgtggagcatcggaagcaggttgagtcaagtcgtgtaaaggagaagggactggagcaaggtaaggcgaagaaactgaattctggggtccaagcaaatttgggagctcgagctaatggatcctctagtgcatctgatcctaacaatgcagcgagggaggaaggcaagaaaagggatgacatactggtagctgaagcaatggatgaagtgcgtgagaagtcttcaacaatggttacagaggaagtcgtcagtggaggacatcaggtacaagcactacatgcggctaccactgattctagtgagtttgggctaaccacttcacccatgcagcaaggagtgctgcaggaggaagtgaagccacaagaggagactaccaattcggttgacatggttggggagaacacttcctctaccatgctgaaggagggtattcaggaagaagcaacaacaagagataaaactaacaatgataccgatgaagtcagagagagtgcttcatccaattttagtcaagcagtgcaggaagaagtgacggcattacacaagactggcaatgctgctattgaggttggaaagaacatttcacctctcatgcagcaagaagtgctacaggatgcggtggtggagttagacgatactgcacatgcagttgatgaggttgtgaagagtgcttcctctgatatgctgaaggaagttattcaggaagaagtggtgcaacataatggaagtgccgatgttgttgatatggttgacactgacacttctgatctgccatgggaggcaatgcaggaaaaaacagtaatactggatggaaatgaccataattttgatactgtggaacctgtcagttattctggtatgctgaaggaagcgatgcacgaaggagagttgacaagggatgaaactgccattaacactattgtagcaggacaaggtaattcaactgatatggtggatgaagtgatgctcggtaaagcagctgtgcgggaagtaatctccagtgctgttaattcagttggcgagagcaatatgtctaccgggctgcagggagaggtgatggtttctcaaaaccaacaggctcctgaaagtaaagaatttgaaaaaataactgtaatggcagagatggatgagccagcagaagatatcacacctcagcctgtagaagtggaactcgagatacatcattgcaaagaaagaggtacatcagaggaaactcttgtagtagaaaaggatgcatctgctatgcatgacaatgttgagaaagaagtaaaaggatttgatatcgaggccaaagctgaccgtgcctttatgttccataaacccatgaaagaacatgctgggggtagtaaggaaagaagttgccaatccaaatcttatgacaagggatttgactgaaagataaaagaaatggcatagaatttgatgtccttagtaagaaaagttaaaagtagatcattcatgttcactgggaagaggtctttgactcaacattgcagcgtggtgtagaaccaacacaaacatcaaaatctgcttcaaccactgttgtaaagacagaacatgatacaatcaagctagagaagcttgatctgtcattgagcttatcagtttgtttgcagaattctgaatctaagtcttcgattcctaaaactgcttctctagtccatgcagcattctctcagccgttatcatcatcatctttccacaccaactcagatggggttcccaacttcaataccattgaccaattctgaaacacttgatcacaatcctagttgctcactcacccaacaatcattggacaattatgagcattcagtaggcagcaaacctttctttatgggagttgatcagatgagcaatcacacaagaagacaagctcagttgtctagtgaatctacacagaaggggagtgctaccccactccttcagagagtactccaaaatggccatatggcagatactagcacttctgcgataaaaaagcatactagtggaatatccactgacctacagaggcaaatctcaggagttttgttgccaacacatagtcattgttctcacaactctggattggaacataatagacatagaaggcaacttacaagagagagaagtagtaacagccttacaagggatgaacggcaggaggggggacaactagttgttaatggtgctggtgttattgagaggattatttccaaggttgtttcagaacctttgcatcttacaggaaggatgcttcaagaaatgacagaaaattctataacatatttgagggaggccatttctgaaatcatagtcgatccagataaaagaggacagataattgctttgcaggaggcactcaagaaaagatctgacttcaatattgatatgttgcgatcatgtccacgtgtgttgatggagatacttgtttctataaggactggccttccatattttataaagaaaagcagtagtgttgctacatctaatttggtcgacatttttctcaacttgaaatgccgaaatctctcatgccaaagcattcttccagtggacgattgtgattgtaaaatttgtcagaggatgactggtttctgtagttcttgcatgtgcattgtctgctcaaagtttgactcagcatctaatacttgtagttgggttggttgtgatgtatgtcttcattggtgccacacagattgtggtctacgccactctctgattcgaaaggggcaaagtgcttcaagggcatatggaactactgagatgcagtttcactgttctgcctgtggatatccatcggagatgtttggttttgtgaaggaagtatttcgaacatgtgcacaacaatggaggatagacatgctggttagagagttacagtatgtagaaagaattttttctgcaagtgaagatgtaaggggcaagagggtccgggacttcgtgaagcagatgctaattaagtcagaaaacaaggcctatcatgctgaagttgtcagatgtgtcattgcattcttttctgatgatggtgctaaccttggcagtgatccatcagtaccactgaaaggcattccatgcagcatttctgaagctgttgatgggattcctagttcaagtcggaaggcatggataccatttaccttagagggacttccagttttagacaaaacaactcttcctaccacaagcacagggagcccatctgtgcctagaaaatctggtgaagctgagtttcagacaattgataataagcctgccactgatgaactggatagcttgatcaggttaaagcaggctgaagcatatatgtaccaggaacgtgcaaatgatgcacggaatgaggttgacaatctgagacacattgttatggtaaaaaatgcacgaattgaggaagattatggcacccatatcgctgatcttgacataaatgagttacaagagcggcgcaagcgaaggattgaagaactccaagtaattgaaaggacacaccatgaatttctcagcatgaaaactaggatggtagctagcattggggagttattgtcaaaaatggaggcactgaaacaaaaccgaagcacatgaactgaggttactattgcagaaatcgaagttgctcaacttgtttaaggaagcctgcacatattgttgtaagtttctttttcttttattattatttctgcttgttctaggactagctttctgtaatattattctttttcactactgctgtgatagagattccttcacttttggatcatttcaatcacataggcagaatgatgagatgtaaactctagatcttcctgtatataatctcaataattatctacatgcacatgtggtgcttcctgatgtgatgttcttgattccta

SEQ ID NO: 156612 - DNA, 2816 bp, Zea Mays
cacagacccaaagcaacccgaccgttgccggtgccgcctcagccccaggaaaaaggaagcccctcgtccgtcaacatccctggtcctgtcatccacgcgcgcacgttcaccggcggcccctctctttcagttcggtcggagggccaacccgacctccgaggcctgagcggcctcgatgtcggcgcggcgggcggccaagagccagcacgcggcggcgacgccgaggaccatcaacctcaacctggcgaggaggccgggcggcgggaggcccagccggggcgcggggcgcgcgcagacccgcccggcgccgccgcagccggcgaggcaggtgcaggtcaacctcggcgcgctgttcgagatggagcgccgcgtgcgcgggctggagtccgcaccgccatcgccggcgccggcgtcgcagtcgcaggaagacgccgaggaacgggaggagaagtggcagttccaggcggagatactccgcgccgagtgcaacttcctccggatggagcgcgaggtcgcgctgcgcaagctcgaccgccaccgcggccagatggaggccgcgctcaagtccgccgtcgaaacgctcgtatcggggaggaagaaggtcgacgggaagggcgacgtcggcgttgcggcggcgctggacgaggggatcgaggacctcgaggagatgatggaggagctgcgtgtggagaaggagagcgggaggagggcgatgggcggtgcccgtgagctgcagcggagccgcggcaggaacttcgatcggcaggcgtcctcgctccgccggcgcctcgagaagatgccgcctgccaatcccgatcccctcgtcaaggacatccgcgagatcgccctgcccgtccccgcgccaccgccaccgccaccagcggctgagcaaagcggcgacgatgaacgcgtccacggcgccaacacctctgatgtggaaatgctgaggatgaagatggaggggatgtcaaagggcatgcgcgagcggatggcggagtacagccggcgcctggaagccgtcgcctccggcgacaacgctggctgccagtcaaggaaatgcggcaaccggcacagccgaaaggcgagcgcaggcagccagagaagctggagcgggggcagcaccgcgagcaacggcaacgccccgtcggccctcgacgccggcccgcacgcccgcagccgccagaacgtggcggcggagaagcgtcagcagcagcacgtgattatgtctggagagtgcaaattggtgggctccgcaagttgcagggactgcagggaaatcatgtggaagataatggagcaagtaaatgcagaatctgatcaatggactgagatgcaagatatgttggagcaggtcaggttggagatgcaagagctgcagtcttccagagatacctggcagcatcgggctatggcttctgacatcagtctccgctccttaaattctcaattactggagtggaaaaatcggggacaggcgtacgaacagcgtgcggaggagctgcacaggaagatttcagagctcgaaagcaagctacacacttccaaagcccatttaccagccccagctgttattcctaaccaaaatcagtggtcagatgcgtgcaagatggagcacccaagaggaaatcctcagcaccagccatccaaggaacccggcaaggaggagatcaagaagcacgtcctcatctgccgcgtgaagcactcgcccagcagcgtgctcccgaagcggtcgccgttccaggagataggcaacatcaggttgccgcggcatcggtgagcatgggtgggcaggtggccatgtgttatgtgagactgtgacctgtgtgagtgatgggctgctgcagcgaaactgcgaaggattcaggcgcaagagagaactctctttcggtttggcgtccacagtagcatcgatcagcttctacgtaataaataatttatttgtgacccactgatgagtaacatggcccgcctgactgtcagatcggtagtaataatcataagtagtcagtacagtgatgaataggtgagatatgtatgtaacggggtaacgctttatgtatgtgcaattttgttcctgctccatccaattttccatttttttgcccactgtgtgatttgttcatggtacattggtatatgagctcgagtcaaattctgattagcgctgaaatgaacacagaacactgatggtacattggtatatggtttcatcatgcacactgatgcaagcacaactgcacaagtaacaatggaaattgaggctttattggatttggatctaaatatactacaggtacagcatccatatgcaactaacagcaacgatcttttctaccttgaagatcagcaacggtatagatgattacagcaccaagtcagtggttaatcatagagagccaagcgcagtacgtgcacacgagcttctgagagatgtacacgtacacggcgaaggagaagctcatgagcgtgacgtccttccagtcccccttctgcttggggctcaggctctcccgcgctgccatcccggccttcaccacgtcgccgcgcagcctctcggccgtggcagcccaccacggggtcgtcttctcctcaccacctcctcccccgccgccgccgcttgccggcggcccggacgggaggtgactttggcagacgaggtaggatctcggcctagacgacacggcgtcgctacatcgtcgcctgcagccctgcggaacatgtggggtgctgctgatggtaaacatgcacagggaagccatgcatggacggtcggtcagatctagcctgtggccttgtgggctggagatgggtttgtt

SEQ ID NO: 156613 - DNA, 951 bp, Zea Mays
ctgtggctgatattttctcgatagtttgtactggagacaagttgcatatgtacctcagtagcttgctactttcctgctacttcttgttctggtgctcaaataatacatccatttttaatgtttgtttaaattgatatcagattcattggtttgttagacaaggggaaaatttatatcagctaaatatgtgacactttccagcatttttggtcgaagtagcttacctactggtacaatttagtctcaaatatatccaatccaaataaactaattaacttatgttgtattgcattgatcaggtgatagccctcaatagctctggtgctgcagaaggcgaactttatatggatgacggcaaaagctatgattaccagcaaggggcattcagccatcgccgatttgtctttgcagacaataagctaacttcattcaatatcgcacctgacaatttgagcaagaaatttacaagtggttgcgtgattgaaagaattatagtcctcggtttacgatccggagtgaagaaggctattattgagcctggaaaccaagaagtagaaattgaatcagggccaattagtttaaggagtggttccagcccagttgtgccaacaatccggaggcccaatgttcgcatcgcagacagttggacaatatggatagcgtaagaggttgtccattcacgtctggagcctgatgtctcttttgtttgctgtcaggttgcgaagttaggccaatctttagaagtttagttgtggcctcgatcattgcgcatatcattatggttttgtggcctcaaaatatttacatgtaactggtacttaagctgttccaactgccaattttgacagaaatactgagagagattgctgatgtatatttgtagctttcatacatgagtatttgagtttattatcttgcaaaaatgataaacagttacaaattccgagaaca

SEQ ID NO: 156614 - DNA, 2190 bp, Zea Mays
gcccggccccacctccatccagatccacccgtcactccgtcagccccgccgcgcgcaccatggatcccccgccgcggcggctagccgccccgctcctcctcctgctcctcgcagcggcctcccccgccgcgcgcgcgtggaagaaggacgagttccgcaactgcaaccagacgcccttctgcaagcgcgctcgaacccgcgccccgcactcgctcgaggcgccgctctccctcgccgctggctcgctcgccgtctcccccgacggctctatctctgccgagctctcccacccgtcccgcccgcgacccctcgtgctccgcctctccgtgctgcccccgcacgcgctgcggctccagatcgatgaggactactccaccgccactccgtgctggcctggatcatcttcctatcctgacatgctgaatcctgagatacgcgagtggtgggctgacaagttctcctatgaaaattacaagggatcaactccaacactctacatttggaacgatatgaatgagccatctgtcttcaatggccctgaggtcaccatgcccagggatgcgatgcattatggagatgttgaacaccgagaattgcacaatgcatatgggtactacttccatatggctactgcagacggacttctcaagcgagacaaggggaaacatagaccctttgttttgtcaagggctttctttgctggaagtcaacggtatggtgcagtctggacaggcgacaactctgctgattgggatcacctgaaatcttctatcccaatggtcttaattcttggtcttactggtttgcctttctctggcgcggatgttggtggattttttggaaacccagaaccggacctgttggtgcgttggtatcaagtaggagccttttatcctttctttaggggtcacgctcaccatgacaccaagagacgtgagccatggttatttgggtaattgttcagatactgctcttttttgaagttttatctttgaagttctgtgatttctgtccaacatgtctgatattagaggggaagaaaactcacatggcgagacttcattcttgcgttttttgtatgtttcatacttattttcaatactaacataatcaccttactctagggagcgaagaactgccataataagggaggcgattcatatgcggtattcactgttgccctacttctacacgctgtttagagaggctagtgtgaatggcattcctgtcatgcgtcctttatggttagaattccctgaagacaaagaaacatataacaatggtgaggcatttatggtcggaccaagccttttagctcaaggaatatatgaagagggccagaaatcagtgtcggtctaccttcctgggaaggagtcgtggtatgacttgagaaatggatctccatacaagggaagtgtgacacacaagctacaggttttagaagatagtattcccagcttccaaagggctggtacaattgtgccaagaaaggacagattcagacgcagttctactcagatggtgaatgatccatacactctggtgatagccctcaatagctctggtgctgcagaaggcgaactttatatggatgacggcaaaagctatgattaccagcaaggggcattcagccatcgccgatttgtctttgcagacaataagctaacttcattcaatatcgcacctgacaatttgagcaagaaatttacaagtggttgcgtgattgaaagaattatagtcctcggtttacgatccggagtgaagaaggctattattgagcctggaaaccaagaagtagaaattgaatcagggccaattagtttaaggagtggttccagcccagttgtgccaacaatccggaggcccaatgttcgcatcgcagacagttggacaatatggatagcgtaagaggttgtccattcacgtctggagcctgatgtctcttttgtttgctgtcaggttgcgaagttaggccaatctttagaagtttagttgtggcctcgatcattgcgcatatcattatggttttgtggcctcaaaatatttacatgtaactggtacttaagctgttccaactgccaattttgacagaaatactgagagagattgctgatgtatatttgtagctttcatacatgagtatttgagtttattatcttgcaaaaatgataaacagttacaaattccgag

SEQ ID NO: 156615 - DNA, 2008 bp, Zea Mays
gcccggccccacctccatccagatccacccgtcactccgtcagccccgccgcgcgcaccatggatcccccgccgcggcggctagccgccccgctcctcctcctgctcctcgcagcggcctcccccgccgcgcgcgcgtggaagaaggacgagttccgcaactgcaaccagacgcccttctgcaagcgcgctcgaacccgcgccccgcactcgctcgaggcgccgctctccctcgccgctggctcgctcgccgtctcccccgacggctctatctctgccgagctctcccacccgtcccgcccgcgacccctcgtgctccgcctctccgtgctgcccccgcacgcgctgcggctccagatcgatgaggactactccaccgccactccgtgctggcctggatcatcttcctatcctgacatgctgaatcctgagatacgcgagtggtgggctgacaagttctcctatgaaaattacaagggatcaactccaacactctacatttggaacgatatgaatgagccatctgtcttcaatggccctgaggtcaccatgcccagggatgcgatgcattatggagatgttgaacaccgagaattgcacaatgcatatgggtactacttccatatggctactgcagacggacttctcaagcgagacaaggggaaacatagaccctttgttttgtcaagggctttctttgctggaagtcaacggtatggtgcagtctggacaggcgacaactctgctgattgggatcacctgaaatcttctatcccaatggtcttaattcttggtcttactggtttgcctttctctggcgcggatgttggtggattttttggaaacccagaaccggacctgttggtgcgttggtatcaagtaggagccttttatcctttctttaggggtcacgctcaccatgacaccaagagacgtgagccatggttatttggggagcgaagaactgccataataagggaggcgattcatatgcggtattcactgttgccctacttctacacgctgtttagagaggctagtgtgaatggcattcctgtcatgcgtcctttatggttagaattccctgaagacaaagaaacatataacaatggtgaggcatttatggtcggaccaagccttttagctcaaggaatatatgaagagggccagaaatcagtgtcggtctaccttcctgggaaggagtcgtggtatgacttgagaaatggatctccatacaagggaagtgtgacacacaagctacaggttttagaagatagtattcccagcttccaaagggctggtacaattgtgccaagaaaggacagattcagacgcagttctactcagatggtgaatgatccatacactctggtgatagccctcaatagctctggtgctgcagaaggcgaactttatatggatgacggcaaaagctatgattaccagcaaggggcattcagccatcgccgatttgtctttgcagacaataagctaacttcattcaatatcgcacctgacaatttgagcaagaaatttacaagtggttgcgtgattgaaagaattatagtcctcggtttacgatccggagtgaagaaggctattattgagcctggaaaccaagaagtagaaattgaatcagggccaattagtttaaggagtggttccagcccagttgtgccaacaatccggaggcccaatgttcgcatcgcagacagttggacaatatggatagcgtaagaggttgtccattcacgtctggagcctgatgtctcttttgtttgctgtcaggttgcgaagttaggccaatctttagaagtttagttgtggcctcgatcattgcgcatatcattatggttttgtggcctcaaaatatttacatgtaactggtacttaagctgttccaactgccaattttgacagaaatactgagagagattgctgatgtatatttgtagctttcatacatgagtatttgagtttattatcttgcaaaaatgataaacagttac

SEQ ID NO: 156616 - DNA, 3087 bp, Zea Mays
gtcccggagcccggccccacctccatccagatccacccgtcactccgtcagccccgccgcgcgcaccatggatcccccgccgcggcggctagccgccccgctcctcctcctgctcctcgcagcggcctcccccgccgcgcgcgcgtggaagaaggacgagttccgcaactgcaaccagacgcccttctgcaagcgcgctcgaacccgcgccccgcactcgctcgaggcgccgctctccctcgccgctggctcgctcgccgtctcccccgacggctctatctctgccgagctctcccacccgtcccgcccgcgacccctcgtgctccgcctctccgtgctgcccccgcacgcgctgcggctccagatcgatgaggactactccaccgccactccgccgcaccgccggttccaagtccccgatgtcctcctcccggacctcgaggcacgcacgctccacctccccgagcccaagaccgccgccggcgtatccaccgtcgccctctcctccgaccttgacgtcgtcgttaagcacgatccgttcgagcttaccctccgtcgcgctgggtcgggcgatcctgtgctctccttcaactcccacggtctcttcgacttcgagccgatgcgggagtccaagccggagaacgagacgtgggaggagcacttccggagccacaccgacaagcgcccccgcggtccgcagtccatcaccttcgacctctccttttatggcgcggacttcgtctacggtctcccggagcacgggtccacctcgctcgccctccgccccacccgcggcccgggggtcgaggagtccgaaccctaccgcctcttcaacctagacgtcttcgagtacctccacgaatcgcccttcggtctgtatggctcgatccccttcatgattgggcatggaagtcggtcgtcgtctggctttttctggctcaacgcagcggagatgcagatcgacgtgcttgcaccaggttgggatggtgccactgcgcaggacaatgggcggatcgacacactgtggatggctgaggctggtgtcgttgatgcattcttctttgttggttctgagcccaaggatgtgatcaagcagtacataagtgtgtcaggcacaccttcaatgccacagcagtttgctatagcgtatcaccaatgccggtggaactaccgggatgaggcagatgttgacagtgtagatgctggttttgatgagcatgatattccatatgatgtgctctggctcgacattgagcacacagatggcaagcggtactttacatgggatcattctgccttccccaatccagaggagatgcagcggaagatagcagataaggggaggaagatggtcaccatcgtggatcctcatatcaagcgggacagttcattccacctccaccaggaggcaacagacaaggggtactatgtgaaagatgcaaatgggaatgactatgatgggtggtgctggcctggatcatcttcctatcctgacatgctgaatcctgagatacgcgagtggtgggctgacaagttctcctatgaaaattacaagggatcaactccaacactctacatttggaacgatatgaatgagccatctgtcttcaatggccctgaggtcaccatgcccagggatgcgatgcattatggagatgttgaacaccgagaattgcacaatgcatatgggtactacttccatatggctactgcagacggacttctcaagcgagacaaggggaaacatagaccctttgttttgtcaagggctttctttgctggaagtcaacggtatggtgcagtctggacaggcgacaactctgctgattgggatcacctgaaatcttctatcccaatggtcttaattcttggtcttactggtttgcctttctctggcgcggatgttggtggattttttggaaacccagaaccggacctgttggtgcgttggtatcaagtaggagccttttatcctttctttaggggtcacgctcaccatgacaccaagagacgtgagccatggttatttggggagcgaagaactgccataataagggaggcgattcatatgcggtattcactgttgccctacttctacacgctgtttagagaggctagtgtgaatggcattcctgtcatgcgtcctttatggttagaattccctgaagacaaagaaacatataacaatggtgaggcatttatggtcggaccaagccttttagctcaaggaatatatgaagagggccagaaatcagtgtcggtctaccttcctgggaaggagtcgtggtatgacttgagaaatggatctccatacaagggaagtgtgacacacaagctacaggttttagaagatagtattcccagcttccaaagggctggtacaattgtgccaagaaaggacagattcagacgcagttctactcagatggtgaatgatccatacactctggtgatagccctcaatagctctggtgctgcagaaggcgaactttatatggatgacggcaaaagctatgattaccagcaaggggcattcagccatcgccgatttgtctttgcagacaataagctaacttcattcaatatcgcacctgacaatttgagcaagaaatttacaagtggttgcgtgattgaaagaattatagtcctcggtttacgatccggagtgaagaaggctattattgagcctggaaaccaagaagtagaaattgaatcagggccaattagtttaaggagtggttccagcccagttgtgccaacaatccggaggcccaatgttcgcatcgcagacagttggacaatatggatagcgtaagaggttgtccattcacgtctggagcctgatgtctcttttgtttgctgtcaggttgcgaagttaggccaatctttagaagtttagttgtggcctcgatcattgcgcatatcattatggttttgtggcctcaaaatatttacatgtaactggtacttaagctgttccaactgccaattttgacagaaatactgagagagattgctgatgtatatttgtagctttcatacatgagtatttgagtttattatcttgcaaaaatgataaacagttac

SEQ ID NO: 156617 - DNA, 1165 bp, Zea Mays
catgtgtgcgtggggcccaggcattattgcaggaatagaaaccctaccaccatctccgctcgtggcgtgctccactgattcttcttcttcttcttctacctcccggccggtctcctcccctttctttgtctgcctgtgcttattagtatctcgcctcaccacgcagctagctagcagacagccagacacgcgctgctttcagatatctcaccggaccgtcgtcgtcggcccctccgagaacataccaccgcgcccgccgccgcgcgcgccaccacgtccacgtacgccggccggccaccaagcaagcatggatacggtttcacagtccgagcacctgtgctacgtccgctgcacctactgcaacaccgtgctcgcggttggggttccatgcaagaggctcatggacacggtgactgtcaagtgcggccactgcaacaacctctcctacctcagtccacggccccccatggtgcagccgctctcgccgactgatcatcccttggggccattccagtgtcagggaccctgcagtgagtgcaggaggaaccaaccgctgccgctggcctcgccgacatcgactgacctcaccccgagaatgcccttcgttgtcaagcccccggagaagaaacatcgcctcccatctgcttacaatcgcttcatgagggaggagattcagcgcatcaaagctgcgaagccagatatccctcacagggaggccttcagcatggctgccaagaattgggcgaagtgtgacccgcgctgctcgacgactgcctctactgccacttctaacagcgctcctgagcctgctagagtcgtcgtgcccactcctcatgtaactgagccacgctttgatctggaggatagggccaaggagcatgtcattgagagcttcgacatcttcaagcagattgagcgcaacatctagatgtctccatttcgagtaccatcagctctatatataacctatgcatgcatatgcatccccatcttgtactttttacccccatgttactgttgctattattcttgctcttgttggattgtacgcaccctttaattgacagttgctaccctatataatgtttgccatcttatatattgtcgtcgttccttatatagggttatgatcgatatatatgtagtgtgtgcaataatttgcatt

SEQ ID NO: 156618 - DNA, 586 bp, Zea Mays
ctatctatccctcctgtgttagttgatgtgattgagtaagatgaacagtagttaaggttgttcttgtactcaatgcatttgttttatctttcattgcagccccggagaagaaacatcgcctcccatctgcttacaatcgcttcatgagggaggagattcagcgcatcaaagctgcgaagccagatatccctcacagggaggccttcagcatggctgccaagaattgggcgaagtgtgacccgcgctgctcgacgactgcctctactgccacttctaacagcgctcctgagcctgctagagtcgtcgtgcccactcctcatgtaactgagccacgctttgatctggaggatagggccaaggagcatgtcattgagagcttcgacatcttcaagcagattgagcgcaacatctagatgtctccatttcgagtaccatcagctctatatataacctatgcatgcatatgcatccccatcttgtactttttacccccatgttactgttgctattattcttgctcttgttggattgtacgcaccctttaattgacagttgctaccctatataatgtttgccatcttatata

SEQ ID NO: 156619 - DNA, 123 bp, Zea Mays
tttttttatacattttttttatattttatactctgtccgtcccaaattaaaattagtagttgttttagatcttagtttgtatgtctatattcaaatgaaagagaataaatctagacacatata

SEQ ID NO: 156620 - DNA, 2514 bp, Zea Mays
aaacgcgcaaaacctcgagcgccgctcgcctcccgccatttccttcccaaatctaccttatcatattataagcgcgcgtagccttggcagctcgacgcatcttcgcctccgctcaacgctcgcccacgcccccagcccccaaccgatccaagagaaaccttctcgcctccgcgggacgattcgccagggagagcaaaggtagcagaggcgccatggacgctgccaagtcggtgacgccgggcgccgtgtcatacatcctggcgcacccgtctacgggctccgatggcgccgtgtcggatctcgtcgttcaggtcctcgatctcaagtccatcggcatgggcagccggttcagtttcacggcaaccgatgggaacgacaaaatcaaggcgatgctccccacttactttgcgtcggaggtccactccggcaatctgaagaatttcggtctcatccgcatcctcgactacacttgcaactccgtcaaaggcaacgctgacaaagtcctgattgtcgtcaaatgcgagactgtgtgcgaagcgctcgatgccgagatcaacggcgaggccaagaaagaggatcctccaattgtgctgaagcctaaagacgaaggctcagtcgtggctgaggaaacaaattctcccccactcgtgatgaagcctaagcaagaggtgaagtccgcgtcccagatcgtgactgagcagcgtggaaatgctgctcctgccacgcgcctttccatgacaaggagggtccatcccttgatcactctgaacccctaccagggtaactgggtcattaaggtgcgggtcacgagcaaaggcaatctcagaacctacaggaatgctcgtggagaaggctgcgtcttcaacgtagaacttactgatgaggatggcacccagatccaggccaccatgtttaacgaggctgcaaagaagttctatccaatttttgagctgggaaaggtctattatgtctcaaaaggatctcttagaattgccaacaagcagttcaagacagtcaaaaatgactatgagttgtcactaaacgagaatgctattgttgaagaagcagagggggagactttccttccaccagtgcaatacaaccttgtcaagattgatcagctaggaccatacgtcggtggcagggagcttgtagatattgttggtgtggttcagagcgtatctcccacactcagtgttaggagaaagattgacaacgagacaataccgaagcgtgatattgttgtagcagatgactctggcaaaactgttactatttctctctggaatgatcttgctactacgactggccaagagcttttggacatggttgacagttcgcctgttgttgcgataaagagcctaaaagtatctgacttccaaggcgtatctctttcaactattggcagaagtactctcgagattaatcctgacctgcctgaggctaagaatctgaagtcctggtatgactctgaaggcaaagatacttcactggcaccaatcagtgcagaagtgggtgccacacgcgctggtggtttcaagtccatgtattctgatagagtttttctgtctcacatcaccagtgatcctgctatgggccaggaaaagcctgttttcttcagtctgtacgccatcataagccacatcaagcctgatcagaatatgtggtaccgtgcttgcacgacctgtaacaagaaggtgactgaagcttttgggtctggatactggtgcgaggggtgccaaaagaattactctgagtgctcgctgagatacatcatggtgatcaagctctccgatcccactggcgaggcttgggtgtctgtgttcaatgagcatgcagagaagatcattggctgcagcgccgacgagcttgatcggatcaggaaagaggagggggacgacagctacgttctcaagctcaaggaagccacctgggttcctcacctgttccgtgtcagcgtcacgcagcatgaatacatgaacgagaagaggcagagaatcaccgtgaggggtgaagcaccggtcgacttcgcagctgagtccaagtacttgcttgaagagatcgcgaagctcaccgcttgctagaagacgcagtctttctggtggttcttgaaggactggcccccgatgtctccctcgcagtttttcttttgagctccagtaacttgattactgttctgtgtgttgctctcactgggttttagcacttctgtaaggtatatgtagatgctagattaccttggtgtcaaggaacagatgctatgataagccttgcaaaattgcagttccaattccgtgtatctgcaactttgagcaaataggaaaagattatgagtactgattgatgatgttaggtcgctgcagctaacaagtgtttggtttttatggactactgtttagtccctgtattttattctattttagtatttaaggttgtgtttggttgcgtcgactagacgtgttgtgcgtgtccgatgagtctattattgaagcacagaattgagaattggaataa

SEQ ID NO: 156621 - DNA, 111 bp, Zea Mays
gacggatacggatacagggaccggatatttatccgggcggataagtgacagatacggatattatttgatcggatatcggatacttgtcggataatgcattaattggttatc

SEQ ID NO: 156622 - DNA, 663 bp, Zea Mays
atgtccttcctcataacggcagcttctggcaagccgggttcctcggagcctgtaacactctcacgtggatcgacgggatctatgttgtcgtcgccgccgcctagcgtctcttgcggcgggatggtctccctctccggcacgggcgacttggacaaggtgggaggcgagttctgctgcatcagcgcagacgtgtcgactgggctggctgagaagagaggaaggcagctacggttagattcatggggaggatggataaaggggaactcgagcgcacgcaccgaagtctgcgaagagcttagcgagggaaacctctgcgatcaactggatccggcagggcacaaactccccagcccctacacctgcaccgccacggtcgccgttgtcagagcgcccgctgttggggtaggtggcggcggtgccgaggagcaccacgctgcacgccaggttattacggaaggaggaggtactgggagttctaggccaggtgggaacggagttggacgggaagaggtggaggatgcgggcatgcggggcgtggacggttctgcagaagtgccgaggttgaaacggcgcatggtcgtggtcatgggggaggaggtcgaggtcgtgggcagagtgcggcgcgccgtcgtggagtggagggcaccaccacaccgaagatga

SEQ ID NO: 156623 - DNA, 2233 bp, Zea Mays
cctttagatccgccattagttttgtacatggtcgcactcgcacaattcgcacgtcaggtcaggccctcccctatctgtaacttagacgtcactctttggttccataatctattggctcgcttttattccacaaaaatggtttacagaaagcgagagaagtccgtctgctggtcgcaaccgagcaggatgctgtcattgcccagaacggcggcggcggtgactgtgtatgcgctggtcgctcttatcgccggcgccgccgcggcgggaggtggcgagcagccgctgtcgaggatcgccatccaccgcgccaccgttgcgccccagccgggtgccttcgtcgacgcttcgccggcccttctcggccgggagggggaggacagagaatgggtgaccgtcacatatagtaaccccaggccctcgaaggatgactggattggagtcttctcccctgctaatttcaatgattccatttgtccaccagagaatgaatgggtggagccccctcttttatgcacagctcctatcaagttccaattcgcaaactacacgaatcgtgattatggaaacactggaaagggatcgttgaggcttcagctgataaatcagagagagggtttctcttttgcattgttctctggaggcctgtcgaatccgaagctcatcgcccactcaaagagtgttactttcatcaacccaaagactccggtgtacccgcggttagcacaaggaaaatcctggaacgaaataacagtgacatggacaagtggctatggtaccaatgaggctacaccatttgtcagatggggcatagaagggcaaatccaaaccctttctcctgcaggcacccttactttcagtcgcgacaccatgtgtggtcctcctgcaaggacagttggttggcgtgatcctggtttcatacacacaagttttctcaaggacttatggcccaatctcttgtacacataccaagttggtcatcgcatttttaatggttctatagtttggggacatcagtatagcttcaaagcacctccttatcccggggaagactctttgcaacgtgttgtaattttgggggatatgggcaaggctgaggttgatggttcaaatgagttcaatgactttgagcctggttcacttaacacaacaaaccagctaattaaagacttgaagaacattgatgtagttttccatattggagacatcacatatgccaatggctatctttcacaatgggaccaattcaccgcacaggttgagcccattgcttctactgtgccttacatggttgggagtggtaaccacgaaagagattggcctggatcaggatctttctatggaaatcttgactcaggtggtgaatgcggggtaccagctcagaatatgttctacgtgccagcagaaaaccgtgagcagttctggtactcaacggactacggaatgttccgtttctgcgtagccaataccgagttggactggaggccaggaacggagcagtacaggttcatcgagcactgcctgtcatctgttgataggcagaaacagccatggctcatcttcctcgcgcaccgtgtcctgggttactcgtcggccaccttctacgccgacgaaggaacgaccgaggagcccatgggccgtgagagccttcagccactctggcagaagtacaaggtcgacatcgctatgtacggccacgtccacggctacgaacggacctgcccagtatatgagaacgcgtgcgtggccaaggggtccgacctctacgccggcgccttcacggcgacgacgcacgtcgtggtgggcggcggcggcgccagcctcgccgactacacggccgcgcgggcgcgatggagccacgtgcgggaccgcgactttgggttcgtgaagctgacggcgttcaaccacacgaggctgctgttggagtacaagaagagccgggatggcagcgtgcacgaccacttcaccatctcccgcgactaccgcgacgttctggcctgcggcgtcgacaactgccccagcaccaccctggcgtcgtgagcgagcggtggtgtcgattatattcggtttgtgtcgctgttggattttgatttcaagatcgatgcactgtgctgtactgttgtggacggaatgaaatacctgagtgaggaagcagctgctggtgcagcaggtccacatgctgcttcggagtgtccccacggccaaaaatgatcacacccctgaattctttgcttac

SEQ ID NO: 156624 - DNA, 941 bp, Zea Mays
atctagtcggttaacttcaatgcaattctggactcttctaggcccaaatgaaattctctgctgtaacagtcaagagtataaaaattgatcatcctctttgcaaagcaggttgccgtgctcgcggatgacatattgaaaaatgtggaatatgatgctctgagggttattttcaacaagttccaatctgtcatatcgtttaagcccacaatggtaacaatactttcccccgaggttgcagaaaaagaatcagaagctggtgggaagatgggtgacctagattcttatgagattgaaggcggcgagacaaaatcagagattttgcagaatctagctgagttccagttttcttgtgtcctgtacaatggtgccctagagaatgcatgcagtgagcttggagcccgtatgtctgccatggacagctctagcagaaatgctggcgatatgcttgatcgtctcactctcacttacaacaggacacgccaagcatccatcaccacagagcttactgagattatatctggtgcatcggcccttgaggggtagtgaagagactgcggacttcttccttttgccgtttgtgttcctctcccatgaaggctttttccctcgggagtctcagtttcagctcctttcatttcacttttccttgagaaacttgctctcatgctttgttgcaataatcaggccaacgacaatgatagtgccgtgcacccttggcacattgcagaaagagtgtaaacagctatggttaatgggtggttttcatgaatggtgatgatcaatatatgtattgttgcacatgatcagcaatgttgtattggtggggtgactaatgcctgccgccaaactgagcgatataacgcgtcattaatgacatttgttcaatctgaactttaaacatttttccacttggagaatctattttgaattttggtatttca

SEQ ID NO: 156625 - DNA, 1529 bp, Zea Mays
tctctctcctcgactccttccttataacacggaggtccgcatatgggcaaagagagagaaggtgagtgctttgacaagggaaaaaaaaccaggtctgtgtgtgtgtgagagagagagagaggcgaaggcaactcaggcgacgcgatggcgatggcggcgctgcgacgcgaggggaggcgcctcatcctctcctccaccgtccccaacccgtctctggcggccgcttcctctgcggtgacgcgatcctccgccgtctcgcaaccggagatggctccacttggtgcacggtctatttcaactcaaatcgtgaggaaccggatgaagagtgtcaggaatatccagaagatcacaaaggctatgaagatggttgcagcatcaaagctccgggcagttcagacaaggactgaaaattcacgtggcttgtggcaaccgttcaccgcccttcttggggatgctcctagtgttgacgtcaagaagaatgtgattgtggccattacctctgataagggactctgtggtggtattaattcaacatcagtgaaagttagcagggcccttcacaaattgacatctggtccagaaaaagaaaccaagtatgttatattaggagaaaagggcaaagttcagctgttgcgtgactcaaaggacagcattgaaatgactgcaactgaactgcagaagaaccctatcaactacacacaggttgccgtgctcgcggatgacatattgaaaaatgtggaatatgatgctctgagggttattttcaacaagttccaatctgtcatatcgtttaagcccacaatggtaacaatactttcccccgaggttgcagaaaaagaatcagaagctggtgggaagatgggtgacctagattcttatgagattgaaggcggcgagacaaaatcagagattttgcagaatctagctgagttccagttttcttgtgtcctgtacaatggtgccctagagaatgcatgcagtgagcttggagcccgtatgtctgccatggacagctctagcagaaatgctggcgatatgcttgatcgtctcactctcacttacaacaggacacgccaagcatccatcaccacagagcttactgagattatatctggtgcatcggcccttgaggggtagtgaagagactgcggacttcttccttttgccgtttgtgttcctctcccatgaaggctttttccctcgggagtctcagtttcagctcctttcatttcacttttccttgagaaacttgctctcatgctttgttgcaataatcaggccaacgacaatgatagtgccgtgcacccttggcacattgcagaaagagtgtaaacagctatggttaatgggtggttttcatgaatggtgatgatcaatatatgtattgttgcacatgatcagcaatgttgtattggtggggtgactaatgcctgccgccaaactgagcgatataacgcgtcattaatgacatttgttcaatctgaactttaaacatttttccacttggagaatctattttgaattttggt

SEQ ID NO: 156626 - DNA, 2109 bp, Zea Mays
atgtttgcacgattcgcagcccatctctctcctcgactccttccttataacacggaggtccgcatatgggcaaagagagagaaggtgagtgctttgacaagggaaaaaaaaccaggtctgtgtgtgtgtgagagagagagagaggcgaaggcaactcaggcgacgcgatggcgatggcggcgctgcgacgcgaggggaggcgcctcatcctctcctccaccgtccccaacccgtctctggcggccgcttcctctgcggtgacgcgatcctccgccgtctcgcaaccggagatggctccacttggtgcacggtctatttcaactcaaatcgtgaggaaccggatgaagagtgtcaggaatatccagaagatcacaaaggctatgaagatggttgcagcatcaaagctccgggcagttcagacaaggactgaaaattcacgtggcttgtggcaaccgttcaccgcccttcttggggatgctcctagtgttgacgtcaagaagaatgtgattgtggccattacctctgataagggactctgtggtggtattaattcaacatcagtgaaagttagcagggcccttcacaaattgacatctggtccagaaaaagaaaccaagtatgttatattaggagaaaagggcaaagttcagctgttgcgtgactcaaaggacagcattgaaatgactgcaactgaactgcagaagaaccctatcaactacacacaggtctgtttttattagtttccagatcaaggtttgcatatgttttagttcaaaaaagatttgcatctgtttattttcttgatgcctgattgttttcacctaatcatgctgtggtgtttgttctctgcctctccgggctatataactccttgactaatttgtgaagctactattctgaatgtgcagaaaaaggatatctagtcggttaacttcaatgcaattctggactcttctaggcccaaatgaaattctctgctgtaacagtcaagagtataaaaattgatcatcctctttgcaaagcagctgagtgcctgagtctttgtgacatcaaactattgagtatatgataaactaatgctaggaagacctgaccatttgtgtgcttccaatcgtttgcttagtagcacttggattatgaaaatatgtcttagcatgttgttgggttctaactttagcttccttagatgtcaggaatgtattgtttctgtgatgaaatttgtgaatacattcactttagtacattttttatataaatatagtttcctttgttgctctgaagtttaatgctttcaattgaatgaattgcaggttgccgtgctcgcggatgacatattgaaaaatgtggaatatgatgctctgagggttattttcaacaagttccaatctgtcatatcgtttaagcccacaatggtaacaatactttcccccgaggttgcagaaaaagaatcagaagctggtgggaagatgggtgacctagattcttatgagattgaaggcggcgagacaaaatcagagattttgcagaatctagctgagttccagttttcttgtgtcctgtacaatggtgccctagagaatgcatgcagtgagcttggagcccgtatgtctgccatggacagctctagcagaaatgctggcgatatgcttgatcgtctcactctcacttacaacaggacacgccaagcatccatcaccacagagcttactgagattatatctggtgcatcggcccttgaggggtagtgaagagactgcggacttcttccttttgccgtttgtgttcctctcccatgaaggctttttccctcgggagtctcagtttcagctcctttcatttcacttttccttgagaaacttgctctcatgctttgttgcaataatcaggccaacgacaatgatagtgccgtgcacccttggcacattgcagaaagagtgtaaacagctatggttaatgggtggttttcatgaatggtgatgatcaatatatgtattgttgcacatgatcagcaatgttgtattggtggggtgactaatgcctgccgccaaactgagcgatataacgcgtcattaatgacatttgttcaatctgaactttaaacatttttcc

SEQ ID NO: 156627 - DNA, 517 bp, Zea Mays
atgtatgggcggtagtggtaccacgctcgacccaactcatgtcagaccagagctccaccctcgcctcgaagggcaaagcctcgacggctggcggcggccgaagcgatgtcgcggcggccgttggagtgtcatcttgcggcgtaagacccggactaccacccactggccagacgacggaggaggaggaggcgcgcgtcaggcgcgaggcggataaagccgagctcgaggaggagatcgccacgttgaaggcggagatctttcgccctggaggaagagttggccaggatggatgccgccgccgccgctactcgcgcgagcgcttctcactctcgtgtttcagataggccactgtgattggctggagctgttgtcgtagatctcggaggtaggtagatggaattccccattgcaattacttcaggtcatgttctgctgaaacagctgcaacgttctcgaattttattgcccttaagcacgattggtttgggattatacaatcaaagaactgttctgcaca

SEQ ID NO: 156628 - DNA, 501 bp, Zea Mays
taatttgtattgtggctatttggagaaaaatgcaatttttttgttcaaatcaaccgccacgaacgtgtgttctaatgaacccatgctatagaatctcggtcttttttcctataacatataggagtcctacatttataatatggatatacgtctattgcctaacaaaacgtgctcaatattttgtatatcttttgatcagtatatgttttcataatgttatttgaaagtatctcaggctagcttggatcatggtgctacgttttcaagagctgctagccaacgccaatgcatctcgtttaagatcgtgcatgtgaccttcgtctcctctcctgatgttaggccttcacaacttgtattatgtgcaggcagaaaaaaatcctctcttttatatagcaaccacctgctgttaagaccttttgactctatatcctaaggctgcaaactgtgttctctaagtatctgtgcaaccagcatcttttattggcccaaaaatgtatttga

SEQ ID NO: 156629 - DNA, 863 bp, Zea Mays
atgtccagggacagagaaacagggaagggggcttgcatcgtagagacagattcgcaggttatgcaggtcgaggaggagcaaatagaaccattaagggagcaggtatggttcttgtttcttcactcatgaaattatgttataatgtgttgggtggacttttcgagccccgaaccctggattacatcttgttattataaaaggggagctaactacagcaggcagtgtgtgaagctttaacccattgtaatttctggccctgtagaggggaactcagcagccaccgggttttgggcaatgtggcaaaaatggtgaatcattggagcatggtaacagcaagcatcttggaagggggcatgtctgcctgacctagatccaggtcgtggtgaaagaattagatgacttgctgaaattattccagcccatcaggacagaaaaaagcttgcacacatgcgcccatccatgcatgccaattgaaaggtgtcatatgcagtgcagtgcagtgcatgggtgtttatggccatggttgtggttgtggttgcaaggcatgagcgagcaagaagccaaccatccatttaaactgtttggttgaaaggtgtcatttgaagggctatcttcccattgttgtagtagtagtattgtattagtttgtttatcttttgttttgatctgggtcttaatttgccttgatatgtgcaaggcctgcagttgaatgcaatgcgagcaacaacttagttatgtgtgtgtgactctgaagggatctatctatatgctcaagcataagaagcataattttgttattcattgaatgaagaactggctactctacccgttccaaattatatatacttcaagttgtacatgat

SEQ ID NO: 156630 - DNA, 653 bp, Zea Mays
atgtccagggacagagaaacagggaagggggcttgcatcgtagagacagattcgcaggttatgcaggtcgaggaggagcaaatagaaccattaagggagcagaggggaactcagcagccaccgggttttgggcaatgtggcaaaaatggtgaatcattggagcatggtaacagcaagcatcttggaagggggcatgtctgcctgacctagatccaggtcgtggtgaaagaattagatgacttgctgaaattattccagcccatcaggacagaaaaaagcttgcacacatgcgcccatccatgcatgccaattgaaaggtgtcatatgcagtgcagtgcagtgcatgggtgtttatggccatggttgtggttgtggttgcaaggcatgagcgagcaagaagccaaccatccatttaaactgtttggttgaaaggtgtcatttgaagggctatcttcccattgttgtagtagtagtattgtattagtttgtttatcttttgttttgatctgggtcttaatttgccttgatatgtgcaaggcctgcagttgaatgcaatgcgagcaacaacttagttatgtgtgtgtgactctgaagggatctatctatatgctcaagcataagaagcataattttgttattcattgaatgaagaa

SEQ ID NO: 156631 - DNA, 1668 bp, Zea Mays
ggccgaggataaaccctcaaatggcaccttcttggtttggacattacggaaactacagaaatggtcagagtgttgctacgcttaatgctgctacgcttaatgcgcagaagcccatggctttgccatttaattttccgaaagcatctcggaacaatgaaaataatagccatgctgaaaatagagttgaacctagccaatctgttaggcctgggcatcatctcccatcagcaagaatggaagctttggttccttccaatgtaaaagtgtcttcaatgatgagaaggcctaagaagcgtaaaactatggactccacacttgtttcttggcataaaataattgaaagcccacgaaaattgaggggcatcagcacacctgagatggactgggcttgggcagctaaccggttaattgagaaggatgaggcagaaactccagacgatgctcctttaaattatttgccgcggaagaggctaattttgacaagccagttgatccagcaacttctccctgctataccagcgaccattctgagagcacaagctgtgtctgcttacggaagtgcgacatacactctatcaatgttgacactaagggatgcatgcagcatggcatcatcatcatataactcttgctcacctgtggaggatgaaaataacccatctgaacaaccaagtgctaagaaaatggaagacagagtgtcaaaggttgtggaagtcttcgttggaagaatccggaagatggaaaatgactttataagtttgaacaagagggcctcgatgctagatgtgcaactggagtgccaagatctggagagaatttctattgtaaatcgtctgggaagatttcatggccggagccatgcagcggcagttgagagttcatcagctccagaaatgactcctcggagaatttttcctgaaagacatgtcatgtcttttgccgtgcctggaaatcttcctgaaggagtgtgctgtttgtcactctagtggaatgatcttcagttattttctagccgcaatgatgatcccgggtcgcgccctgtgattcccagtgctccttgtcccatgcaaagcatggtcaaacagaaggatcatatattgtcaaggggtaacttgagaactggaagcatcacagtaccacgatgaggcaggccggggacatgttccagccgatcaagtcagtgctggctgttgttgatgcaccttatatcaagtataggtccatgtatattgtggaaagtgaaggaaaaaaactgtggatctcccatcatttttctcgatgaagagtaattagcctcagaatttttttagagaagtcgatgcttactagcttagtgcatctggtgggtttcttgggtatttgtcgatctctaagaaatccgtgatgatggagtgttggcaggctagagtggaaataataatgtgagcctttctctgggttctttggttcctttaggatgggatgcaaattggctagtgtgtcctccagtctaactgaccacccctgttagtcagcagttaattattactagttttatgtagtgctgaaagcattcatggaacaattggcgggtaaagtgcttgggaattcttgtaacttgtgtacccgtgatgtttaaacgctaacgggttcttgtaaatttgaagtgccaatattcctgaggttata

SEQ ID NO: 156632 - DNA, 584 bp, Zea Mays
tcaatctccaaaacaagctgctgatagtgatgcaaagttagcatcttcccagaagggaaacctagagttgacaggaactaccgtaacaggaggaaacgaatccttgcagaagccttcttcagatgagaattctatcaatgctgtttcatcctttgcacagttgcgtcagcaaggcatccttggtgctaaacatggggagaacccaggagctaattttcaggctatgaatgtttcccacaataatgctaatcacagtggtggcattgttttacatggaagtccagcacctacaaacattcagcagcaaaattactctcttctacatcaaatgcaaacctcgaggcatatggatgttgatccaggcagtttatctggaaagacgacaaaacctgatattggttctgatgctgcacagattgattggaattctggtcagagatttgctcatgtaaccaataactcaaccaaatcgtctgcagataacattggaagccctggtgtcccagggtcattcacatcggacttgaaaatgttgagttttgcttcaaggaacgaggagagaaatccaaacataccttctcggt

SEQ ID NO: 156633 - DNA, 511 bp, Zea Mays
tggggagttctggaatgaacattggtctgtctccaggcaatccaatgtcaaatagtctgtttccacctcagacacgaaatagtctgcagcatcattttggcacaaactcccatgtttccaatagtatgccgtcagcaagtgagaaaatgatgatggcacaggaacaacttcaatcgcgacatggtctccccaacagctccagtgcatcaactttaggaggagctgatactggtctatcccagaatagagcagttcaaaacagtcaacatatgcttcagcttctgcataaggtggataactcaaggaatagcaatgtggttgctgacatacccaacaattcccttggcgttgtttctgcccagcaacaacttaaccattcttctttgcaaggatttgggttgagactggcaccaccatcccaactccaatcaatttcgggtaatttatggtctagtcagactaatgctgatggcaagcaattttaccaagatggcgaccgcacacagctacc

SEQ ID NO: 156634 - DNA, 1034 bp, Zea Mays
ctcctggctcgcttgcgttgtggagctcgagactgtcgccattccgctacgagaaaccctaaccctagccctcgcaccgccgcgggaggccgcgggagagaccgtgtcgcaccgcgccgtcgatcccgatccagacgccgtcgcgccgtgccgcgctgatcgagtgtggaggaatggaggacgggcagaatatcagattgcttgcagctagtttatttttccagcccagggtgaacttctgggtagtgtagtttgtcgtgggtttatcttctgcagaatagaagcaaatatttgtaaaagctgcttatagttctatatgatatgaaagtttgggaactatcaactgcaaattggccactctttctcaggcattagaccctaagggatactcaaggaatgtcacattttcatcccacacagcatgctagtgacaatgattttcagatgtggcaacagcagatgatgttcaagcacttgcaggagtttcagaggcagcaacaactacagcagtctgatcatggagccaggatgcagctctcttttggacagtttcatgctcctgcaaaacctttgcctggtgatcaattgtcgacaatgtcaaatgaaatggtcaacaatgagaccatgaattctggatggccacataattttacaggtggtgacctgagtttgacgagcaactcccagatgttgaacaatggtagcacaaattgggatcagattgttggttctcctgttgtgggcaatttcatgaatggttcaatgtttgtgaatgctcataatcagtcgatgagaccaatgggattagctacccaccaagtggatcaaactttttatccaatgcatgctaccagcagtagagggcctggaaaccagtattcccaatttttagggattcctgctgatcctcagagtgaagcggcaagggttggtccagttcagtcagaaaagacatccagaccattcaactcttcaatgaacgaacttggtcttcatatgcaaggtaccaccagtttgatgcataattttcgtgg

SEQ ID NO: 156635 - DNA, 417 bp, Zea Mays
acgctcagacgtctaggcatctcgcttgctttccttccaggcttccacgattccaccccagtctgcccaccgactcttccctctccccactactgtcggcgcgtgctctttcctcctcacaccgcacacccgctgccggagctcgagagtcccctccgcttgtcggtgcccgttctgtcaacccctcgccggacgcctgccgccggagctagagagggccaatgcagccgccgctgcgtggtgcctagggcgggtcgcaggggacaaggccgagcccaccaccgtcgacgaggcattcatggaacgcagcaagagcttcatcaaggccctccaggagctcaagaacctgcgcccacagctctacaccgcctccgagtactgcgacaagtcctaactccacagtgagcagaagcaaaa

SEQ ID NO: 156636 - DNA, 1625 bp, Zea Mays
agttcacctttctcttctaatggcttcaagccggcgacagcagcaacaatgcgacgttcatttcaccgtttgcttcccgagatacggtcatacggagccacagtttgtcgttactgctcccagccagcgtgaaccgatcccacggagctcatcccacaggccacagcactcctccggtactcccctcgcacgacttcacgagcgcggtcgactgccgccgccaccaccgccgatctgcaaggtcccgtcgaccaccgccactctgcaagtgaggggaaagaggcaagattgaggagggaagcatcgctggtgtatccgccgccacattcgtcgccgggagccagcccatattcgagacgaggtcgagctttgctgccttggcgagcttcagtcgaatcaaggttgagcctggcggcaggccagtaaacagagcaacgcaaaacccttcgaatcaatggagacctccgcagcaaccccgacccggccgccccacccggcggccgcttccccatcgccgtcgccctcgtcgtcgctgaggctgtggaggtcagcggcgcagcgcaacgtgcgcaatcagtggtcccgtctgagcgccgccaaggagcagtggctggccgccgttgctgatggccgcgcccacgcctccgcgctcgtcaacgcccacctctgccgcaggaacatgccagcgacggatttgggggtgctcaaggatatgccggggatccgcgataaggctaactccaagttggtgcttagagaggagcaatacagtgggatgcttctgtcggcctacaaggagatggtccgtcagctgtcctacttggttgaagcttcccattctatgcgctgtttttctaaagcagctccaaattgctccatcacacagttttctgaccgccaagataatttgaatgattcaggggatggtggaggagccccagtattcaaatggttctccatattagaatttgagactcttgcccaggagcttgttcagatgtttgtttcagagcaaaagttgaagaggctgctactcttggaatttctctcgattgctttaaaggaaggtgtagaactccagacatcattaaattggggtgatgaactatatgatggtgaatcaaatgaacttcagagtattggccttcagtcaggagatgcctactcaccgcctgaaaattggtgtgcagaacgtttagggagtcagcgacctggcaatctccctctgcatgaagttttacaggtttatttaaccacttggcatgctaatatgaacatcaaccggagtagaattggtgaaatatttgagcttgttgaggaggagatgaagattaaactgtcttgaagattccgattcattttgtttggctattcatcaaggaagaagaaatggaaaagaaagatcaatcagtttactattcaccaggtttctctatccagtgtctttatctgccttagtagaagtcttcagagcttacctatcatcttagaatatagtactggtctccttgtaacccataatatatttttttaatccaatgttcggttaccctggaatcatattgggaggagagcgttggaccaacatatgttattgaaatgagatttccaagttatcaggatca

SEQ ID NO: 156637 - DNA, 1621 bp, Zea Mays
agttcacctttctcttctaatggcttcaagccggcgacagcagcaacaatgcgacgttcatttcaccgtttgcttcccgagatacggtcatacggagccacagtttgtcgttactgctcccagccagcgtgaaccgatcccacggagctcatcccacaggccacagcactcctccggtactcccctcgcacgacttcacgagcgcggtcgactgccgccgccaccaccgccgatctgcaaggtcccgtcgaccaccgccactctgcaagtgaggggaaagaggcaagattgaggagggaagcatcgctggtgtatccgccgccacattcgtcgccgggagccagcccatattcgagacgaggtcgagctttgctgccttggcgagcttcagtcgaatcaaggttgagcctggcggcaggccagtaaacagagcaacgcaaaacccttcgaatcaatggagacctccgcagcaaccccgacccggccgccccacccggcggccgcttccccatcgccgtcgccctcgtcgtcgctgaggctgtggaggtcagcggcgcagcgcaacgtgcgcaatcagtggtcccgtctgagcgccgccaaggagcagtggctggccgccgttgctgatggccgcgcccacgcctccgcgctcgtcaacgcccacctctgccgcaggaacatgccagcgacggatttgggggtgctcaaggatatgccggggatccgcgataaggctaactccaagttggtgcttagagaggagcaatacagtgggatgcttctgtcggcctacaaggagatggtccgtcagctgtcctacttggttgaagcttcccattctatgcgctgtttttctaaagcagctccaaattgctccatcacacagttttctgaccgccaagataatttgaatgattcaggggatggtggaggagccccagtattcaaatggttctccatattagaatttgagactcttgcccaggagcttgttcagatgtttgtttcagagcaaaagttgaagaggctgctactcttggaatttctctcgattgctttaaaggaaggtgtagaactccagacatcattaaattggggtgatgaactatatgatggtgaatcaaatgaacttcagagtattggccttcagtcaggagatgcctactcaccgcctgaaaattggtgtgcagaacgtttagggagtcagcgacctggcaatctccctctgcatgaagttttacaggtttatttaaccacttggcatgctaatatgaacatcaaccggaaattggtgaaatatttgagcttgttgaggaggagatgaagattaaactgtcttgaagattccgattcattttgtttggctattcatcaaggaagaagaaatggaaaagaaagatcaatcagtttactattcaccaggtttctctatccagtgtctttatctgccttagtagaagtcttcagagcttacctatcatcttagaatatagtactggtctccttgtaacccataatatatttttttaatccaatgttcggttaccctggaatcatattgggaggagagcgttggaccaacatatgttattgaaatgagatttccaagttatcaggatca

SEQ ID NO: 156638 - DNA, 1493 bp, Zea Mays
agttcacctttctcttctaatggcttcaagccggcgacagcagcaacaatgcgacgttcatttcaccgtttgcttcccgagatacggtcatacggagccacagtttgtcgttactgctcccagccagcgtgaaccgatcccacggagctcatcccacaggccacagcactcctccggtactcccctcgcacgacttcacgagcgcggtcgactgccgccgccaccaccgccgatctgcaaggtcccgtcgaccaccgccactctgcaagtgaggggaaagaggcaagattgaggagggaagcatcgctggtgtatccgccgccacattcgtcgccgggagccagcccatattcgagacgaggtcgagctttgctgccttggcgagcttcagtcgaatcaaggttgagcctggcggcaggccagtaaacagagcaacgcaaaacccttcgaatcaatggagacctccgcagcaaccccgacccggccgccccacccggcggccgcttccccatcgccgtcgccctcgtcgtcgctgaggctgtggaggtcagcggcgcagcgcaacgtgcgcaatcagtggtcccgtctgagcgccgccaaggagcagtggctggccgccgttgctgatggccgcgcccacgcctccgcgctcgtcaacgcccacctctgccgcaggaacatgccagcgacggatttgggggtgctcaaggatatgccggggatccgcgataaggctaactccaagttggtgcttagagaggagcaatacagtgggatgcttctgtcggcctacaaggagatggggatggtggaggagccccagtattcaaatggttctccatattagaatttggagcttgttcagatgtttgtttcagagcaaaagttgaagaggctgctactcttggaatttctctcgattgctttaaaggaaggtgtagaactccagacatcattaaattggggtgatgaactatatgatggtgaatcaaatgaacttcagagtattggccttcagtcaggagatgcctactcaccgcctgaaaattggtgtgcagaacgtttagggagtcagcgacctggcaatctccctctgcatgaagttttacaggtttatttaaccacttggcatgctaatatgaacatcaaccggagtagaattggtgaaatatttgagcttgttgaggaggagatgaagattaaactgtcttgaagattccgattcattttgtttggctattcatcaaggaagaagaaatggaaaagaaagatcaatcagtttactattcaccaggtttctctatccagtgtctttatctgccttagtagaagtcttcagagcttacctatcatcttagaatatagtactggtctccttgtaacccataatatatttttttaatccaatgttcggttaccctggaatcatattgggaggagagcgttggaccaacatatgttattgaaatgagatttccaagttatcaggatca

SEQ ID NO: 156639 - DNA, 1946 bp, Zea Mays
cacagcgccacagacctccctcccagtggtcgattctttgcttgtagctagctgtaccagcctctctctctccgtctcttgtgttgaaggggagacagagaagggtaggcgacacgccatggaaccgacaaggctgctgcttcttctcctcgttctcggcgtgtcgctgcaaggatgcattgcgcagggcggcggcggcgccggagggctcacgcgggggagcttccccaagggattcgtcttcggcaccgcctcctccgcttaccagtacgagggagcggtgaaggaggacggcagagggaaaaccatctgggacaagttcgcgcacacgtttgggaaggttgcagacctgagtaacgccgatgtcgcggtcgatcagtaccaccggttcgaggaggatatacagctcatggcggacatggggatggacgcgtaccgcttttcgattgcctggtcgaggattctgcccaatggtaccggccaagtcaaccaggccggcgtcgaccactacaacaggtttatcgatgcactgctatcgaaagggattgagccatacgtgaccctgtaccactgggacctcccccaggccctggaagacaggtacaacggatggctggacaggcagatagtgtacgacttcgccgagtacgccgagacatgcttcgaggccttcggagaccgcgtgaggcactgggtcacgctcaacgagccgcacacggtcgccgtccagggctacgacgccgggctccaggcgccgggccgctgctccctgctgctccacctctactgcaggtcgggggactcggccaccgagccctacgtcgtcgcccacaacttcatcctggcacacgccaaggtctccgacgtgtacaggaaaaagtacaaggcggctcagaacggagagcttgggatagcgttcgacgtcatgtggttcgagccgatgaccaacactaccgccgacatcgaggctgccaagagagggcaggagttccagctcggatggttcgcggaccccttcttcttcggcgactacccggcgtcgatgaggtcgcgggtcggcgacaggctgcccaggttcacggcggccgaggccgcgctcgtcaagggggcgctcgacttcgtcggcataaaccactacaccacctactacaccaagcacaacagcaccgacctcgtgggccgactgctgcacaacaccctggcggacaccggaaccatcagcctcccgttcaggaacgggaaagccatcggtgacagggccaactcgatctggctgtacatcgtgcccagcgggatgaggagcctgatgaactacgtcaaggaaaggtacaacagcccgccgatttacgtcaccgaaaacggtaagagaaggccgccatggcgtggtgggtgggtgctcgatctgaaatgtggcgcgcgctctctctagctactcatcgatgtgaccttctggtgcagggatggacgacggcaacagccccttcacctccatcaaggacgccctcaaggacagcaagagggtcaagtaccacaacgactacctcaccaacctggctgcctctataaaggatgacgcctgcgacgtgcgtggctacttcgcctggtcgctgctggacaactgggagtggacggccggctactcctccaggttcgggctctacttcgtcgactacaaggacaaccttaagagataccccaagagctcggtgcagtggttcaagaacctgctggcctctagctgaagcctcgatggatatatatatactgcattgtcatttccttctttaatcttcatggcctgcccaagtggccatctgaaaccatgcatgcatgtacgctgtggcgtccccttctggatgccttctcctttcatctatatagccacgatacaatacaagttgcctggaagaaaactatcgaggcgaaataaagtcaaggcaatactt

SEQ ID NO: 156640 - DNA, 1894 bp, Zea Mays
cacagcgccacagacctccctcccagtggtcgattctttgcttgtagctagctgtaccagcctctctctctccgtctcttgtgttgaaggggagacagagaagggtaggcgacacgccatggaaccgacaaggctgctgcttcttctcctcgttctcggcgtgtcgctgcaaggatgcattgcgcagggcggcggcggcgccggagggctcacgcgggggagcttccccaagggattcgtcttcggcaccgcctcctccgcttaccagtacgagggagcggtgaaggaggacggcagagggaaaaccatctgggacaagttcgcgcacacgtttgggaaggttgcagacctgagtaacgccgatgtcgcggtcgatcagtaccaccggttcgaggaggatatacagctcatggcggacatggggatggacgcgtaccgcttttcgattgcctggtcgaggattctgcccaatggtaccggccaagtcaaccaggccggcgtcgaccactacaacaggtttatcgatgcactgctatcgaaaggccctggaagacaggtacaacggatggctggacaggcagatagtgtacgacttcgccgagtacgccgagacatgcttcgaggccttcggagaccgcgtgaggcactgggtcacgctcaacgagccgcacacggtcgccgtccagggctacgacgccgggctccaggcgccgggccgctgctccctgctgctccacctctactgcaggtcgggggactcggccaccgagccctacgtcgtcgcccacaacttcatcctggcacacgccaaggtctccgacgtgtacaggaaaaagtacaaggcggctcagaacggagagcttgggatagcgttcgacgtcatgtggttcgagccgatgaccaacactaccgccgacatcgaggctgccaagagagggcaggagttccagctcggatggttcgcggaccccttcttcttcggcgactacccggcgtcgatgaggtcgcgggtcggcgacaggctgcccaggttcacggcggccgaggccgcgctcgtcaagggggcgctcgacttcgtcggcataaaccactacaccacctactacaccaagcacaacagcaccgacctcgtgggccgactgctgcacaacaccctggcggacaccggaaccatcagcctccgtacgtgagcctgagccttcttcgttcctccacaccgccttcgtccttctctcaatggactaacgacggttgttggttctgcatcacagcgttcaggaacgggaaagccatcggtgacagggccaactcgatctggctgtacatcgtgcccagcgggatgaggagcctgatgaactacgtcaaggaaaggtacaacagcccgccgatttacgtcaccgaaaacgggatggacgacggcaacagccccttcacctccatcaaggacgccctcaaggacagcaagagggtcaagtaccacaacgactacctcaccaacctggctgcctctataaaggatgacgcctgcgacgtgcgtggctacttcgcctggtcgctgctggacaactgggagtggacggccggctactcctccaggttcgggctctacttcgtcgactacaaggacaaccttaagagataccccaagagctcggtgcagtggttcaagaacctgctggcctctagctgaagcctcgatggatatatatatactgcattgtcatttccttctttaatcttcatggcctgcccaagtggccatctgaaaccatgcatgcatgtacgctgtggcgtccccttctggatgccttctcctttcatctatatagccacgatacaatacaagttgcctggaagaaaactatcgaggcgaaataaagtcaaggcaatactt

SEQ ID NO: 156641 - DNA, 1849 bp, Zea Mays
cacagcgccacagacctccctcccagtggtcgattctttgcttgtagctagctgtaccagcctctctctctccgtctcttgtgttgaaggggagacagagaagggtaggcgacacgccatggaaccgacaaggctgctgcttcttctcctcgttctcggcgtgtcgctgcaaggatgcattgcgcagggcggcggcggcgccggagggctcacgcgggggagcttccccaagggattcgtcttcggcaccgcctcctccgcttaccagtacgagggagcggtgaaggaggacggcagagggaaaaccatctgggacaagttcgcgcacacgtttgggaaggttgcagacctgagtaacgccgatgtcgcggtcgatcagtaccaccggttcgaggaggatatacagctcatggcggacatggggatggacgcgtaccgcttttcgattgcctggtcgaggattctgcccaatggtaccggccaagtcaaccaggccggcgtcgaccactacaacaggtttatcgatgcactgctatcgaaagggattgagccatacgtgaccctgtaccactgggacctcccccaggccctggaagacaggtacaacggatggctggacaggcagatagtgtacgacttcgccgagtacgccgagacatgcttcgaggccttcggagaccgcgtgaggcactgggtcacgctcaacgagccgcacacggtcgccgtccagggctacgacgccgggctccaggcgccgggccgctgctccctgctgctccacctctactgcaggtcgggggactcggccaccgagccctacgtcgtcgcccacaacttcatcctggcacacgccaaggtctccgacgtgtacaggaaaaagtacaaggcggctcagaacggagagcttgggatagcgttcgacgtcatgtggttcgagccgatgaccaacactaccgccgacatcgaggctgccaagagagggcaggagttccagctcggatggttcgcggaccccttcttcttcggcgactacccggcgtcgatgaggtcgcgggtcggcgacaggctgcccaggttcacggcggccgaggccgcgctcgtcaagggggcgctcgacttcgtcggcataaaccactacaccacctactacaccaagcacaacagcaccgacctcgtgggccgactgctgcacaacaccctggcggacaccggaaccatcagcctcccgttcaggaacgggaaagccatcggtgacagggccaactcgatctggctgtacatcgtgcccagcgggatgaggagcctgatgaactacgtcaaggaaaggtacaacagcccgccgatttacgtcaccgaaaacgggatggacgacggcaacagccccttcacctccatcaaggacgccctcaaggacagcaagagggtcaagtaccacaacgactacctcaccaacctggctgcctctataaaggatgacgcctgcgacgtgcgtggctacttcgcctggtcgctgctggacaactgggagtggacggccggctactcctccaggttcgggctctacttcgtcgactacaaggacaaccttaagagataccccaagagctcggtgcagtggttcaagaacctgctggcctctagctgaagcctcgatggatatatatatactgcattgtcatttccttctttaatcttcatggcctgcccaagtggccatctgaaaccatgcatgcatgtacgctgtggcgtccccttctggatgccttctcctttcatctatatagccacgatacaatacaagttgcctggaagaaaactatcgaggcgaaataaagtcaaggcaatactt

SEQ ID NO: 156642 - DNA, 2231 bp, Zea Mays
cccctgcacgtcacgggagtccatggaggccgcccgttctagatcgcacggctcgcgccccgcgacgccatccaaccccgcgcggccccacctacagcgagcggctcgcgccgtgccccagttgccagctccgcctcccttaaaacccaccgctgttcgcgtcctcgtttctctcaatctctctcttctcctcgcctcgccttggtgttcacgccgtcgctagcgcctgccgcggcgaagcttctgccctccccggcgccgggctcgggtcgtcgtcggccaggaagatggctggcggcttcagggtactgcatctggtcaggccttttcttgctttcttgccagaggtgcagagcgcggataggaagataccgttcagagaaaaagttatctacactgttatttccctcttcattttcctggtctgcagccagctcccactctatggcattcattcaacaactggagctgatcctttctactggatgcgtgttatcctcgcatcaaaccgtggcactgtgatggagttgggtattactccaattgtgacatctgggatggtaatgcaacttcttgttggatcgaagatcattgaagttgacaacagtgtgagagaggatcgtgctctgctgaatggtgcacaaaagttgcttggtatcctgattgctattggggaagctgtggcatatgtcctgtctggaatgtatggcagtgtaagccaacttggaacagggaatgctatcctcattatacttcagcttttctttgctggcatcattgtcatctgtctggatgaacttctccagaaaggttatggcttgggatctggcatttctctgttcattgctaccaatatctgcgagaatatcatctggaaggcatttagccccacaaccatcaacagtggtcgtggtgctgaatttgaaggggctgtcattgcactgtttcatctgttgattacgagaaccgataaagtccgtgctcttcgtgaggctttctaccgccagaaccttccaaatgtgaccaatttgcttgccacagtcttggtcttcctcatagttatctatttccaaggcttccgtgttgtccttccagtgagatcaaagaatgctcgtggccagcaaggctcatatccaattaagctattctacacttcaaacatgcccatcattctgcactctgcactgattaccaacctctatttcatatcccagcttctctacaggaagtacagtggaaacttccttgttaaccttcttgggatgtggaaggagtctgaatactctggccattctgttcctgttggtggtcttgcttactatgtaactgccccatcaagtttggctgatgtccttgcaaatccattccatgcactgttttatgtggtcttcatgctgtcagcttgcgctctgttctcaaaaacgtggattgaagtttctggttcatcagcaaaggatgttgctaagcagctcaaggaacaacaaatggtgatgccaggacatcgtgagtcaaacttgcagaaggaactgaaccgatacatccccactgctgctgcatttggtggagtatgcatcggcgcattgactgtcctggctgatttcatgggtgcaattggttcaggaactggaatactgctggctgtgacaatcatataccaatactttgaaaccttcgagaaggaaagggcaacggagcttggtttctttggtttttgattagtagctgtggaaccttgaaccgatagctgaattttcttgtaaggccctgtttggaagcaacccggtttttaagaaaccagtttttatattttagctaggagaggccagcttctcagtttttaagaaactgagaatctaatttctataaacttagtcataaactggtatgtttggaaccacctcaatttctataaaccagtttcttaaaaactgggtgtttccaaacagggcctaagtcactgtagtgcttagccagttgtaacttaagagagttctgttaggttgccttgtggccacaatcatgtagcagaatctgtccaaagagcgtgttcatcccatccacaatcagtaatccgcactctacagtttgctcataggttaccctggcaactggatgttctgtgttcaatttcagttacttttgaactgtaaggtctgttattactagtttcccagaacttagatgctcacgtgcgctttatttcaatatctattttgtgatgttgcatgatt

SEQ ID NO: 156643 - DNA, 1748 bp, Zea Mays
attgcaccacgcaaaactccaacgaacttctcatttgctgattacaggaagatggctggcggcttcagggtactgcatctggtcaggccttttcttgctttcttgccagaggtgcagagcgcggataggaagataccgttcagagaaaaagttatctacactgttatttccctcttcattttcctggtctgcagccagctcccactctatggcattcattcaacaactggagctgatcctttctactggatgcgtgttatcctcgcatcaaaccgtggcactgtgatggagttgggtattactccaattgtgacatctgggatggtaatgcaacttcttgttggatcgaagatcattgaagttgacaacagtgtgagagaggatcgtgctctgctgaatggtgcacaaaagttgcttggtatcctgattgctattggggaagctgtggcatatgtcctgtctggaatgtatggcagtgtaagccaacttggaacagggaatgctatcctcattatacttcagcttttctttgctggcatcattgtcatctgtctggatgaacttctccagaaaggttatggcttgggatctggcatttctctgttcattgctaccaatatctgcgagaatatcatctggaaggcatttagccccacaaccatcaacagtggtcgtggtgctgaatttgaaggggctgtcattgcactgtttcatctgttgattacgagaaccgataaagtccgtgctcttcgtgaggctttctaccgccagaaccttccaaatgtgaccaatttgcttgccacagtcttggtcttcctcatagttatctatttccaaggcttccgtgttgtccttccagtgagatcaaagaatgctcgtggccagcaaggctcatatccaattaagctattctacacttcaaacatgcccatcattctgcactctgcactgattaccaacctctatttcatatcccagcttctctacaggaagtacagtggaaacttccttgttaaccttcttgggatgtggaaggagtctgaatactctggccattctgttcctgttggtggtcttgcttactatgtaactgccccatcaagtttggctgatgtccttgcaaatccattccatgcactgttttatgtggtcttcatgctgtcagcttgcgctctgttctcaaaaacgtggattgaagtttctggttcatcagcaaaggatgttgctaagcagctcaaggaacaacaaatggtgatgccaggacatcgtgagtcaaacttgcagaaggaactgaaccgatacatccccactgctgctgcatttggtggagtatgcatcggcgcattgactgtcctggctgatttcatgggtgcaattggttcaggaactggaatactgctggctgtgacaatcatataccaatactttgaaaccttcgagaaggaaagggcaacggagcttggtttctttggtttttgattagtagctgtggaaccttgaaccgatagctgaattttcttggcctaagtcactgtagtgcttagccagttgtaacttaagagagttctgttaggttgccttgtggccacaatcatgtagcagaatctgtccaaagagcgtgttcatcccatccacaatcagtaatccgcactctacagtttgctcataggttaccctggcaactggatgttctgtgttcaatttcagttacttttgaactgtaaggtctgttattactagtttcccag

SEQ ID NO: 156644 - DNA, 823 bp, Zea Mays
agtagctgacgctgaagagggccgaggcggcgaacctatcgtcgttgtgtgctgagttgaaagacgaggtcgcgactgagcgcgagaaggtgtcgtcgctggaggaggaggtgcgacgcctgagataaggccttcgggtggtgactggtgaacgagacgagtctcggcatcaagccaccgaggcttctcttcaagctgactctcacgaaggacctgggggccgagtggagtacggtccaaggcctaagggcctaaatgggagagctcgaaagggatttggatgctgccattcacacctctaaaactcacccaggccgtcgaccaaaagatggtcgagctgaaggacctgtccgacgcggtggtggagtttggtcgagacctttgcgtcgcggacgttcccttgggtgagtacttgcggagccgcatgcgagccctgagtggctacgtgcggagcgaactccgtgaggccgtccatcttggggtgaagcaagtgttggtcgtagtcgcctcccactatgagattaatctcgagcgggcatgcgaaggctacgtcttgttggacgagcgcaacctcgccgaggccgagatgcagaggctcaccgatgttgtcgaggggtcgggctcagtgtaacaccccgtccaatcccggaccggcggtacttactcctggcagctctctaggatcatttatcatccacacaaaccaacatgggtcttttgtgcgcactttgtcctcactcatgtgcacccgataaaacttcccagtcggtcactaatcctaaattgctccaagccaaacacgcttaacttggaggttcttttg

SEQ ID NO: 156645 - DNA, 1992 bp, Zea Mays
aaaaccccaccgctgttcgcgtcctcgtttctctcaatctctctcctctcctcgcctctccttggtgtccgtgttcacgccgtcgctagcgcctgccgcggcgaagcttctgccctccccggcgccgggctcgggtcgtcgtcggccaggcagctgctacgcgtgaacacggtcacaccagtaccacgtgacgtgaacggtgaactcgtgaagaacagagccgccactgaggaaccctagcgacggcggcgtgctaccggtgacattgtccccctcggtccctcctccatccccgacgcagcggcgccagcctgcaggaagcctattcgagacaaggtcgatctttgctgccttggcgagcttcagccgaatcaaggtcgagcatggcggcaggccagtaaatagagcaacacaaaacccttcaaatcaatggagacctctgcagcaaccccgacccggccgccacaccaggcggccacttccccatcgccatcgccctcgtcgtcgttgaggctgtggaggccagcggcgcagcgcaacatgcgcaatcagtggtcccatctgagcgccgccaaggagcagtggctggccgccgttgctgacggtcgtgcccacgcctccgcgctcgtcaacgtccacctctcctgcaggaacatgccggcgatggatttgggggtgctcaaggatatgccggggatccgcgataaggcgaactccaagttggcgcttagagaggtagagcaatacagcggcatgcttctgtcggcctacaaggagatggtctgtcagctgtcctacttggttgaagcttcccattctatgcgctgtttttctaaagcggctccaaattgctccatcacacagttttctgaccgccaagataatttgaatgattcaggggatggtggaggagccccagtattcaaatggttctccgtattagaatttgagagtcttgcccaggagcttgttcagatgtttgtttcagagcaaaagttgaagaggctgctactcttggaatttctctcgattgctttaaaggaaggtgtagaactccagacatcattaaattggggtgatgaactatatgatggtgaatcaaataaacttcagagtattggccttcagtcaggagatgcctactcaccgcctgaaaattggtgtgcagaacgtttagggagtcagagacctggcaatctccctctgcatgaagttttacaggtttatttaaccacttggcatgctaatatgaacatcaaccggagtagaattggtgaaatatttgagcttgttgaggaggagatgaagattaaactgtcttgaagattccgattcattttgttgggctatccatcaaggaagaagaaatggaaaagaaagatcaatcagttcactattcaccaggattctatatccagtgtctttatctgccttagtagaagccttcagagcttacctatgatcttagaatatagtactggtctccttgtgacccataatttttttaaaaaatttaatgttgggttacactggaatcatattgggaagagcgttggaccaacatatgttattgaaatgagatttctaagttatcaggatcattcgcctagcttcagggtttagatgggcgtcgaggcagcaatcgaggcaaggaggaggcgggggtgggggatgctacaccgaccgtgacgtcgcctactgtcttggaccttctgtgcgccctccttgacaccctcgacgctccacggagctcggaggcggtgaccgtcgaggaggtcggtccctcgaggcgacccggggaaccggttgaaaagtacatcatcccgcctcctatcgttggggcgggtggcgacctcgttcgtgccggatcggacctctcgacatggggagggccgaccctgaggtggatggccaccgagggcaacccctacttcgtccttaatgacacggaggagagggagatgtgggcggagtttcgagcaatggctcagg

SEQ ID NO: 156646 - DNA, 1989 bp, Zea Mays
aaaaccccaccgctgttcgcgtcctcgtttctctcaatctctctcctctcctcgcctctccttggtgtccgtgttcacgccgtcgctagcgcctgccgcggcgaagcttctgccctccccggcgccgggctcgggtcgtcgtcggccaggcagctgctacgcgtgaacacggtcacaccagtaccacgtgacgtgaacggtgaactcgtgaagaacagagccgccactgaggaaccctagcgacggcggcgtgctaccggtgacattgtccccctcggtccctcctccatccccgacgcagcggcgccagcctgcaggaagcctattcgagacaaggtcgatctttgctgccttggcgagcttcagccgaatcaaggtcgagcatggcggcaggccagtaaatagagcaacacaaaacccttcaaatcaatggagacctctgcagcaaccccgacccggccgccacaccaggcggccacttccccatcgccatcgccctcgtcgtcgttgaggctgtggaggccagcggcgcagcgcaacatgcgcaatcagtggtcccatctgagcgccgccaaggagcagtggctggccgccgttgctgacggtcgtgcccacgcctccgcgctcgtcaacgtccacctctcctgcaggaacatgccggcgatggatttgggggtgctcaaggatatgccggggatccgcgataaggcgaactccaagttggcgcttagagaggagcaatacagcggcatgcttctgtcggcctacaaggagatggtctgtcagctgtcctacttggttgaagcttcccattctatgcgctgtttttctaaagcggctccaaattgctccatcacacagttttctgaccgccaagataatttgaatgattcaggggatggtggaggagccccagtattcaaatggttctccgtattagaatttgagagtcttgcccaggagcttgttcagatgtttgtttcagagcaaaagttgaagaggctgctactcttggaatttctctcgattgctttaaaggaaggtgtagaactccagacatcattaaattggggtgatgaactatatgatggtgaatcaaataaacttcagagtattggccttcagtcaggagatgcctactcaccgcctgaaaattggtgtgcagaacgtttagggagtcagagacctggcaatctccctctgcatgaagttttacaggtttatttaaccacttggcatgctaatatgaacatcaaccggagtagaattggtgaaatatttgagcttgttgaggaggagatgaagattaaactgtcttgaagattccgattcattttgttgggctatccatcaaggaagaagaaatggaaaagaaagatcaatcagttcactattcaccaggattctatatccagtgtctttatctgccttagtagaagccttcagagcttacctatgatcttagaatatagtactggtctccttgtgacccataatttttttaaaaaatttaatgttgggttacactggaatcatattgggaagagcgttggaccaacatatgttattgaaatgagatttctaagttatcaggatcattcgcctagcttcagggtttagatgggcgtcgaggcagcaatcgaggcaaggaggaggcgggggtgggggatgctacaccgaccgtgacgtcgcctactgtcttggaccttctgtgcgccctccttgacaccctcgacgctccacggagctcggaggcggtgaccgtcgaggaggtcggtccctcgaggcgacccggggaaccggttgaaaagtacatcatcccgcctcctatcgttggggcgggtggcgacctcgttcgtgccggatcggacctctcgacatggggagggccgaccctgaggtggatggccaccgagggcaacccctacttcgtccttaatgacacggaggagagggagatgtgggcggagtttcgagcaatggctcagg

SEQ ID NO: 156647 - DNA, 1985 bp, Zea Mays
aaaaccccaccgctgttcgcgtcctcgtttctctcaatctctctcctctcctcgcctctccttggtgtccgtgttcacgccgtcgctagcgcctgccgcggcgaagcttctgccctccccggcgccgggctcgggtcgtcgtcggccaggcagctgctacgcgtgaacacggtcacaccagtaccacgtgacgtgaacggtgaactcgtgaagaacagagccgccactgaggaaccctagcgacggcggcgtgctaccggtgacattgtccccctcggtccctcctccatccccgacgcagcggcgccagcctgcaggaagcctattcgagacaaggtcgatctttgctgccttggcgagcttcagccgaatcaaggtcgagcatggcggcaggccagtaaatagagcaacacaaaacccttcaaatcaatggagacctctgcagcaaccccgacccggccgccacaccaggcggccacttccccatcgccatcgccctcgtcgtcgttgaggctgtggaggccagcggcgcagcgcaacatgcgcaatcagtggtcccatctgagcgccgccaaggagcagtggctggccgccgttgctgacggtcgtgcccacgcctccgcgctcgtcaacgtccacctctcctgcaggaacatgccggcgatggatttgggggtgctcaaggatatgccggggatccgcgataaggcgaactccaagttggcgcttagagaggagcaatacagcggcatgcttctgtcggcctacaaggagatggtctgtcagctgtcctacttggttgaagcttcccattctatgcgctgtttttctaaagcggctccaaattgctccatcacacagttttctgaccgccaagataatttgaatgattcaggggatggtggaggagccccagtattcaaatggttctccgtattagaatttgagagtcttgcccaggagcttgttcagatgtttgtttcagagcaaaagttgaagaggctgctactcttggaatttctctcgattgctttaaaggaaggtgtagaactccagacatcattaaattggggtgatgaactatatgatggtgaatcaaataaacttcagagtattggccttcagtcaggagatgcctactcaccgcctgaaaattggtgtgcagaacgtttagggagtcagagacctggcaatctccctctgcatgaagttttacaggtttatttaaccacttggcatgctaatatgaacatcaaccggaaattggtgaaatatttgagcttgttgaggaggagatgaagattaaactgtcttgaagattccgattcattttgttgggctatccatcaaggaagaagaaatggaaaagaaagatcaatcagttcactattcaccaggattctatatccagtgtctttatctgccttagtagaagccttcagagcttacctatgatcttagaatatagtactggtctccttgtgacccataatttttttaaaaaatttaatgttgggttacactggaatcatattgggaagagcgttggaccaacatatgttattgaaatgagatttctaagttatcaggatcattcgcctagcttcagggtttagatgggcgtcgaggcagcaatcgaggcaaggaggaggcgggggtgggggatgctacaccgaccgtgacgtcgcctactgtcttggaccttctgtgcgccctccttgacaccctcgacgctccacggagctcggaggcggtgaccgtcgaggaggtcggtccctcgaggcgacccggggaaccggttgaaaagtacatcatcccgcctcctatcgttggggcgggtggcgacctcgttcgtgccggatcggacctctcgacatggggagggccgaccctgaggtggatggccaccgagggcaacccctacttcgtccttaatgacacggaggagagggagatgtgggcggagtttcgagcaatggctcagg

SEQ ID NO: 156648 - DNA, 2201 bp, Zea Mays
aaaaccccaccgctgttcgcgtcctcgtttctctcaatctctctcctctcctcgcctctccttggtgtccgtgttcacgccgtcgctagcgcctgccgcggcgaagcttctgccctccccggcgccgggctcgggtcgtcgtcggccaggcagctgctacgcgtgaacacggtcacaccagtaccacgtgacgtgaacggtgaactcgtgaagaacagagccgccactgaggaaccctagcgacggcggcgtgctaccggtgacattgtccccctcggtccctcctccatccccgacgcagcggcgccagcctgcaggaagcctattcgagacaaggtcgatctttgctgccttggcgagcttcagccgaatcaaggtcgagcatggcggcaggccagtaaatagagcaacacaaaacccttcaaatcaatggagacctctgcagcaaccccgacccggccgccacaccaggcggccacttccccatcgccatcgccctcgtcgtcgttgaggctgtggaggccagcggcgcagcgcaacatgcgcaatcagtggtcccatctgagcgccgccaaggagcagtggctggccgccgttgctgacggtcgtgcccacgcctccgcgctcgtcaacgtccacctctcctgcaggaacatgccggcgatggatttgggggtgctcaaggatatgccggggatccgcgataaggcgaactccaagttggcgcttagagagcggcatgcttctgtcggcctacaaggagatggtctgtcagctgtcctacttggttgaagcttcccattctatgcgctgtttttctaaagcggctccaaattgctccatcacacagttttctgaccgccaagataatttgaatgattcaggggatggtggaggagccccagtattcaaatggttctccgtattagaatttggtgggttaatcatctcttgcttctatggattaagtcaccactatgatctttcgtctgttgggtgtgacaatgatctcctaacccatctatatctgagactactcagagcactatatattctcacatttgaggatgccgatcaatatctgagacagtacacacattcatgtttacatgttttaaatccacatgataaaaatatattatgtttcctttaatcacctcagagagtcttgcccaggagcttgttcagatgtttgtttcagagcaaaagttgaagaggctgctactcttggaatttctctcgattgctttaaaggaaggtgtagaactccagacatcattaaattggggtgatgaactatatgatggtgaatcaaataaacttcagagtattggccttcagtcaggagatgcctactcaccgcctgaaaattggtgtgcagaacgtttagggagtcagagacctggcaatctccctctgcatgaagttttacaggtttatttaaccacttggcatgctaatatgaacatcaaccggaaattggtgaaatatttgagcttgttgaggaggagatgaagattaaactgtcttgaagattccgattcattttgttgggctatccatcaaggaagaagaaatggaaaagaaagatcaatcagttcactattcaccaggattctatatccagtgtctttatctgccttagtagaagccttcagagcttacctatgatcttagaatatagtactggtctccttgtgacccataatttttttaaaaaatttaatgttgggttacactggaatcatattgggaagagcgttggaccaacatatgttattgaaatgagatttctaagttatcaggatcattcgcctagcttcagggtttagatgggcgtcgaggcagcaatcgaggcaaggaggaggcgggggtgggggatgctacaccgaccgtgacgtcgcctactgtcttggaccttctgtgcgccctccttgacaccctcgacgctccacggagctcggaggcggtgaccgtcgaggaggtcggtccctcgaggcgacccggggaaccggttgaaaagtacatcatcccgcctcctatcgttggggcgggtggcgacctcgttcgtgccggatcggacctctcgacatggggagggccgaccctgaggtggatggccaccgagggcaacccctacttcgtccttaatgacacggaggagagggagatgtgggcggagtttcgagcaatggctcagg

SEQ ID NO: 156649 - DNA, 1871 bp, Zea Mays
aaaaccccaccgctgttcgcgtcctcgtttctctcaatctctctcctctcctcgcctctccttggtgtccgtgttcacgccgtcgctagcgcctgccgcggcgaagcttctgccctccccggcgccgggctcgggtcgtcgtcggccaggcagctgctacgcgtgaacacggtcacaccagtaccacgtgacgtgaacggtgaactcgtgaagaacagagccgccactgaggaaccctagcgacggcggcgtgctaccggtgacattgtccccctcggtccctcctccatccccgacgcagcggcgccagcctgcaggaagcctattcgagacaaggtcgatctttgctgccttggcgagcttcagccgaatcaaggtcgagcatggcggcaggccagtaaatagagcaacacaaaacccttcaaatcaatggagacctctgcagcaaccccgacccggccgccacaccaggcggccacttccccatcgccatcgccctcgtcgtcgttgaggctgtggaggccagcggcgcagcgcaacatgcgcaatcagtggtcccatctgagcgccgccaaggagcagtggctggccgccgttgctgacggtcgtgcccacgcctccgcgctcgtcaacgtccacctctcctgcaggaacatgccggcgatggatttgggggtgctcaaggatatgccggggatccgcgataaggcgaactccaagttggcgcttagagaggagcaatacagcggcatgcttctgtcggcctacaaggagatggggatggtggaggagccccagtattcaaatggttctccgtattagaatttgagagtcttgcccaggagcttgttcagatgtttgtttcagagcaaaagttgaagaggctgctactcttggaatttctctcgattgctttaaaggaaggtgtagaactccagacatcattaaattggggtgatgaactatatgatggtgaatcaaataaacttcagagtattggccttcagtcaggagatgcctactcaccgcctgaaaattggtgtgcagaacgtttagggagtcagagacctggcaatctccctctgcatgaagttttacaggtttatttaaccacttggcatgctaatatgaacatcaaccggagtagaattggtgaaatatttgagcttgttgaggaggagatgaagattaaactgtcttgaagattccgattcattttgttgggctatccatcaaggaagaagaaatggaaaagaaagatcaatcagttcactattcaccaggattctatatccagtgtctttatctgccttagtagaagccttcagagcttacctatgatcttagaatatagtactggtctccttgtgacccataatttttttaaaaaatttaatgttgggttacactggaatcatattgggaagagcgttggaccaacatatgttattgaaatgagatttctaagttatcaggatcattcgcctagcttcagggtttagatgggcgtcgaggcagcaatcgaggcaaggaggaggcgggggtgggggatgctacaccgaccgtgacgtcgcctactgtcttggaccttctgtgcgccctccttgacaccctcgacgctccacggagctcggaggcggtgaccgtcgaggaggtcggtccctcgaggcgacccggggaaccggttgaaaagtacatcatcccgcctcctatcgttggggcgggtggcgacctcgttcgtgccggatcggacctctcgacatggggagggccgaccctgaggtggatggccaccgagggcaacccctacttcgtccttaatgacacggaggagagggagatgtgggcggagtttcgagcaatggctcagg

SEQ ID NO: 156650 - DNA, 1931 bp, Zea Mays
aaaaccccaccgctgttcgcgtcctcgtttctctcaatctctctcctctcctcgcctctccttggtgtccgtgttcacgccgtcgctagcgcctgccgcggcgaagcttctgccctccccggcgccgggctcgggtcgtcgtcggccaggaagcctattcgagacaaggtcgatctttgctgccttggcgagcttcagccgaatcaaggtcgagcatggcggcaggccagtaaatagagcaacacaaaacccttcaaatcaatggagacctctgcagcaaccccgacccggccgccacaccaggcggccacttccccatcgccatcgccctcgtcgtcgttgaggctgtggaggccagcggcgcagcgcaacatgcgcaatcagtggtcccatctgagcgccgccaaggagcagtggctggccgccgttgctgacggtcgtgcccacgcctccgcgctcgtcaacgtccacctctcctgcaggaacatgccggcgatggatttgggggtgctcaaggatatgccggggatccgcgataaggcgaactccaagttggcgcttagagaggagcaatacagcggcatgcttctgtcggcctacaaggagatggtctgtcagctgtcctacttggttgaagcttcccattctatgcgctgtttttctaaagcggctccaaattgctccatcacacagttttctgaccgccaagataatttgaatgattcaggggatggtggaggagccccagtattcaaatggttctccgtattagaatttggtgggttaatcatctcttgcttctatggattaagtcaccactatgatctttcgtctgttgggtgtgacaatgatctcctaacccatctatatctgagactactcagagcactatatattctcacatttgaggatgccgatcaatatctgagacagtacacacattcatgtttacatgttttaaatccacatgataaaaatatattatgtttcctttaatcacctcagagagtcttgcccaggagcttgttcagatgtttgtttcagagcaaaagttgaaggtacatcatccctctttatacggtgatcttttccaacaacagaaaaattcttttattcagtatatctgtgtttaggttcttttgtaaatcggatttgttttacttgcctgcattattctcttttggagaagtttcctgacaatgtagatcatttatatctgtagaggctgctactcttggaatttctctcgattgctttaaaggaaggtgtagaactccagacatcattaaattggggtgatgaactatatgatggtgaatcaaataaacttcagagtattggccttcagtcaggagatgcctactcaccgcctgaaaattggtgtgcagaacgtttagggagtcagagacctggcaatctccctctgcatgaagttttacaggtttatttaaccacttggcatgctaatatgaacatcaaccggagtagaattggtgaaatatttgagcttgttgaggaggagatgaagattaaactgtcttgaagattccgattcattttgttgggctatccatcaaggaagaagaaatggaaaagaaagatcaatcagttcactattcaccaggattctatatccagtgtctttatctgccttagtagaagccttcagagcttacctatgatcttagaatatagtactggtctccttgtgacccataatttttttaaaaaatttaatgttgggttacactggaatcatattgggaagagcgttggaccaacatatgttattgaaatgagatttctaagttatcaggatcattcgcctagcttcaggtttgttctgtgctgttgtagatgtgtattatttacttcattggcctgctgtacagatcttggtgacatgctcgtggaaaacgcatattgctttt

SEQ ID NO: 156651 - DNA, 2349 bp, Zea Mays
atgtcccgctttttgctttttgttccgtattttgcaattcgggaagaagtcctgactgcctaatccagtgacaagctttaggcccagggcccagcgcatgagcattgagcccatccagtcttcattccccgagagcgagacgcttcaatgacctcttctgtatgacacgtgggtccctcgtaagctattctacgcgcacggcgcacccagcgcttctccttccgtccttggcaaccaggcccaggcatcgtttcaccgctattcctcctgccccatctcctcccgatccatccgagcccaaaccctagtccagccagatctccgccgccgccggcgagagcacggcatcagatccgccgcgatggcgttccgccgcatcttatccacagcggtgcgccgccgctcggccatcgccgcggcagcggccgggaacgcgcgcgaggcctccacggccgtcgccgcggcgcccggcgtgctagcccccgacgcgaccccggtgcgcgctcccgtgatgccgtacgatcgcatcgccgaagccgttaacgccaggctccggcggcttgagcacccagacccgcgcttcctccgctatgcaagccccgtgccgtcccacgccgaccacacggccatccttgcggcgccggagacccgggtcaccacgctgcccaacggcctgcgcgtggccacggagtcgtccctcgccgcgcgcacggctacggtgggtgtgtggatcgatgcgggcagcaggtacgagaacgaggaggcggccggcgtcgcgcattttgtcgagcacatgctgttcaagggcacagggaagcgtagcgccgcgcagctggagcaggagattgaggacatgggtggccacctcaacgcttacacgtcgcgggagcagacgacctactacgccaaggtgcttgacaaggacgtgccccgtgcgatggaggtcctcgcggacatcctgcagaactccaatctcgaccaggcccgcattgaacgtgagcgcgaagtgatcctacgagagatggaggaggttgagggacagtctgaagaagttatatttgatcatctccatgcaactgcattccaatatacatcccttggcagaccaatcttgggttctgcagataacgtcaagtcaatcaccaaagaggacctcgagaactacattgcaactcattatacagcttctagaatggttatcacagctgcaggcaatgttaaacatgaagacattgttgagcaggcaaagaagttgttcagcaagctatcaactgaccctacaacaacaaacatgttggtctctaagcagccagcctctttcactggttctgaggttcgaatcattgatgatgacatgcccctcgctcaatttgctgttgctttcaatggagcatcatgggtggatcctgattctgttgcactgatggttatgcaaacaatgcttggttcatggaacaagagtgctggtggaggaaagcacatgggttcagagcttgtgcagagggcagcaatcaatgacatcgctgagagtgtaatgggattcaatacgaattacaaggacactggtctttttggtgtctatgctgttgctaaggctgattgcttggatgatttggcttttgcaattatgcatgagatgagcaaattgtcataccgggttacggaagaagatgttatccgtgcacgtaatcagctgaagtcctctatccaactccaccttgatggttcaactgctgttgttgaggacattggccgtcagctgctgacctatggacgaagaattcctacccccgagctttttgcaagaatagatgctgttgatgcaagcactgtgaagcgtgttgcaaaccgcttcatctttgatcaggatgttgctattgctgcgatggggccgatccaaggacttccagactacaactggttcagacgccggacctacatgctccgttactagattaatcagccggtgtacccatgtttaccgtctgcaaaagacaagataaaatttgcctcttttagcgtcagtatattaaggcctcagcactgcacattacgtgctgcgatggaggaattttttgagaatttgttttatttcttgtcgtgtccaaaatccacaaatctgtcaataatgataggcaggttcgactgacgtggctgacttggttggccaccggatgttttcttacaacgagtcatgaaccataccgtcccatcttttgttggaagattttactttggcaaataattttgtggcacgttatatgtaaagatggtacagttttagcttcattgtccacaaatcttgttttgaacgattattgtcgtgtatttagtcaatttcctggcgtt

SEQ ID NO: 156652 - DNA, 2247 bp, Zea Mays
ttttctctgtttcccaattcccatacgcatggaaacatctcgtcgacccaaacccatccacccacaaggcggaatacacgatccagtccgatcctcgccccgcgcgctgctccaaaccctggcgatgtcgacggcggcggccgcgaagactccgatcaaggccctgggctccgcggccgcgggtgccatgactccgaccaaatctcaggcccccgcggcggccaagacgccctgtacctctcgcgcgcggtcctcccacgcatccgagaattccaaccccaacatcccgggcacgccgcctcccccgcagtcgacgccgtccaagcccagcctcaagtccccggcgggcgcgggagccaggtccgccaccgcgaagaaaaagccctccacgcccgcgcccgccgcgccaccgctggagcgggagcgggagcggcgattcctcgtggcgaagaagggcgcgcggcggaggcgcaacgtcgggaccatgggaggcggcgggggcggccgcgggggagagatcgacttcgacaagtgccgcgaggccgctcgcgaggcgctgcgcgcgtcgcagggggagttcttccgcaaggaggtcgccgcatccacagccaccggagaggatcaattgggacaggaggaggaggggaagccgctggctgacgaggatgtgaaaggtggagcattcgaggagcggcaggaggaggagaccgacgcggagctggaggggagcagcaaggttagggcgatgaggacgaaggcgatggctaaggcgatgagcagcgttccgaatcctggctctggccgcgtcaagcatatggtgcaggccttcgagagcctgctcaacatctccggcgccacctccgatgctgaaagggccggtgagggctcatgggcgctgcccgggttgcagctatggaaggaggatgataagggtgatctggggttcccaccagtgtcggtgttctcttctgctgatttccagaatgcagggtctaatcgactctgctcgtcactagatggaaacaccgtcaggtcgagctgggacagcagaacatcgactggcgagtgcagcaggagaaattcatctgagtcactaaggagcagaacatcggctggcgggcgcagaagcaggagaaactcatctgagtcactaaggagcagctggaacaaaaagctcaaggtcaccagccagcatccattcaagttgaggacagagcaaaggggaaagtttaaggaacagcagttcgtccaaaaggtgcaagagatgcttgcagaggaagagaagaagcgtattcatattgcgcaaggattgccatggactaccgatgaacccgagtgtttgataaagcctgcagtcaaagaaagaactgagccgatagaccttgttttgcatagcgatgtgcgtgctcttgaacgtgcagaatttgatcagcacgttttggataggaacaagtttgctgagcaacaaagattagaatgggaaaggcaacaggaattagacgaagaagaaaggataaggcaactgaggagaaccgagctgattcctaaagctcagcccatgccatactttgaccgcccattcatccccaaaaggtccacaaaacctcctacagttcccatggaaccgaaattctacctcaggccagaaaagttatcctgttactatcgacagcaatgtatggaacttggaaagctgaatccacaacatcagtgccaacatccgctgtggcaatcgagaaatgcagagcatcgacacacatgatccaacaactgtttccatttcctggcatcgtcttattcattcttgattcgtcttcttccatgtgcgaagaaattgctatcaagcgtgtttttgtagctttgcttggatcgccttgcctccaagttctgttaatcgctggctctgtgcttcagatgcaatcccaccgaggtttgaaatttgtcgttcaagaaactgataaggaaattcaaggatgaattttctgtggtatattaatatgtactttaatgttggttcttgcccgctatgcatgagcccggcagtcccagtgtgcttttatatggtagtttctatttgtgcttaagtatataatataagagaaaaatatgttgtatatgagtttagaaccaacaattatggttcgaacctttatgtctgcatggttttggcatttaactatgagttagcacaatggccatagaaaccgtgaaactagagaaactggtgttttaatatagtagatagag

SEQ ID NO: 156653 - DNA, 2234 bp, Zea Mays
ttttctctgtttcccaattcccatacgcatggaaacatctcgtcgacccaaacccatccacccacaaggcggaatacacgatccagtccgatcctcgccccgcgcgctgctccaaaccctggcgatgtcgacggcggcggccgcgaagactccgatcaaggccctgggctccgcggccgcgggtgccatgactccgaccaaatctcaggcccccgcggcggccaagacgccctgtacctctcgcgcgcggtcctcccacgcatccgagaattccaaccccaacatcccgggcacgccgcctcccccgcagtcgacgccgtccaagcccagcctcaagtccccggcgggcgcgggagccaggtccgccaccgcgaagaaaaagccctccacgcccgcgcccgccgcgccaccgctggagcgggagcgggagcggcgattcctcgtggcgaagaagggcgcgcggcggaggcgcaacgtcgggaccatgggaggcggcgggggcggccgcgggggagagatcgacttcgacaagtgccgcgaggccgctcgcgaggcgctgcgcgcgtcgcagggggagttcttccgcaaggaggtcgccgcatccacagccaccggagaggatcaattgggacaggaggaggaggggaagccgctggctgacgaggatgtgaaaggtggagcattcgaggagcggcaggaggaggagaccgacgcggagctggaggggagcagcaaggttagggcgatgaggacgaaggcgatggctaaggcgatgagcagcgttccgaatcctggctctggccgcgtcaagcatatggtgcaggccttcgagagcctgctcaacatctccggcgccacctccgatgctgaaagggccggtgagggctcatgggcgctgcccgggttgcagctatggaaggaggatgataagggtgatctggggttcccaccagtgtcggtgttctcttctgctgatttccagaatgcagggtctaatcgactctgctcgtcactagatggaaacaccgtcaggtcgagctgggacagcagaacatcgactggcgagtgcagcaggagaaattcatctgagtcactaaggagcagaacatcggctggcgggcgcagaagcaggagaaactcatctgagtcactaaggagcagctggaacaaaaagctcaaggtcaccagccagcatccattcaagttgaggacagagcaaaggggaaagtttaaggaacagcagttcgtccaaaaggtgcaagagatgcttgcagaggaagagaagaagcgtattcatattgcgcaaggattgccatggactaccgatgaacccgagtgtttgataaagcctgcagtcaaagaaagaactgagccgatagaccttgttttgcatagcgatgtgcgtgctcttgaacgtgcagaatttgatcagcacgttttggataggaacaagtttgctgagcaacaaagattagaatgggaaaggcaacaggaattagacgaagaagaaaggataaggcaactgaggagaaccgagctgattcctaaagctcagcccatgccatactttgaccgcccattcatccccaaaaggtccacaaaacctcctacagttcccatggaaccgaaattctacctcaggccagaaaagttatcctgcaatgtatggaacttggaaagctgaatccacaacatcagtgccaacatccgctgtggcaatcgagaaatgcagagcatcgacacacatgatccaacaactgtttccatttcctggcatcgtcttattcattcttgattcgtcttcttccatgtgcgaagaaattgctatcaagcgtgtttttgtagctttgcttggatcgccttgcctccaagttctgttaatcgctggctctgtgcttcagatgcaatcccaccgaggtttgaaatttgtcgttcaagaaactgataaggaaattcaaggatgaattttctgtggtatattaatatgtactttaatgttggttcttgcccgctatgcatgagcccggcagtcccagtgtgcttttatatggtagtttctatttgtgcttaagtatataatataagagaaaaatatgttgtatatgagtttagaaccaacaattatggttcgaacctttatgtctgcatggttttggcatttaactatgagttagcacaatggccatagaaaccgtgaaactagagaaactggtgttttaatatagtagatagag

SEQ ID NO: 156654 - DNA, 2151 bp, Zea Mays
ttttcttttcccgtttttataaataaatcagcccgaaaaaaggacgcggtcgtggaccgaacaaacctttccccaaaatttccccttccccgcacaccgaacgaactctcgatctgatccctatccttgcagggcccgcctcggctcaccgatccggccccggatccgctcgtcgctcgacgggatctctcgattgtttagacaagcatgctgcatcaggagaacagtgagccgttcgtgaggcaccactctgagcagcttgcgtgtggcaacatgaggggagcagataatggtcgtccgaatttccttcctgagaagtgccagattgcagtttgccagaggggtgaaaaagttagcctatttgatgaagggctgatacatggtgttgatctaaccaatcatattgctcagtcacaattggtgccaagtggtgtcaaggaaacaccaatagtggatcaaaacaagagacctgcatccagtgacatgcttgacatagttgaatgcaaacgtctgaagcaggaaggtcaaatcgtaactaaggaagacaaccatacatctgcagaggattttcatgagtaccccacatacacgacttgcagaagaagctttgactcaccactatctgagagcgaggatagtgaagatgaaggtgtagattcacctctccatttttcacatgctcacacctatgttgaagatgatctatggcctgccagctttcatcatgctctgggcccttttcccttgaggaaacctgttcctatcgggccaaatcatcaggctgaattacctgagtgcaggccattttgtggaagaactgaagaaggcgaaagtgtcaagtggatcagaaacggtgttgtgccaatgcctgatactggtgcatcgtctttggtgttggaacctgttcactgcaaggcagactgtgagtgtcatgatgaaggttcaatcatttgtgtgaaaaagcatgtgagggaagcaagagaaaagctgaagggttctgttggtgcagacaccttcagggagttgggtttgaatgatatgggtgaagaggttggctcaaggtggacagaagaggaggaacatttgttccagcaggttgtcttgtcaaaccctgcttctctgtgcagaaacttttgggatgaactccctcttgccttcccttccaagtccagcaaagaactagtgagctactacttcaatgtattcatgttgaggaagagggctgagcagaacagatttgacccagtgaacatcgacagtgatgatgacgaatggcaggcaggtgacgatggtgagtatccaatcacaggaagaactgatgaatacttgccaactgagtctcttactgatcaagatgatgttgcatgcaatccagttcctttagaaagggatctctatgaagattctgatgatgaggatgagctggacaatgccagtggagacaggcataatggtgcccagagggctggtatgttgtcagagggtaatcgtgtaatgtcggtcatagaacataatcaacagacgttcaagttagatgcagaggcgcaagacgactcttgcacatcatttgaggctcatcaggttggtgttgaaggtgggacacatactgatattgctgatgacaatcattacaggagtgacggctttggtggtggtgcagaacatgggttcttcggtaatcagtgtgacacaaaagagtgggacttcggtctcagtatcggttgggaaaagcatgattttttgtcaacaaacaatgtcatagaagaggtgttcgggaagtgctgtgacactgctgaccaggaccttatctgagccagacgcggaggcttcttgtcagctgcgaaaactttagggttctctgaattgtacagcagtagttggctattttgatttaatgcctcacttgttcttacaggaatctcatctctgtccttggaacatcatctgcttgtgatttcgtcacatgattaatgtaaatccgtagtctgttgatagcctgtggaatgtatgtatcatctttgttgtgacggtgtctcttgacctgagcgttttttctatgtgctagcgagggtcatgtaataaaagctgttgttgttccttgaccctgtctgcaaataaatgtaacctgccagtcaatgtattccgaaaggt

SEQ ID NO: 156655 - DNA, 1145 bp, Zea Mays
attttgagctggaatgtgcgggggctcaatgaagtggccaggcgtgattctatgcaagaactagtttgggataccggtagtaccattgtttgcttgcaggagactaaactcaccacaatcgacgatgcaaccatccttcgtacattgggtcagaattttctaaacaacactgttgtgctgcctgcaaatggatctaggggtgggattctccttgcagcttcgaatgactttttctcactttcgcaagtgtacaccacctcacacactgtctcggccatgatcactatgaaggcggacaattcagcttggtggatcacaggggtttattagccacagtcgagcgctgagaaacttgttttccttcaagaactaagtggcctcgcagcacaacgttgggcaaagtggttggcgttaggagatttcaatctcatatatcaagcctgaaataaaaataattgtaacttgaatcggcgcctcatgggcgcgttcagatcagcactggacaacctacagatgaaggaaatccacctcaatggccgccgctacacttggagcaacgggcaagtgaatccaacgctaacaagaattgacagatttttctgtacaacggaatgggagcttctttttcctagccgctatatgcactcctttccctccctcatgtctgaccacacttcgtttctcctccagagagaattgacgacgacacatagcccctctttccgtttcgaaattttttgggtaaagatggagggattcaaggaggctgttcaggctgcctggctgaaccacttcattcctcctttacacccatgaagcgccttcatatcaaattagcgcgtgcaacaaaggccatcaaactatggcgtaagaccaaagtgggagacacgagattacagcttgcaatttccaaagaattaatcctccgatttgaaagtgctcaagaggagcgtgtgctcacccaagaggaactggatctcctgaaggcactcaaatccagagcactaggacttgctgtaattgaaaaatcaaggatccgtcaatgggttcgcctcactcgcattaggtagggcgacgcgaacactaagttcttccacctatctgctagctccagagcgcgtaagaactttatccattgcctgcag

SEQ ID NO: 156656 - DNA, 112 bp, Zea Mays
atgttccccatacttgcggttgaggttccaccgccagcgaggtggtgtgactgcggtggaatcggagaggaggatgaaaaggtggaccgtgcggagaggagacggtcatggc

SEQ ID NO: 156657 - DNA, 946 bp, Zea Mays
tctcagtggctgtacattttccctctcttgatttacaacattattccagtgcagttttgttaactccttttttcctttagcatgtattcatttagtttcttattatgcccatccttttatttttgactatgaagcaggctttctggaatcacatttcttgagaactatctgttggagagctaaactaggctcttgttcatattatggatcagcaagctaagattgatgctgattttcttgaaccaactgtactcttagatgagacacattaccaggaggggtacagaaatggctataatgatggtttggcatctggaaaggaagaggggaggcaggttggtttaaagatgggtttccaggtcggtgaagaactgggtttctttcagggctgtctggatgtgtggacgtctgcaattctcattgatcagaatgccttcacagctcgggtcaggaagaatatcgagcaactggctgcactggtgggcagttatccgctgtccgatccggagaatgaacaaattcaagacgtgatggagaagataaggctgaaattcagggtcatcactgcaagcttaggggtgaagttagagtatgaagggcaccccaaatcatctaaacaggatgctgaggatctgtagcggtgattgaaattacattttagtttctccgcccttgctgtttaaagctcttcaactcattggcatcatgaggaactgcagtgagacatcaatggtcagagtccgaccataaccacatatatagttttaacaatgtctcaagttttgtgttattacctgctgtctgctgtctgccatatgtaatagtttcctttcaaaaggcaaatgcacttccttcccattttctttgaagtacttgtatcaaacactctgcgatgagaatcctgaatttcgttcttttctgaagaatatatgtactcctttctcat

SEQ ID NO: 156658 - DNA, 559 bp, Zea Mays
ccctccccgcaaagcccattgccattcccacgtgcatcccacgcctagcgaaaattaaattaaaaaacacaaatggtctcaaggggattcgaacccgcgacccctcaagcaaatatactcgtagctaccattacaccacatatgtgtttatgtctacatctattacaataaaaacatctactacatctctcccgaagcccacctgctatccttgcacgatgtgtagtagtagataattatcaccgagatttttgaattatatttttggatggagggagtagtatttaaagaagagtcttgcatgcaattccttttgtttgaataatgttttcaacttaaattcattttttgcatgtgtgacatttattctccgtaatattttttccatagatttgacttatgagtcattttcataaaccaacgccaaagatgaatccatgtttcttacttggaaaccccgaacaaacaccactggcaggaggcgctcgcgttggcgtcgctcattgacgacgagaagaagcttggcgactgccagttcgacctctggaagcagtactac

SEQ ID NO: 156659 - DNA, 503 bp, Zea Mays
ctttgaaattgattggtcttcaatcgactattgcaattcgagggcaaaagtaaccctgcatcgcagcacaagaacctgcaaattaacccacatgaacactgataactgaagcagaaaaataaatgtgctccatggttccaggccttggatgcacacaattaccatctcctggtctgtttctttcaaagaatatttttcttggttatgtgctctcaaaagatttttgtctcccctttctctctctttcttcttttggtgacatattgttgggttttaactctaacctaccccaacttgcttgggactaaaagactatgttgctatatatggtgtcattatacacagggaagaaaaagatcttcatgttacagggaactttgatctatgagatttgttggatgtggttcggttcttgtaagtaaattcttcagattagtttgaaggacctatgttgtagtatttcgatatggtattaaatatgcaagcatatgtatcaattatgc

SEQ ID NO: 156660 - DNA, 881 bp, Zea Mays
gtcccggtcgcccaccccactaccccagccgccactcccagtcgtcccagcctcccagccttccctggaggccaggaccccagcgccccacgcggccacgccggcacgcggcactgcggcagtcccaggcccccagccgcgcgcccccgcccaggctcccaggcggcggccaggcccccgccccgcgcccccgcccagcaggcagcagccagtccgcctccgcccgctaggacggctcctagtcggccagtcttcaggcttcagcccgctgccccgctgcgacgctgccccgagcggtcgagctacgcctgcgcggctgcgaccggcgaccgtccccaagctgcgactgcgactgcgaccggcgaccgtccccaacctgcggcgtccccgagccctaggcccgacccgctgccatccctaccgctgccacctgcgtcgtccgcaagggatccatcgccggcgaaggaagccctccgaaagccgcacgaagctcatttgatgacgcccgcacacgcgacgagctcgttcacctaccagcggtttaccggcggtgtggtggctacggatcaacggttagctgaatttcttccttatttcctcctagtccctccctgtcccctctctcatgtccctggccaagaatagactagaacaacaagtcgatgaatggtagcacagcatctgcaagcacttcaggtagtatgtgttgggctgtccgttggatcagtgattaactgatctcgtgtctcgtccaagcctgaaggcacaagtcaaaggcgattacttgaatatactagtggattaagcacttatgcattactagtgggggtttgcaacttcgatttcgaaaattcaatggaaatgctcggcaggcttgtcta

SEQ ID NO: 156661 - DNA, 111 bp, Zea Mays
gaattgtttatagtagtttactctacaagaaggattttactcgcatctaaaaacataaatcatcaagctattgctacacatactcaaaaccaaataaaaaatatctaggcc

SEQ ID NO: 156662 - DNA, 3036 bp, Zea Mays
agagaaggttggctgccggccagctgactacctgcccagcgaaccacgttgcctccgccaccgctgtccgctacctctcgtcctcaaccccgtcgctgcttcgttttcctctgcggcctcgggcctctgccttctctaaaaggtggattgccctacatttagttcaaacttcaaacagcctcctagaccgatctcttcctctattttcatcctgactagtagtggagtggccaattctgctcttcctatcctaggagaacgatccaaggccaatttcccaacatggaatttgaaagcactctttaacaattgttgattgaacagcacagtgcctggttttaaaaggttcaaaaggaagaaaattcatctgacaccagcactatcacagccactgaaagacctcaatgtccaaagatttggaaaaatgttcacctagtggcaccacacctacgacttcagtttcacctgtagagtcaaaaaagcatgagaagactgtaccaaattatctcagagctactagaggttcgtgccatgatttttgcaagtatggacataaaaacccttctgaagaggaggcgggtatttcaggaggaagaagaaagaaaattcctgctcatctgattaatttgacactacacagatcagctattttggatagatccaaggatataaaaaataggagtgtttcactaaccaagtcgagcatatctctgggtgaagctgaacggtttgcacccaagaaagcatcagcaagtcgaaaaggagttctatccagtgagcatatggttcccaggacagctacaccatctcaacataaatctctgaactctgatagaagaaagatgcattcaattgttgcacagaaggctccaacaaatctaaggtgttcaaatggagttccaaaaattgataaaaaagaaacaacgccagccaagggggctatatttcctgcgaaattgaagtttccagagaagaccttgctggagaaatctagaaatgtggatagagtcacaatggccaatcaatcattgcacaagaggccagcttcttctctcactaagctcaacatggttaaacaggggcctgttgcatctcaggcttctagtaagcatctactttcaaaacataaaaatactctggaggaacctgttgcagcaaatattacaagaatgcgtgctaaagctggacaaagtcctagaaggacgagcaatccttctaatataaatgggaaggaaggctcagatatgcccagatcacccctctctttgcaacccaagttgactgcttctatggaattacagatggatgattcacaaattacagggaattacaacgattcagcattggctgaactatctccagctattacagaatacagagacttttctcaaccagcactagaagaaacaagtaaaactatttcagaggacgatggggtgggaagaactgaaaagagcaaaatattaggaggtgaagccttcctggaaagcaccattgcccttcagctgcagcaatcattagatggaaaggaattcagcgttatcctagctgaatctgatctagaacagaaactatcagagcataatattgttcatagtcaagcttcaaaggattataatagccaaacagattatgcagctctttgtcaattaccagaacaagtaacaactgtggaaactgcagatgtgtttgactttatgtcaactcaaagtaattcaaaaactgaggatgatcaagttaaagtcaatgcgtctgtggagtctctaatccctgaaggtaaggaagaaatgagagttcatgaagattttgaaatatctccagaactactggtacttgacaaaaaacatgataaggagcctgagtcttgtcttgatcttgcttctggaaatatagcagagaatgataaggatggtaaagtttttgacagtaggatgaacaacagtgcttctcactgccaatcaatttcagaaacttcatcagatggtggactccttgaggaacctaagtccatgctaattgaacctagtgtttttgctggtgatgagttagcaagtatcagtaatgaaaatacctctgaacatggcggactgaaatcaaggatgtttattccccatcaatcaccagaagaactatcagataatgaattttatgaagagtatggttttgaattaagtgaatcagatgaatctggtacagaagatgaggagacaacaatcaagaaaaataggaatgaatcattgaagtctggtggccaaagatcaagaagaacctcagcacttgaattggatgatgctagtctcacaccttataagttaaagtttaagaggggtaaaattgtagaactcccactagacagcatgggcccaaggaggctgaaatttagaagaaagtctgcaaatgaagcttcaaatcgtgaaagccaaccagctagaaggatttatagaaggaacaacaccagtactgctgttcctactgatgtggaatctcctggtgtgaaactgagacatcaagatgcacaagagaagaaagatgcacaaggattgttcaataatgtaattgaagaaactgcaagcaagttagttgagtccaggaaaagcaaggtaaaagctttagttggcgcttttgaaacagtgatttctctccaggatggcaaacccacatcatcgacagcgcaagctggtaattcacaagatttaattcctgatgacgggggaaatgcacctgaggaaactggatagaatttgcatgcctctgaaatgttgcaatctttgcactcatgtttgggtctcctcctttatttggttccagaatcggatctgattggaagcattttgttcagtgtatacaacagatttctcctgtagaacgacagttgcggaagtggttttttcagacagtatatagtaatgtgttcaatggaacaagtgctttgaagtctacttcactgtaaatcaaatgagacattgtaagaccaattgtgtttttgttcggcttggttttcctaaatgcaatattaaaagagttggttttgctgca

SEQ ID NO: 156663 - DNA, 1337 bp, Zea Mays
ctttctaatggcagattagcaatgagacaaaccgtccaaaggagggagcgagcgacccagatcttgcacacggcacgcaccggccacacggcaacagtgtgcgtcttgtgccgcaggggcgtgggccttcttcctcctcttccggcactccactgctccgtctcccggcctctcgcctctcggcctctccatcgttcgacctcgcgacgcgtcaagtaggggggcggcggccttcgcggagatgaccaccttcctgatcaccggaggcgatttcccgcgacactcctcccccctccccgtgctctgctagacagatagatccgggctcttccttgatttgttcggtgaggacatcatgtggagttttgcatcaaatgccatagctggaagcttaaagaaaaaagcacaaccctcaaaatgcagcatatccaatgcagattattctgatgatgaagtttcttcatgtacaagcagagaggaaggccttgattgtccaatatgctgggaatccttcaacctcgtggagaatgttccctatgtcttgtggtgtggccacacaatgtgcaaaaactgcatccttggtcttcactgggcagttgtcaagttcccgtcccttcctatccagctgcctttgttcatctcatgcccctggtgcaacctgctgtctttccgcctggtttacaagggcaacctcaggttcccacgcaagaactactttctgctctggatggtcgagagcatgaacggtgggagagcaaaattccattccactaaccatgacgagcatcattccacgtggcattcaagtgccggcacaagctccagccatcaacagcgaagaaatgctgctgtaggatcagagagctcttctggcagagagacaggcgtaggccgcaacattttccacaccgacaacattagtgcttctctgcaaaagcttatggtgtgcttcatgcagctgacggccaagttcccactcgtgataatctttctgctgatagtcctttatgctgtccctgcaagtgctgctgttctggttctctacgcccttgtcacgtttttgtttgcactgccctcatttttgatcctctactttgcctaccccagcttggattggcttgtcagagagatcttcgcttaattcgtgctgtctgaaatgtccgcgcagtttgtatccctgcgacaaatgatatatattggtatatgtattccatgggccacctgccctcgtaggccctgtatagtttcttcttattctctgtccttgtagcactctatttctgttgtaactaacagcttattaaaaatgctctgcaatgcttttatttgtggttcta

SEQ ID NO: 156664 - DNA, 733 bp, Zea Mays
tttttttgctggctttgctgctaagtgctaacacacgtgtggtcgagaaccaacgagcgacggcaaaccaggcacagcagagccgctcaaagagccagatgaacggcatgctgctgcatctgcccgccggcgccagcaccgttgctcgcgctcccgtcccgccgctgccgcgccagctcgcgccccggcggacagcgcggtgcagcgcgaagaagaaggcagcgaacgaggccaaggacgaccggcgggcgggagacggcgccggcgtgctctcccggaccgtgatgcttcgggccggcgtcgcgctattcgccctcggcttcgtcgacgccgggtacagcggcgactggtcccgcatcggcgccatctccaaggacaccgaggagctgctcaagctgggcgcctacgccgtcgtgccgctctctctggccctcataatctggttacccgaaggcgacagcgaccgtgaatcgtaggatttgagaaagcagatcgcatttcttcttatctcagtagaaaagcgaagagcatcgggttctagactcggcgctggatcgttttccgtgttatgggttgggatgaaatcacgatgtagctagtacgtcggcgaattgaacgtgtggcttcaagtaaaaaaacggcaatgccaagctacatcgatgtaatacaagacaggtctaccagtttcttttctgacgataaaaatcaaagaaaaaaagattaaaaaaacgaa

SEQ ID NO: 156665 - DNA, 254 bp, Zea Mays
gataattattttctgcaagttatgtatactctagcgggagactacactgcacagatcattccaacaggacaagtcattcgacccacatactggtcaacgccagcacacagtacacctgtttaaaccaacaaacattaacccttgcaatttattttgagaacatgaatcaattagacctcaattttttttcacatatcctgcattgagttacagattatttcaaacgggaacaaaggaaaccgagcgaaacttac

SEQ ID NO: 156666 - DNA, 909 bp, Zea Mays
cccccatcctttcccagcggcggcttgcccccaccagtccgctagtgctacatgctctccatccaatccatccatgatgcatcctccttcgcattgctgggccttagcatactgtcaggctaccagcaagcgaagtagctagccatgctcggcctccccgccgcgcccccggccgccgcagcaccgccgaacccgaagggcaaggggcgatgcagcgccgccccgccaccagcgatgacaggccgggtgtctctggctgtccctgcggcggctgtctcgctctcgctcttcctctggtccagtccagtgaacgccggcatcctgtccggtttctcgggactggagtcgactcccggccccgacctcccccggctcgagttcctggagaaatggaatgcggagaaccagaagaagtacaccgagttcgataacaggttcaagaagtccaaggtgctgcaggacctgctcgagaagagcaggaagaacaaagagaagaacgagaggatgatccaggacaagtactgtctgcggggcgccgagtggggcgtcggggactgctccacggagggcatgtcagaccaggagagggaggacttcatttcggagctcaagaagagagctggagcagagtagcgagctgaggacgtcattcagtttcaacagacgaagtatgggcacacttcgccactgtagcagtccagggaatggccattttactcgtcataccctgattaccaagggaaatacgcaaacaatgtagaccagcccataggccactgggagtgcgagaatgttcaccaacatcatgcgagctcagaatttgcaatacatatgtacccattgtaaaatgcatttagcacgagcaaattaccagctacactgattcttaagatccctaaattcctctta

SEQ ID NO: 156667 - DNA, 1514 bp, Zea Mays
gcccacggccctcttttgaacctggttctcctgtcgctgtcgcccatcttgcggcatcccaccacggcaccaccgccacagaagagcggccgagcggtgcagagaaccagccagctgatctgagcggccgcgcttccggtgggaggatggagaaggctctcaccaaactgggcagcttcaccatctcccgcaaggccaagcaggagctctccgccatcggcgacgacatctctcgtttttcgagcacggtggaggagaaggcaaaatgggtcttcgaaaagctcaaaggacacaagaagtccctctctgatctactgcgcgagcacaacctccctccaggcctcttccctcgtaacatcatctgctatgagtacgacgaatcgacatcgaagctgatggtgcacctgtcgaagccctgcgaggtgagcttcaaggattcctccgcgatacggtatgctcctcgcgtcaaggcgactctgtcccgaggcaagctttctggggttgaaggcatgaagaccaaggtggtggtgtgggtgaaggtggctagcgttagcatcgacagctacaagtccgacaagatatgcttcctcgccggtgtgaagaagctgaggcagaaggatgcttatgaggtccctcgtgaagccgtctctgttgatgagttctgagctcgattgatttcccttatccgtagtatcattcgttcgtagcatttttttgggtcccatgtcatcggcaattgatgtgctgcggttttgtagatttggaatcacatggatctgttgtgcctggcagaagacaacccgttcatgttatctgacgagacattcacatgtgtgatgtttcagtaatgtgtacatttagcatgtgttctggttctgcattggttgctcctagaattcatttcttcatgttttactgtaatacgtggtattgggctattggccgagttgcacagtttgttccgacaggtaatcctatatagctatctccagcagttgtatatggatctgtacctatatttagttcgcaatgtctccaacaacatacgctatcacatccgataagatagcggagccacccagcgtcctctatactggtctgcttcgcctgctaaacactgtgcccgtacctttctcatttaattcacttgatttcatgtgcggggatgcgatgtatgcgtatgtgtggtgtttcatgtgcggggatgtgatgtatgcgtatgtgtggtgtacgacacgagacgaggtcacaaggatacgatggtgatggaggaatgtttagaaattagttgtaataatgaaaaaatatgtaaataaataaataatttatttttatgagtcgtcaaaattactgttaatatagttggcgaaataaaaaaaacaatgtatttaatgaagtctgttaatacggtagatatagaggaccgaatttagaggacgctgcaccattcaagctagtagcggaggacaaaacaaaataaatgtaagactagtttgtaagggaaaaaaagaaaa

SEQ ID NO: 156668 - DNA, 141 bp, Zea Mays
atgtagaggcggcagcggcaggcgctggagatacgtggttagttggattttggtgggacgcaagcgcgagggagtgcgagcgaacgctgacatgggtccacctgtcggcgagagagaggcagaaccatggtgcacggatgg

SEQ ID NO: 156669 - DNA, 824 bp, Zea Mays
accttgccatccctaccccacctagcccccgccatactccgaccctagggtttccgtcctcttccgtaagcttccaaaaaaatggccaacgaggagccggctcccgtcaccgctcctgccgccgccgccccagccgggggcgaccattctccggccttctcgttcagcatctggccgccgacgcagcgcacgcgggacgcggtggtgcggcgcctcgtggagacgctcgcgggggacaccatcctctgcaagcgctacggcgccgtgccggccgccgacgccgagcccgcggcgcgcgccatcgaggccgaggccttcgacgccgtggccgccgcgggaggcgccgccgcctccgtggaggaggggatcgaggcgctgcagtcctactccaaggaggtgagccgccgcctcctcgactttgtcaagtcccgctccgcggacgccaaggccgacccgccgtcggcggaggccctggcccctgacgcgcccgaggcccagcccgcggcgtgagcgccggacagccagtcgttccgtacctgatcttcctgagatgagattgagtcgcgtctggagtttgtgtggagactgcagcctgtgtgtgtggcaaagtctgggtctgtatgacttgaacgttagctgtttgcacatctatgcagttcttcttccacggatgtctgatttagtgcgtgctcttattttacttcttgcaatgactgcccctgaccaacgattatgttccgtttgctgtgacgctcatgcatcaggcctcgagtgatagataaatccgaaataacaagcagaatcctcccatctttcaagccaca

SEQ ID NO: 156670 - DNA, 152 bp, Zea Mays
aacgatggttattataggatgatctcctcttggacactgacattgagagttttatttgggagcacgatgctgttaactacaactacttcatcttcaacatcaacggcttcacctaatagtaatgccaagtttggcattgtgatcaccttcgc

SEQ ID NO: 156671 - DNA, 1666 bp, Zea Mays
ggggggagctacggcgggaagatagaagagagaatggggaagattctagctcggcgccaaaatctatggcgccgagctagggagccacgtaagcaaacacgtcatccatcgacgccaccgccacgtcagcacttgacgccataagctatggcgtcgagctatgtaaactcggcgtcataggctaaggcgccgagattcgggtacaaatactgaaataaaacattcaggatctaaatgcttacttttttcataaagaaggtaaaaaaaaaatcggccctgcagatgcccaccacaaggccatctcaaaacttctaaccgcatcaatcttcccacttcccaggaccccaaacgaaccctggcgcttcactcattgcccgacccgaaccaaaccatgcaaacccaagcggaaagccaaggcaatcggaggaacgaatccggatccggaggtcggactcagaggcgatgaagaacaagggaaactctgcgtctccgcgcactcggcgccgcctctcaataggccacgggggaagcgcaaggccctggccgagctcgccacgtccagcggagcgaacatgaaccacgactcggcgccgcggccatcgaagccgagaacgcggtcggcggcgcggattgagggcgaggcggaggaggcgaggaaacggcgggagtccggactccggagactccgcgcgctggctgttggacacgaagccgccttaccctgaagcggcggttgcgccgtacgtcggagacatcgaccggtacctccggtccctggaggttgaaccgttgaggaggccaagccctggctactttcaggatatccagaaagacatctgccccaaaatgagggctgtcgttgtggactggttggtggtgttggctgaagaattcgagcttcacgcagaaactctccacctcgcggtttcctacgtggaccgcttcctcacaatgaatgtcgttgctcgggacaagctgcaactactggctgtcactgcattgctcgttgctgccaagtatgaagaaattgagtctgctgagatgaaggtgaacatatacattaatagcatggataacacttacaccaagcagcaagtggtgaagatggaggctgacttactgaaatctcttaactttcagattgggggtcccactgtaacaacatttttacgaacttgacacttgaacaaaacacggggtataaagtctttgatctgcagaaatccatttatgtcatacatgaactgcagttgacaataaggtgcccagatcaggaagccaccaggaagaagtacaaggaccccaagtttgggtgcgtgtcgacaatggtttcaccacgagaaatccctacatctttccctgaagattgccataagtgaagtctggacttggagaaaggtttttgcagtaatgctgctggcgatgtagaaaatagcttgattgtaggatagttggtataatacgtgctagttcacattagaatagtaagactgaattaagcttacctgttgagtctgagatcttgaacaagccatacagtcaaggttttgctcagtaacctagttcacgattctctctttagcagtaatggatgagacatttttactattagaaagggatgttaaactaagaacacagattttaaagctcttctattaaaaaacgc

SEQ ID NO: 156672 - DNA, 530 bp, Zea Mays
aaaattgctctttgatctgcatatttcaaatgttgcagcaagtatgaagaaattgagtctgctgagatgaaggtggtgaagatggaggctgacttactgaaatctcttaactttcagattgggggtcccactgtaacaacatttttacgaacttgacacttgaacaaaacacggggtataaagtctttgatctgcagaaatccatttatgtcatacatgaactgcagttgacaataaggtgcccagatcaggaagccaccaggaagaagtacaaggaccccaagtttgggtgcgtgtcgacaatggtttcaccacgagaaatccctacatctttccctgaagattgccataagtgaagtctggacttggagaaaggtttttgcagtaatgctgctggcgatgtagaaaatagcttgattgtaggatagttggtataatacgtgctagttcacattagaatagtaagactgaattaagcttacctgttgagtctgagatcttgaacaagccatacagtcaaggttttgctc

SEQ ID NO: 156673 - DNA, 1652 bp, Zea Mays
gccggcgcttcacacatcgcccgacccgaaccaaacccttcaaaccccagcgaaaagcgaaggcaatcggaggaacgaatccgcgcgaccaacacgttggcagcagcattaggatccggatccgaagaccgccagaccggagccggaggcgatgaagagaaaggaaaactccgcgcactcggcgccgcctctcaacaggccgcgcgggaagcgcaaggccctggccgagctccccaagtccaacggactgaacatgaaccacgactcggcgccgcggccgtcgaagccgagaacgcggtcggcggcgcgagctgaggccgaggcggaggcggcgatgaaacggcggaaggccggagacgccgcgcgctggccgatggacacgaggcagcctgacgctgaagcggcggttgcgccatacgtcggggacatcgaccggtacctccggtccctggaggttgaaccgttgaggaggccaagccatagctattttcaggatatccagaaaaacatctgccccaaaatgagggctatccttgtggactggttggtggaggtggctgaagaattcaagcttcacgcagaaacactccaccttgcggtttcctacgtggaccgctttctcacaatgaatgtcgttgctcggaacaagctgcaactactgggtgtcactgcattgctcgttgctgctaagtatgaagaaattgagtcttctaagatgaaggtgaaaagatacaccgatatcacggataacacttacaccaagcagcaagtggtcaagatggagactgacttactaaaatctcttagctttcagattgggggtcccacagtgacaacatttctacggcaatttatagcttcgtgtcgtggaggcaatagtgcaagcagaggaaaacttgagtttgtgtgcagctaccttgcggaattgagcttgctggattatgactgcataagctatctaccctcagtagttgctgctgcctgcttgtttgtagccagattcataatccacccaaagactcgtccttggaacttgtcacttgaacaaagcacgggttatagagtctttgatctgcagaaatccatttatgtcatacatgaattgcagttgacaataaggtgcccaaatcaggtagccatcagggagaagtacaaggaccccaagtttgggtgcgtgtcgacaatggtttcaccacgagaaatccctacgtctttccttgaaggttgccataagtgaagtccggacttggacttggagaagggtttttgcagtaatgctgctggcgagtggcgatgcagaaaatagcttgatggtaggataatttaagggtaggtcggaaaatataccatggccagcgttgtagatcgttggtacggtactggtctcacagttggtagaatatgcaattgaaggctttttgtacaggagttaggctagtccgtgacacacacgtgtgcatcctctatggtctgtctttgcgcacattatgccgagcgccgaccatctcgtgctgttggcctgtctcaattaccaccagacatttgacacgtggaatctttttaagattcaatttttaaaaattgtatttctcaagctgtaacttcgattcacgaacggtttgaagcgtgtcattgagaaaaatataacgaac

SEQ ID NO: 156674 - DNA, 1476 bp, Zea Mays
gcttcccaagaccccagacgaacgccggcgcttcacacatcgcccgacccgaaccaaacccttcaaaccccagcgaaaagcgaaggcaatcggaggaacgaatccgcgcgaccaacacgttggcagcagcattaggatccggatccgaagaccgccagaccggagccggaggcgatgaagagaaaggaaaactccgcgcactcggcgccgcctctcaacaggccgcgcgggaagcgcaaggccctggccgagctccccaagtccaacggactgaacatgaaccacgactcggcgccgcggccgtcgaagccgagaacgcggtcggcggcgcgagctgaggccgaggcggaggcggcgatgaaacggcggaaggccggagacgccgcgcgctggccgatggacacgaggcagcctgacgctgaagcggcggttgcgccatacgtcggggacatcgaccggtacctccggtccctggaggttgaaccgttgaggaggccaagccatagctattttcaggatatccagaaaaacatctgccccaaaatgagggctatccttgtggactggttggtggaggtggctgaagaattcaagcttcacgcagaaacactccaccttgcggtttcctacgtggaccgctttctcacaatgaatgtcgttgctcggaacaagctgcaactactgggtgtcactgcattgctcgttgctgctaagtatgaagaaattgagtcttctaagatgaaggtgaaaagatacaccgatatcacggataacacttacaccaagcagcaagtggtcaagatggagactgacttactaaaatctcttagctttcagattgggggtcccacagtgacaacatttctacgaacttgtcacttgaacaaagcacgggttatagagtctttgatctgcagaaatccatttatgtcatacatgaattgcagttgacaataaggtgcccaaatcaggtagccatcagggagaagtacaaggaccccaagtttgggtgcgtgtcgacaatggtttcaccacgagaaatccctacgtctttccttgaaggttgccataagtgaagtccggacttggacttggagaagggtttttgcagtaatgctgctggcgagtggcgatgcagaaaatagcttgatggtaggataatttaagggtaggtcggaaaatataccatggccagcgttgtagatcgttggtacggtactggtctcacagttggtagaatatgcaattgaaggctttttgtacaggagttaggctagtccgtgacacacacgtgtgcatcctctatggtctgtctttgcgcacattatgccgagcgccgaccatctcgtgctgttggcctgtctcaattaccaccagacatttgacacgtggaatctttttaagattcaatttttaaaaattgtatttctcaagctgtaacttcgattcacgaacggtttgaagcgtgtcattgag

SEQ ID NO: 156675 - DNA, 1530 bp, Zea Mays
ctcaaaaattcaaaccgcatcaagcttcccaagaccccagacgaacgccggcgcttcacacatcgcccgacccgaaccaaacccttcaaaccccagcgaaaagcgaaggcaatcggaggaacgaatccgcgcgaccaacacgttggcagcagcattaggatccggatccgaagaccgccagaccggagccggaggcgatgaagagaaaggaaaactccgcgcactcggcgccgcctctcaacaggccgcgcgggaagcgcaaggccctggccgagctccccaagtccaacggactgaacatgaaccacgactcggcgccgcggccgtcgaagccgagaacgcggtcggcggcgcgagctgaggccgaggcggaggcggcgatgaaacggcggaaggccggagacgccgcgcgctggccgatggacacgaggcagcctgacgctgaagcggcggttgcgccatacgtcggggacatcgaccggtacctccggtccctggaggttgaaccgttgaggaggccaagccatagctattttcaggatatccagaaaaacatctgccccaaaatgagggctatccttgtggactggttggtggaggtggctgaagaattcaagcttcacgcagaaacactccaccttgcggtttcctacgtggaccgctttctcacaatgaatgtcgttgctcggaacaagctgcaactactgggtgtcactgcattgctcgttgctgctaagtatgaagaaattgagtcttctaagatgaaggtgaaaagatacaccgatatcacggataacacttacaccaagcagcaagtggtcaagatggagactgacttactaaaatctcttagctttcagattgggggtcccacagtgacaacatttctacggcaatttatagcttcgtgtcgtggaggcaataacttgtcacttgaacaaagcacgggttatagagtctttgatctgcagaaatccatttatgtcatacatgaattgcagttgacaataaggtgcccaaatcaggtagccatcagggagaagtacaaggaccccaagtttgggtgcgtgtcgacaatggtttcaccacgagaaatccctacgtctttccttgaaggttgccataagtgaagtccggacttggacttggagaagggtttttgcagtaatgctgctggcgagtggcgatgcagaaaatagcttgatggtaggataatttaagggtaggtcggaaaatataccatggccagcgttgtagatcgttggtacggtactggtctcacagttggtagaatatgcaattgaaggctttttgtacaggagttaggctagtccgtgacacacacgtgtgcatcctctatggtctgtctttgcgcacattatgccgagcgccgaccatctcgtgctgttggcctgtctcaattaccaccagacatttgacacgtggaatctttttaagattcaatttttaaaaattgtatttctcaagctgtaacttcgattcacgaacggtttgaagcgtgtcattgag

SEQ ID NO: 156676 - DNA, 1368 bp, Zea Mays
ctcaaaaattcaaaccgcatcaagcttcccaagaccccagacgaacgccggcgcttcacacatcgcccgacccgaaccaaacccttcaaaccccagcgaaaagcgaaggcaatcggaggaacgaatccgcgcgaccaacacgttggcagcagcattaggatccggatccgaagaccgccagaccggagccggaggcgatgaagagaaaggaaaactccgcgcactcggcgccgcctctcaacaggccgcgcgggaagcgcaaggccctggccgagctccccaagtccaacggactgaacatgaaccacgactcggcgccgcggccgtcgaagccgagaacgcggtcggcggcgcgagctgaggccgaggcggaggcggcgatgaaacggcggaaggccggagacgccgcgcgctggccgatggacacgaggcagcctgacgctgaagcggcggttgcgccatacgtcggggacatcgaccggtacctccggtccctggaggtggtcaagatggagactgacttactaaaatctcttagctttcagattgggggtcccacagtgacaacatttctacggcaatttatagcttcgtgtcgtggaggcaatagtgcaagcagaggaaaacttgagtttgtgtgcagctaccttgcggaattgagcttgctggattatgactgcataagctatctaccctcagtagttgctgctgcctgcttgtttgtagccagattcataatccacccaaagactcgtccttggaacttgtcacttgaacaaagcacgggttatagagtctttgatctgcagaaatccatttatgtcatacatgaattgcagttgacaataaggtgcccaaatcaggtagccatcagggagaagtacaaggaccccaagtttgggtgcgtgtcgacaatggtttcaccacgagaaatccctacgtctttccttgaaggttgccataagtgaagtccggacttggacttggagaagggtttttgcagtaatgctgctggcgagtggcgatgcagaaaatagcttgatggtaggataatttaagggtaggtcggaaaatataccatggccagcgttgtagatcgttggtacggtactggtctcacagttggtagaatatgcaattgaaggctttttgtacaggagttaggctagtccgtgacacacacgtgtgcatcctctatggtctgtctttgcgcacattatgccgagcgccgaccatctcgtgctgttggcctgtctcaattaccaccagacatttgacacgtggaatctttttaagattcaatttttaaaaattgtatttctcaagctgtaacttcgattcacgaacggtttgaagcgtgtcattgag

SEQ ID NO: 156677 - DNA, 1106 bp, Zea Mays
caagcttcccaagaccccagacgaacgccggcgcttcacacatcgcccgacccgaaccaaacccttcaaaccccagcgaaaagcgaaggcaatcggaggaacgaatccgcgcgaccaacacgttggcagcagcattaggatccggatccgaagaccgccagaccggagccggaggcgatgaagagaaaggaaaactccgcgcactcggcgccgcctctcaacaggccgcgcgggaagcgcaaggccctggccgagctccccaagtccaacggactgaacatgaaccacgactcggcgccgcggccgtcgaagccgagaacgcggtcggcggcgcgagctgaggccgaggcggaggcggcgatgaaacggcggaaggccggagacgccgcgcgctggccgatggacacgaggcagcctgacgctgaagcggcggttgcgccatacgtcggggacatcgaccggtacctccggtccctggagaacttgtcacttgaacaaagcacgggttatagagtctttgatctgcagaaatccatttatgtcatacatgaattgcagttgacaataaggtgcccaaatcaggtagccatcagggagaagtacaaggaccccaaggtaaatccattttcaccgttttgttgctctaatctacatttcgtgttctgttaaaatctgtttgcctgaccatttcagtttgggtgcgtgtcgacaatggtttcaccacgagaaatccctacgtctttccttgaaggttgccataagtgaagtccggacttggacttggagaagggtttttgcagtaatgctgctggcgagtggcgatgcagaaaatagcttgatggtaggataatttaagggtaggtcggaaaatataccatggccagcgttgtagatcgttggtacggtactggtctcacagttggtagaatatgcaattgaaggctttttgtacaggagttaggctagtccgtgacacacacgtgtgcatcctctatggtctgtctttgcgcacattatgccgagcgccgaccatctcgtgctgttggcctgtctcaattaccaccagacatttgacacgtggaatctttttaagattcaatttttaa

SEQ ID NO: 156678 - DNA, 2061 bp, Zea Mays
acttcttccacttgcacaccacgccccgacaaagcgagcgagagcagccacggcaaaaccctcgcgggcgtctctctctcgatcggcgggcagcagcgacgcgcgcgcacaacacagcaggtgaattcaaggcaagtgagtcagtggttggggtcctcgtcctggctatgagaggtttaagtcggtatctgccgttctgcggcggcgggtgctgctgcggtgacggcgccggtagggcagggggcgtggcggatgggctggtgtgggacgtggccctcaaggcgcacgcgtccggtgactactccatcgccgtggcgcaggcgaacgaggcgctcgaggaccaggcgcaggtggtcgcggctccggccgccacgctcgtcggcgtcttcgacgggcacggcgggcccgaggccgcgcgcttcgtcaacaggcgcctcttctcgcatatccaagcctttgcggctgagaacggtggcctgtcagcggaggtgttccagaaggccttcggcgcgacggaggaggagttcataggcctggtgcagaaatcatggccgtcgcagccgaggatcgtgtccgtgggctcctgctgcctggtgggcgccgtcgacatcgagaacgggacgctgtacgtggccaacctgggcgactcgcgcgccgtgctgggccgccgccggggcaaggggaggcgcgtggtggccgagcggctgtctcaggaccacaacgtggccgacgagggcgtgcggcgggaggtggccgagatgcacccggacgactcgcacatcgtgctcaacagccacggcgtgtggcggatcaaggggatcatccaggtgtccaggtccatcggcgatgtgtacctcaagaagcctgacatctgcaggggcaacccggtgctgcagcagtccatctgcccgttcccgctgcgccgccccgtcatgaccgccgtgccgtccatcaccacgcgggagctgcgccccggcgaccgcttcatcatcttcgcgtcggacgggctgtgggagcagctcagcgacgacgccgcggtggacgtcgtggcgagcagcccgaggaagggcgtggccatgcgcctggtgcgggccgcccagctggaggcggcgcgcaagaaggaggtcaagtacgacaagatccggaccatcgagaagggccagcgccggcacttccacgacgacatcaccgtcgtcgtgctcttcctcgacaagtgcaggggagctgccaggtccggccccgaggacatcgacggcacctacgcgccggtggacgtgttctcctgcagccccgccgccggcggcgatcacgaggacccgacgaagcccgtcctgcgtcgttaatacggatcgcttggtgttccgcgtgctgtcagatactgaacaaacatatactcttctctttcagtcttctttcagtgctctgcttcgctctctaaacaagagaaggtacatacttgagctgcttcgtttggaacgcaggaatatttgccggttcttgcgtgaattgagttgtttatcgtccaagacaattcgcttgtaaagaaatgatagtttcaggtcatgtgtcatagattgtaaatcttcatccatctcttctcacttctatcctatctactactatctgtccttccgatgttcttcatcgtcgtctatttcgatgttcttcatagctgtcaaccgaaagctaagatgaatatactcagcatctgctggttagcagccggcccccggccgccggcgacctcctatcagcgaggcagcaagtgaactgcatgcgaagcaggcaagccggtcgtccctcgtcagcggtcatgatctcggagacggtctgctctggaatatggctatgtggaaagacggccacgatcgtggatcggttcaacaggcactataattcttgacctctgagtcaacagagtgatggcatcgatgcccggatggccaggatcgcgagaaatggtggacgaactatcatgacagaaaaaagaactgccggcaaaattctgtccaacttgagcttgttcggttacttttattatatatggatgggatgaaattg

SEQ ID NO: 156679 - DNA, 1149 bp, Zea Mays
tcctcctcccctctctcgcctcaaaacaaggaagggagcagatggagccgcatcattaaaaaaaggacacggaaacttaatccgatccaccaaacaaaaatccctgtctctcgcgcagggcaccgccacgcgcgcctcatccggtaccgccatgacgagcgcctccgagctcttcatcgcgcgccgcgccgcccgtggggcccgcctctccgaccccgaccccgacccggacccgcaccccgtcgcgctccgggaccagcatggactcggcggccggcgccagcgccgcgggtgccggccgcgacgccagctcgacgccgccggggacgtgcgccagcacctgcacaccggggccccgccaccgcgtcgccgcggatcgtacaccgatcagatcttatcctacatagacaataacaactttggggattctgcatctcggaggaacagactcgataggctgatgttcaggacaaatgagcggcttcctggtgctgtactgcaagcacaagcacgtgtcctggagagactcagaggcatttctcttggttcatctgcctccaggccatccatctcattagatgaattttccgctaacgatgtatttagaatcatcgacttcagaaacagggaaacgtggcatgaggcaaaccggccccactcatcgtcgttccacctaggcagtgaatcagatgaagaaagaccaaacgtcagctccgttaactccaaccggtcaactggacttagcaaggcggctttcctgcgtctgcagattgagatttttgaggctagcaaagatgataacagagaggcttcaccagaatgctctatttgccttgatggattttacgacggagatgagctgataaggttgcactgtggccacaggttccactcgacatgcttggagccatgggtgaggaaatgttcagactgcccatactgtcggacaaatatacggtcacaatcctgatggcaaacccttagttctgaacaagattataaccaccgcgaagttcaactgctgtaaattcgctgttgcgggcaccgcgttccagttagtctggtgctccaatggttgcgtgtcatttctaatatactgaatgttttgtgttgttgtgtggctcaaagaggcatatggtgttgtgtgct

SEQ ID NO: 156680 - DNA, 1143 bp, Zea Mays
tcctcctcccctctctcgcctcaaaacaaggaagggagcagatggagccgcatcattaaaaaaaggacacggaaacttaatccgatccaccaaacaaaaatccctgtctctcgcgcagggcaccgccacgcgcgcctcatccggtaccgccatgacgagcgcctccgagctcttcatcgcgcgccgcgccgcccgtggggcccgcctctccgaccccgaccccgacccggacccgcaccccgtcgcgctccgggaccagcatggactcggcggccggcgccagcgccgcgggtgccggccgcgacgccagctcgacgccgccggggacgtgcgccagcacctgcacaccggggccccgccaccgcgtcgccgcggatcgtacaccatcttatcctacatagacaataacaactttggggattctgcatctcggaggaacagactcgataggctgatgttcaggacaaatgagcggcttcctggtgctgtactgcaagcacaagcacgtgtcctggagagactcagaggcatttctcttggttcatctgcctccaggccatccatctcattagatgaattttccgctaacgatgtatttagaatcatcgacttcagaaacagggaaacgtggcatgaggcaaaccggccccactcatcgtcgttccacctaggcagtgaatcagatgaagaaagaccaaacgtcagctccgttaactccaaccggtcaactggacttagcaaggcggctttcctgcgtctgcagattgagatttttgaggctagcaaagatgataacagagaggcttcaccagaatgctctatttgccttgatggattttacgacggagatgagctgataaggttgcactgtggccacaggttccactcgacatgcttggagccatgggtgaggaaatgttcagactgcccatactgtcggacaaatatacggtcacaatcctgatggcaaacccttagttctgaacaagattataaccaccgcgaagttcaactgctgtaaattcgctgttgcgggcaccgcgttccagttagtctggtgctccaatggttgcgtgtcatttctaatatactgaatgttttgtgttgttgtgtggctcaaagaggcatatggtgttgtgtgct

SEQ ID NO: 156681 - DNA, 1297 bp, Zea Mays
tcctcctcccctctctcgcctcaaaacaaggaagggagcagatggagccgcatcattaaaaaaaggacacggaaacttaatccgatccaccaaacaaaaatccctgtctctcgcgcagggcaccgccacgcgcgcctcatccggtaccgccatgacgagcgcctccgagctcttcatcgcgcgccgcgccgcccgtggggcccgcctctccgaccccgaccccgacccggacccgcaccccgtcgcgctccgggaccagcatggactcggcggccggcgccagcgccgcgggtgccggccgcgacgccagctcgacgccgccggggacgtgcgccagcacctgcacaccggggccccgccaccgcgtcgccgcggatcgtacaccgcactggactaccatgttgcacaaagagtgaaacgacaaacgagccttgttcattatagtagcagtgatcgagcttggcatcatgtagtcctgacggctttgtgcgattgtagctcttccgccagtgaaaatttcgtagatgacgcaggatcagatcttatcctacatagacaataacaactttggggattctgcatctcggaggaacagactcgataggctgatgttcaggacaaatgagcggcttcctggtgctgtactgcaagcacaagcacgtgtcctggagagactcagaggcatttctcttggttcatctgcctccaggccatccatctcattagatgaattttccgctaacgatgtatttagaatcatcgacttcagaaacagggaaacgtggcatgaggcaaaccggccccactcatcgtcgttccacctaggcagtgaatcagatgaagaaagaccaaacgtcagctccgttaactccaaccggtcaactggacttagcaaggcggctttcctgcgtctgcagattgagatttttgaggctagcaaagatgataacagagaggcttcaccagaatgctctatttgccttgatggattttacgacggagatgagctgataaggttgcactgtggccacaggttccactcgacatgcttggagccatgggtgaggaaatgttcagactgcccatactgtcggacaaatatacggtcacaatcctgatggcaaacccttagttctgaacaagattataaccaccgcgaagttcaactgctgtaaattcgctgttgcgggcaccgcgttccagttagtctggtgctccaatggttgcgtgtcatttctaatatactgaatgttttgtgttgttgtgtggctcaaagaggcatatggtgttgtgtgct

SEQ ID NO: 156682 - DNA, 2845 bp, Zea Mays
ccccaacttgcgccgcagagcgccactaacgcttgtttctgccgttgttgcttgccgcagagatcgccgggagagagggacagatcatgctcggggaacggtgtgtggcgaggaatgttgactagttgtttaatacgagatcaagaaggacaaagcaattaaacaagcagcaggctttgtgctttgtgggtgtccctcctctggttcactgccccgctctccactccagctccatacattagtttactcctcctgaggtactttgtgctcctcccccttctggcccctcactgcctacgatagcagcagcaccggccgcataagtaggttgggcgctagagtgcgcttcaagcagcagcgctgttgctgcatcggaacccatccccactatttgtttgttttcgctgtacgagcgatctcctggccggctccggcacgttgcaatattcggtcttctcttctcggcgcagcagcaacttgttcttgtgcgctgcctcgctgctctgagccatttgccgttgctgcggtggacaagtatgggatagtggttgtggtgctgtgcagttcttgcttcttacaagtggtggtggtggtggtggtctggacgtctggtctctgcgtgagcattggactagaggagcgggaagctgtgcggctcctctttcgtggtcaagatgaagttcatgaagcttggatcaaatccggatacatttcagggagatgggaatgaagtcagtattgcggcatctgaattggtgagcgacatcactgttcgtatagggactacaaagttttaccttcacaagtttccgctcctatccaagtgtgctcgcttccagaagttgattccaactactggcgatgaaaatattgagatccacatccatgatattcctggtggtgccaaggcttttgagatctgtgccaagttttgctatggcatgattgtcacactcaatgcctacaatgtgattgccgcccgctgtgccgcagagtacctggagatgaacgagactgttgacaagggcaatctgatctacaagatcgatatcttcctcagctcaagcatacaccggagctggaaagactccataattgttcttggtacaacaaaggctcatttaccttgggcagaggatcttaagctggtcagccactgcattgactctgttgcttcaaaagcctctattgacgtttcaaaagttgaatggtcatacacatacaaccgtaagaagctcacagttgagaatggtcatgattcgccatggaatggagtcaagcagcagcagtttgttccaaaggattggtgggtcgaagatctgacagatctcgacattgacgcctacaagcaagtcataacagcagtcaaaaccaagggtacggtgcccaaggatgtgatcggtgcggcgattaaagcctacacttacaagaagctcccgtcactaagcaaggtctcgatgatccatggcgacgcaaaagttcgggctatgctagttaccatcacatgcctgttgccatccgagaaaggttcggtttcgtgcagcttcctcttgaagttactgaaggcaacaaacttgctcaagtgtggagagatgtgcaggaaagagcttatgaagcgcatcgcacggcaactggaagaagcgtcagtgtcagatcttctgatccctacggtggatggggataccaccgtttacgacatcgacctgattcttagcattgttgaagaatttgtcagacaagatagcaagaatgcccagagacataacggtggtgaggtgaacgaccacgtatctgctcctagtgcgtcaatggttgcagtggccaaaactgtcgatggatatctcgcagaggttgcaagggacccaaatataccggtctacaagtttttcagcctagctgagacggtttcgggaggttcaaggccggttcatgatggactgtatcgtgccattgatatgtatctgaaggagcacccaagcttgggcaagagcgacaagaagaggctatgtgccctgatggactgcaagaagttgtcgcccgacgcgtgcgctcatgccgtgcagaacgagcgcctgcctctgaggatcgtggtgcaggtgctgtaccacgagcagacaagggcctgtgccgcagccaccgccatccgagccgacagcatcggcatcggctcctacgagagctcaaggtcaggcgccacaacgaacacagaggacgagtgggacggcgtcatggccgtggaggacctcagcctgtccaagacgacgaagctggtggacaaatgcgacacggcggccagtacggtcgtcgtggggaaggacaaggaccacggtggcaacaagggcgccaccggcagggtggccaaaggtggcgctggcgcggcgacaccaaagaaggcgctcgggaaaacggtgtccggcaaagggcagaccggggagcgcagcagctcggactcatccgacagcgccgtcgccgtcgcagtcttgaccagccaggagcatcccaagaggacgacccgcgcaaggaacgccgccaagtcggctgctgcgtagcccttccgctgagagaaatgctcaaggagcactagctaggttttagcagtcgtctgttctttgttattacgagtgttgcatagaagccaggaccatgttttttacacgtctgtagctgcctgtagggatggtgtaataccaggtacgtgcgttgttaggtgatgctgttagcacgtaggttccaaacctatgagaccttgggctctgctgggtttatgtcgaactcgcagttgtgttataagaatcctactttgatagacttaaactgttctgcagctgtgagatcttttgaactc

SEQ ID NO: 156683 - DNA, 3188 bp, Zea Mays
ctggctccatccattgcccgggagcgcgcgggtggacccttttttttctcgggtgggtgggtcacgctgctcccctttctcgggccatgcctgacgctgcccttcgctttgcctttgttcttgcgtgccttgttggctagcctgtgttgttgccttccctctcgtttgctataaaccctcgatgcgatgccgcctcatgcacgcctctcacacattgtgcagtgcctggtgcctcagtgcctgccctgccctgccctttgatatggtttctggttatttttattattccctcccttctgctggcccggcgcgcgcgtctctctcccttgccatctgatcgatctcggcaaaaaaactgcgagatcttggcgtgctgccggcgataagattctccccggcgcaagcacatcaccagagcgagcaagtggttcttgagatcgccgggagagagggacagatcatgctcggggaacggtgtgtggcgaggaatgttgactagttgtttaatacgagatcaagaaggacaaagcaattaaacaagcagcaggctttgtgctttgtgggtgtccctcctctggttcactgccccgctctccactccagctccatacattagtttactcctcctgaggtactttgtgctcctcccccttctggcccctcactgcctacgatagcagcagcaccggccgcataagtaggttgggcgctagagtgcgcttcaagcagcagcgctgttgctgcatcggaacccatccccactatttgtttgttttcgctgtacgagcgatctcctggccggctccggcacgttgcaatattcggtcttctcttctcggcgcagcagcaacttgttcttgtgcgctgcctcgctgctctgagccatttgccgttgctgcggtggacaagtatgggatagtggttgtggtgctgtgcagttcttgcttcttacaagtggtggtggtggtggtggtctggacgtctggtctctgcgtgagcattggactagaggagcgggaagctgtgcggctcctctttcgtggtcaagatgaagttcatgaagcttggatcaaatccggatacatttcagggagatgggaatgaagtcagtattgcggcatctgaattggtgagcgacatcactgttcgtatagggactacaaagttttaccttcacaagtttccgctcctatccaagtgtgctcgcttccagaagttgattccaactactggcgatgaaaatattgagatccacatccatgatattcctggtggtgccaaggcttttgagatctgtgccaagttttgctatggcatgattgtcacactcaatgcctacaatgtgattgccgcccgctgtgccgcagagtacctggagatgaacgagactgttgacaagggcaatctgatctacaagatcgatatcttcctcagctcaagcatacaccggagctggaaagactccataattgttcttggtacaacaaaggctcatttaccttgggcagaggatcttaagctggtcagccactgcattgactctgttgcttcaaaagcctctattgacgtttcaaaagttgaatggtcatacacatacaaccgtaagaagctcacagttgagaatggtcatgattcgccatggaatggagtcaagcagcagcagtttgttccaaaggattggtgggtcgaagatctgacagatctcgacattgacgcctacaagcaagtcataacagcagtcaaaaccaagggtacggtgcccaaggatgtgatcggtgcggcgattaaagcctacacttacaagaagctcccgtcactaagcaaggtctcgatgatccatggcgacgcaaaagttcgggctatgctagttaccatcacatgcctgttgccatccgagaaaggttcggtttcgtgcagcttcctcttgaagttactgaaggcaacaaacttgctcaagtgtggagagatgtgcaggaaagagcttatgaagcgcatcgcacggcaactggaagaagcgtcagtgtcagatcttctgatccctacggtggatggggataccaccgtttacgacatcgacctgattcttagcattgttgaagaatttgtcagacaagatagcaagaatgcccagagacataacggtggtgaggtgaacgaccacgtatctgctcctagtgcgtcaatggttgcagtggccaaaactgtcgatggatatctcgcagaggttgcaagggacccaaatataccggtctacaagtttttcagcctagctgagacggtttcgggaggttcaaggccggttcatgatggactgtatcgtgccattgatatgtatctgaaggagcacccaagcttgggcaagagcgacaagaagaggctatgtgccctgatggactgcaagaagttgtcgcccgacgcgtgcgctcatgccgtgcagaacgagcgcctgcctctgaggatcgtggtgcaggtgctgtaccacgagcagacaagggcctgtgccgcagccaccgccatccgagccgacagcatcggcatcggctcctacgagagctcaaggtcaggcgccacaacgaacacagaggacgagtgggacggcgtcatggccgtggaggacctcagcctgtccaagacgacgaagctggtggacaaatgcgacacggcggccagtacggtcgtcgtggggaaggacaaggaccacggtggcaacaagggcgccaccggcagggtggccaaaggtggcgctggcgcggcgacaccaaagaaggcgctcgggaaaacggtgtccggcaaagggcagaccggggagcgcagcagctcggactcatccgacagcgccgtcgccgtcgcagtcttgaccagccaggagcatcccaagaggacgacccgcgcaaggaacgccgccaagtcggctgctgcgtagcccttccgctgagagaaatgctcaaggagcactagctaggttttagcagtcgtctgttctttgttattacgagtgttgcatagaagccaggaccatgttttttacacgtctgtagctgcctgtagggatggtgtaataccaggtacgtgcgttgttaggtgatgctgttagcacgtaggttccaaacctatgagaccttgggctctgctgggtttatgtcgaactcgcagttgtgttataagaatcctactttgatagacttaaa

SEQ ID NO: 156684 - DNA, 3174 bp, Zea Mays
ctggctccatccattgcccgggagcgcgcgggtggacccttttttttctcgggtgggtgggtcacgctgctcccctttctcgggccatgcctgacgctgcccttcgctttgcctttgttcttgcgtgccttgttggctagcctgtgttgttgccttccctctcgtttgctataaaccctcgatgcgatgccgcctcatgcacgcctctcacacattgtgcagtgcctggtgcctcagtgcctgccctgccctgccctttgatatggtttctggttatttttattattccctcccttctgctggcccggcgcgcgcgtctctctcccttgccatctgatcgatctcggcaaaaaaactgcgagatcttggcgtgctgccggcgataagattctccccggcgcaagcacatcaccagagcgaagatcgccgggagagagggacagatcatgctcggggaacggtgtgtggcgaggaatgttgactagttgtttaatacgagatcaagaaggacaaagcaattaaacaagcagcaggctttgtgctttgtgggtgtccctcctctggttcactgccccgctctccactccagctccatacattagtttactcctcctgaggtactttgtgctcctcccccttctggcccctcactgcctacgatagcagcagcaccggccgcataagtaggttgggcgctagagtgcgcttcaagcagcagcgctgttgctgcatcggaacccatccccactatttgtttgttttcgctgtacgagcgatctcctggccggctccggcacgttgcaatattcggtcttctcttctcggcgcagcagcaacttgttcttgtgcgctgcctcgctgctctgagccatttgccgttgctgcggtggacaagtatgggatagtggttgtggtgctgtgcagttcttgcttcttacaagtggtggtggtggtggtggtctggacgtctggtctctgcgtgagcattggactagaggagcgggaagctgtgcggctcctctttcgtggtcaagatgaagttcatgaagcttggatcaaatccggatacatttcagggagatgggaatgaagtcagtattgcggcatctgaattggtgagcgacatcactgttcgtatagggactacaaagttttaccttcacaagtttccgctcctatccaagtgtgctcgcttccagaagttgattccaactactggcgatgaaaatattgagatccacatccatgatattcctggtggtgccaaggcttttgagatctgtgccaagttttgctatggcatgattgtcacactcaatgcctacaatgtgattgccgcccgctgtgccgcagagtacctggagatgaacgagactgttgacaagggcaatctgatctacaagatcgatatcttcctcagctcaagcatacaccggagctggaaagactccataattgttcttggtacaacaaaggctcatttaccttgggcagaggatcttaagctggtcagccactgcattgactctgttgcttcaaaagcctctattgacgtttcaaaagttgaatggtcatacacatacaaccgtaagaagctcacagttgagaatggtcatgattcgccatggaatggagtcaagcagcagcagtttgttccaaaggattggtgggtcgaagatctgacagatctcgacattgacgcctacaagcaagtcataacagcagtcaaaaccaagggtacggtgcccaaggatgtgatcggtgcggcgattaaagcctacacttacaagaagctcccgtcactaagcaaggtctcgatgatccatggcgacgcaaaagttcgggctatgctagttaccatcacatgcctgttgccatccgagaaaggttcggtttcgtgcagcttcctcttgaagttactgaaggcaacaaacttgctcaagtgtggagagatgtgcaggaaagagcttatgaagcgcatcgcacggcaactggaagaagcgtcagtgtcagatcttctgatccctacggtggatggggataccaccgtttacgacatcgacctgattcttagcattgttgaagaatttgtcagacaagatagcaagaatgcccagagacataacggtggtgaggtgaacgaccacgtatctgctcctagtgcgtcaatggttgcagtggccaaaactgtcgatggatatctcgcagaggttgcaagggacccaaatataccggtctacaagtttttcagcctagctgagacggtttcgggaggttcaaggccggttcatgatggactgtatcgtgccattgatatgtatctgaaggagcacccaagcttgggcaagagcgacaagaagaggctatgtgccctgatggactgcaagaagttgtcgcccgacgcgtgcgctcatgccgtgcagaacgagcgcctgcctctgaggatcgtggtgcaggtgctgtaccacgagcagacaagggcctgtgccgcagccaccgccatccgagccgacagcatcggcatcggctcctacgagagctcaaggtcaggcgccacaacgaacacagaggacgagtgggacggcgtcatggccgtggaggacctcagcctgtccaagacgacgaagctggtggacaaatgcgacacggcggccagtacggtcgtcgtggggaaggacaaggaccacggtggcaacaagggcgccaccggcagggtggccaaaggtggcgctggcgcggcgacaccaaagaaggcgctcgggaaaacggtgtccggcaaagggcagaccggggagcgcagcagctcggactcatccgacagcgccgtcgccgtcgcagtcttgaccagccaggagcatcccaagaggacgacccgcgcaaggaacgccgccaagtcggctgctgcgtagcccttccgctgagagaaatgctcaaggagcactagctaggttttagcagtcgtctgttctttgttattacgagtgttgcatagaagccaggaccatgttttttacacgtctgtagctgcctgtagggatggtgtaataccaggtacgtgcgttgttaggtgatgctgttagcacgtaggttccaaacctatgagaccttgggctctgctgggtttatgtcgaactcgcagttgtgttataagaatcctactttgatagacttaaa

SEQ ID NO: 156685 - DNA, 1562 bp, Zea Mays
atccaccggtctgccggccccgtcttccgctccgacgacccggagccggaggtctgtccagttggtagtcgcctcaagcaccaattcgcccctccgccgaagctaagctgctcggtcccaagggcatccctagctggctgaggcggatcggtagcaaaaccgatactgttacgttgccacggaggcagtttgatttggtggacctaacggccttgcggatctcttgggagccagagcgatggcgcgcggtgctcgcttcctccttgttctcgcgctgctggtcgcgctacttgccgtcgtcttccagctttatcgcctcaggaagccgaggttgtggacagtggaggagctatcgctgtacaatggaaccgatgaggggttgcccatactactcgcgattttgggctcagtgtttgacgtcacaaaagggaggtcacattatggccctggaggaggttatcatcattttgctgggagcattcttttgacagggatgcatcacgggcatttgtttctggaaattttacaggtgatggtttgactgattccttacagggtttatcaagcagtgaggtaaacagcattgttgattggaggaagttttactttgaaagatatatatttgctggtaaacttattggacgttactatgacagtcaagggaatcctacgaaatatctgaagggtgtagaaatgaaggcaaagagaggtgcacagcttcttgaaaagcagaagagtgatgaagctaaaatacctggctgcaattcaaaatggagccagcaagaaggtggagaagtctggtgcgacacgggctatccaagattggtgaggaggccaggtgacatagctctgaccggacaagttagccaaaggtgcgcttgcttccaggaaaacgagctggacaaagccgggctagtggtgtacgaagggtgtgattacctgtcccagtcttgcaaagtaaactaggccgtgcgtctcccttccacggacttgttgctttggggggtactcaaacgcaaggttcatcagttacgggggcgctgcgacattccacgagcacccaccagccacgcatgcatcatgaaggcgggcctttctgctctgtcccgcgtgaaacacctggtgcaacgtcgtggttcagttcagatgcctagatacgcaattgattggaagatacccgcgatcgaatcaaatgatggtaacgctgcgccgccacgggcaagatctcgatcctaaaggctgtccgtgttaataggcatggggccttgggctgtcgattgatcgaggctgccttgcaagttgcgccgtctgcaccataggctacctccatcaatgaaatgcatttttttggagagtcattttagccatttgcatagcgaacagtgtgtgcgtgtgtggtacgcaaatttttgtttctccaagttggatcatgcatatgcagatttatacagtgccgtgcgagaggcattttacgtttgcatacccctaacccctttgcgtgatctgttggagatagatcccaaactcattctctctgctgcaaaatacacgctctttggatt

SEQ ID NO: 156686 - DNA, 3111 bp, Zea Mays
atgcctcccgctaccgtcaccctgctaccagcgtgcgccgtgctgctgctgtgctgccgtctctctccggcggccgcggcgtcgcccgccgatgtcggcgggggcggggccaggcgggtgctccaccagccattgttcccaatcgagtggaccccgccgccgtcgccgccgcctccgccggcaccggacttcacctccgatccggcgacgccggacggcccacccggcgacttcttccctccggcgccaccgacggcgccggccggcggcggaggtacgagcacgacgacgacgacgacgtcgtcctcgccgaccaccgtcgccgccgacgtcccgagcgcctcgtcaggatccggtgacgccggacaccacggcggccctgcgaaggggaccatcgtcgcggcgggggcggccgcggccgcggccatcgcgctgctggccttcgcgtgcgccttcctcgtcgcgggccgcgcgcgccgccacggggactcgcagaagctgctcagccccgaccgcggctccgcgcgccaccgctccgcgccctcggccgccgacttcctctacgtcggcacggtggagcccgccacgccgggccgccaccgtgggcccaccgccgccgacctcgttgggtccccgtaccgcaagctgcgcagcgagcgcgagcgcgcgcgccgcgggctgggccgcgcccgcgacgagcccaccgaccacccgagcccggagctccgcccgctcccgccgctgcgccgcgcggccacggtgggctccgacgacgacgatgcctactacacgccacgtcagcgctccgccggtggcggggtcggcggcgaaacgtggagcgaggccagcgcgtccagcccgcccaccaccaccaccgcgtcccgccgaagtctccccagcctcaccagcgactgctttcctccggtcgccgccattgctgcgccgacaccgtcccctgcgtggtcccgccgtacgcccccgcgcacgcgcttctctgccggctccacccctgacatcaaacaggtgatctcgccgtccccgcggtcggtgcaaccatccaaaccagcaccaacgccaccgccgcggccgccgccgacaccacctcctccaccgccgctgccgaagtctaccacagctccaaaacctcctcctcctccgccgccgccgccacgaatggttccatctaataccggcctgaagcccgcgcagccgctttccgaaccgacgtcgcgacgccggttgctcaagccgttaccacctgagggcccccgcattgccatgccgatgccgatcacggaggcaacggcacaggatagtatcgggagcgcgtcaatgcctaaacaggatgacgtggcagacggtatcgttggcaacggcgagccgcggccgaagctcaagccgctgcactgggacaaggtgcgggcgacctccgaccgcgccatggtctgggaccagctgaagtcaagctcattccagttgagatcttgcttcgtactacatgcgctgttaatggctgggttgaatgaggacatgatcgaggcattgttcatgaataactcaacgccgtccgcgctgccgagagatgcgggacggaagaccaccgtcccaccattcaggcaggaggagagggtgctcgaccccaagaaagcacagaacatcgccatcctgctccgtgcattgaatgttacgcgcgatgaggtctctgatgcactgttggatggcaacgctgaatgtttggggacagaacttttggagactttagtcaagatggctcctactaaagaggaagaactcagactacgagattataatggtgacgcatcgaagcttggttctgcagagcgctttctcaaagctgtgcttgatataccttttgccttcaagagagttgatgccatgctataccgagccaattttgaggccgaaataaattacttaatgaaatcttttgagacattagaggcagcctgcgaagatctcagaggcagcaggttgttcctgaaactactcgaggcggtgctgagaaccgggaaccggatgaatgtcggcacaaaccggggtgaggcaaaagctttcaagcttgacactctcctgaaacttgctgatgtcaagagcactgatggtaaaacaacgctgttgcatttcgtcgtccaagaaataattcgatcagaagatgcaaaatcagaaaaagaaagcgccatgattattcatagctctaaagacgagcagttgcggaagcaaggtctgaaacttgtctctggcctcagcagtgagctgggaaatgtcaagaaagcagccatgatggactttgatgtgttgcatggctatgttagtaagctagaaacaggcattgaaaagatcaagtcggtcttgcagctcgagaggcaatgcactcaaggccaaaagttctttacgacaatgcagagttttctgaagaaagccgagacggagatagacaaagtcagaggggaggagaagaaggccctggtgagagtaaaagacatcaccgagtacttccatggtgacaccgcgaaagaggaagcgcaccctcttaggatattcatggtggtgagggacttcctctcgacgttggatcatgtctgcaaggaggttggcaggttacagcaggacagaacggttattgggtcagccaggtctttcaggatttcagccacctcaatgccagttctaagtgtgtatggacaacgaagggagaacaactctgacgatgacagtgcatcatcctaggacaggacagcaaggctgagggacaaatcaccaagtcacaacactgaattttggaaggagcacagcacatcagctatgccatttttagctgctgaagcggatgtcgcattggcatttgccccgaggcacatgtttaaggttgggaggacgaaggtcgggagggggtggtatacttttggatcccgtggaaattctttttgtacaaaaggaaaataatcgtaacaggttctctctcttgttgggtgacttgcagaaactgaggtcgaggcttgaaaagctgcccactttcagtaagtagtgcactgcagcttctgggatatggcttcttatgtaactagtatgctcatctgatataacctggga

SEQ ID NO: 156687 - DNA, 3069 bp, Zea Mays
atgcctcccgctaccgtcaccctgctaccagcgtgcgccgtgctgctgctgtgctgccgtctctctccggcggccgcggcgtcgcccgccgatgtcggcgggggcggggccaggcgggtgctccaccagccattgttcccaatcgagtggaccccgccgccgtcgccgccgcctccgccggcaccggacttcacctccgatccggcgacgccggacggcccacccggcgacttcttccctccggcgccaccgacggcgccggccggcggcggaggtacgagcacgacgacgacgacgacgtcgtcctcgccgaccaccgtcgccgccgacgtcccgagcgcctcgtcaggatccggtgacgccggacaccacggcggccctgcgaaggggaccatcgtcgcggcgggggcggccgcggccgcggccatcgcgctgctggccttcgcgtgcgccttcctcgtcgcgggccgcgcgcgccgccacggggactcgcagaagctgctcagccccgaccgcggctccgcgcgccaccgctccgcgccctcggccgccgacttcctctacgtcggcacggtggagcccgccacgccgggccgccaccgtgggcccaccgccgccgacctcgttgggtccccgtaccgcaagctgcgcagcgagcgcgagcgcgcgcgccgcgggctgggccgcgcccgcgacgagcccaccgaccacccgagcccggagctccgcccgctcccgccgctgcgccgcgcggccacggtgggctccgacgacgacgatgcctactacacgccacgtcagcgctccgccggtggcggggtcggcggcgaaacgtggagcgaggccagcgcgtccagcccgcccaccaccaccaccgcgtcccgccgaagtctccccagcctcaccagcgactgctttcctccggtcgccgccattgctgcgccgacaccgtcccctgcgtggtcccgccgtacgcccccgcgcacgcgcttctctgccggctccacccctgacatcaaacaggtgatctcgccgtccccgcggtcggtgcaaccatccaaaccagcaccaacgccaccgccgcggccgccgccgacaccacctcctccaccgccgctgccgaagtctaccacagctccaaaacctcctcctcctccgccgccgccgccacgaatggttccatctaataccggcctgaagcccgcgcagccgctttccgaaccgacgtcgcgacgccggttgctcaagccgttaccacctgagggcccccgcattgccatgccgatgccgatcacggaggcaacggcacaggatagtatcgggagcgcgtcaatgcctaaacaggatgacgtggcagacggtatcgttggcaacggcgagccgcggccgaagctcaagccgctgcactgggacaaggtgcgggcgacctccgaccgcgccatggtctgggaccagctgaagtcaagctcattccagttgaatgaggacatgatcgaggcattgttcatgaataactcaacgccgtccgcgctgccgagagatgcgggacggaagaccaccgtcccaccattcaggcaggaggagagggtgctcgaccccaagaaagcacagaacatcgccatcctgctccgtgcattgaatgttacgcgcgatgaggtctctgatgcactgttggatggcaacgctgaatgtttggggacagaacttttggagactttagtcaagatggctcctactaaagaggaagaactcagactacgagattataatggtgacgcatcgaagcttggttctgcagagcgctttctcaaagctgtgcttgatataccttttgccttcaagagagttgatgccatgctataccgagccaattttgaggccgaaataaattacttaatgaaatcttttgagacattagaggcagcctgcgaagatctcagaggcagcaggttgttcctgaaactactcgaggcggtgctgagaaccgggaaccggatgaatgtcggcacaaaccggggtgaggcaaaagctttcaagcttgacactctcctgaaacttgctgatgtcaagagcactgatggtaaaacaacgctgttgcatttcgtcgtccaagaaataattcgatcagaagatgcaaaatcagaaaaagaaagcgccatgattattcatagctctaaagacgagcagttgcggaagcaaggtctgaaacttgtctctggcctcagcagtgagctgggaaatgtcaagaaagcagccatgatggactttgatgtgttgcatggctatgttagtaagctagaaacaggcattgaaaagatcaagtcggtcttgcagctcgagaggcaatgcactcaaggccaaaagttctttacgacaatgcagagttttctgaagaaagccgagacggagatagacaaagtcagaggggaggagaagaaggccctggtgagagtaaaagacatcaccgagtacttccatggtgacaccgcgaaagaggaagcgcaccctcttaggatattcatggtggtgagggacttcctctcgacgttggatcatgtctgcaaggaggttggcaggttacagcaggacagaacggttattgggtcagccaggtctttcaggatttcagccacctcaatgccagttctaagtgtgtatggacaacgaagggagaacaactctgacgatgacagtgcatcatcctaggacaggacagcaaggctgagggacaaatcaccaagtcacaacactgaattttggaaggagcacagcacatcagctatgccatttttagctgctgaagcggatgtcgcattggcatttgccccgaggcacatgtttaaggttgggaggacgaaggtcgggagggggtggtatacttttggatcccgtggaaattctttttgtacaaaaggaaaataatcgtaacaggttctctctcttgttgggtgacttgcagaaactgaggtcgaggcttgaaaagctgcccactttcagtaagtagtgcactgcagcttctgggatatggcttcttatgtaactagtatgctcatctgatataacctggga

SEQ ID NO: 156688 - DNA, 327 bp, Zea Mays
atggtgctgctgttgatctatggagtgccggttgcattcttgctgagttgctatcagggaagcctatcatgccaggacgaactgagatgatcaatatggtcaaggtgcggcataacaatgtggttccaaccatggccttgggagtgcagcagctgaagaaggagctgggacgatcaaggaaggttccattcgagttcgatgagatccacgagttccttgaccggttctacatgtcaaggattggcatccacatgctgataggttcgcaaccttcaagctgctttgtcaagagcttaatttatgaagggtaaaacttactgtcaactt

SEQ ID NO: 156689 - DNA, 1447 bp, Zea Mays
tcctttgctggcacgaccaaaaacttctcttcatccaatctgcaactccctcccgcaccaaaccttacccaggactaggaggaggaaagaaatggaggaataaagcagagtgagaagagaagaggaagcgaggcctctgctccagctcctatacaggagcgagcgacccagacgcctctgcttcggtgcttcccagtgccagtagtcgccaatccgcccaggtctcatgcttcggtccacgcacccacccagccccagcagcggcagctccgacgccacgatggtcgggggcggcgccccgagcggcgccaagctgctgcagatcctcaacgtgcgggtggtgggcagcggcgaccgcgtggtggtgctgtcccacgggttcggcacggaccagtcggcgtggagccgcgtgctcccctacctcacccgcgaccaccgcgtggtgctctacgacctcgtctgcgccggcagcgtcaacccggagcacttcgacttccgccgctacgacacgctggactcgtacgtcgacgacctgctcgccatcctcgacgcgctccgcgtctcgcgctgcgccttcgtcgggcactccgtgtccgccatgatcggcatcctcgcctccatccgccgccccgagctcttcgccaagctcgtcctcatcggcgcgtcgcccaggttcctgaacgaccacgactaccacggcgggttcgagctgccggagatccagcaggtgttcgacgcgatggcggccaactactcggcgtgggcgaccgggtacgccccgctggcggttggcgcggacgtgcccgcggcggtgcaggagttcagccgcacgctcttcaacatgcggccggacatctcgctccacgtctgccgcaccgtgttcaacacggacctccgcggcgtgctgggcatggtgcgcgccccctgcgtggtggtgcagaccacccgcgacgtctccgtcccggcctccgtcgccgcctacctcaaggcccacctcggcggccgcaccgccgtcgagttcctccagaccgagggccacctcccgcacctcagcgcccccggcctcctcgcccaggtgctccgccgcgcgctcgcccggtactagcagccgggccggccaggcctgtttttaccgcctcgatttacccctgccgagaccgagaatcaagaaatggcgcgactcgcgccgtttgctgtgcctatgcgcgccatgactgtagtacaacttgttctggtaggtagtggtacccgatttcttttcgctttttatgagcagttgcagtgttgcactgctactccgcatcttgccttcgtctcctgcacctccacccaacccaaggacagataagtgggcctgctcgggacacgtggcgagtagtcgaggcggcgcacgagctcgttccgccttcgccttcgccctgtcccatccgcaactgcaactagtgct

SEQ ID NO: 156690 - DNA, 1611 bp, Zea Mays
atgagtacagaggaggctgcgaagaagacagaaattgatggtagtggttcaggagggattacaaagagtgagatgatgagtgaaatgagaagtatgatccaggagctcatggggttagggttgattggtgctagggcaaatacaggtacatctgagttgaagttggaacttgtgcctaatgatgtgaagctagaaggtagtaagaattatctaagctggttcagaagagtgcgtgtactcctagggggcaagggagtggagcattatttggaggagacatgtgttgagccgattgataagctcggtgcagaatggagaatctggcatgcgacaaactctgtgatagttgcatggttattggcatccatgtctcccactgttagcaagagggtggaagccatgcgtactgcatcacaaatctggaagaccttgagtaatatatactctcgaaaggggaatgtgatggtgatgatggaaattcaaaacaaggcagatgcagtaaagcagatgggaagaccagtggaacaatatgctagtgagctccaacagttatggggagagctggatcattatgctcctctccaaatggtttgcccacaggatgcacaaatggttcataagtgggtagaggataggagagtgacccactttctaaagaatctggattctgagttcgagagcaggagagcggtcttttgtcaccaggagagtcttcctaccatggatgaggttgtgtctgccatgatagatgaagagagcagacttcgagtgatgagtagtggtaatcatgtgaagccagcatacgttgcaattgaggatagagaatgttataattgtggggaaaggggacacctgagttacaattgtcccaaccctagaggaaatggtggcaagggaggatctcgtggaggacgaggtggtactcgtggtcgtgggagctatggaagaggtcgcggaggtcgtggtagaggccgtggtggctccagggccaacatagctaccactgaagagagtctctctgttactctatctggggaacaagctaagcaatgggagcagtggcagaagggcaagtcttccgagtgcctcacttcacctgatgggcaagccaccaactccttcggtaactttgccaactacgcccacatgggcgaaggaggagtgattgttggaggtatgattccacgagaagtggagaaagggataactacgcaggtattgagtgatgatgaaagtagtggggatcatgatgatccaactattgatattcaggaggagacagaggatgatgaggcagtgattgttgggtcaatcccatgtcctatggcagggaagttgaatgagaaacagggggagcaacatgattgttccattggggcaaaggtgaatgacaaacagggggagcaacctatagtatactatcgaaagcggacgaagaagcagggggagcaaccacaacctggatgtgttgaagctccagtcccatatctctcttcagactcctctccagacccagctgatgaacatattctcctgtgtttgaagcagtttgctcccagcggtggaagggcttcagtagagttgagcaacataactggcaaccagatgtaa

SEQ ID NO: 156691 - DNA, 1170 bp, Zea Mays
atctaattgcagtggctcgagcctccgccgcggccataggtcggtccgaaaccctgggtccggcccacacctataataaagcccactagcggtccagacaggagccggaagtggcaccggccgccgccgaacgtgtccactgttcagtcggctcgagtaacaacagcaatagaatgggtggcggcggcgggagcccggcagcgagcggcgggagcagcagcagcgaggatgacggagacgccgcgtggaaggcagccattgactccatcgcgtccgttgggttcagcgtcccttcgtccaacggcgtggcgaaggcagcctctagcggcagccgcgaggtgaacaaccgcgctgatctggaagagccgcgtgaggggaagccaaagagtcctgggcttaagctgtaccaggtcaaggtaagaaacatgttggatgatatgttagagaaaaatctcgaaatagtcaaagctccgtgcttgaacttagtagaccccatggaaacaggaggaggaataaagttatttaaaaaagcaccacctggtattagcatggattctacggataaatggcacgtgcaactcaagcgaccaagaatcgtgcctggggaagaggtcgatgagaaatcaaagaagttccggcatatgctccggtctgttgttgtcgacggcagtgacatagttgtttctgcaaagaaagcatctgagagatcattggctagattggaagtgagagaagctgcagcaaaggcaaaagccaagagggaggaagaaagggtgcaggaactaaagaaggttaggggagagaaatggcttccttctgttgctagacaaatgaaggaggaaaaggcttgggagctgcgaaggcaatgagctgatgatgcgccagatcaatggggctgcgtaggcttatctccgagtccagttatcctggtgcctgttctgagtggccacaaaagtaatgtggcctatttctgaagtttggcgatggcaataggattagcagaaagagtacatagaatggaagctttgttctaactgagaatgtagcactggatatgccagcgttcatttccatttaacttatgtagtaaaatttgtggctctgatgttccagaatatgatttgacatcaaactcttttggaagtgcattgcgaatcgttgtcttgtttc

SEQ ID NO: 156692 - DNA, 1709 bp, Zea Mays
catttgtcctcttcgcttctctggatcaacctgccaatgcgcgtatcggttggagtagataagcggcgccatgggtatgaggagcaggcacccaaaggcgttgggtttccgctgccacccggcaagccaccggtccctaactctggcactatggagcctagcggcattggtcgtcgttgtgaatttccatcttctcatcgttcataaggaggacgatgagagtatgagcacacacgagatccgccgatcgattatgagggagctggaggtggtggaggaggagaagttccggctagctcctccccggagccggaggaatccccgggctgtgcgccgcaagggagagaagaagaagcctacaatagtggatgagttcctggatgagtcttcggctgtgcatgacatgttcttcccagaactgaatacggctgtagatccaatcaatggtgcaaatggcagcaagtacttctactacccaggcagaatttggttggacactgacggaaaaccaattcaagctcatggaggaggtgtcctctatgataagaggaccaccacctatttcttctacggggagaataaggatggcaaaacctacagagctcataggaagggagcagacagggttgacatcattggagtaagttgctattcttcgaaggacctgtggacatggaaaaacgaagggcttgtcctccgtggcgaggagaagaatgtaacacatgatcttcacaaatccaatgtcctggagagacccaaggtgatatacaatgatcggactggcaagtatgtgatgtggatgcacgtagatgatgctaactacaccaaagcttcagttggtgtggccatcagtgactctccgacaggcccattcacttacctctacagcaagcgtccgcatgactgtgagagtagagacatgaccatcttcaaggatgatgatgggaaggcctacctgatatactcttccgaggacaacagcgagctccacattggcccgctaaccgatgactaccttgacgtcactgatgccatgcgaaggcttctcatcgcgcagcatcgagaagctcctgcgctcttcaagcatgaaggcacctactatatggtgacctctggctgtacaagctgggctccaaatactgcgctggcccacgcagcgacatcagtgatgggaccttgggagacactggggaacccctgtgtgggagggaatgaggtcttcagatcaacgacattcttctcccagagcacatttgtcttgccagttccagggctgccgggctcattcatcttcatggctgatcggtggaacccgtctgatcttagagattcgcggtatgtttggctgcctctgacgatcgggggagtccctgatgaagccgcagactacagcttcatgttccctctctggtcccgggtgtccatttactggcacagacggtggcgtctccctgaggagtggagggattattgaaactctgaagtttctttttttttcataagaatcgaaggtcttatacgctgttacattgatagataccaaagtaaagtattgacatttgacacgttggtctacattgtataggtcagatgtagatgcagggttcgtaaatgtttagttttttgagtttgcactcaaatcaaataaaactattgtggccttttgggcgaggtagtttctagaataatctgtctgcattggtcttttc

SEQ ID NO: 156693 - DNA, 1822 bp, Zea Mays
ctgttagccaaggaagccagacacccggccataccaattaccaaaaccactcatcaggtcgcgttgccagccgcacaaaccaagacagacccccctaatctctctggcatcgcggctcgtgctaagctaatcgaggcgcccccaaccacctctggccaagatctcgataaggactagcccatgcgcgtatcggttggagtagataagcggcgccatgggtatgaggagcaggcacccaaaggcgttgggtttccgctgccacccggcaagccaccggtccctaactctggcactatggagcctagcggcattggtcgtcgttgtgaatttccatcttctcatcgttcataaggaggacgatgagagtatgagcacacacgagatccgccgatcgattatgagggagctggaggtggtggaggaggagaagttccggctagctcctccccggagccggaggaatccccgggctgtgcgccgcaagggagagaagaagaagcctacaatagtggatgagttcctggatgagtcttcggctgtgcatgacatgttcttcccagaactgaatacggctgtagatccaatcaatggtgcaaatggcagcaagtacttctactacccaggcagaatttggttggacactgacggaaaaccaattcaagctcatggaggaggtgtcctctatgataagaggaccaccacctatttcttctacggggagaataaggatggcaaaacctacagagctcataggaagggagcagacagggttgacatcattggagtaagttgctattcttcgaaggacctgtggacatggaaaaacgaagggcttgtcctccgtggcgaggagaagaatgtaacacatgatcttcacaaatccaatgtcctggagagacccaaggtgatatacaatgatcggactggcaagtatgtgatgtggatgcacgtagatgatgctaactacaccaaagcttcagttggtgtggccatcagtgactctccgacaggcccattcacttacctctacagcaagcgtccgcatgactgtgagagtagagacatgaccatcttcaaggatgatgatgggaaggcctacctgatatactcttccgaggacaacagcgagctccacattggcccgctaaccgatgactaccttgacgtcactgatgccatgcgaaggcttctcatcgcgcagcatcgagaagctcctgcgctcttcaagcatgaaggcacctactatatggtgacctctggctgtacaagctgggctccaaatactgcgctggcccacgcagcgacatcagtgatgggaccttgggagacactggggaacccctgtgtgggagggaatgaggtcttcagatcaacgacattcttctcccagagcacatttgtcttgccagttccagggctgccgggctcattcatcttcatggctgatcggtggaacccgtctgatcttagagattcgcggtatgtttggctgcctctgacgatcgggggagtccctgatgaagccgcagactacagcttcatgttccctctctggtcccgggtgtccatttactggcacagacggtggcgtctccctgaggagtggagggattattgaaactctgaagtttctttttttttcataagaatcgaaggtcttatacgctgttacattgatagataccaaagtaaagtattgacatttgacacgttggtctacattgtataggtcagatgtagatgcagggttcgtaaatgtttagttttttgagtttgcactcaaatcaaataaaactattgtggccttttgggcgaggtagtt

SEQ ID NO: 156694 - DNA, 386 bp, Zea Mays
cacaaaatccctgatcaatacctcttgcgtaatttacagctccaatgctatgcgacatgcaaaaaagaggaagactggagtgcgctttaagagctagtgcagatttaagttcaattcttctttttcgagtgcttcaccagccattcaatgacagaatcaatgttggtagagttcttgcaagatgtcatgaaacatgccacttctcgtagattagcatgttcttacattagttctgtgaaggtttgcttggggaaagcttcaggtttgtcaattttattgccaatgactagtaacggaatcccggtcaaagatggcttgctcaagaggtcatggagttccccctttgcaatggccatgttttctcgatctgccgcgtcaacaacata

SEQ ID NO: 156695 - DNA, 1293 bp, Zea Mays
ccgcatgatcgaacctggaaaccctcgagtcgtatataggtagtccgctctgcctcgaagtgccttctcccgcagagccgccgacaactctctctaccgtccgataccccaagcaccagcgcggcggcggcgaccatggctgtcggaaagaacaagaggatctccaagggaaagaagggtggcaagaaaaagaccgtcgaccctttctctaagaaggattggtatgacatcaaggcaccgtcggtgttcagtgtgcgcaacatcgggaagactctcgtatccaggacacagggtaccaggattgcttctgagggtctgaagcacagagtctttgaggtttgcctagctgatcttcagggcgacgaggatcaagcttacaggaaaatcaggctccgtgctgaagatgtgcagggcaggaatgtgctcacaaacttttggggtatgaattttaccactgataaactgagatccctagtgaagaagtggcagacattaatcgaagcccatgttgatgtcaagacaaccgacaactacatgttgcgtttgttctgcatcggcttcacgaagaggcgcccaaaccaggtcaagagaacctgctatgctcaggcatcccagatccgtcagatccgccgtaagatggttgagattatgatcaaccaggcttctacatgtgacctgaaagaacttgtttcgaagttcattccagaagttattggtaaggagattgagaagtctacctccagcatcttcccacttcaaaacgtcttcatccgcaaggtgaagatactcaaggcccccaagttcgatcttgggaagctcatggaggttcatggcgactacaaagaggatgttggtgtgaagcttgagaggcctgtcgagggagatgaggctgtgcaggaggttgctgctgccgagtagtttgtttgctacttctatatctaggctgagtctggacatgaggttgcttatgacgtgaacttagagttgtctacttgttttcatccgcccctaagattttgtctggaaacaagtttaaaattaagattattctcaacaagtgtttaagattactcgtggtgatcttctgagttcgagtactgctgtactaagttccttgcatcctcatttttgtttggccatcgatattttacgttctcgttctgtgctctgtttatttattgttagctgacactggtcatccagaattgtaaacttttaacactatcagttaaaactagtactacctccattttttattcatcatgttttagtttaaaattgaactagtaatcg

SEQ ID NO: 156696 - DNA, 1408 bp, Zea Mays
acgctgcagatgggccgaatcaaatgggccaaccatgcctcgaagcacacatatgggccacaccgcatcgtgtgcgtccatccgctcttgcgtgcctgctgaccgcatgatcgaacctggaaaccctcgaatcgtatatagtagtccgctctgcctccgaagtgctttctcccgcagagcagccgacaactctctaccgtccgagaccccaagcaccagcgcggcggcggcggcggcggcggcggcgaccatggctgtcggaaagaacaagaggatctccaagggaaagaagggtggcaagaaaaagaccgtcgaccctttctctaagaaggattggtatgacatcaaggcaccgtcggtgttcagtgtgcgcaacatcgggaagactctcgtatccaggacacagggtaccaggattgcttctgagggtctgaagcacagagtctttgaggtttgcctagctgatcttcagggcgacgaggatcaagcttacaggaaaatcaggctccgtgctgaagatgtgcagggcaggaatgtgctcacaaacttttggggtatgaattttaccactgataaactgagatccctagtgaagaagtggcagacattaatcgaagcccatgttgatgtcaagacaaccgacaactacatgttgcgtttgttctgcatcggcttcacgaagaggcgcccaaaccaggtcaagagaacctgctatgctcaggcatcccagatccgtcagatccgccgtaagatggttgagattatgatcaaccaggcttctacatgtgacctgaaagaacttgtttcgaagttcattccagaagttattggtaaggagattgagaagtctacctccagcatcttcccacttcaaaacgtcttcatccgcaaggtgaagatactcaaggcccccaagttcgatcttgggaagctcatggaggttcatggcgactacaaagaggatgttggtgtgaagcttgagaggcctgtcgagggagatgaggctgtgcaggaggttgctgctgccgagtagtttgtttgctacttctatatctaggctgagtctggacatgaggttgcttatgacgtgaacttagagttgtctacttgttttcatccgcccctaagattttgtctggaaacaagtttaaaattaagattattctcaacaagtgtttaagattactcgtggtgatcttctgagttcgagtactgctgtactaagttccttgcatcctcatttttgtttggccatcgatattttacgttctcgttctgtgctctgtttatttattgttagctgacactggtcatccagaattgtaaacttttaacactatcagttaaaactagtactacctccattttttattcatcatgttttagtttaaaattgaactagtaatcg

SEQ ID NO: 156697 - DNA, 1350 bp, Zea Mays
acgctgcagatgggccgaatcaaatgggccaaccatgcctcgaagcacacatatgggccacaccgcatcgtgtgcgtccatccgctcttgcgtgcctgctgaccgcatgatcgaacctggaaaccctcgaatcgtatatagtagtccgctctgcctccgaagtgctttctcccgcagagcagccgacaactctctaccgtccgagaccccaagcaccagcgcggcggcggcggcggcggcgaccatggctgtcgggaagaacaagaggatctccaagggaaagaagggtggcaagaaaaagaccgtcgaccctttctctaagaaggattggtatgacatcaaggcaccgtcggtgttcagtgtgcgcaacatcggggaagactctcgtatccaggacacagggtaccaggattgcttctgagggtctgaagcacagagtctttgaggtttgcctagctgatcttcagggcgacgaggatcaagcttacaggaaaatcaggctccgtgctgaagatgtgcagggcaggaatgtgctcacaaacttttggggtatgaattttaccactgataaactgagatccctagtgaagaagtggcagacattaatcgaagcccatgttgatgtcaagacaaccgacaactacatgttgcgtttgttctgcatcggcttcacgaagaggcgcccaaaccaggtcaagagaacctgctatgctcaggcatcccagatccgtcagatccgccgtaagatggttgagattatgatcaaccaggcttctacatgtgacctgaaagaacttgtttcgaagttcattccagaagttattggtaaggagattgagaagtctacctccagcatcttcccacttcaaaacgtcttcatccgcaaggtgaagatactcaaggcccccaagttcgatcttgggaagctcatggaggttcatggcgactacaaagaggatgttggtgtgaagcttgagaggcctgtcgagggagatgaggctgtgcaggaggttgctgctgccgagtagtttgtttgctacttctatatctaggctgagtctggacatgaggttgcttatgacgtgaacttagagttgtctacttgttttcatccgcccctaagattttgtctggaaacaagtttaaaattaagattattctcaacaagtgtttaagattactcgtggtgatcttctgagttcgagtactgctgtactaagttccttgcatcctcatttttgtttggccatcgatattttacgttctcgttctgtgctctgtttatttattgttagctgacactggtcatccagaattgtaaacttttaacactatcagttaaaactagta

SEQ ID NO: 156698 - DNA, 1040 bp, Zea Mays
ccgcatgatcgaacctggaaaccctcgagtcgtatataggtagtccgctctgcctcgaagtgccttctcccgcagagccgccgacaactctctctaccgtccgataccccaagcaccagcgcggcggcggcgaccatggctgtcggaaagaacaagaggatctccaagggaaagaagggtggcaagaaaaagaccgtcgaccctttctctaagaaggattggtatgacatcaaggcaccgtcggtgttcagtgtgcgcaacatcgggaagactctcgtatccaggacacagggtaccaggattgcttctgagggtctgaagcacagagtctttgaggtttgcctagctgatcttcagggcgacgaggatcaagcttacaggaaaatcaggctccgtgctgaagatgtgcagggcaggaatgtgctcacaaacttttggggtatgaattttaccactgataaactgagatccctagtgaagaagtggcagacattaatcgaagcccatgttgatgtcaagacaaccgacaactacatgttgcgtttgttctgcatcggcttcacgaagaggcgcccaaaccaggtcaagagaacctgctatgctcaggcatcccagatccgtcaggtaacgtttcttttctttccacatatgcagcagtcataaaactgtagcaatttctcaaaacgtcaaacagtcaccttctatgtttgcctgttatctttatacttgccatgtattgtgcgcagatccgccgtaagatggttgagattatgatcaaccaggcttctacatgtgacctgaaagaacttgtttcgaagttcattccagaagttattggtaaggagattgagaagtctacctccagcatcttcccacttcaaaacgtcttcatccgcaaggtgaagatactcaaggcccccaagttcgatcttgggaagctcatggaggttcatggcgactacaaagaggatgttggtgtgaagcttgagaggcctgtcgagggagatgaggctgtgcaggaggttgctgctgccgagtag

SEQ ID NO: 156699 - DNA, 1124 bp, Zea Mays
ccgcatgatcgaacctggaaaccctcgagtcgtatataggtagtccgctctgcctcgaagtgccttctcccgcagagccgccgacaactctctctaccgtccgataccccaagcaccagcgcggcggcggcgaccatggctgtcggaaagaacaagaggatctccaagggaaagaagggtggcaagaaaaagaccgtcgaccctttctctaagaaggattggtatgacatcaaggcaccgtcggtgttcagtgtgcgcaacatcgggaagactctcgtatccaggacacagggtaccagggtatgtttttctttgattatcgatgtttttccgtactgcccctacattctgtgttgtgaacttgcgcatatatgcatgtatatgtagaccgcgctagtcatgcggtatattagatacgctcgttcgcgcgtttgtttgtggggactactattcaggtttcattgcaagaattcgtaggggaggtaattaatattgttcgggtttgattgatagatagtttgtcagtatttgagatcatacccttgcgtgcttattctaagctgttcgtaggtatcattaagtgcaatgcaactagaacggcatagtgaatctgctgctttactgataattaagaattagcctctgattgtatttcttctaaacgccagctgctcaaacccatagtcaaaatagaattttgtaatagctcaccttagtttctgatgtcccactcccatctgttactatctgtaatgtgtttatgtttgttggcacctatcatttttgcactttctgttggaatgattattattagtttgtgcttttgctttcatatgtacaataacgaattgccatttatttgagcaccccaatggcaacttgtccttgttcatttcaagtttcaaatcttttttcgtgcactatatcttgataagtaatcaatgatctgtcactgaaggccacatgatcttataatgacatggatatgattagtcttattaggtgccactctgtttgcaatgttattcagaacgtagatgcactgcttgctgtcctaatttactgattgacgtactttatctggttttagattgcttctgagggtctgaagcacagagtctttg

SEQ ID NO: 156700 - DNA, 1323 bp, Zea Mays
acgctgcagatgggccgaatcaaatgggccaaccatgcctcgaagcacacatatgggccacaccgcatcgtgtgcgtccatccgctcttgcgtgcctgctgaccgcatgatcgaacctggaaaccctcgaatcgtatatagtagtccgctctgcctccgaagtgctttctcccgcagagcagccgacaactctctaccgtccgagaccccaagcaccagcgcggcggcggcggcggcggcgaccatggctgtcgggaagaacaagaggatctccaagggaaagaagggtggcaagaaaaagaccgtcgaccctttctctaagaaggattggtatgacatcaaggcaccgtcggtgttcagtgtgcgcaacatcgggaagactctcgtatccaggacacagggtaccaggattgcttctgagggtctgaagcacagagtctttgaggtttgcctagctgatcttcagggcgacgaggatcaagcttacaggaaaatcaggctccgtgctgaagatgtgcagggcaggaatgtgctcacaaacttttggggtatgaattttaccactgataaattgaggtccctagtgaagaagtggcagacattaatcgaagcccatgttgatgtcaagacaaccgacaactacatgttgcgtttgttctgcatcggcttcaccaagaggcgcccaaaccaggtcaagagaacctgctatgctcaggcatcccagatccgtcagatccgccgtaagatggttgagattatgatcaaccaggcttctacatgtgacctgaaagaacttgtttcgaagttcattccagaagttattggtaaggagattgagaagtctacctccagcatcttcccacttcaaaacgtcttcatccgcaagggtgaagatactcaaggcccccaagttcgatcttgggaaactcatggaggttcacggcgactacaaagaggatgttggtgtgaagcttgagaggcctgtcgagggagatgaggctgggcaggaggttgctgctgccgagtagtttgtttgctagttctatatctaggcgagtctggacatgaggttgcttatgacgtgaacttatagagttgtcttggctatgtgttttcgtctagccctaagattttgtcttgaaacaagtttaaaattaagattatttgtaacaagtgtttaggattactcgtggtgatattctgtgttcgattactgctgtactaagttccatcatcctcatttttgtttggtcatcgataatttactttctcattcgtatgagatgttctctgcttatttgttgttagctgacactgtcagtt

SEQ ID NO: 156701 - DNA, 534 bp, Zea Mays
acgctgcagatgggccgaatcaaatgggccaaccatgcctcgaagcacacatatgggccacaccgcatcgtgtgcgtccatccgctcttgcgtgcctgctgaccgcatgatcgaacctggaaaccctcgaatcgtatatagtagtccgctctgcctccgaagtgctttctcccgcagagcagccgacaactctctaccgtccgagaccccaagcaccagcgcggcggcggcggcggcggcgaccatggctgtcgggaagaacaagaggatctccaagggaaagaagggtggcaagaaaaagaccgtcgaccctttctctaagaaggattggtatgacatgaacttatagagttgtcttggctatgtgttttcgtctagccctaagattttgtcttgaaacaagtttaaaattaagattatttgtaacaagtgtttaggattactcgtggtgatattctgtgttcgattactgctgtactaagttccatcatcctcatttttgtttggtcatcgataatttactttctcattcgt

SEQ ID NO: 156702 - DNA, 431 bp, Zea Mays
atgagctactacaatccccacggccatggcggcgcgcccccgtcttcgccgtgcccctccccgtctccgcccccgccgccgccccaaggtgactcctccgacctcatgttcctctcgagatgccgacgtgcctttcaatctgacctgacctgacctatcagggtacccaatggacccgtacgcggagcgcgggatggagcaccaccaccaccaccagtacgggccgcctccgccgcagccgatgtacgcgtcgccgtacgggcagccgccgccgccgccgatgtaccagcagccgtacggacagccggtgtacgcgtcgccgtacggacagccgccgccgccaccggcgatgtacccgccgccgtacgcgcagccgccgccgccgccaccacggaagaccggcgcgtcgttcgcggaaggatggtacgtac

SEQ ID NO: 156703 - DNA, 949 bp, Zea Mays
tctcccggctcccgccacagaaaaagacacgaggagcgcgcgtgctcgcctcggcaggcacgcatttcaatgggcaactgccaggcggcggaggcggaggcggcgacggtgctgatccagcaccccggcggcggcggcacggagcgcgcttactgggcgctctctgcagagaccgtcatggcggccaatccgggccactacgtcgcggccgtcatcaccaccgcgcagccggacgcgggagacggagcagcctcttctgctgccgcgcccgtgaagcacctcaagctgctccgccccgacgacacgctcctgctcggccgcgtctaccgcctcgtcagcttcgaagaggtgctgagggagttcgcgtcgaacaagcggcaggtgaagctgagccgcgtgacggtaagggccaaggacgaagacgaggacgtgaagccggcgtcgaagcatcgccgcgccagtggcgacgtcggagagcgcaaggaatccgagaggtcactcgccaaggtcctgcgccagacggaggagctggagccggaggcagacccgtcgtcgggccccagcgccaagcacaggcaagccgacaccgacacgccagccgacctggaggccctcctgccgcacagggcgctgctcggccaccgagccgcccggcaatggaggcccgcgctgcagagcatcgcagaaggcggagggtgagtggccgggatagctccgtgcaaagtcagtcgctatttgcgaggtagacagcgtattgtaaaaataagtttacactggcaacattgtgtatgtcgacgtgtataacattgttttgtaatgtgtctacgtagaagagtttgaaaaatagagtgatataaggcgtatgatatggattcgatggtgtgtttgtaaggtggcaggcgagtagtggcatacgccatcgcataaaatctctagtctatttcttgcg

SEQ ID NO: 156704 - DNA, 1541 bp, Zea Mays
tatgtggcttcaaaactcttgcaactttagaattgaagtatttaggtggctattgacagctcatctttcaagttttgctctgggaagatccacgccgacaaaaaaggaaaaaaaaaatctacgtatccaccacgtgtcacgtgctcccgttatattacgagaccgcgcaggccggacagctaccgtgcaacgtcggcagtcggcatcatcatgcttgactcgccgctcgcgttgcgcgccaaccaccctataaaacgttcggcgccgctagcgcccacggttcagtcgcccacctcgcttgcccggctccccctcctctcccggctcccgccacagaaaaagacacgaggagcgcgcgtgctcgcctcggcaggcacgcatttcaatgggcaactgccaggcggcggaggcggaggcggcgacggtgctgatccagcaccccggcggcggcggcacggagcgcgcttactgggcgctctctgcagagaccgtcatggcggccaatccgggccactacgtcgcggccgtcatcaccaccgcgcagccggacgcgggagacggagcagcctcttctgctgccgcgcccgtgaagcacctcaagctgctccgccccgacgacacgctcctgctcggccgcgtctaccgcctcgtcagcttcgaaggtactgtgcgtgcgtcgtgccctggactggcgccgaacgggctcatacgttacgttgctggccgtgttaggcccggccgtcatcttgctgcgcgcgcatcaggtccttgcgtgttcttgcacggagctacggataaagatgaattgtgtgtcttgttcggtttgaatggccgtatgttacccggcgcctttctgaactttcttggcgcgcgcggcgcgtcagtatttggacatgaatggctgaatgccacagtttcaccatcgtttccaaacagttctttccctctctgccttcctttttctcatgtcgatgtcgcttttgccgtcgatccgactgatgaacacgaatgaacccgtgcgtgggtgtgtctgcatgagcagaggtgctgagggagttcgcgtcgaacaagcggcaggtgaagctgagccgcgtgacggtaagggccaaggacgaagacgaggacgtgaagccggcgtcgaagcatcgccgcgccagtggcgacgtcggagagcgcaaggaatccgagaggtcactcgccaaggtcctgcgccagacggaggagctggagccggaggcagacccgtcgtcgggccccagcgccaagcacaggcaagccgacaccgacacgccagccgacctggaggccctcctgccgcacagggcgctgctcggccaccgagccgcccggcaatggaggcccgcgctgcagagcatcgcagaaggcggagggtgagtggccgggatagctccgtgcaaagtcagtcgctatttgcgaggtagacagcgtattgtaaaaataagtttacactggcaacattgtgtatgtcgacgtgtataacattgttttgtaatgtgtctacgtagaagagtttgaaaaat

SEQ ID NO: 156705 - DNA, 949 bp, Zea Mays
tcaaggaaaacaaagaaagaacaaaaacataagtttgttttctttcgaggagaacaaaaacatgaaacgagaagacaaatgaacagtttgacgggccggccctgacaaacctgggccaagaataaataggcccatagacttgtatatagggtctaaagtgactgaaaagtcccgcatgttctcctgcctccgctccgccgccgcaacaaccatttccttctctagccgccgcctccgatcccctcccgaggctacagaaccagttcatccaggcgcgaatggcggcggcgaggagcctgcttctgaggcacctccgcttggcggcggccccgtcagcggcgtccgtgaggccgacggcgtcgttgcatgaggccctgtgggggcagcggtggatgtcttcggaggatgccaagggctctttcctggacaagagcgaggtcactgaacgcatcatcaaggtcgtcaagagcttcccgaagatcgatgacccctccaaggtgacaccagatgcccatttcaagaatgatcttggcctagacagtttggatgcagtggaggttgtcatggccctggaagaggaattcagattcgagatacctgacaatgaagctgacaagattgactccgtcaaagttgcagttgacttcattgcctcacacccgcaagcgaaatgataaagatgcgttgcctggtatagcaaagctatatcgtcattaatctctgtttatgaagaaagttcagtttgaagatgtacactaccgtgcccatttggatacttctgctgatgctactgtcctttttggaacgaattttgctactgtggattgtctgcactaaataaaatgtttgaacctgagaaggaacttggatgccgtttggttcacgaaatgtaacgtaaatggtaatggtaatgattgacactcgaatatcgacagtaacaaatttgaat

SEQ ID NO: 156706 - DNA, 738 bp, Zea Mays
tcaaggaaaacaaagaaagaacaaaaacataagtttgttttctttcgaggagaacaaaaacatgaaacgagaagacaaatgaacagtttgacgggccggccctgacaaacctgggccaagaataaataggcccatagacttgtatatagggtctaaagtgactgaaaagtcccgcatgttctcctgcctccgctccgccgccgcaacaaccatttccttctctagccgccgcctccgatcccctcccgaggctacagaaccagttcatccaggcgcgaatggcggcggcgaggagcctgcttctgaggcacctccgcttggcggcggccccgtcagcggcgtccgtgaggccgacggcgtcgttgcatgaggccctgtgggggcagcggtggatgtcttcggaggatgccaagggctctttcctggacaagagcgaggtcactgaacgcatcatcaaggtcgtcaagagcttcccgaagatcgatgacccctccaaggtataaacattgctgtcacactctccctaccgttggctagctgggacaagaggtgtttgatgagatcaaaccgacaatcgaatggaatccatgcaatagcttctctccgagaaacaaatgttgtatataaacctagacggagctgattgttggatctattagcagtgtgcaataatgataacttgataaacatttctatgtgttcgattaaatttcgaagagtggtttcagtgtggcaaaa

SEQ ID NO: 156707 - DNA, 75 bp, Zea Mays
acgcagcggatccggtcgcgggcacggcgggcggatccggtcggagatcctgccgcccccaaacgcagcggatcc

SEQ ID NO: 156708 - DNA, 1282 bp, Zea Mays
attcaccaagaagagctagttgtaacatttagactgccggccggccattgtacatcatacatttgcttacagaagaagtgcatccttaattatgacactgggatgggattccaccttcaccatttttatggggtttccctagactagacacactggatgactgaacacgacttagagagcagcagtaaacttacagctgcattttgttatattttttggtcattttttttttttacttgcttgctatacaaaaggaacttctacagttgagccacactatccactagctcgaaccaccgttacttcgacttgaaagagcagaccacgacagcggcggcagccaggagcaaggctgcaagaggggcagcagccttcctgatgagttcccccagcgaacctagcgaggctggtggatcacgcggggagcgttgctcttggggctgccggcgtacttggtcggcttctcggcgttcctgggtttctcccggaacccccgcggggcgtcgccgccgcccttcggggaggtcatgttcagcgccttgagcaccgaatctgagagagagacatcagtacctgtcttaagggcggcggcgacggggccctgctcgagctggtcgtcgtagaagaggtcctcgtcgtcggggaggaggccggccgcgtcgatctgctcggccatctcgtccaggtgggcgcgctcgcgggaccagtggtcgcggaaccaggcagtggtggtgatgaggtcccaccactgcggcgagaagtcctccacctgcagcagcgccgccgggatgaagagcggcgcgtccgggttcagcgacgacgaaaccgccacggcgctcatagttcaacccttcctttcctgctgattactacagcaaatcagatcacgagacagcgggagaccgagccaataaaaaacaagccccccccctcgattttggctctcggcacaggaaaaccaaaaggaatccacgaggtcccgtggtggtctggtggatggaaggattcgaccaccaggggaaggaaaaaccacagatctagaaccgcacggatcgtgataggtgacgtgacgatctaggcgcgaaagcgacgcaaggctacagatcgcagctagcagggcggatggttcgttcacggcgctcaccttccggtccgcgaatggatggatgtatctgatctgcctgctggagttggggagcgagcgaggggatggactggccggggccgcgggggcagccggcaacgagcagtgagtgagcttctggtgcccagtggactcggc

SEQ ID NO: 156709 - DNA, 469 bp, Zea Mays
ataatagcaaaaaactccgctccagcgcttcgacgacgagaaagacagcgacgccgccgccgctccctccgcccggtacgtgcgcacgctacacgagctgcgccagttcaagactgccgggaaccccttcacggatgagttcttcgataccttcgacgccgtttaccagcagcagctggacatgctgaagaagctgcagcagcgccagcaccggctcgacaagaaggtcaagaccatccaggcgtggcgccgggtgtcaagcatcatcttcgcgaccacgttcgcggccgtgctcatctgctcgattgttgccgcggtcatcgctgccccgcctgtcgctgcggcattggccgcggctgctgcagtcccgctgggatccatggggaagtggtttgattcgttgctgaaagggtgtcaggacgcggtcaacagacaggagggggtggtgagcgaaatgcagtttggcaca

SEQ ID NO: 156710 - DNA, 2054 bp, Zea Mays
cgattagcattcgccgttgagcctttttggcttttgctgtggcccccgacaaggcaccatgccaagcccctcgttgctttgcttcccccaggctgcaagatcctcctccgccgacctcgaggagaggaggggaacatgaaacacgcgcaattgctgctgagctacttactacacacaccgcagcggtgcacaccacgtccacagtccacacgcgcgcgcctaggcctagcgatggagtgacaagcatcgggttgcttccggcgatggccattgccaaccccgccccccgtctccttcgtcatgcgtacaagacatccccacatcaccccctcctccaccacctcctcgccgcaccgcaaaatccacctccccttcccggccctgcattgcatccgttcttcttgcttgcttccccggaacctcgcgcttggtctgacgcaacgcaacgcgccttcgggccctgagataaaatctcccagcgctcgcttgctccgccaaaattcactccttggaatttcctgagctgtgggaaattttctcttttgttttggttcttctttgtccccttaggtcgctagcatttgtgcgttccgccgaagctcccttgtttgatccgtcctagttgcggaagcgcctcttgatttggttctaaaatacatcgtttcttgttttcatccttccgaagggggggaaatcatcttttttgggccctgatttgagtgtgtcacctttggttccggcaatggggaacagcagcagcagcaacagacgtccgccggggccctcggagccggcggaagagctgagctcatacgaggccgcgtgccggtcggacccggagctgcgcaccttcgacacgacgctgcagcggcgcaccagccgcgccatctcgacgctggccgtgggcgtcgaggtgcggtcgatgtcgctggactcgctccgcgaggtcaccggctgcctcctcgacatgaaccaggaggtggtgcgcgtcatcctcgactgcaagaaggacatctggaagagccccgagctgttcgacctcgtcgaggactacttcgagagcagcctgcagaccctcgatttctgtaccgcactcgacaagtgcctcaagcgcgcccgcgactcccagctcctcctccacgtcgcgctccagcgcttcgacgacgaggaagacatcgacgccgccgccgctgctccctccgcccggtacgcgcgcacgctgcacgagctgcgccagttcaagacggccggggaccccttcacggacgagttcttcgccgcgttccaggccgtttaccggcagcagctggcaatgctggagaagctgcagcagcgcaagcaccggctcgacaagaaggtcaagaccatcaaggcgtggcgccgggtgtcaagcatcatcttcgcgaccacgttcgcggccgtgctcatctgctccgttgttgccgcggccatcgccgccccgcctgtggccgcggcattggccgcggctgctgcagtccctctggggtctatggggaagtggatcgattcgttgctgaaagggtatcaggacgcgctccgcggacagaaggaggtggtgagcacaatgcaggttggcacattcattgccatcaaggatttggacagtatcagagtcctcatcaaccgggtggagctggagatcagctcaatggtagactgcgtagagtttgcagagcgggatgaggaggcggtgaaatttggggtggaggagatcaagaagaagctggagaacttcatgaagagtgtcgaagatctaggagagcaagcagaccggtgtagccgggatatccgtcgtgcaaggaccgttgttctgcaaagaatcatccgacatccaaactgaaaaataaagggaaatgtaaggtatggatgtcttaatatatagccatgttactcttaataatgttgtgatggaatgtacataagagatgcacctttaggaaagtgtgaatgagtcaaatcgatttcattatcatttgattcatggaatctgtacttccatacttgattatctctttggttgtctatctggggac

SEQ ID NO: 156711 - DNA, 1881 bp, Zea Mays
gtaggacgcgttaaggatgaggaggcggaccgagtcgacgaaagtggctccggtgctggtgccatcgaggcggtagacaccggtggcctcaaacgaccgcagctcgtcgctgacttccatctgcggtggcagcggcaagggtttggcagaatgtcagatactctgcgagcgaaacgtgagttggcacagcagacaacacccgcgtgcagcgctgcaatccaaagaagcgaagcaaccaacccccgaaatcttcaacggcgccatcgccactgcgtcatgcccgtcccgcccctcctctcgccacttcgcctgccctcgccagcgccgcccctccaccgcaatggagcgccatggcggcgcccgacgcaactacgtgccgcactacgggtcccccctccgcttcacctggggctcgccgcggcccgtggcgatggcgtgaggcggttcgtcgggacgctgggctcgaagagagcgcgagctgttggtgcaattagggtttctgcgatctctggagacggcggtggcggtgctggtggtacgggaattgcggcggcagcggccgccactgtggtctttgctgtgatgaaccgggtgctctacaagctggcgctcgtgccaatgaagaattaccccttcttcctcgcccagttcgccacatttgggtatgtcctagtgtatttctcaattctcttcataagatttcgcgctgggattgtcactagagaaatgttagcgcttccgaagccacagttcatgctaattggtttactggaagcgctaggtgctgcttcaggcatggctgctgctgctatgttgcccgggccatctattccagtgttgtcacagtcctttctggtttggcaacttatcttatctgccctcatcttgggaaggaaatatagagcaaatcagatccttggctgcttgcttgttacagctggagtaattctagcagtggccggtggagccagtaatggtccgattctctttgaagtcaaattcttttggccagcagtaatgatgatttcagctgcatttcaagctgctgcttccattatcaaggagtttgttttcattgatggtgcaaaacgccttgagggaaagaagcctgatatatttgtagtcaactcttttggttctggtttccaggcactttttattttcctactccttccatttctctctaacttgaaagggattccttttgctgaactccctgcatacctaacccgtggtgctgcatgctttctgaatgtgggagggaatctgaaggattgccatggagctcctttgctaccacttctctacataactctgaacatggccttcaacatttctgtccttaatcttgtgaagatgtctacagcagtggttgcttcgctgacatcaactttagcagtacctctttccatctatatactgtcactgcctctaccatatctacccgaaggaacaaatttgagcgcatcttttttgattggtgttgctaccttagtgctcggattgcttctatacaatcttcctcaagaatcaaccaatcaagtaaaggaagattaatctaaacccatatcagatataaggttaacaggaagctattggtgctccactaagaaaatagccgcattttgttgacagtggcttcacagtttggtacataactcatgaagagcagtgttcttctgccacaaacatttgcggtgcaaacatttgaggcaccagctgacttcaaagtttagaaacagcaagttcttgtttcatctgttaacaaaatcctaatggattatgcagctatatataagctctacctgagcggatgtaactactaactactttcagatgagtaagggctttacaaattcattggttgtataattgttctca

SEQ ID NO: 156712 - DNA, 2163 bp, Zea Mays
acaagctcctcctcctctcctccctacacactccagagccagaggcagcacgtgctgccgtgctcgagcacagctaggccgcagctgcatcaccatggcgggcgcgccgctgcggagatcggaccttgacttcgccgacgtctttggcggcccgccgcgccgcgtgtctgggaacgagcaccgctcgcagcgcggctcgcaggacacctcgtcgttcgagtccgcgacgagggcggggagcggcggaccggacacgcccgttttcggggaccgggggagctccgaccgaagaaggcagctcggggaggagttctacaaggacatattccccgggagcgaggcagcgtcgcccaggcggagcggcgccggggattgggggaatgtgttcggcgcgcaggcttcgcctgtctccacggcccgcccgcgatcgagcttctccattcggttcaacagaggcatggacagttcaatgcctacttctccctctcagcaaatgtccaacagaaacgatgatggcacatcttatgcttatagtgttccaacttcacccaatgcatccatgaacaattatcttgctcaaggggcagcccgacaagattcgaagaagaatcccttctcatggcatcgctatccatttctatctaggttccgttctcaaagtggagaaaagaagagcacatctaatcatgtcagctcaatggacaatgaatttgaagggactcctgttaacttggaaagtatcatggccaataacaagttccatttttccttctacaagtgggcaggcaaaggagccttgttagtgttgccagctactgcacaagaaaagtccgtagacatcattggactgagaagcttccctcaagtggtcattcaaggtattgatctaattgattgtgaagacagcatgtcaactgccaccggaacagccaaaaatcagacagattacgaagattcgaaatctggaaaacatagcgcaaactcagcaaccaaggatggagctattcctttactctttgaagactacatgcaaggggagagaagtcgtagtagcagggtgaaggaaaagatgaagggtttcataaaactatttagccctgagagttcaccaaagcgcaaacgagcaccggaaacacaaaggcaaacatctgtggggaaaaatggaaccaaaactgaactgcatgataagttcagcatgtccagtttggaggccagtgaggatgtggaaacggtacaaatgaacagccagaatgcttttactgccgaaccttttccaatgactgaagtgcaagagaggttggacaaaccagttttgacagcgaatagtaaaatggatacagctacgggaagtaatgaggccgcttctaatgagcccatccatgatgatacaaaagacaaagcggccaacacaatagagcatgaggacattgaagatcttgatggatgtgtggttgagcatttttctgaagatcatgttcttcataatgatcaggaaaaggagctaataaagatatcagaagctaaaattcgcgaatggtctaggggaaaagaaggaaatattaggtcattgctttcaacactgcaatatgtcttatggcctgagagtggatggaaaccagttccacttgttgatataattgaaggagcagcagttaagaaggcttaccagaaagcattattgtgccttcatccagataagttgcagcaacgaggtgctgccatgcatcagaagtgtatagcagagaaggtttttgacattttacaggaagcatggaaggaattcaattcggtcacttttggatagtactaggagtttatttcactactgtattggtccaatgatctatcgcacaggcatattgcttcccggtgtctgcaacagttagttggttgaaacaacctagaacagtacagcaaatgggcaaccgagagttcggtttgtgaatttcggtgcacagtcaatgccgacctccgccatttcttcaaaattccgactgtaacaagtgtaatatgtaatattggttaatcaggtttaatggatccagacgatgactgaaatgtcatttaaggaatgctttgtgcacagccatttgatgtgtgcctagtagctgttggtgcataaattttgtctaagcttcggatgaaaaaggttatcaatctttt

SEQ ID NO: 156713 - DNA, 728 bp, Zea Mays
gattgtagttcacaggatgtaaattgacttggagtaagacattaaggaaaacaacacctcaaaagaagacattataaagatcaaagtgaagatcaacaagtattaagcaaagtccaagaaacaaagaaatatgttgccactggcggactatccgatcaaggacaccgaactgtccggagccacacgctggattgtccgatgcaccagggaactgtagcccaacggctagtttctagtggtagtagggagagaagccacctcactgcaggtatgacaccagattcagactatccagtgtcgatatgacaccagatttagactgtccagtgtgacaccggattgtccggtgtaaaaacctgcatcaccaaagatcaactgttatgtcagatccaacagttagacacacagacagtggcatcaaactgtccggtgcctacaaccagactgtccgatttgccacatattgcagcagattttcttaaacggctagaattgagttaggttctatgtatagaccacccaaccggccaagtctcctttcccaactcgtttgagtaagttagccaagctcaatcacctagcaagccacacctccgagctcgatggcaattcaggaacctgtatatatagaaccccctaccagctccagcagattatgggtctttttgatccaactattttttgtccacattgtaaaatgcattaaatataataagggctaattaact

SEQ ID NO: 156714 - DNA, 2415 bp, Zea Mays
cgaacgcgcagtccagctcactgcggagggcgggccaagtggcgccggcggggcacacctcacgcgccacgacaccggcgaccatcactctcgtcgccaccgcgccacgtgccgcccatgcacggccacagcgccagcgtcacccacgtcgcacgcacgcagcgtccccgagggcgcaagcctagctgcttatcaagcggcccaaagcgcgatccaccactccgcagatcgcagcccgtgcggggacggggggagaactcagagcagagattctagctgccttagttagcttgggtcatggcggtggcgacgactgctcggtggctcctgctcctggctgtcgtctcggcggccgcggcgtccgggaagcacgagaggtggagggtgggcggccaggtggtggagaaggagcgacggcgggtggtggcggagagcgaggccggctcggtctcggccgtggacgtcgccgacgcggcgggcacggcgtaccggctgcacttcatcaccatggaccccggggcgctgttcctgcccgtgcagctgcatgccgacatggtgttctacgttcacagcgggcggggcaaggtgacttccatagaagaagagagcagcgaacagagctccctggaggtggagcgaggagacgtatacaactttgagcaggggagcatcctgtacatccagagctaccccaacgccagtagacagcgtcttcggatctacgccatcttcaccagcgaaggcatcaacgccgatgacccctcgaagcccaaggtggaagcttactccagcgtcagcaatctggtcaaagggttcgagacagacgttcttcgcctgggatttggggtcaaacccgaggtggtagaagcgatcaagtctgccaagacaccgccaccgatcatagcctacaacccagaggaggagaagggggacaagaaacccggctggaccgagaacatcatcgacgctctgctgggcgtgcgcgatccggaggagttccttaacaagaagaagaagaagaaggacaagcacaaggacaagaagtccaagagcaaggcgttcaacttctactccggaaagccagacgtccagaactgctacgggtggagccggatgatgactagcaaggacctcgacgcgctgcacggatccagcattggcatgttcatggtgaacctgactacgggttcgatgatggggcctcactggaaccccaaggccacggagatcgccatcgtgacagagggttcaggaatcgtgcagacggtgtgcccgagcagcagcagcagcagcagcagcccgtcgggcgggagcagtggagaccaccaccacggtcacaagcggcgcggcgggccgggaggccgcggcgatgagggcgaaggcgaaggcggccgcgcgcggtggcagtgcaggaactcggtgttccgtgtgaaggaaggcgacgtcttcgtggtgccgcggttccacccgatggcgcagatgtcgttcaacgacgactcgttcgtgttcgtcgggttcagcacccacatggggcaaaaccacccgcagttcctggccgggaagggctccgtgctgcaggccattgggaagaaggtgctggcgctggcgctggggcagcgggacccgaccgccgtggacaagctgctgtccgcgcagcgcgagtcgacgatactgccgtgcgtatcgtgcgctgaggagctggcggagaaggccgaggaggagaggaagcgacgggaggaggaagggggagggaaagggaaaggaccgggagaacgtgagaaggaaaaggagaggagggaacgggaggagaaggaaaaggaggaagagcgggagagggaacgggaggaaaaggagaggaaggaaagggaacgggaggaaaaggagaggaaggaaagggaacgggaggaagaagagaggagggaagaggaagaagagcgggccaggaaggagcaagagaagcagcggaggagagagaaagaggaggaggagcgtgcacggagacgcgaggaggaagaaagagagagggaggaggaagaagaacggcggagggaggaggaagaaggtggaggcggacgtggtgacgagccagagagggaggaagaaggcggtgacaagccgccataccggttgtccaagaaactgaagaaacgctaccatgcacgtgccggtgtgttcagcaggagtggctgagtgagcagccgagcagagctggcctctgctccgtacaaataaacaggtggcctcgtacagatggccaattgccacatcaccaccactcgtacagagtaccacctgccagtcggctatgtatgtgtgttcgttgtgtcgtttgttaagctttgctgcatgctgagtttagattccgcttgtataaaacgtaccctaaataagcagacaagttttcaggctcatgca

SEQ ID NO: 156715 - DNA, 216 bp, Zea Mays
catacctttctcggccttttggctaagatcaagtgtagtatctgttcttatcagtttaatatctgatatgtgggctacgtgcccacaatgatattaaatctattttttatagggagaatctaataagtagcttgctactaagattctagtgtcgccctagtgttgcactattgtttgggcttggcacaaccctaccaatttaatggttcaaacttt

SEQ ID NO: 156716 - DNA, 528 bp, Zea Mays
atgacatttacagagaagatggttttggcagtcttcagggatctcactatcctatggatgaccaagagcctgatggacgacatccatgggtggggagttctcttcgatggcagagttggtgacagaaccatcactgtctatatttggaatggtgaagaacctaaacctaacaagggacatcttgcatgggctgatgcttttgtcataacagcagactcgataagtatgttaagtgaagcatgcagcacaggcttgataccgaagaacgttgcgtcactgttcatgaataaggattccctcaaggttgaagctgatactaggcttggggagctcataaaggagaggctgaggcaggagtgcctgcggaaggggacggaactggcgcatggggtggctgacgccctcttcgttgtatcacccaccgaggacctcgacggccctatcgtacacctcccaccgcccgctgttcgactcccgcgcgagaagcatcttggtgctgggacctcactgccaggattccaggattag

SEQ ID NO: 156717 - DNA, 220 bp, Zea Mays
gtgttacgtttgcagatatggacctcgatggttttctccacattatgaaagctggaagagccttttgaactcacttttttttgctaacaatggtgttatggtggaacatagttttgcgtgtatgtaccaacaactaaaatgtaaacacgacattatcatagttgagtataggaataattatctcttatatcttattttaaaatctaaaacagttctcctg

SEQ ID NO: 156718 - DNA, 2491 bp, Zea Mays
agagccaggcaccacgcacggaccactcggtctcatgtagctagcagctagcactcactagcagcgaagagtgaggagtgagaggacacggtaaccccagcggcattcgctgctggtacaccaataatcgagcagcgtgcgagagagagagacgaaccgagccacagagaagagggaacgcgaagctactggcgaactgacataacacgcctgcgatcggtagatagatctacatcatctacaccgccgaggcgccgacaaccacttggcgaccatgagcacgggcacggacgccgtcccggtcgccgtggcgccggcgaagcgcccgcccatcaacaagtacgccttcgcctgcgccctgctcgcctccatgaactccgtcctcctcggctatgacatctcggtgatgagcggcgcgcagctgttcatgaaggaggacctcaagatcacggacacgcagatcgagatcctcgccggcgtcatcaacatctactcgctcttcggctccctcgccgcgggcctcacctccgactggctcggccgccgctacaccatggtgctggcggccgccatcttcttcacgggcgcgctcctcatgggcctcgccccggactacgggttcctcatggcgggccgcttcgtggccggcatcggcgtcggcttcgcgctcatgatcgcccccgtgtacaccgccgaggtggcgcccacctccgcgcgcggcttcctcacctccttcccggaggtcttcaacaacttcggcatcctcctcggctacgtctccaacttcgccttcgcgcgcctgcccgtccacctcagctggcgcgccatgttcctggtcggcgccgtgccgcccgtcttcctcggcgtcgccgtcctcgccatgccggagtcgccgcgctggctcgtcatgcggggccgcatcgacgacgcgcgccgcgtgctgcagaagacctccgactcccccgccgaggccgaggagcgtctgctcgacatcaagaaggtggtcggcatccccgagggcgtgaccgacgccgacgacgtggccgccatcgtccgcgccagcagcaaggcatcgtcgtcgtcgtcgtcgtcgcgccacgacggggtgtggaaggagctgctcatcaacccttcccgccccgtgcgccgcatgctcgtggcggggctcggcctcatgttcatccagcaggccacgggcgtggactgcgtggtgatgtacagcccgcgggtgttcgagcgggcgggcatcaagtccaagaccaactcgctgggcgcgtccatggcggtgggcgcgtgcaagaccttcttcatacccatctccacgctgctcctggaccgcatcggccgccgcccgctgctgctggccagcggcggcgggatgaccatcttcctcttcacgctggccacgtccttgcacatgatggaccggcgccccgagggggaggccgcggcactgggcgcggtgagcatcgcggccatgctgtcgttcgtggcgtcgttcgcgtccggcctgggccccgtcgcctgggtctactgctccgagatctacccgctgcggctgcgcgcgcaggctgctgccatcggcacggggctcaaccggatcatgagcggcgccaccaccatgtccttcctctcgctctccaacgccatcaccatcgccggcagcttctacctctacgcgtgcatcgccgccgcaggctgggtgttcatgtacttcttcctgccggagaccatgggcaggagcctggaggacaccgtgaagctcttcggcaaggacgcggacgacgaggacgtcggcgacagccgtcgtcacgcgcccagtaagaagccctccacttccactgagcttgagctcagtgctcagcactgagtgatgtgccatgcaacacgtgtcctcccgagtgtgaccgaagcttatgtctaaagcttcgatgatacagtctactcctagtatcttgtgtgctcgaactgtggtgaatcttttgtagatcccgggcctctccttttttttctgttagatttgtagattttttttgttgatctcgtggcatagtgcgtgtgagtagcgagggattggggcacgcaacactttagtctaatttggatactctagtaatgagtgtgattggagtggattgagatgtattgagagaatatttgatctattggtgatttacaccctcttcaatccctccaaaacactttaatccaaaagtatccaaactaggccttagaaaaaaataggaatatgctaaaattcgcctgcattttagttttgaatgtgattgttattgaatatattttatcctacagttataaattattttagtgtagttaatatatactatttatattttctatttaagaatataaatttaaaatacgaacctcaacaatctgtgttaataaaaaatagaataatttatatagtcatacaaaaaaaattattatcatacaaatacaaatcataaattataaaaagcaaaaaaaa

SEQ ID NO: 156719 - DNA, 524 bp, Zea Mays
aaaaagcccacgagccaggccaggacacacatgcatgtaccgcatcgggggcgtgagccaaggggctccggttcataagctacggcccaacaacggcgacggcggcgacgacgactcttcctcctttctcggcacaggatcgtccgtcgtcgtcgtccctgacgcagcgggccacgctgttcccggcgcgcgtgtcagattgtattgtgctgcatgtgcgcgaaccaccatcagtttcatcagttcacgtcgagttccaatcaatcagcttgcctctgctggacgttctggcgggcgtcgtcttcggccaccccccttgttgcgagccgcccctgttttctcgcgacccggcagcagcagcacccacctgacctgcgtgcgtcaagggtcgctggttggtcgtaaagcatcctcatagtagctcatggctacgtacgttacctgcctgctgtgtattttacgtgaaaaatgtgttacttgtgacgttatagtacgtgcgtaagaccatatacaggccttgctat

SEQ ID NO: 156720 - DNA, 717 bp, Zea Mays
ttatagacagtgttgtgcgcagcaacactataaagctttctgtgtgccgtgggcccgtggctttagtctgcccgctactatgggcgcgtaactcaccaactctatataaacttccgccgtggcaaaaatatctatctactcgaggcgaggctccgtgcctccgtcgtactcggcttgcacagcaaggtaaagcaagagcgctactggctgtctctctctctctctccctctcttctctctcccccccaagcacacgcacacatggcggacaccaaccagaatcgcgagcagaccttgatcgccggcgcgggcctcggcctggtcgccgtccactcgggcctcaccgtctaccgcgcaatgggtgacaagcaggcggccgtcctcttcgtcgcttggtcgtgcctcaccctggtccttgtgttcgtctgcctcctcgcctatgagcgggcggcccccggttcgccggccagggagcgggcgagccgagccatatggccgcccaccacgctgctcacgctctccttcgcctggaaggtgaccgcggacatgcctccggattcagccgcggcggccgccctcgtctggggcttagccatagccaccaccgccggcggtttcgttgctctctctgtacgtgcaggcccctgaagtgaagacatggacgacggcctagcaagatgcatgtgttcgttcagttctctgggctctcggcgtcgg

SEQ ID NO: 156721 - DNA, 1826 bp, Zea Mays
ccacctagagacccttttcacaatatcaagagaagacgaccgtgtcatgtaaacacgcacagagccccgccccaaccaacacacacaccaaaaaaagaagcagcagccgcatcattgtgttgtttcacatagatatatcatgcataagatactatcggagacgaaatccccagatgacactgcaaaatgatcgaccatgtcaacctcgaacgttccaggcacacgctatcgaccagcggctctccggtccccaacaaccgcgcgacgacctcctcctctccccgtgctgccattacatatagcgtagctggactttccctccctcaccagctgcagctccgaccaagcctgtttgctgccttcgtccatcaagtatccatggcgcggctcctcctcctcctcctcggggcctccgtgctgctgctcgcgtccgccgtcacggcgcaggactgcctgtccgcgacgttcagcggcgggcggacgttcggcaagtgcaacagcctgccgtcgctcagcgccagcctgcactggacgtaccacccggagaacggcacggccgacgtggcgttccgcgcgccgtcggaccccagcggctgggtcgcctggggcatcaaccccgacagcggcggcagcatggaagggagcagcgtcttcgtcgcctcgcaggacggcagcggcgccgtgtccatcctcatgaccaacctggagagcaccagccccagcctcaccaacaccaccgccctcaagttcaaggtgcccgccggccccgccgccgagtactccgaccgcgcgtacaccatctacgccacggtggagcttccccggaactccacgcagcagttcacggtgtggcaggccggcccagcgaccagcaacggtggcatctcccctcacccgacggcgccggccaacttggccagcacccagcggctggacttcctctccggctccagcaccgccgcgccaaactccaagcttcaccgccgtaacatccacgggatgctgaacgcgattgcgtggggcgtcctgatccccacgggcgccatcatcgcgcgctacctgcgcgtgttcgagtccgcggacccggcatggttctacctccacatcgcctgccagtgctccggctacgtcctcggcgtggccggctggggcctggggctgaagctgggcagcgagtccgccggcgtcacctaccagccccaccgcagcatcggcatcgccatcttctgcctggccaccctccaggtgctggcgctgctgctcaggcccgacaagaagaacaagtacaggctctactggaacatctaccaccactccgtcggctacgccgtcatcgtcctcagcgccgtcaacatcttcaaggggctccacatcctcgagccggccagcggctacaagaccgcctacattgtcatcctggccacgctcgccggcatcgcgctctgcctcgaggccatcacgtggcccatcgccatccggaagcgcaggcggaacgccgacaaggcgtccggcggcaacggctggcagcagggtgcgtagtagggaccagatcgcccggcttgtgcttagttttgaatgcgagagagggatgtgatatcgatgtgctcatgtcgttgttcagagggatcgttgctgcctgtgctttctttctcttcctgttattactacctctctagtctgtacttgtttatttattttatttatgtttcttctgttttgtttatttattttattattagggttccatattgccatttgtacacagtttttctctcttcttattattgactacgattactctgattagtgtatatattgtttccatc

SEQ ID NO: 156722 - DNA, 928 bp, Zea Mays
gaactcggagcttccagcaacctcagctcatagccgcattcgcctctgcagcgggagcgcacaagaacgcaggctcccacggcccacgtgtcctgctttcgacagatggcgcgtcggaacgaccacgtgttatccctcctcggggcaatggcggcgctggtgctgtttgcggccgccggcgccgcagcccagggctgtgcgccgggaaacctccagccaggaaggtcgttcgagcggtgcgccgacctgcccgagctcggcgccagcctgtactggacgtaccacccggcgaacggcacggcggacctggcgttccgggcgccgcagagcagcagcggctgggtggcctggggcatcaacaccgagcgccccagcagcatggcgggcagcagcgtgttcgtcgcctcgctgggcggcgacggcggctcggtgtccgtcctggcgacctacctggagtccacgtcgcccgccctggccaacggcaccctcaagctcgacgtgcccgtcgcgcccctcgccgagtacgcggccggcgcctacaccgtctacgtcacggtggcgctccccgggaactccacgcagcagaacacggtgtggcaggcgggcccgctcagcgccggccagatcgcgccgcacccgatcgccgggccaaacgtgcagagcaccatggtgctggacttcctgtctggcggcaaaagcacagcgctacccaacttcgacgtgcaccgtcgtagcttgaggagtttccggggatgaaaggctatcccatgcgatcgtgaacatcgtctagttcaatgtctcaagcatagagatacattagatgtgtttaaattatgtgtcttactttatttattgtatcaatcaaaatattcaataaattaaattgatcaattagcttgttttctgtctcgagtataaaactaaaaca

SEQ ID NO: 156723 - DNA, 654 bp, Zea Mays
aacttgggtagcacaaacccttgggcctagccgccacggcgcctgatgagtgaacgaaacgggagacgataacgagacagcaagagccaagaggtgagagaaggagtgaaggaccgaggagggaaacagagaagatggcgacgaagcgcgacaccgagtcggacggcgaaggctccaaccccgtcggtggtggcgcgactccgccgcccctagccgccgcccctgtcgtatgcctcctccgctccgccggggacttcggtggcggcgccttcgttggatccatcttcggatatggacaaggcttgatcaccaagaagggttttaagggctcattcagcaatgcagggtcctctgccaaggttagtttatcgtagtttttgttcaaatgtgcgtttctggatagctgttcataacacaaaatatcttggattagacttttgcagttctcaccccaacttgcttgggactaaaagggtttgttgttgttgtagtagacttttgcaattctctctggcgttcagagtttggttttgtgcttgttgcgaaggctacgtggcaaggatgacagtacgtataccttgttatccggtcatatatttgttaacatatctgaacttgtatgtgtaaatatgaactgacatgttctgtcggcag

SEQ ID NO: 156724 - DNA, 212 bp, Zea Mays
acacttgtggagctttcccttatataaaaaaactgattccttcctcaggacaaggcttgatcaccaagaagggttttaagggctcattcagcaatgcagggtcctctgccaagacttttgcaattctctctggcgttcagagtttggttttgtgcttgttgcgaaggctacgtggcaaggatgacagtacgtataccttgttatccggtcat

SEQ ID NO: 156725 - DNA, 458 bp, Zea Mays
aacttgggtagcacaaacccttgggcctagccgccacggcgcctgatgagtgaacgaaacgggagacgataacgagacagcaagagccaagaggtgagagaaggagtgaaggaccgaggagggaaacagagaagatggcgacgaagcgcgacaccgagtcggacggcgaaggctccaaccccgtcggtggtggcgcgactccgccgcccctagccgccgcccctgtcgtatgcctcctccgctccgccggggacttcggtggcggcgccttcgttggatccatcttcggatatggacaaggcttgatcaccaagaagggttttaagggctcattcagcaatgcagggtcctctgccaagacttttgcaattctctctggcgttcagagtttggttttgtgcttgttgcgaaggctacgtggcaaggatgacagtacgtataccttgttatccggtcat

SEQ ID NO: 156726 - DNA, 1263 bp, Zea Mays
actagaccaccactcgccgacgccgctcctccctcttctgcttctcccagcgccgcccgcccccgccgttccctcacacgccgcccgccgcgcaagagccgcgacctcgtcacgtctgcccgctggtgccgtggccccgtcgacgtccgcccgcacaggactctccgagtgtgggattgagccgtactttttttttttggtggctcgggccgagatccggtactgtatgagggttgccaactagactttaagatcgctgattcaatggaggcctccgaggcagcacctgcagcggcggacaccgtcatggaagcagaggatgtgagcggcgggaagggcgaatggtacgtgcttggggagcgggcgctgatggtgccgtacacgcgggagcacgtgccgcggtaccacgactggatgcaggacccggcgctgctggaggccaccgcgtcggagcccctctccctctcgcaggagttcgaggtccaccgctcatggaccctcgaccctctaaagcacactttcatagtgttggataaggagctcatagagggagagttcgtgccgggcaacccgcacattgaagattgaatcagttcttggcaactcgtgtccttccggtctcaatgacttccggtctcaggaacggattgaagcgagctgcaccaggaaagtagtgaaactatggttggtgatgtgaacatatatatgaatgactctgatgatgtgcagatcgcggagatagagattatgatagctgaacataagagccgtgggaagggtattggtcaagaagcaatcttactgatgatggcaattgcagtagagaaatatggaattcacacgttcagggcaaaaattagcgaatcaaatatggcatcgcttaagctcttcaggaagttgggcttcaaggatgcttcatacagtgtggtgttcaaggaggtgactctggaggcacccgctgactcactcccgttgagatttcctctgaccattggagactggtgacgtctgacatgccccaagctaattccatgcagacgacacaagaagctaatgctgtttgtctgtactatctgaccaaaatttactcgggctgatattgtatgaaaaattgaataaaacagttgcacagttgtgattcaattgcattagaccagtcgggtttttcatgtcactattttgaagaccccatatcttataaacaaatgtagacaagttttatctcataaattttttttatcgtatctctcatcatcaataata

SEQ ID NO: 156727 - DNA, 1184 bp, Zea Mays
atcaattccgcttcggcactagaccaccactcgccgacgccgctcctccctcttctgcttctcccagcgccgcccgcccccgccgttccctcacacgccgcccgccgcgcaagagccgcgacctcgtcacgtctgcccgctggtgccgtggccccgtcgacgtccgcccgcacaggactctccgagtgtgggattgagccgtactttttttttttggtggctcgggccgagatccggtactgtatgagggttgccaactagactttaagatcgctgattcaatggaggcctccgaggcagcacctgcagcggcggacaccgtcatggaagcagaggatgtgagcggcgggaagggcgaatggtacgtgcttggggagcgggcgctgatggtgccgtacacgcgggagcacgtgccgcggtaccacgactggatgcaggacccggcgctgctggaggccaccgcgtcggagcccctctccctctcgcaggagttcgaggtccaccgctcatggaccctcgaccctctaaagcacactttcatagtgttggataaggagctcatagagggagagttcgtgccgggcaacccgcacattgaagctatggttggtgatgtgaacatatatatgaatgactctgatgatgtgcagatcgcggagatagagattatgatagctgaacataagagccgtgggaagggtattggtcaagaagcaatcttactgatgatggcaattgcagtagagaaatatggaattcacacgttcagggcaaaaattagcgaatcaaatatggcatcgcttaagctcttcaggaagttgggcttcaaggatgcttcatacagtgtggtgttcaaggaggtgactctggaggcacccgctgactcactcccgttgagatttcctctgaccattggagactggtgacgtctgacatgccccaagctaattccatgcagacgacacaagaagctaatgctgtttgtctgtactatctgaccaaaatttactcgggctgatattgtatgaaaaattgaataaaacagttgcacagttgtgattcaattgcattagaccagtcgggtttttcatgtcactattttgaagaccccatatcttataaacaaatgtagacaagttttatctcataaattttttttatcgtatctctcatcatcaataata

SEQ ID NO: 156728 - DNA, 1227 bp, Zea Mays
tcaattccgcttcggcactagaccaccactcgccgacgccgctcctccctcttctgcttctcccagcgccgcccgcccccgccgttccctcacacgccgcccgccgcgcaagagccgcgacctcgtcacgtctgcccgctggtgccgtggccccgtcgacgtccgcccgcacaggactctccgagtgtgggattgagccgtactttttttttttggtggctcgggccgagatccggtactgtatgagggttgccaactagactttaagatcgctgattcaatggaggcctccgaggcagcacctgcagcggcggacaccgtcatggaagcagaggatgtgagcggcgggaagggcgaatggtacgtgcttggggagcgggcgctgatggtgccgtacacgcgggagcacgtgccgcggtaccacgactggatgcaggacccggcgctgctggaggccaccgcgtcggagcccctctccctctcgcaggagttcgaggtccaccgctcatggaccctcgaccctctaaagcacactttcatagtgttggataaggagctcatagagggagagttcgtgccgggcaacccgcacattgaagctatggttggtgatgtgaacatatatatgaatgactctgatgatgtgcagatcgcggagatagagattatgatagctgaacataagagccgtgggaagggtattggtcaagaagcaatcttactgatgatggcaattgcagtagagaaatatggaattcacacgttcagggcaaaaattagcgaatcaaatatggcatcgcttaagctcttcaggaagttggtgagcactctcttttgtcgtcttctcgtctggtcgctagtttgcttgatcagaattatatttctttggtttggatacagggcttcaaggatgcttcatacagtgtggtgttcaaggaggtgactctggaggcacccgctgactcactcccgttgagatttcctctgaccattggagactggtgacgtctgacatgccccaagctaattccatgcagacgacacaagaagctaatgctgtttgtctgtactatctgaccaaaatttactcgggctgatattgtatgaaaaattgaataaaacagttgcacagttgtgattcaattgcattagaccagtcgggtttttcatgtcactattttgaagaccccatatcttataaacaaatgtagacaagttttatctcat

SEQ ID NO: 156729 - DNA, 528 bp, Zea Mays
gaaagaaatggcaggagctctgcctaatcattaaaaggagagtccagaaaacacactgtacaggtccgaggaccgagacaagacaagacagactagcaaacacgacgtgaggaacgctcctaacagacccgtacaaagcagctaaaccactgcagcagccctaatactggggaacgtagctctcttgaaagagaaagcctacgagcaaagccagaaatacaaggaagggaagtacatcctcgagagagctagaatggtgaaggatgggtgacgatcatttggatgctcttacttctaacaccccagaagcgcaatcttcttgaactctggaaagattcagaactatccctcaatttgcatgcctcagaacatttgacacctaattggcatcccagttagctaggaagatcactggttgcagattctttgatttgtagaatattactgactctgaatacccttagcttgttagtaatggtaacatttggtgaaatattgatgattaggtgaattgaagtgaagctgatg

SEQ ID NO: 156730 - DNA, 702 bp, Zea Mays
atgtcggtacagccgagaaccgggaccggtgattttcccctcccccttgtcttgctgcttccaattgacccgtcaattgctcaggcgatagtggctgcagtgcatttctgggatggggctgctcttccttgagcggctcgagggggagggcgtgttcaggtgccggcgctgccgcgtggacgccgcctccaaggacgccatcatctccagggacttctacggccgcagcggccgcgcctacctcttcgaccacgttgtgaacatatgcctaggccctaatgaggatcggtatcttgtaaccgggctccatactgtgaatgacatctactgtagctgctgccaacagattcttggctggagatatgagaaagcctacgagcaaagccagaaatacaaggaagggaagtacatcctcgagagagctagaatggtgaaggatgggtgacgatcatttggatgctcttacttctaacaccccagaagcgcaatcttcttgaactctggaaagattcagaactatccctcaatttgcatgcctcagaacatttgacacctaattggcatcccagttagctaggaagatcactggttgcagattctttgatttgtagaatattactgactctgaatacccttagcttgttagtaatggtaacatttggtgaaatattgatgattaggtgaattgaagtgaagctgatg

SEQ ID NO: 156731 - DNA, 633 bp, Zea Mays
ctcatgtcggtacagccgagaaccgggaccgtgcatttctgggatggggctgctcttccttgagcggctcgagggggagggcgtgttcaggtgccggcgctgccgcgtggacgccgcctccaaggacgccatcatctccagggacttctacggccgcagcggccgcgcctacctcttcgaccacgttgtgaacatatgcctaggccctaatgaggatcggtatcttgtaaccgggctccatactgtgaatgacatctactgtagctgctgccaacagattcttggctggagatatgagaaagcctacgagcaaagccagaaatacaaggaagggaagtacatcctcgagagagctagaatggtgaaggatgggtgacgatcatttggatgctcttacttctaacaccccagaagcgcaatcttcttgaactctggaaagattcagaactatccctcaatttgcatgcctcagaacatttgacacctaattggcatcccagttagctaggaagatcactggttgcagattctttgatttgtagaatattactgactctgaatacccttagcttgttagtaatggtaacatttggtgaaatattgatgattaggtgaattgaagtgaagctgatg

SEQ ID NO: 156732 - DNA, 630 bp, Zea Mays
ctcatgtcggtacagccgagaaccgggaccgtgcatttctgggatggggctgctcttccttgagcggctcgagggggagggcgtgttcaggtgccggcgctgccgcgtggacgccgcctccaaggacgccatcatctccagggacttctacggccgcagcggccgcgcctacctcttcgaccacgttgtgaacatatgcctaggccctaatgaggatcggtatcttgtaaccgggctccatactgtgaatgacatctactgtagctgctgccaacagattcttggctggagatataaatggcaggagctctgcctaatcattaaaaggagagtccagaaaacacactgtacaggtccgaggaccgagacaagacaagacagactagcaaacacgacgtgaggaacgctcctaacagacccgtacaaagcagctaaaccactgcagcagccctaatactggggaacgtagctctcttgaaagtgaacacatcctctttatttcaattcgccttatgtcatttctgctaaaatggtggatgaacggtatacctttatattttcaacccagcatcgtgttatgacttctactgttatatccagaaatgcaacaattaatttgtgcagaattaa

SEQ ID NO: 156733 - DNA, 2421 bp, Zea Mays
ctcgtcattttccccgcagcgacgacgattcagtgaggcacccctctcctggcctcttctcgccttctccgtttccgcgaacccagctgcctcgtagccccaccacaccgccgagcacgcggtctcccgcgccgccttccacccaagcgaagctacccctactcgacccagaattatcttctaccagcgctagtccgctccgcctctctactggctgccgtggagtggggatccgtccggacttccttctttcgctgttgatgtcatcatgctgagcattttgtggtagagacgatcatctctttgggttccagcatataactcatgcccataaaatttgcactagaaaatatgtcgacacaagcctctaaccggtcatacagatatccagacagaacccaactgccgtaccacaatggcaatccaatgcatgttgggggcaatggtaattactgtgtgcaacaaaatcacgatgatgttaactacatttcctctgatgatggatcacagagcagtagttctagagttcaagattttcaagcacagttttgcaccctagattcgtcttcggccaattgtgtttatcctgcacatagttctacctcttctcagagcataagtggaagccctctgtctcagcaggagagccactctgatcatgcatatggttcctctccaagtgcatcgtgcatcactcaggttcccacctggacacttaaggatctagaaaatgtgatgcttggacccgattctgacataggtagccctgacagttcctttctgcttgacactgccttgcatggaaataactggagagaacttttgggaattcaaactggggatttgaggcaggtaattgtagcatgtggtaaggctgttgacgagaatgctgtctatatggatgcattgatgtctgagttaagggagatggtttctgtctctggtgaaccgatgcaacgtctgggagcttacatgttggaaggcctcattgcgaggctttctttcactggacatgccttgtataaatctctgaagtgcaaagagcctgtggctacgagttctgagctcttgtcctatatgcatcttctttatgagatctgtccattcttcaagttcggttacatgtctgccaatggtgccatagctgaagcggttaagggggaagacattattcacatcatcgattttcaaatcgctcagggtagtcagtggatgactatgatacaggcccttgcttcaaggcctgggaggcgaccatacctaaggatcactggcatagatgactcgaattctgctcatgcccgaggtggtggactggatatggttggacagaggttgcacagaatggcccagtcatgtggtctgcccttcgagttcaatgctgtgccagcagctagtcatgaggttgtgtttgaagatctttgtctaagatctggggaggccatcgttgtcaattttgcttatcagctgcatcatactcctgatgagagcgtgggcatagaaaaccatcgtgatagaatactgagaatggtcaagagcctctctcctaaggtggtaactcttgtagagcaggaggcaaacacaaacacagcacctttctttcttagatacatggagactcttgattattacacagcgatgtttgaggcaatagatgttgcttgccccagggatgataagaagcgcattagcacagagcaacactgtgttgcaagggatattgtcaatttaattgcttgtgaaggtgcggaaaggatagagagacatgagccttttggaaagtggagggcaagacttgtaatggctggttttagaccatacccgttaagtccagtggtgaacagaaccatcaaaacactgcttgacagttaccacagccattacaggcttgaggagagagatggcatcctttatcttggctggaagaacagaaagctggtcgtatcttctgcctggtgctgatatttccaacttcttctaagaagcattgttaagattctttcgtggcttggggttcaggcgttcagcacatgaatccaaggtggaacctaaacttcagtatgaagactgcacaatcaaaaaaacaagctggttgcttccttactatttgttgcccagccttgaaactctcccacgctcactatcatcgctgatgtacttaccatgactcagttccatccttatatataggtgcaaacaatggtcttaatattgtatattggtagaatctggtggtattagcttccaaatctggattgctgaatcgtttgtgttactacatttagccaggatttgacagtagacacaaggagtgctgtaagatcctgtatgtacaacgtgcttcagttggtgtattgtacgtacttgggtgctatggctggtttggttatcacagtgctgagtgctgcactgttcggcgtt

SEQ ID NO: 156734 - DNA, 653 bp, Zea Mays
gccctcgtcattttccccgcagcgacgacgattcagtgaggcacccctctcctggcctcttctcgccttctccgtttccgcgaacccagctgcctcgtagccccaccacaccgccgagcacgcggtctcccgcgccgccttccacccaagcgaagctacccctactcgacccagaattatcttctaccagcgctagtccgctccgcctctctactggctgccgtggagtggggatccgtccggacttccttctttcgctgattctttcgtggcttggggttcaggcgttcagcacatgaatccaaggtggaacctaaacttcagtatgaagactgcacaatcaaaaaaacaagctggttgcttccttactatttgttgcccagccttgaaactctcccacgctcactatcatcgctgatgtacttaccatgactcagttccatccttatatataggtgcaaacaatggtcttaatattgtatattggtagaatctggtggtattagcttccaaatctggattgctgaatcgtttgtgttactacatttagccaggatttgacagtagacacaaggagtgctgtaagatcctgtatgtacaacgtgcttcagttggtgtattgtacgtacttgggtgctatggctggtttggtt

SEQ ID NO: 156735 - DNA, 174 bp, Zea Mays
atggttggtgtcgttaaggagaagcagaaagttcacaaaggatatgttgagactgaagatgagatttcagagcagaagggtgatatactgcaggttgaggaaggctttagaggggctcttttgacatcaagtgcttcagcacagctttgtcagggcatagcattgagtgaatga

SEQ ID NO: 156736 - DNA, 2336 bp, Zea Mays
agcccaccgagcctctcgctagtcgctccatagaattcgacgccttccgaacggccgcagcgcacaccccgccgcctcaaaacctcaggcacaagcttgcttcttttcctcccccattaatctctcccctcttgttcttcctcttccccatcagtctcgccgccatttccctgtcctgctgctgctactgctggtagtggttccccaaacccaagccttcgattcgcccgcccgcccgcccgcggtctcgagccagccttccgcgccgtcgtggttgctttacgcgcagctatccatggatgaggtccctgccaccgccgccgtcctcgacttccgacccggctcttctgtaccacgcgtctccgccgtcccgcgccgtgccgtgcagtgccccccggacaccggcggtgcagaggcggcgacgggaggtcgtccaggtatcgggaacactgccgccgtttccgcgaagttgacggggtcaagttcggccggtcccgatatccagtctgtggattgcgatacatcgggaggccttgccggcggtgacgctggagacgtgggggttttgtgcttagagaacgctgccgagaccgaatcggtggaaccaggtgtttcggacgtgaggttgggagctccagtggaggaacgccatggcaggacgctggatagtacgggattgggctctggtaaagctggtgagaccaatgagatttcactggttgaggtgtcccaatcaggtgccacttcaagcctagatgccactgcgtcgattggtggtggctactccctcgtggaggggtctctgccagaggcgagtggtgcccgcagatgtaaacccgaggtccatgaagtaccaacagggacccctgcaactgtgggattcccgattgaggacggtggctatggatttggaattgggcctaatgacgatgtggacggtagaaacgaccctgccggaggggaatgggaaccgcctactgatggcaatgatgccgaggacgtcacagatatgggtggaatcttgtgtgacgaaagagtggagaggatggagacgaattcggtagaacgtgaggcctcgaatggttccaccgtttcttctgaggaaggagtggacaggatggggacgagcttggatgactctgaggcttccgatggctcaaccacacaagattctgatacagacgtcgagaccgagtcaagtgtttctagtatagaggagcaagaagcaggatacggagcccacatccctcaaccggatccagcagtctgcaaggtggccaaagaaaacaacacggcaggagtgaagatctctgataggatgacttcagtgtccgaattaacacttgtgctggcttcaggtgcatcaatgttaccgcatccttcgaaggtacggacaggtggtgaagatgcatattttatagcttgtgatggctggtttggtgtagcagatggagttggtcagtggtcatttgaagggatcaatgccggactttatgccagagaactaatggatggctgcaaaaagatcgtggaagagacccaaggagctccagggatgagaaccgaggaagttcttgccaaggctgcagatgaagcacggtcccctggttcttccactgttttagttgctcactttgatggaaaggttcttcacgcatcaaacatcggagattctggattcctcgtgattaggaatggagaggtccataagaaatcaaacccaatgacttacggtttcaatttcccgttgcagattgagaagggtgacgaccctctaaaacttgtacagaaatacgccatctgtctacaagaaggcgacgtcgttgtaacagcgtcagacggtcttttcgacaacgtctacgaggaagaagtggcaggcatcgtctcgaaatcattagaagctgatctgaagcccacggaaatcgccgatttactggttgcccgagcgaaggaggtggggcggtgtgggtttggaaggagcccgttctcggactccgctctcgcggctgggtacctgggctactccggcggcaagctggatgatgtaacggttgttgtatcgattgttcggaaatctgaagtttaataaactagaaacgaactagcaaagttgagcgcacttcttttttttcttttcttttcttttttctcttcttgcaacagctgcactcgctggcaaaatgcccgtgaggcgtgagcatttcgcacatccctggcctacgcgctcaggcgcattgcgaaacgtgtattgtgtacacttgatacatactataaggttgtataagtaagcttcaaacgatcgctcgctccaccgcgcgccatcacaaaaggcaaaa

SEQ ID NO: 156737 - DNA, 2532 bp, Zea Mays
agcccaccgagcctctcgctagtcgctccatagaattcgacgccttccgaacggccgcagcgcacaccccgccgcctcaaaacctcaggcacaagcttgcttcttttcctcccccattaatctctcccctcttgttcttcctcttccccatcagtctcgccgccatttccctgtcctgctgctgctactgctggtagtggttccccaaacccaagccttcgattcgcccgcccgcccgcccgcggtctcgagccagccttccgcgccgtcgtggttgctttacgcgcagctatccatggatgaggtccctgccaccgccgccgtcctcgacttccgacccggctcttctgtaccacgcgtctccgccgtcccgcgccgtgccgtgcagtgccccccggacaccggcggtgcagaggcggcgacgggaggtcgtccaggtatcgggaacactgccgccgtttccgcgaagttgacggggtcaagttcggccggtcccgatatccagtctgtggattgcgatacatcgggaggccttgccggcggtgacgctggagacgtgggggttttgtgcttagagaacgctgccgagaccgaatcggtggaaccaggtgtttcggacgtgaggttgggagctccagtggaggaacgccatggcaggacgctggatagtacgggattgggctctggtaaagctggtgagaccaatgagatttcactggttgaggtgtcccaatcaggtgccacttcaagcctagatgccactgcgtcgattggtggtggctactccctcgtggaggggtctctgccagaggcgagtggtgcccgcagatgtaaacccgaggtccatgaagtaccaacagggacccctgcaactgtgggattcccgattgaggacggtggctatggatttggaattgggcctaatgacgatgtggacggtagaaacgaccctgccggaggggaatgggaaccgcctactgatggcaatgatgccgaggacgtcacagatatgggtggaatcttgtgtgacgaaagagtggagaggatggagacgaattcggtagaacgtgaggcctcgaatggttccaccgtttcttctgaggaaggagtggacaggatggggacgagcttggatgactctgaggcttccgatggctcaaccacacaagattctgatacagacgtcgagaccgagtcaagtgtttctagtatagaggagcaagaagcaggatacggagcccacatccctcaaccggatccagcagtctgcaaggtggccaaagaaaacaacacggcaggagtgaagatctctgataggatgacttcagtgtccgaattaacacttgtgctggcttcaggtgcatcaatgttaccgcatccttcgaaggtacggacaggtggtgaagatgcatattttatagcttgtgatggctggtttggtgtagcagatggagttggtcagtggtcatttgaagggatcaatgccggactttatgccagagaactaatggatggctgcaaaaagatcgtggaagagacccaaggagctccagggatgagaaccgaggaagttcttgccaaggctgcagatgaagcacggtcccctggttcttccactgttttagttgctcactttgatggaaaggttcttcacgcatcaaacatcggagattctggattcctcgtgattaggaatggagaggtccataagaaatcaaacccaatgacttacggtttcaatttcccgttgcagattgagaagggtgacgaccctctaaaacttgtacagaaatacgccatctgtctacaagaaggcgacgtcgttgtaacagcgtcagacggtcttttcgacaacgtctacgaggaagaagtggcaggcatcgtctcgaaatcattagaagctgatctgaagcccacggaaatcgccgatttactggttgcccgagcgaaggaggtggggcggtgtgggtttggaaggagcccgttctcggactccgctctcgcggctgggtacctgggctactccggcggcaagctggatgatgtaacggttgttgtatcgattgttcggaaatctgaagtttaataaactagaaacgaactagcaaagttgagcgcacttcttttttttcttttcttttcttttttctcttcttgcaacagctgcactcgctggcaaaatgcccgtgaggcgtgagcatttcgcacatccctggcctacgcgctcaggcgcattgcgaaacgtgtattgtgtacacttgatacatactataaggttgtataagtaagctgcgagcccttcgaatgaacatcgtgatgtacttactcagcggcagcggggtaagctattcgtggccggccggtagcattatttatgcgaggcagtgaaatccatgaacagccgcagtgctactaaacgaaacggaaacgctcacaagatacatctctcggtacatgatttgtggtcagactggggtaaggtacgggcggagcgcatgaactcgggtgagtgagcccagctcacaagacccg

SEQ ID NO: 156738 - DNA, 576 bp, Zea Mays
atgaagctttatccgtgcccccgtgacatgatggcattcagtgcctgcaacaggcccttaccaaacctcagggcggagctcaccagtagccgggggcatccatttcccagagttgtacacgctctcgccgaccttccaccctggaacgtctttcatgatcctcgcctcctcctcaagacacttcttccactctttgacaaatctttcatcctcttctgcttggagcatcggcagtatagcactgcgagcagcaattttctcttctttgagcgccctgcggaccttgttcccctggccgacctggtacatgccatatgcgaaagcaccgaaggtggtgaggaagatggcggtggcgctgggccccgaggtggggatccggcgggcgaagcgcacgggcgcgaaaccgcccggcggcggcccgtcctgcaccaccggcatctccttgatgctggccatccccggcttgttccgcaccagggactccgtcatcttcggtcccggatccggacgccggtacgcacgcttggcggaactagagctccccgcggggatcaaacgagccgaggctgtcgctag

SEQ ID NO: 156739 - DNA, 1929 bp, Zea Mays
gtaatttacactctaaattacacttgcgatttttatattcatgattatttattgaaatggtttcgtgtgttttgaaggtgttcatttgtgaacaaaagctttatttgaagtcacagttagctcagcatatgaagactggcgactctgaagtggatggctctgaggtagagcgcaatggttttgctgggcatccaatgtgtgagttctgcagaagttcattttatggagatagtgagctttacatgcatatgtctagggaacactattcttgccacatatgcaagaggcagaaccctggtcgtgttgaatatttcgcgaactatgaggacattgagttgcattttagagaagatcatttcctatgtgaagatgaagcatgtttggaaaagaagtttgttgtcttcctgagtaaagcgcagctgaagaagcataatgctatggagcacggtgggcggatgtctcgttctcagaggaatgctgcacttgagacacctagcagctttatatatcgcagaaatgagcaagaacaacggcgtggcaggggccgtaatgctttccatgatggatctgattgtcatatctcatcgtctgcaaatgctttccatgatcgatctgactgtcatatctcatcatctgcaaatgctttccatgataaatctgactgccatatcccatcaactgcacaaaaagaccgggcagctgccgatggccatgcagggcgtcttgacaatgtttcagagtcgtttcagtcattaagtattggatccagttctagggaagctgaagttggcgaaggctcaaggactggacgagtgctggaacagttgtccttccgacctctttctgacccggatattcctgacaatagtgttgaaacctcattcccttcattatcagagcagcaatccagtctcaatcagagtgcaagggacgctccgaggcttggagatgagtcactgttcccccctttgactgggtctagtaacaagatgaagcagcctgtttttacgcctaagcgtcctcgaacttttcctgctgccgaggatatccatgctgcaaagatgcgctatgctctgggaatgaacgaggacatgtactctgcgttcaaagagatcgctggtgaataccgtcgaggtaccatagatgcttttgagtatctttcatatgtcgagcagttcggactgtcgcaccttgttcctgagatggttaggctattgcctgattctcgaaaacagagggaacttgctgatgcgcactatacaaatacacggttgaaaaacctccaagaaaatggaaataataggaaggggggattcttcttatcaaagaagaaaagcctccaagaaaatggaggtggaactagcgaatggaggtggaactagcagaaaattcatattacagaaagcactgccgacggatgatgtgaacagggcacaagcagataatatttaggacacttttagaaggcttcaatcaaaccatcttacttagaaaggagaagctgaggtgttgtccaaggatgggtatcgatctttcatggggttcaaccggccgctgctggacccttcatctaatatggacagtgaaagtcatctagtgcaacggaggaggcaataaggaaccgaagaagacatcaaggtttctcagagctcgttcaagtgacaactcgttagccatgcttgatttaagacagccaagtgcaagccatgaatgtccacaaaggaaattacaaggcctagagacgtgattggtgcttggaagaagaagaatggtggggggcagaaactctttttgatcaattgacggaagagttattgcaactgtatttagacgtagtattttttgaattttgagatagagtcgtggtattgaaaaatattacagtatttttttccaagaagtgtttggcaaccttgtaaaaacactctc

SEQ ID NO: 156740 - DNA, 817 bp, Zea Mays
gcgtcctaactctttcatcatcttgcttgccgccgccgtggccgatcttcgctgcctgccagccatggaagacttttgtgcggtgtgcgcagatacgctggagtgggtggcctatgggtcgtgcgggcaccgcgacgtgtgctccacatgcatcgtccgcctccgtttcgtgatgggcgacaacaagtgttgcatctgcaagaccgtctgccccttcgtctttgtcactaaggccatgggtaaatacactagagtgatcactgatttctctgtgttacccgctggggtaaatgagggcaaagctggggatttctggtaccatgaagatacaaaggcatactttgatgatgcggaccactaccggatgatacggaccatgtgtcaactttcctgtaatgtttgtgacaacgcagaagatcaggttgctcaagcaaagcgcaaaagcaagttcaggagcattgaacaactgaagggacatttatactgcgtgcatagttgatttcatggattatgctgtcaaatttagcatcaaactttagacatgttttgaataatctagagctgatttttctttgtttctatttcatgcataatggtttctttttagtttataggcctttcattgtgcatgtacagttcagtgcagtttgtcttgtctatcagtatatgacgctggtacctatgctatagcttacctagtgagctgttatgttactgtacaatatattttgaaattgaaaaatgttgtttccttcctgtagtttttttgcttagtataatgagcagaatttattcgtttatgtatataacatggttt

SEQ ID NO: 156741 - DNA, 227 bp, Zea Mays
agtaatgggggacctcatttactcatcacccgtcgtcgcctccctctccatcccttcccttcccttccccgagcagccagccaagaaccgaacgagagaaagagagagagaatagaaagcgcgtaatgggggaccgggcgtacgcggcggccgcgaagccggttcccgtacgcgccgccgtccatgctgccgggcggccgcgtgccccctccgccgatgtaccggcc

SEQ ID NO: 156742 - DNA, 2026 bp, Zea Mays
gtaatttacactctaaattacacttgcgatttttatattcatgattatttattgaaatggtttcgtgtgttttgaaggtgttcatttgtgaacaaaagctttattcgaagtcacagttagctcagcatatgaagactggcgactctgaagtggatggctctgaggtagagcgcaatggttttgctgggcatccaatgtgtgagttctgcagaagttcattttatggagatagtgagctttacatgcatatgtctagggaacactattcttgccacatatgcaagaggcagaaccctggtcgtgttgaatatttcgcgaactatgaggacattgagttgcattttagagaagatcatttcctatgtgaagatgaagcatgtttggaaaagaagtttgttgtcttcctgagtaaagcgcagctgaagaagcataatgctatggagcacggtgggcggatgtctcgttctcagaggaatgctgcacttgagacacctagcagctttatatatcgcagaaatgagcaagaacaacggcgcggcaggggccgtaatgctttccatgatggatctgattgtcatatctcatcgtctgcaaatgctttccatgatcgatctgactgtcatatctcatcatctgcaaatgctttccatgataaatctgactgccatatcccatcaactgcacaaaaagaccgggcagctgccgatggccatgcagggcgtcttgacaatgtttcagagtcgtttcagtcattaagtattggatccagttctagggaagctgaagttggcgaaggctcgaggactggacgagtgctggaacagttgtccttccgacctctttctgacccggatattcctgacaatagtgttgaaacctcattcccttcattatcagagcagcaatccagtctcaatcagagtgcaagggacgctccgaggcttggagatgagtcactgttcccccctttgactgggtctagtaacaagatgaagcagcctgtttttacgcctaagcgtcctcgaacttttcctgctgccgaggatatccatgctgcaaagatgcgctatgctctgggaatgaacgaggacatgtactctgcgttcaaagagatcgctggtgaataccgtcgaggtaccatagatgcttttgagtatctttcatatgtcgagcagttcggactgtcgcaccttgttcctgagatggttaggctattgcctgattctcgaaaacagagggaacttgctgatgcgcactatacaaatacacggttgaaaaacctccaagaaaatggaaataataggaatgggggattcttcttatcaaagaagaaaagcctccaagaaaatggaggtggaactagcagaaagttcatgatatagaaagcactgctgatggatgatgtgaacatggcacaagcagataacattcaggacactgtaagaaggcttcaatcaaaccatcttgcttagaaaggagaagctgaggtgttgtccaaggataggtatcgatcttccatggaggtccaaccggccgccgctggaccttcatctaatctggatagtgaaagtcatctagtgcaacggaggaggcaataagcaaccaaagaagacatcaaggtttctaagagctcgttcaggtgacaactcgttagccatgcttggtttcagacagccaagtgcaagccctgaatgtccacaaagggaattacaaggtccagagacgtggttgccagcgcgaggtgcttggaagacgaagaatggtgggggatagaaactctttttgatcaatggacggaagagtcattgcaactgcatttagacgtgtccatatactttagtattttttgaattttgagataaagtcgtggtattgaaaaatattatagtttttcccaagtgtttggctaccttgtaaaagctctcttttgaatactataatttagtagttctatggtttagtagataccatggtatttatttttggagtatttaaaactccactccaatctaaaatttttttatct

SEQ ID NO: 156743 - DNA, 806 bp, Zea Mays
ctttcatcgtcttgcttgccgccgccgtggccgatcttcgctgcctgccagccatggaagacttttgtgcggtgtgcgcagatacgctggagtgggtggcctatgggtcgtgcgggcaccgcgacgtgtgctccacatgcatcgtccgcctgcgtttcgtgatgggcgacaacaagtgttgcatctgcaagaccgtctgccccttcgtctttgtcactaaggccatgggtaaatacactagagtgatcactgatttctctgtgttacctgatggggtaaatgagggcaaagctggggatttctggtaccatgaagatacaaaggcatactttgatgatgcggaccactaccggatgatacggaccatgtgtcaactttcctgtaatgtttgtgacaacgcagaagatcaggttgctcaagcaaagcgcaaaagcaagttcaggagcattgaacaactgaagggacatttatactgcgtgcatagttgatttcatggattatgctgtcaaatttagcatcaaactttagacatgttttgaataatctagagctgatttttctttgtttctatttcatgcataatggtttctttttagtttataggcctttcattgtgcatgtacagttcagtgcagtttgtcttgtctatcagtatatgacgctggtacctatgctatagcttacctagtgagctgttatgttactgtacaatatattttgaaattgaaaaatgttgtttccttcctgtagtttttttgcttagtataatgagcagaatttattcgtttatgtatataacatggttt

SEQ ID NO: 156744 - DNA, 825 bp, Zea Mays
atggcggagagggccctcccgcccgcggtgccggcgtcgcccgagccggcctcctcctccgcggtctcaacggcgttcggctcaccgctcgtgcccgtcgccgcgacggcggctgcgacgcccgcgcacgacacgtacgtggtgcaggtgcagaaggaccagatataccgcgttccgccccccgagaacgcctacctcgccgagcgctaccggaacgggcggcgcggcgggggcaagaagcggcgcgggagaagcgaggggtcgggcgcgtgctccccgtgcgtcctgcgcacgctcggcgcgctgctcgcggccgccgcgctggtgggcgccgccgtcctcatctccctcgtcgtgctgcggccgggcgtcccgggcttttccgtggacaggatcaccgtgatcaactcgacgcggcagcagcgcgtggactacgacgtcttcctcacggcggtgaaccccaacaagatgacggcgctgtggtacaggcgcggcgcggcgaggctggcgcaccatgggacgaccctcgccaagggcgacgtcgggcagcccgcggacggcggcgaggacgccaccgacttcagcgtgctgctgcagggggtgaagcacaacgggcgcacgcccagggcggtggagaaggggttcagcgggtccaaggagcacctcgcgctccagctggccgtggaggtcaccgtgcaggtgcacgtcggcgcgctcgggttcgggcagaggaggctagccgtggactgcgggatcaccgccgccgggctgagcaaggacgtgcacattgcgtcgcagagttgcaggagcagcttccggaactga

SEQ ID NO: 156745 - DNA, 1465 bp, Zea Mays
aaacccaaactccccagaaaccaggcttagcttagcttagcttcagagttctcctgcgtgttcctcttcctcccaagtcccaaccaaagaaaaacgcatatccttgtttggccatcgccatggcgtctgctggtcaccggagacacttcgccgacccacatgtgcttctgaagacgcagtacaacagcagttcccgccacgtatgcgacatctgccggtccaagctggccggcctcaccggctaccgctgcagcgcctgcgacttcgacatccacgaggcttgcgccaattacttcaaggagacaatctccttcttcgcgcacccctggcacaccctcacgctaagccgcatgcccagttcctgcgacggatggtcctgcgacctctgctgggagggctgtccgccgggagacttggtgtatcgctgcaccgattgcctcttcgatgtgcaccctctctgcaccatgctcccgcagaccatccgtagccccctccacccacggcacgaccttcgcctggtcccttcaatcggcacgtgcatgtgcggctgcgaggaactgtccgtgtggaactacgtctgctcttgtccgttgaaagtaaacatcgcgtgcgtctccggcgcgcccagcagtggtcgccagagcactgactactgtggccgaagcaacaccggcagtgctcatcatgccagcgccgccaccgcgcagcaaccggaggcttggcatcgccggtgctcgatgttctatcggcggccttcagttgattgctactatactatgtcgtccgatccctcccgcggcgcccacctccacctgccattcgattcaccgcctgccgctcctttgccttcaactattcagttcgagactcgataagaacaccgagtgcagtctgtaatgtctttgctgtattcggttttcctgttcttttcttatgccgtgagctatggaattatggatgtaatatatgctgcgtcagaatcctccaaggctccgttgctcataggaaagcaaaatagtgcacctttattttgcgcgaatgattatggttgggtgtaaggtcattttcagtgtatagtttcatcatactgtttacaagtttgtcacgcgcgaataaggtaatatagttgttagagcaatactataaaactctctcatatccctcttcattaaattacatgccatatcatcctacttaaatcacatgtcatatcatatcatcctacttgttagagcaagtatatataataaggtaatatagttggactctaagagatggcgcattaaatttctactgatgtgaagaaaaaaagaaatggagagagaatagaagcaactgctcactagtagccatctgaaaacggactcctgataaactcaagacagtctatgagaagaagggtggaccacgtattaaatatacaacttgtatcattgaaaggttattatatgactatacttttagt

SEQ ID NO: 156746 - DNA, 1424 bp, Zea Mays
aaacccaaactccccagaaaccaggcttagcttagcttagcttcagagttctcctgcgtgttcctcttcctcccaagtcccaaccaaagaaaaacgcatatccttgtttggccatcgccatggcgtctgctggtcaccggagacacttcgccgacccacatgtgcttctgaagacgcagtacaacagcagttcccgccacgtatgcgacatctgccggtccaagctggccggcctcaccggctaccgctgcagcgcctgcgacttcgacatccacgaggcttgcgccaattacttcaaggagacaatctccttcttcgcgcacccctggcacaccctcacgctaagccgcatgcccagttcctgcgacggatggtcctgcgacctctgctgggagggctgtccgccgggagacttggtgtatcgctgcaccgattgcctcttcgatgtgcaccctctctgcaccatgctcccgcagaccatccgtagccccctccacccacggcacgaccttcgcctggtcccttcaatcggcacgtgcatgtgcggctgcgaggaactgtccgtgtggaactacgtctgctcttgtccgttgaaagtaaacatcgcgtgcgtctccggcgcgcccagcagtggtcgccagagcactgactactgtggccgaagcaacaccggcagtgctcatcatgccagcgccgccaccgcgcaggtgagttctgcttctgcatgcgaaagtagcagcagcggccagagccttcccgtccgacggagccgtcgttcctccgtcgccaagtttcttctcaagacaagcttcaatgtcgcggtcaacgcagcaaccggaggcttggcatcgccggtgctcgatgttctatcggcggccttcagttgattgctactatactatgtcgtccgatccctcccgcggcgcccacctccacctgccattcgattcaccgcctgccgctcctttgccttcaactattcagttcgagactcgataagaacaccgagtgcagtctgtaatgtctttgctgtattcggttttcctgttcttttcttatgccgtgagctatggaattatggatgtaatatatgctgcgtcagaatcctccaaggctccgttgctcataggaaagcaaaatagtgcacctttattttgcgcgaatgattatggttgggtgtaaggtcattttcagtgtatagtttcatcatactgtttacaagtttgtcacgcgcgaataaggtaatatagttgttagagcaatactataaaactctctcatatccctcttcattaaattacatgccatatcatcctacttaaatcacatgtcatatcatatcatcctacttgttagagcaagtatatataataaggtaatatagttggactctaagagatggcgcattaaatttctactgatgt

SEQ ID NO: 156747 - DNA, 596 bp, Zea Mays
atggagtgcgcgtcgatgcggaccaggtcggcgcccagcccgacctccctgaccaggggcaggttcgccgtgttgagcaccaccacgcggcccccgcccgggatgtccacgtccagcggcgcctccaggcagttgagcgccaccccctcgcggtcctgcgccgagggcgccggcagcggggacgaggccctgacgatgcccgacgccggctggctcgacaccagcgccgcggcgttcgcctccggcaggtcccacgcgcgcgacacgaactcggtggagaagcccgtgaagatgccgctcgcgcccgtcagctggaagttggtgaactgccccggcctgtggcccttggaggtgtcgccgaggaagaggaccgtgagctgggtcggcgcggcggggccgttgtgccaccacgtgaccacgccgaaggggagcgcgagggcgtcgccctccttcacggccagcaccttctccttggtcgcctccggcaggacgatgccgcaggtgccagtgcctgttgttcgtttcgttcaagcatcagcagattcagatatatttaggtatctatcagattatcagtgagagaggcgcgcgcgtac

SEQ ID NO: 156748 - DNA, 1291 bp, Zea Mays
aaaaagctcggtctccttccctactccgttcactccccaaatcccagactctcaccgcttccctcgtctcctcagtcctcccccgccatggtcacggacaagtccaacctcccacagcagcagcagccgcctcctccctccgcctcctcagcaccctcctcgctcaagtccctcaacaaggcctcctacaagatctccaagcagtcgtcttccgcctctcccgctcccgttcccgcctccaccatgcgagcgccttccccgccgccgccggctccccgcccgcctcctcctctcccgccgccgccgccgccgccgccgcaggcctcctccatccctgccgaccacccgcctccccagccccccgtgtacaacatcgacaagtccgacttccgcgacgtcgtgcagaagctcacaggctcgccgtcccacctcctgccgccgcagccagcgcccactcccgccaccgcccgcgcccgcgcccccctcatggcgccaccgcctcccatcatggcgccgccgcctccgccgccgacggcgataccctcccgcctccaccgcatccggccgccgccgctggccccgccgcccatcctgcccccggccccgccggcgctctccccgctcccgccgctcccggcggtgtgcatgaccgcggagtcgcccatctccgcctacatgcgccgcctccgcgggatgccctcgccgatccgcgcgcccacgtcgccgctcggcttcggctgcctgccgtcgcccggcgtgcccatgccagctaccagcccccgcgtccgcgacccgtgacgtgcgtgatgcaggaacccccaccaccaccgttgcgccgccgccgatgtgtacatacggccggctggtgtaggagagatctggcgaggcggcgggcggcgaccgcagaaggaagcaggcagcaacaccttcacattctctgtcgacgttggagcaatggcgtttctctggtcaattgggtggtagtagtgccgacgtgaggtgctccactaaagagaattttattactgtgaaccaagttggtcgaaaaagcaggagctgggaagcgtaggtgtccatttctgccaaagatcggtggcatgataggggtaacagttgctgcgaagtccaattcggaaagcgatgcgctgagaagacgccggtgcctgttctcttcctgcgagctgcgctttctagggtcgaaacattggtttcctggtgtaattttatcgtctgaatgtactgtagtgtagtagtagcatttcactctcaacatgttttttttccttcttcc

SEQ ID NO: 156749 - DNA, 558 bp, Zea Mays
atggtgtggagtgctggcatcctaaggagaacatggtcctttttgcttcatcttggtagcttcggtcttaagggcgaattccccgatggacttgagaattgtagtagcatgactttgttggatctctcaagcaacagcctctctggacctatcccggctgacatctcgaggagagttccatttgttacaaaccttgatctgtcatttaatagcttcttgggagagataccagaagcactagccaattgttcttatctcaacattgtcaatttacaacataacaaattgactggaacaatcccagttcagcttgctgcactcagtcgcctagcccagtttaaattgtcagggcagattccttcatctttgagcaagtttacagcctctgattttgcaaatcaagacctttgtgggaggcctataagcaatgattgcactgccaattcaagcagtcgaacggggataattattggttctgctgttggtggtgcagttataactttaataatagctgctgttattttattcattgtattgcaaccctcgcattcttcatag

SEQ ID NO: 156750 - DNA, 2237 bp, Zea Mays
gcaacacagccccctcttgccccgtccatccccctaggcacgaaagctcgccgcaccccgcacgtcggggtccagctgcgcggtgccgcgtgcgtgtccgcctcgcccacctcactcaacgacccaaccccacccgccttataaaagcgagcgcccgggcacacaggtctccctccactgcacacacacacacacaccacacgccggctatctggctctgtacgtgtgtggcacggggcgcggggacgagagagccgtgtcgtcgtccatttgggttttgggcatcgatcgagtagtagcgatggcgctggaggccgtggtgttctcccagccccaggcggcggcgggccacttcggctacggccgcggggactcgacgacgtacgcggtgccgtggtgcgacctgctacagggaggcgtaggaggaggagggggagggtttggcgatctctgcgcggcgggcgagtgggacctcgacatcgacacctgggccgccgccgccgccgccgcgcccaccgtggagctggggggcgacgactgggactgggaggcgctctcccgggactaccagtcctcggacgcctccacggagtactaccacggcggcagcaggaaggcggcggcggcgcccgagcctgcggggaggaggaagcggaggcgcgccaaggccgtcaagaacaaggaggagatcgagagccagcgcatgacccacattgccgtcgagcgcaaccgccgccgccagatgaacgagtacctcgccgtgctccgctccctcatgccgccgtcctacgcgcacaggggtgaccaggcatccatcgtcggtggcgcgatcaactacgtgagggagctggagcagctgctgcagtcgctagaggtccaaaagagcatcaggagccggccgggtgcaggcgccggcgccgctgacagctccccgttcgccggcttcttcagcttcccgcagtactccgccaccaccacctcggcccacggaggctgctcgggcaacaacaacaacaacacgggcagcggaggaaaccgcagcgacgcggccgccgcaggagcaggagcagcagggtcgtcggcggtcgcggacgtggaggtgacgatggtggaagggcacgccagcctcaaggtgctggcgcggcggcggcccaagcagctgctgaagctcgtcgcggggctgcaccagctgcgcatcccgccgctgcacctcaacgtgaccaccgtcgacgccatggtcctctacaccttcagcctcaaggtggaggatgactccaacatgggctctgttgaggatatcgccgccgctgtgcatgagattatcggcagcatagagcagcagcagcaggaggagggagagaccgccgtcatgtgaagctctgcactctgcacgactgcacccgcacatatctgcactctctgcatgccctcgtcctgccaatggaatccatttgcctctgtagtagtctgtacacatgtgagctagtgactgcgattgcgcccagctgggcacctgagccatacatgcagagcattatttgtccaatccgtggtcacaagcagaatatgctgagagatctagctagctagtgggctgtatgcaatgatctaagcaagcgacaacctccgttttggagtgagagcagtacctgtagatagacacacatacaaatttgcctccctcaactcaagctacaaccactactgcagtgtgcagtctgcatacgccagacagaagaatgagtacgtgctcggtgatctatgtatggcgtgtcgatctgctgtatcatcagttgctagctggtactataccactagctcatctctggaaatgcgttagcttcagtaccgcggccgtcgtcacctcgttctgttcccttatcaggttcagatcgatggaatgaatgtttcagtcaactgtagcacacacgtacgtgtacgtcagtgggaactaaaaaaaattgttctgcggacaaaaaatggcgcagtcgaggtgctactagagtacacggacagcatgagtgtgctcctgtgctgtgccgctagagattccattgaccgtgaaacagtactgctcgcgcgcgatgggagattgatcggtgtgtctgtgtgtgtccagtgtccgcatgtctgcagtctgcatgtcccaaggacgacggaggtagtagccccgtgtctcctcctcctcctcctggcacgtgttgtttccgaaatgtaggtgtccatcttccatgcac

SEQ ID NO: 156751 - DNA, 1074 bp, Zea Mays
atggcgctggaggccgtggtgttctcccagccccaggcggcggcgggccacttcggctacggccgcggggactcgacgacgtacgcggtgccgtggtgcgacctgctacagggaggcgtaggaggaggagggggagggtttggcgatctctgcgcggcgggcgagtgggacctcgacatcgacacctgggccgccgccgccgccgccgcgcccaccgtggagctggggggcgacgactgggactgggaggcgctctcccgggactaccagtcctcggacgcctccacggagtactaccacggcggcagcaggaaggcggcggcggcgcccgagcctgcggggaggaggaagcggaggcgcgccaaggccgtcaagaacaaggaggagatcgagagccagcgcatgacccacattgccgtcgagcgcaaccgccgccgccagatgaacgagtacctcgccgtgctccgctccctcatgccgccgtcctacgcgcacaggggtgaccaggcatccatcgtcggtggcgcgatcaactacgtgagggagctggagcagctgctgcagtcgctagaggtccaaaagagcatcaggagccggccgggtgcaggcgccggcgccgctgacagctccccgttcgccggcttcttcagcttcccgcagtactccgccaccaccacctcggcccacggaggctgctcgggcaacaacaacaacaacacgggcagcggaggaaaccgcagcgacgcggccgccgcaggagcaggagcagcagggtcgtcggcggtcgcggacgtggaggtgacgatggtggaagggcacgccagcctcaaggtgctggcgcggcggcggcccaagcagctgctgaagctcgtcgcggggctgcaccagctgcgcatcccgccgctgcacctcaacgtgaccaccgtcgacgccatggtcctctacaccttcagcctcaaggtggaggatgactccaacatgggctctgttgaggatatcgccgccgctgtgcatgagattatcggcagcatagagcagcagcagcaggaggagggagagaccgccgtcatgtga

SEQ ID NO: 156752 - DNA, 405 bp, Zea Mays
atgagcctgcacgacaagttcgcggtcatcttcacctccagccccgtcgtcctcgacgccgtcgacgacctctccgttctcctcgcgttcaccatcctgctcaacagcatccatcccgtgctctcagtctcaggtgtggccgtcggctccggctggcaatccatggtggcctacgtcaacatcggcatccccatgggcattctgctcggacggctcttcaacgttggcgtgctgggaatctgggcggaaccctcgtttattgccacgctcatcctggccattatgacagtccgctgcgactgggaaaaggagtcgtacactcgtactgtctcatgtcatgcctaccgtggagtctactgtacaacttcatgccacagctggaggcaatcaaggacttccaagtaa

SEQ ID NO: 156753 - DNA, 1157 bp, Zea Mays
gcaagatctacctacgccttgcgatgtgtgaggactggagaagaccccgcatcagtcaggcaccaccaccaccacctttttagttgctgcctccagcgtccagccaccctccccaggacatccaccccgcaagtttggcaccaccaccttctcatcacctatccaggaccaggatcgacgacgaggaatcaagcagccagcagcgaccgatcgagacgcagccctgtggctgtgccgctgtgggttggatccggccgattcgacagcacgcggcacctacggatgccccacgcacccgtctcctgagagaactcgatcgattgcttcatggggagcggcaaggcgtcgtctccgccaggccccactgccggcgggcgcggctcgccgccaggtgccgccgtctgctgcatgtgcggcgaccgcggcctcctgcccgagctcttccgctgctccgcctgctccgtccgctcccagcacacatactgcacggatcggtacccgaaggtggagtcatacggcgtctgcaactggtgcctcagggcggacgggggcgtggcttctacttctaactcgccgagatccgccggcaaagcggttgtccagcgcccggctcctcacggcggtgacaaaatcggcagcggaacatcacccaaggctgccgctcgtggcgacttcgcgtcttccaacctgagcaagcctatcaagaagcagccgcagcagcatgcgcagaggctgttgctgcggcggtcggcgtcggacctcggcagtcgcgtcgttcgtaccgaccacgacgcgccgccttcgcccggcgttactacgcgtggcaggccgagggtccggaggtacaagctcctggaagaggtgatcactagctagctaactagccgtacccggggcgtgtgtgttgtgtattaggtgtaaaattaaatatacgtgcgtttaatttgtgtatatatatctacttagctacatctaggggtagacacggcatctcttgcggtgctgccatgcatgcatggagatcgagcagtgtgtacgtatgtactacgtgctgatcatctcaggcgttaattcatcaccatgcatcagggtgctcgcgtcgtgttgtacttgtacatgaggaataatgtagtgcttgctaccgcgcagttcgatca

SEQ ID NO: 156754 - DNA, 2675 bp, Zea Mays
tttggcgtgatacagatgagaggattttttaaccacaacctgaaattcggtcccacagggagtcaaacccagtacctgaggagtgctactcataccacctaaccaactcaactagaggccctttcgcaacttttccattgttttagatatttcgaaatataatagtggcaagccaaattatattttggggtattttgttttttatttgaaatgttatgtttgtaaattaagttttttataacttttggtggtatctggatctggatatcattttctgcctttgaatctataaatcttagaaaaagtgaactcataatgcttcatttgttggaaaattcagttgtagctttgtgttcagtattctgcacttctcatgcacctgcttatatgatttataccagtagtccattttttctcctggattctatttgaatgcatggataagtctgcttgaagaatgaagataaatgcttcttgatctacggtgtggagcaaagaagtctttagctgatctacccaaacatccattggcactgaagtcttgtgacattagctctgtctgttcccatcaaatccttgttggtgggagcgatgcatttgctaggttgtacgatagaagaatgcttccaccattgagctcgtgtcaaaccaaaaggaagccaccaccatgtgttaaaatgttctgcccattgcatcttgctgacagtaagaagacatattcacaccttacacatgttgcattcagcccaaatgggaaggaggttcttttaagttacagtggtgaacatgtttatctgttcgatgttgacccagatggtatgagttctagatacacagcagactatgtaagggaacaattatttgtacctccttttcacaaagtatcagcaaaaggacatgcaaaacaaaagaaggcttcagtaaatacaacttcaagaagtttgtctagggtagatatgtgcaagaaatttatgcaagtcgcaacaagatctctggagacaggtaagaacttaatgcttgggattgaagcatgcagtgaagtccttgaatcaatggaacctgatattgacgatgacacgaggcacgagtttttgtgtactcgagcagcattgtacctaaaggtttgtctgcttcctttatcatttgtgggagctctgttccacattaaattagggatcatagaatttgatctacagaggaaatggaaaaatgatgtttacatggcgattcgagattgcaatagaacgtggaagattgatgtcacatcgtatcaagcacacttgcatatggctgaggcactattgcagttaggaagactgaaggaggcatctgagcatgcagaggtggcaaatggtcttcttccacctcattgtccattgagggagcaggtggatgatttcaagcaacgcatcgcttcagctgagcttgagaagaacagagcggataaaaatgggagctcaaaagctgatactcatggaaaattacgctcattgagtgagatactctttagacctgatgttggtggttcatcacaggagggacgagaagattcagattatgatgatgatacggaaatggactatgaaacaacggtatctggtcatgaaagccgagagaatgatcaaggtgtcttccggggtagtttaagtttccaatttcatcaaagagaggatcaaaccaatgtacacactgatgagaatgggtcagttgagtcccctcgaaaagatgattatgcttttcagtcagatgttgccattgatatgaaacaaagatatgttgcacactgcaatgtagggacagatataaaacaagccagttttcttggtgagcaaggggagttcattgccagtggaagtgatgatggtagatggttcatatgggagaagagaacaggaaggcttattaaaatgcttgcaggggacggagctgttgtgaactgcatacagtctcatcccttcgactgtgccgttgcaacaagcggaatcgataacacaataaagctatggacacccgatgcaaatgctacatcaatggtttctggacctgaacttgatgtattgagtgccatagagaataatcagcagaagttatgtcggaaccgtcactttgtactgccttctgaatttttagaacgatttcagatgcatgagttttcagaaggtttcgagtgtgcccagagctgatttactatcgctggagctgcttgaggaaaagggtaatacttggaagaatgatatcatccaagctacaagcagcctatgtttgaattagtgaaatcggaaggccttgttgccattatagagtgtagacgcacctggatagataaacaggtgtgccggtgctgaaactattgcttgagatgtcaataaacactggaattatgttgttgtttgggggtggtataatgattcatacgtgtgtaatgcagtgtggattcattcccttgtacagattgtagataggtgagattctgcaataagtgacaatcacagatgtacatgtgtggtattcttgtctctgcgtgccgcaggtaggtcatgctagtttgtggctgacgattggggtatatcttctcttaaagacttgctgggtctggatgtggtgtaggaactgtgttactttatgtttcctaaatatgttactctttccatcccaatttataattcatttaattt

SEQ ID NO: 156755 - DNA, 616 bp, Zea Mays
ttgttcctggaacccagacctcaagccttcgccaccgcgcagtgtccagaatcatcccccacccggtccgcggcgatcgtgcggaagctggcgacgcgggagagcgagtggcagcgagggttagctggagatgaacggggccgagaagctgcggtgggccttctcggacggcagcgtcaccgatctcctggacgcccgcagcctccacggctcccccgacattaagaaaaaagtacagttccattcttctctagtgcaaaagcttgctttggaaaaggagatggagggtcacgtaggttgcgtgaatgccattgcgtggaactcaagtggttcgcttcttgtatcaggatcagatgacactagaattaacatctggaattataataaccgagagctggtgcatgatattgacactggccattctgcaaatatcttttgcacaaagtttgttccagaaacatgtgatgaagtagtagtctctggagcaggagatgcagaggttcgtgttttcaatatgtctcgattaagtggcagaaggcctagagaaatttctatggaaccaacagcagtttaccagtgtcactcaagaagggtcaagaaactagctgtaagttag

SEQ ID NO: 156756 - DNA, 4353 bp, Zea Mays
atgtacaagctccgcggccgtggcggcgggcgcggcggcagcggcgtagcaaagcgaccgatgccctccaacgcccgcggccgtggcgttgcctcctctatcggcgggatggccgggcctcctcgcagtcgcgccgccgccgccgccttgaaacagccggtgggacgcgaggaggcgttctgcctcgagtccagcgggctgcctgcctttgcggctataatacggctgacgcccgacctcgtcgacgagatacggcggacggaggaggccggtggaggcgcccgcatcaagttcaaccctaacatgtacaactcatcggagaacgttatagatgttagtggtaaagaattcaaattcacctgggcatctgaacgaggcgaattgtgtgatatttatgaagaacgtcggagtggagaggatggaaatgggttgcttctggagtgtggctctgcttggcgcaaggtgaatgtgcaacgcattttggatgaatcaacaaagaaccttgtgaaaatgcgctcagaagaggctgaacgtctctcaaaatctcgaaaatcaatcgtgctggaccctgccaatccatctgtcaagagtcaggccaagtcaatggctgctgcagctgtagaaggtaatccacggaggatgcactggaagcagaagagcgaatttcttaagaagaataaagctgctgttatcaccccaaccaaatcagttttgaaggtgaagttatctaacaacatccccaaagggaatatctcaagttcacctgcaccttctcctgaacaacctggagaaagcaatccttcgtttcctgttggatcagatgcaaataatgaagtcataacaccttttgattttaacaaagaggaaaacagtaaatatgagaaatcagttagaaataagatgtctaacaaagatataaatcgccgagcaagttctcatgctgcaaatgtggatgataatacaaatgaagtgcgaagctacttgatatccgtgctctcaaaaaatccaaaaggaatgggcctaaaggccttggagaaagctgttgcagatgcatttccaaatgcatcaaagaaaatacagagcatcatcaagaatattgcaaattaccaaggacctgagaggtatgttctgaaatcagggttggaggtagaaagctcaaaaagtcatgtatctgaaggagtaagatccatcagtaagaaaattgaggaatcggctccaagcctgacgattgatgatcctgatatatgtgagaggattgacattgtgggctccctagttgctccaactgatggaaaactcagtaatgacagtgaaggtaaggctggaacttccagtgacagtggaagcgatagcgatagtgacagcagtaacagtggaagtgatagtgggagccaaagcagaagtgctgcagaaactggtagtggaagcagcagcaatagtgacagtgatggctcatcaagcagcaaggaaggatctgatgcagctgttgatattacgagtgatgatgacaaagcaaatatagcacacacaaaagtagtggatgaccttaatttgtcttcatcgccaagagatttgaaaagactcgatgttgatgatgaacaaattgacattgaaacaaatcttgactacaggagtacatcacctcatattggtctgaataagtttaataccggtaatgatgatgcagcagcagagggctttagtgccggcaaccttagtaagccatctgaaatgtcaggaagcaagaacatgacgagcaccagaatggattctattggagttgataccaaatataatgaaatgtcttttctggacaacctttttgatgactccatgagaatagccagtgaaaactcacccaagggggaagctggtcaattgacagtgcagcatgtcaacaagagaaaatcaacatcaaaggatgaatcaaaatttggcccagtgagtattgctaaacctaaattaaaaaggtcttctggcagcgagaactctacagcaaagcctgagagtgctaaaaaggtcaaagctgacatagcatcgtcaataggttctttatcagagcacaaaagaagtttaccacctgaaaaatatagcaatgataggtttaacaaggggacatgggatgttagccgccatgcttcacaagatagcagtcctgccatgaaaggaagacctttggctcctggaaatttacagaggatagatcagagcccaaatttacctgtcccaacaatgcactctgagagaacaaaagaaaatactgtgaaatcaagtttgaagaaaaaatcagataagtcgcagaaaccatggcatggtatggatggtgactttgggccaggttattcacatggtgtagatcaccacgctaattttgatggctctgatgatttttccacaagaaaaaggagtagacatgggaatcttcttattgatgataaaatgtttaagcgttcgaaggacgctaatgccaatgtagattccatgaatttaaccaaaagttccagagaaactgttgtgcctgatgaaataactgcttttcctgaatctaatgaatgtaatggtgagcagtcaaattctcaaagagataatgttgagagatcaccttacggtaaaaaaaagctccagagggagttttctgatcttgagttggctgaacttcgcaagacttctttggaaaatgacgatggaaggataaggaagcaatttgagagtagttcctccaagtcgcttgatgctaaattaaatgtaattaactcctaccccagtatgaatgacagaaaggttcctgttaccgtctttaatgatactaagaggaaaccttcacctcaagaatatggaattggaggccatataaaccaggaagggtttcccaggaaggcagcagggtatgagtttgatgataataggcctcagcaaaatattccagacagtcagcatttgccaaggatttataatacagattttgagaatttaatatatccagatagttcaggaaaaacaagcaaaagggaaactaggatgacacatggtggaatgctagagtatgctgatatccagaagaagaaaacaacctcaaggcttccacagaatggtactaataatgtcagagtgtctcgaatgcagaaatcaatatccccatcagataatgatgaaagaagtaggaacgactctttgattgagacaaagacaggtaggaagagaaggggcagttcttcagatgatgataatttgtttttctccaagtatgataaagatgctccggagcttaaagatccaataaaagatttctcacaatacaaggattatgtgcaggagtacaatgagaagtatggggtttattcttatttgaatagtcagatagacaaaactatgtcagaatttttaaagattcaggatgatctcaatgttggaaaagaaagaggcaaggaacagtattataacaccttagaaagactcagagacatgtatcatgaatcaggaacaagacataaattgatgaagaaggtcttcgttttgcttcatgaggaactgcagattattaaggaaagaatcaacgattttacggacgcctattcaaatgagtagctgttttactctcataacatgtgactgcttcttgtcaaggctgataatatctgggcatcagcattatgctttgcctttgtagaaatttacttggcttggaaatattcagtcgaaggcacgtatcacaggaaacctgagagacttagggtgtgtttggttgaatgtacatgaagggatggaaaaaggtggccacagatttaatagtgtttggatgagagtcgcgtaggggcgaggtgaacaccggagtagttttaggtggcggcgtgttgccctgcctcatcccactttgtcctcaaaccaaatcagcgtgatgaatttgatagtaatcacggtgaagtggaatcaaagacagttcaaatatcaatggcgtcgctggatacctgcgcggttccgcacaggagagcagaagaaatgattcattactcagggaagaggtgaggttatctctgaggaaacgagtaggccttacatcagcagttttgcagctagtttggcactgtgaccgggcggttctctttgtagatgttctgtgtttttttaaccccctgtgaagggcgagatctctcctctcttggcatttgtacatcgctttgtattagtgtgatccatgtcaaactgaaataaattgctaactgtgtacatatctgtagagccgatagagaagaagttttggagggagagaaaagtctgggacatttttttttgtcgcaaacacccacacaccaattcctaaatcttgcaactggtaacgaagatattggttcgatt

SEQ ID NO: 156757 - DNA, 1058 bp, Zea Mays
gagccctaaaccctactcgaaccaaaccagagcagcctccaccgccagcgccgacagctcgtgttcgaccttgcgcacttctccgcccatggctgaacccgaggtaggggtggccgcagacacagcgatggaaaccgaagctcctgaagcagccggtcagaagagggaacgggatgaagtaggtgatcctgctgctgaaggaggcgaggcggcggtggaggaagcggcggcggctaagaagccgaagttggaggaggagactaaggaggtagaggaggcgtcggaggagaaggcagaggagacggcggaggggaagacagaggaggcgaatgagaagacagtggaggcggagcgcaagccagtgaagctggggccaaaagagttctcctcatccgtcgagatgttcgactacttcttcggtctgcttcactactggacgccgcagattgagttcaataagtatgaacaaatggtgctggaggatttgctgaagaaaggccacgcggaacctgctaagaagatcggggcaggagtcgaagcattcgagatacgcaaccacccggtgtggcaaagccgctgcttctttatccgcaggatcgatggatcctcggatgacttcagcttccgcaagtgtgtggacaacatactgcctctccctgaggacatgaaggtcggcaacggcaagaagtctggtggccaccacaagggtggcggtggcggcggcgggggtaggggaggaggccgtggccgaggcggctggcgtggtggccgtggccggggcaggaggggagggtaggatcttaattcttaacaggccctgcaattttgcccggttaataagacactggtggccgtggacacgaaggcgtttattatgtgactgtcctgaaagaccgatgcccaccttacaactgatccacgccgagtgcttgccgcgtgctgttcttaatttgtgccttatttttcttcttgtcagctgctcgtgtacgttgctttaggccatccggtctgttcgctgctggtctggaatgaaggatagataggattacacttgcaca

SEQ ID NO: 156758 - DNA, 86 bp, Zea Mays
ggctcgacggcggcgtcagcggctccccttcccgcctctagccagtggcctcgtgccctcggctccggtcctctgcacaccggccg

SEQ ID NO: 156759 - DNA, 734 bp, Zea Mays
aagtcttctccttccctgccgccgtcttgctttcccctttcctccaggaagctaacaccaaatctggtcgtgcaaccccgattcccccgcgaacttgcgaagcgatggtggacgcgtggtggtctctgttgggcgcggcgttcccggcgctggtggcgggtcagttcatccgcaccaagcgccgccgcgacgaggagcagcgcctcaaggcggcgcgcgggcgggagaagagctccgacgaggtcttcgtctgcgagcgcgtgtgcacttccaagcgtatgctcaacaaggtaggggccttctccaaggaccccataccggagacctgcgtcaccgtgtgcggcgtctctgaactcgacgcctgcgccgacgcctgcgcgcgcaccgtctgcgtcaaccagcaccaggtgcccaactggaacgacgtctgcctcaagaggtgtcagagcgagtgcctcaaactctcttcaacgctaatgtaatggccatctcgctattgtgctgcgctccttagatgccaaccgtgaggttcttctctgttccgttctgcttagatgccatctcgctattcatcatgcttgaggacagtgaatgtttctggtcaaggccgttatgtcttccattccattcgttcttgcacatttctttaatttaacaacaaaactctttttatgcacaataatttacttcatggtcctaattttatttctgaattgaaaccattaatgattacg

SEQ ID NO: 156760 - DNA, 1954 bp, Zea Mays
tcgtccggcactccggccacaccttcgctttcctgcctgccacagccactgccatgcatgcatgcggcgcccggcaggggccagcccataaacatttctgccatccctggctggccccccttttctccgcgtccccttgttcgcgggtgtaccatcgtcctcctcccgatcctagcatgtcattacgatggcaagccgcatcgcatcgttcccctccttcctcgcctttgtcgtcgtcaccgtcgccacgttattcccctcctcttcctcccagcagcagcccgccgccgccgtgccacagcccagagggttctatataagctgcgggtcggacaaggacgtgcaggtagggagcatcaagtgggccaaggatgagggcttcaccgccgtcgggaacgcctccgccatcaacaagccccacctcctccccctgctcgccgcgctgcgctacttcccggacgccaccgcgcggaagtactgctaccagttgcccgtcgtcaagggcacgcgctaccttgtccgcaccacctacttctacggcggcttcgacgggggcaaggaaccgcccgtgttcgaccagatcgtggacggcaccctgtggagcgccgtcaacaccacggacaactaccggcgcggcatgtccacctacttcgagatggtggcgcaggggcagggcaagaccatgagcgtgtgcctagcgcgccgccccgacacggcgtccagccccttcatctccgcgctcgaggtcatcgacctcgccgactccatgtacaacaccacggacttcagcaggttcaccatgaccaccgtggtgcgcagccgcttcggcagcaagggcgatatcgtcagctatccagatgacccgtacaaccggtactgggcgccgttcgcggacgccaaccccatggtggagagccactcctccatctcgcccgacgacttctggaaccagccgccggccaaggcgctcaaggccggaatcacaaccagccggggcaagaagctcgccgtgcagtggccgaccacggagctccccgcggcgacctactacgtggcgctctacttccaggacccgcgcacggcgagccccttcagctggcgcgtcttcgacgtcgcggtcaacggcaacgacttcttccgggggctcaacgcctccgcggccggcgtcatggtctactccagcatgatgcagctgtccgggaagacggagatcttgctcacgcccaacgagacgtcccccgtcggcccgctcatcaacgccggagagatctaccagatcgtcccgctcggcggcaggaccgccacaagagacgtggttgcaatggaagacctggcaagcagcctcaagaacctgcctccggactgggctggagacccttgtctaccacagcaacattcctggactggggttgaatgctcccagggatcacccgtgcgcgtcttgtcactggatctaaaaaaccatggtctttcaggatcgctacccgacagcattgtacacttgacagggatgaaaaccatctatctcagtggtaacaatctctcaggccccatacctgacttgagcagcatgcacgccctgactgcagtgcgccttgatagcaatcagttcagtggaacgatcaacccatcaatggaaaaactagccaatctcaaggagctacacctgaacaacaacaatctcacgggcaaaataccagatggtctgaaaaacaaagctggacttgatttgagaactgaggggaacaaatttgaatgaggctgacaaggaggaaatcatgagtacgatgctgcacccatgcacacagttcaatgatgaagggagaggactgaagacttcaaaatttgtacgatgacatacattaatggctgatgtataagagctgaagagtgatttcatatctagcatgcatttgccatttccatcctcttcttagagttttgttgtacatgt

SEQ ID NO: 156761 - DNA, 1617 bp, Zea Mays
tcgtccggcactccggccacaccttcgctttcctgcctgccacagccactgccatgcatgcatgcggcgcccggcaggggccagcccataaacatttctgccatccctggctggccccccttttctccgcgtccccttgttcgcgggtgtaccatcgtcctcctcccgatcctagcatgtcattacgatggcaagccgcatcgcatcgttcccctccttcctcgcctttgtcgtcgtcaccgtcgccacgttattcccctcctcttcctcccagcagcagcccgccgccgccgtgccacagcccagagggttctatataagctgcgggtcggacaaggacgtgcaggtagggagcatcaagtgggccaaggatgagggcttcaccgccgtcgggaacgcctccgccatcaacaagccccacctcctccccctgctcgccgcgctgcgctacttcccggacgccaccgcgcggaagtactgctaccagttgcccgtcgtcaagggcacgcgctaccttgtccgcaccacctacttctacggcggcttcgacgggggcaaggaaccgcccgtgttcgaccagatcgtggacggcaccctgtggagcgccgtcaacaccacggacaactaccggcgcggcatgtccacctacttcgagatggtggcgcaggggcagggcaagaccatgagcgtgtgcctagcgcgccgccccgacacggcgtccagccccttcatctccgcgctcgaggtcatcgacctcgccgactccatgtacaacaccacggacttcagcaggttcaccatgaccaccgtggtgcgcagccgcttcggcagcaagggcgatatcgtcagctatccagatgacccgtacaaccggtactgggcgccgttcgcggacgccaaccccatggtggagagccactcctccatctcgcccgacgacttctggaaccagccgccggccaaggcgctcaaggccggaatcacaaccagccggggcaagaagctcgccgtgcagtggccgaccacggagctccccgcggcgacctactacgtggcgctctacttccaggacccgcgcacggcgagccccttcagctggcgcgtcttcgacgtcgcggtcaacggcaacgacttcttccgggggctcaacgcctccgcggccggcgtcatggtctactccagcatgatgcagctgtccgggaagacggagatcttgctcacgcccaacgagacgtcccccgtcggcccgctcatcaacgccggagagatctaccagatcgtcccgctcggcggcaggaccgccacaagagacgttagcagttgtcggtcgcgtccggtttcttgtgcagtggttgcaatggaagacctggcaagcagcctcaagaacctgcctccggactgggctggagacccttgtctaccacagcaacattcctggactggggttgaatgctcccagggatcacccgtgcgcgtcttgtcactgtaagtattcagattacaatgacagatgtatccaatcgattgtcaatgacgctcacagtgcattttgtttgttttctggttaaattcagccaatcattaatattcatcagctgtcaataatgctcagtctgt

SEQ ID NO: 156762 - DNA, 1618 bp, Zea Mays
gtaggcgtaaagctcccgtccagtccagggcccggtcggctcggctgccgatccttcttcaatccctcgcctgcaactggctctctgtccccttctgctccccccacggttccccagagcccgagccaaatctaggggcttccttcatccgagcgtggtttcaattctaggggtagtcacctcacctgaattccgcccaaataaattcgtcgctgccttgtgatccttggggtttccttggttcttgagttgcgatcttctgctggttcgtgtcccccaatccgtaatcaatccggcgtctaggaaaccaattgctgctcagttctcttatttgctcctcgccttccttcctccagcctggttaaaatatcgaaaggggatttttttttaaaaatctgctcatcgaggaagcagggaagacaagaattgttgcatcggataaaggtcgggtgaaaatacaagcaaatcctgggaactcgcgtccctttgctaggtggttctttcctgatacaaagaacacaatgggcgatgtgtccttgaacggacccattaaggctgctgagccaggtgccggtggcattgccaagggcaatcaagttctggacacgatgtccgccgggtggacagacgagagacacaggctgtatataagctctatggaggcctctttcgtcgatcaactgtacaaccacgggagccgtccgcgcaacgcaaacggcaccgccttcaaggctctccgcagggagtacgtcgagtatgagaagaccgatgctcctgtgcgaaggggggctaagtgctgcggcgttcctgcaaatccttggatgcagcatttcaggccacgtagtgatggcggtaataacgcgcgaggcgatgggctcggggattctgtgggcgatcttgaatctggcactgaggcaaaccggaagagcctctcagcgtctcatggaagggaacgggacgcttgtgagggagaaccccagcttctccatgaaagtagagaggtctctgatcaaaattttgctgacgacgaggctgaagctgaaacagaatcaatgaaagcatacaagaaaaggagattaagcaggacaatgatcaactaaatttgcagggtcaattagcttagcctgttgcaggaattgagatgactgtcctaaaaggaggcagtaagatgatgggacatgtcttacgaaattttcagctgttgcctcttggtagccaaggcactttgaatccgaaggaaggtgttgaagggtagttgttagtgatcttgtgatgatataacgagctctggagcagttagcatcggcattttagtggattatgttcttgttatgtgtatctgtctatttttcagtcctcatcggtagtgctgcatagtacctcgctctctcgtcagaaggatattaggctaggtcactgttattaaatttttcaataacagtgaagtgtacatgtgtttgccaaatggtgagaatcattattgatttccaattcacaaactattctttatgcctcactccgtggatgtcgcggacatgtaacatggtcccggaaggaaggtacagcatacgacgtgcttgctgttgaacgatgatctttttaaaaaagaaaaaaaaaa

SEQ ID NO: 156763 - DNA, 2059 bp, Zea Mays
cgtgtgggcgtggagcagctgcgctcacggcggcacgccagcgagctccctcagccctctctttatgatcctatggctgatccgaagtggagagcaaagtccaatgatcccggatggaagtatgggtattggacagaaattgggaaccgagataaggtcacatgcaacctttgcaagaccgtgacaaccggaggaatcaaaaggttgaaagaacaccttgcgggtggttttgcggatacattaatgtgttctaagacaacaacagagattagaaaagaaatgtaagcatatttggacaagaataagagatgcagacctatttttcttgatgaggatgatggtcatgagcagcaggagcagcaggatactacttatgtacatcaacctagcttggggacagccgctaaaaggaagagagctgcatttcaatttagaacagcagctccacaaccatccaacatggaaaaagaaaaaagaaaggttgcaaccatgcttcggagaactcccaaacaagttgtggatgacaggcgttcctcagggtcacaccaaaccaccatagaggctgcactgaagccaaaggctgacagggaatatgtgaatgagcaatgggcactgtggttctatgagtgtggcattatgccatcagttcttgacaatttcaggttgcttgtgaagctactgcacaatatggttccggttatgtgcctcctagtttccatgatttgagggagcctttgcttaattcatgtgtgaagaggacaaacaacatgagagctgagcatgagatagcatggaacaactatggctgcactctaatgtctgatggatggaatgatagaaggggtcgtcagctaatcaacttccttgatcgcagcccagaaggtacttatttcatggaatctgttgatgcatcaaatgtacaacataatgcatatatgctagctgatttgcttcaggagagaattgataagattggaagagataaggttgttcaactagtcactgataatggtgctaattatatggcagcggacaggattctaatggactggattccaacattattttggacaccttgtgctgcacattgtttggatctcatgttggaagatattggcaaattgaaagacttcaagaaacctattgcatatgccaaaagggtgaccacttttatttatagacatggaagaattttaagtgcaatgagggagaagacaagtgggatggatctggtaagaccagcagcaactcgatttgccacatacttccttacattgaagagcttacacaaacattgatatgccttgagagctctcttttcaagtgatgaatggaagaacaacaaattagcgaagacagaggcaggcaagagtgtgtacaacattgttctatctaaggcgttttggactacagttgaagattgccttagagcttcggcgccacttcttattgtgcttagggctgttgatggtgatgaaaaaccagccatgccagaagttgctgcactcatgaatgttgtaatagagaagataaggcttagctttcctacccaaaacaagcagacattgttgaaaaaaatcatggacatcattgagcgccggtgggtgacacaaatggaccatccattatatggagctgcactctatttgaacccgagaaagttttttccatccgaaagaagggggattctagatatgttgcagagctaaggagttgtttcaatgatgtactagcaagaatggagcccgatgaagagattaggtccaagattgatgagtatgacatgcatcatgaagaccaaagaggacctatcttttctaacaagctggcactcgaaaatattcaatcaaaaagccctcttgattggtggtgtgcatatggtggacaggcatttgaactacaaagatttgtgatgcgtgtggttagcctttgtgcttcatcatcgggttgtgaatggatttggagtacatttgaatttatgcatacaaagaagagaaatcggttgttgcgcaagaggttgaatgacttggtcttatctgcctatttcatgggaactcaa

SEQ ID NO: 156764 - DNA, 3005 bp, Zea Mays
tcagtcggatttggaggagtcgaataaacaaggaaactcctcccggcccaaaaagcacttcacttgcaacagtccccgtcagggagggagcattgctgtgcgggatggcgataaggaagagcggaggcggtggcggggtgggggatgtggcgcggcggctgctgcttctggcctgctgctgcatttggcctggtggacggatcttcactgctgcggacactgaccccaacgatcttaatgtcctcaatacgctcttcaccagtctgaattctcctgggcagctcagagcttggcaggcgaatggcggtgatccttgtggccagtcatggcagggcattacttgctcaggatcaggggtcactaaaatcctattaccaaacttgtcactcaccggaaatctggcctacaacatgaataacttgggttcattagttgagcttgacttgagccaaaataaccttggtggtggaggccaaatacagtacaatcttcccaatgtgaagcttgagaaactcaatcttgcaggaaatcaatttggtggaaatttaccctactcaatttcgacgatgcctaatcttaagtatttaaaccttaatcataaccaactacaaggaaacatcactgatgtattttccaacctttatagtttgtcagagctggatctctcctttaattctcttactggtgatctaccacaaagtttcactggattgtcaagcctgaaaagaatgtatttgcagaacaaccaatttactggttatatcaatgtcttagccaaccttccccttgaaaccctgaatgttggaaacaaccatttcactggttggattcccagtcagcttaagaagataaacaatctacagaccgacggaaattcttggagcacaggaccagcgccacctccacctccatatacagcgcctcctcctccaaaccattggaatggcgcgggtcagaatgatgatggttcatcaagttctggtggaagacctgggataggtggtggaggtgtagcaggaatcattatatcattgctgattgttggatcagttgttgcattttttctaatcaaaagaagaaaacacaaagctattatggaagaacaatttgaacagcatcagccgttcacttccttcccttcaaatgaagttaacgacatgaagcctatctatgagtccaccacagtagacatagagtctttggcttcacctgcttcgattaatctgaaaccacccccgaagatagaacagaacaaatcatttgatgatgatgatgatttttcaaacaagactgctgcaaatagaagtaatataacacctatgaaggcaactgtttattcagttgcagatctacagatggcaacagatagcttcagcttcgataaccttgttggagagggtacttttggacgtgtttacagggcacagttcaatggtggaaaggttctggccatcaagaaattagacattactgtgatgccatttcaatcgtctgatgactttgctgaactggtctcgaacatttcaaaattgcaccatccgaatctgaatgagcttgtaggctattgcatggaacatggccagcacttgcttgtgtatgatttccataggaatggatcgcttcatgatctactccacctttcagatgagtacagcaaggcacttagctggaactctcgcatcaagatcgcactcggctctgcccgtgcactggagtaccttcatgaaatatgttctccatccatcatccataagaatttcaaggcatcaaatattttgctggactcagaattcaatccacacctttcagatactggacttgcaagcttcattcctgatgctgaattccaggcagcagaacaaagtgccggatacactgccccagaagtggacatgaccggtcagtacaccctcaagagtgatgtttacagctttggagttgtcatgcttgagctactgacaggacgtagaccatttgacagctctagacccaggtcagagcagtcacttgtgcggtgggcagcacctcagctgcatgacatcgatgcattggacagaatggtcgatcctgcactcaagggtctatacccagccaaatctctatcccgatttgctgatgtcctcgccctgtgtgtccagcctgaaccagaattcaggccaccaatgtcagaggtggtgcaagcattggttcgacttgtgcagagggccaacatgacgaagaggatgcttgatggaggagatacttctcgtggaccagatgatcaggaccaatatttcatatgacaagctgaactcgagcttttcagctacctctcagattgtatttatctcgtctcgttccactagcgcccggcagagacataatcacacaagtggaagaaacagaactttgtcagcttcgccagtacttggtagcaaatgagttgtgctctatggttgatggttgtattgtgtctaggaaacagtatcttgatcttgcactaatgacattctgttatattctttgggtagattatatgcaaatgccccggataaataaaactatggtgtcaagtttgcggaatgttaaaagaatcaattactccagtcctgctgcataaactgaaacatgttgcatggtggaatagtcatttgtcctatcatctgacgcttgttttcgtccttgaactttcaaaacgactattttaaatggaagtcttttaaaaccaccattcagattccctaagcatgctgctggctgtcagtccgaagaccgaaccaaacggataaatttaactgactagtctttgtatttagttgatatcttcaagcttcttgtacctcaagagtggagtgaaattacttatttcaagaagcttgagaagttggtgggagttcctgttatcaatgtccatatatggtttgacagaaaactgaaaaacacatatggccaccttcttttcagcaggagttcacttttaagtgtctatgcagacatgtcagtaacctgtaaggtactaaggcatc

SEQ ID NO: 156765 - DNA, 1683 bp, Zea Mays
caacggcccaataggccagaacgcatcactacgtctctgcagaagcttcctagggttttttaggcgtcgcagataagagatcccctcactgcattccctctgagcgccgccactccctgacatcgagaccggctgcccgaccccggtccggcgatccctctgcacccctttctttgcgctgccagccccaatctctcgcatccctgtcaaccatggcggcgtcagcaggcggaggcgcggtgcgcgcgctgtcccagaaggagcaggacatacagatgatgctcgcggccgacgtccacctcggcaccaagaactgcgatttccagatggagcggtatgtctttaagcgtcgcaccgacggcatctacatcatcaacctgggcaagacatgggataagctccagctcgcggcgagggttattgttgccattgagaacccacaagacatcatcgtccagtcggcccgcccctacggccagcgtgctgtcctcaagttcgcgcagtacactggcgcccatgccatcgctgggaggcacacccctggtaccttcaccaatcagctccagacctctttcagcgagcctcgcctgctcatccttactgacccaaggactgaccatcagccaatcaaggagtctgctctggggaacatcccgaccattgccttctgcgacactgactctcccatgcggtatgtcgatatcggcatcccagccaacaacaaggggaggaacagcattggatgcctgttctggcttttggccaggatggttctgcagatgaggggcactatcctccctgggcacaagtgggaagtcatggttgatctgttcttctacagagacccagaggaagcaaaggagcaggaggaggaagctgctgcggcccctgagtttgctgcagtcactgattaccaaggagctgatcagtggggcggtgaccagtggacctctgatgtggctgcaccacctgttgctcctactggtgctgattggggtgctgcaccagctccggttcctaccggtgatggctgggatcaaactgtggcccctgttcctgtggatggcactgttcctccagtggtcgctcctactggttgggaatcagcagcccagcccactgcccaaggctgggaataggcgttgaggcatcactttgagacgtcttgtgcgggattattccaaagtatgaatgcccgaagtcagacgacatattttgtagctaatttgctatgctttgtgcacttatgtttttagggctttctagttgaaccggtgcccctgttctgtttttaaaattgatgctatgaaagagcctatgaagtataagtactagcccctttgttttctgtcgaccgcattccatggtttggttcgaaccgttcgatgtcgtagttctatatgataatacattcagttgattttgatatatggatattaatattatttgtccatgtttgatttagtggttgagaatgagagatgtcctgcaactttctcagtggaccttcattctcgagtctcgagtatgaaactatccgtttatacgcaccaccgaccagtgtacctttcacctgaccaaacggaggtaaaagttttaaaaaatgtaggctacttgtttttttatgaaaatgtaaaaaaaaataaataattaagaagttagaaaacaacaaattccaaacaa

SEQ ID NO: 156766 - DNA, 781 bp, Zea Mays
gcatcactacgtctctgcagaagcttcctagggttttttaggcgtcgcagataagagatcccctcactgcattccctctgagcgccgccactccctgacatcgagaccggctgcccgaccccggtccggcgatccctctgcacccctttctttgcgctgccagccccaatctctcgcatccctgttcctgtggatggcactgttcctccagtggtcgctcctactggttgggaatcagcagcccagcccactgcccaaggctgggaataggcgttgaggcatcactttgagacgtcttgtgcgggattattccaaagtatgaatgcccgaagtcagacgacatattttgtagctaatttgctatgctttgtgcacttatgtttttagggctttctagttgaaccggtgcccctgttctgtttttaaaattgatgctatgaaagagcctatgaagtataagtactagcccctttgttttctgtcgaccgcattccatggtttggttcgaaccgttcgatgtcgtagttctatatgataatacattcagttgattttgatatatggatattaatattatttgtccatgtttgatttagtggttgagaatgagagatgtcctgcaactttctcagtggaccttcattctcgagtctcgagtatgaaactatccgtttatacgcaccaccgaccagtgtacctttcacctgaccaaacggaggtaaaagttttaaaaaatgtaggctacttgtttttttatgaaaatgtaaaaaaaaataaataa

SEQ ID NO: 156767 - DNA, 1673 bp, Zea Mays
cggatatgtgcaatgaaaagcagaaaaaaaatgcagagagcccattttaattttgacttaactgaggccgtgtttcgttggactggttacttaaaaagctgtcgtcttaaaatctactagagaaccaaatgtagctgattttatgtcttggttttggtgcagcaaggaagaatctcacgttatcaagcctccaccgcattttattggattttcgtgttgcaaccagattcccattatccctagcaaactaaatgcggccttagattcctagtaatttgttgtagactaactgcggtgcagtgtagcagcttaatagcatgtatgttcttcacagtcaatatgaattgttaggtgtgatattctattcctgttactttttttatcaggcatctacatcatcaacctgggcaagacatgggataagctccagctcgcggcgagggttattgttgccattgagaacccacaagacatcatcgtccagtcggcccgcccctacggccagcgtgctgtcctcaagttcgcgcagtacactggcgcccatgccatcgctgggaggcacacccctggtaccttcaccaatcagctccagacctctttcagcgagcctcgcctgctcatccttactgacccaaggactgaccatcagccaatcaaggagtctgctctggggaacatcccgaccattgccttctgcgacactgactctcccatgcggtatgtcgatatcggcatcccagccaacaacaaggggaggaacagcattggatgcctgttctggcttttggccaggatggttctgcagatgaggggcactatcctccctgggcacaagtgggaagtcatggttgatctgttcttctacagagacccagaggaagcaaaggagcaggaggaggaagctgctgcggcccctgagtttgctgcagtcactgattaccaaggagctgatcagtggggcggtgaccagtggacctctgatgtggctgcaccacctgttgctcctactggtgctgattggggtgctgcaccagctccggttcctaccggtgatggctgggatcaaactgtggcccctgttcctgtggatggcactgttcctccagtggtcgctcctactggttgggaatcagcagcccagcccactgcccaaggctgggaataggcgttgaggcatcactttgagacgtcttgtgcgggattattccaaagtatgaatgcccgaagtcagacgacatattttgtagctaatttgctatgctttgtgcacttatgtttttagggctttctagttgaaccggtgcccctgttctgtttttaaaattgatgctatgaaagagcctatgaagtataagtactagcccctttgttttctgtcgaccgcattccatggtttggttcgaaccgttcgatgtcgtagttctatatgataatacattcagttgattttgatatatggatattaatattatttgtccatgtttgatttagtggttgagaatgagagatgtcctgcaactttctcagtggaccttcattctcgagtctcgagtatgaaactatccgtttatacgcaccaccgaccagtgtacctttcacctgaccaaacggaggtaaaagttttaaaaaatgtaggctacttgtttttttatgaaaatgtaaaaaaaaataaa

SEQ ID NO: 156768 - DNA, 1233 bp, Zea Mays
actgcattccctctgagcgccgccactccctgacatcgagaccggctgcccgcccctacggccagcgtgctgtcctcaagttcgcgcagtacactggcgcccatgccatcgctgggaggcacacccctggtaccttcaccaatcagctccagacctctttcagcgagcctcgcctgctcatccttactgacccaaggactgaccatcagccaatcaaggagtctgctctggggaacatcccgaccattgccttctgcgacactgactctcccatgcggtatgtcgatatcggcatcccagccaacaacaaggggaggaacagcattggatgcctgttctggcttttggccaggatggttctgcagatgaggggcactatcctccctgggcacaagtgggaagtcatggttgatctgttcttctacagagacccagaggaagcaaaggagcaggaggaggaagctgctgcggcccctgagtttgctgcagtcactgattaccaaggagctgatcagtggggcggtgaccagtggacctctgatgtggctgcaccacctgttgctcctactggtgctgattggggtgctgcaccagctccggttcctaccggtgatggctgggatcaaactgtggcccctgttcctgtggatggcactgttcctccagtggtcgctcctactggttgggaatcagcagcccagcccactgcccaaggctgggaataggcgttgaggcatcactttgagacgtcttgtgcgggattattccaaagtatgaatgcccgaagtcagacgacatattttgtagctaatttgctatgctttgtgcacttatgtttttagggctttctagttgaaccggtgcccctgttctgtttttaaaattgatgctatgaaagagcctatgaagtataagtactagcccctttgttttctgtcgaccgcattccatggtttggttcgaaccgttcgatgtcgtagttctatatgataatacattcagttgattttgatatatggatattaatattatttgtccatgtttgatttagtggttgagaatgagagatgtcctgcaactttctcagtggaccttcattctcgagtctcgagtatgaaactatccgtttatacgcaccaccgaccagtgtacctttcacctgaccaaacggaggtaaaagttttaaaaaatgtaggctacttgtttttttatgaaaatgtaaaaaaaaataaa

SEQ ID NO: 156769 - DNA, 732 bp, Zea Mays
caacggcccaataggccagaacgcatcactacgtctctgcagaagcttcctagggttttttaggcgtcgcagataagagatcccctcactgcattccctctgagcgccgccactccctgacatcgagaccggctgcccgaccccggtccggcgatccctctgcacccctttctttgcgctgccagccccaatctctcgcatccctgtcaaccatggcggcgtcagcaggcggaggcgcggtgcgcgcgctgtcccagaaggagcaggacatacagatgatgctcgcggccgacgtccacctcggcaccaagaactgcgatttccagatggagcggtatgtctttaagcgtcgcaccgacggtatgttctttcctcccgcatcccttcctttttgcctctccgcatgcgaatccatgtagatgttgacaggaaggaggccgctggcgctccagtgttacagttccgggcgtgaatatcctgggtagacggtctgtggacttgtgtcttcgtatttgtagtgtatgctatgacagaggacaaaatcttagtgggagctgaacttttgtagtccagatacaaatacgctgatacgacgtatggatatggatataaaaaacgatgtttttgttatatggatacgcattaatccaactgattatgtatatgcaaacacactttttatccgaatattttttactattttaaaaaataatgatggtcattaatataatt

SEQ ID NO: 156770 - DNA, 520 bp, Zea Mays
cgggtgtgacactgcaccacctgttgctcctactggtgctgattgcggtgctgcactagctccggttcctaccggtgatggctgggatcaaactgtggccctgttcctgtggatggcactgttcctccagtggtcgctcctactggttgggaatcagcagcctagcccactgcccactacccaaggttgggagtaggcgttgaggcatcactctgagacgtcttgtgcgggattattccaaagtatgaatgcccgaattcagacgacatattttgtagctaatttgctatgctttgtgcacttatgtttttagggctttctagttgaactggtgcccctgttctgtttttaaaattgctgctatgaaagagcctgtgaagtataagtactagcccctttgttttctgtcgaccacattccatggtttggttcgaaccgttcgatgtcgtagttctatatgatgatacattcagttgattttgatatatggatattaatattatttgtccatgtttgattt

SEQ ID NO: 156771 - DNA, 152 bp, Zea Mays
acggtcggagcttattcctcgaccaagccaacgtgtgtcgccgtcgattccaaggcggttggtttctcctacgatggcacctatggcctgattagcttcgagctcggcatccccgaccaagaaatgtactgtggacggttacagtagggtac

SEQ ID NO: 156772 - DNA, 125 bp, Zea Mays
gcccctttgttttctgtcgaccgcattgcatggtttggttcgaacctttcgatgtcgtagttctatatgataatacattcagttgattttgatatatgataatacattcagttcaatggaccttc

SEQ ID NO: 156773 - DNA, 87 bp, Zea Mays
gtgattttacccctctattttgaaaatgaagcctacgtttgcttccacccattaacaccgttagtcaaaatcggaattagtgattaa

SEQ ID NO: 156774 - DNA, 967 bp, Zea Mays
ggtctttccctccacggccgagttttttttactccccttgcactgttaagatgtatcacaagaaccgtgatttgcaggtcatcactgatcaattcacctatggatgtggtcagcgttgaatcatctacgtcgtacagtgaacaaggacacactgatgaggttagtctcattatctgaattttttcctgagctatctatctgaaaatggaatgagaattgtggtcaactgaatgttcggttactcggctttcctctgaacttcatgctgtgagccttgttcattttaccagggaagggatgacatggatctttcccgttcaagcagccaggtctcagacgttcgggactattctgaccggtttgcgcactgggtcgcggatggaggcatgctttggtaaaaggccatggacttttgtcttgcttgacaactcggtagaatctgtgaccgcaggaaatggatgcgagcagatgacatggctagatgcagagatggtgggcgtggaaaaagtctcgcatcggtatggttgtgaccactggaaggcttgaacgctgatattcatcggatggggatggagatttcggtggttgggttgagtacaagattcaatttgctgtggtgaaaaattttaccatagtttgtttagacaataaataggcaaaatatatatgattcttttattttagcttacagtgcgtcccccttctccatagaaaattctgaaaagcaaaaaaaaaaaggaaaatctagaaaaaggaggaaaaaaaacttagataaagaacacttttgctgtaaatagttagtatgttacggaagtataaatattgtgaaattttgctgacgacacgacttcgctcaaacgtgtaatatactgttggacagtgttaacaaaatatatcccgtatcagtacgaaaactgtgtaaatttactgtaacgcacagtatgcattatttatttatttgtttctc

SEQ ID NO: 156775 - DNA, 884 bp, Zea Mays
cctggaagacactctatttcagaagagcggcagagttatttgaaaagattaggttaccctgaattgcattcttcaaatttcctcgaccttgatttgttgtcgtcttctgggaattcctgtgacgaggaagtttttgagaggtcatcactgatcaattcacctatggatgtggtcagcgttgaatcatctacgtcgtacagtgaacaaggacacactgatgagggaagggatgacatggatctttcccgttcaagcagccaggtctcagacgttcgggactattctgaccggtttgcgcactgggtcgcggatggaggcatgctttggtaaaaggccatggacttttgtcttgcttgacaactcggtagaatctgtgaccgcaggaaatggatgcgagcagatgacatggctagatgcagagatggtgggcgtggaaaaagtctcgcatcggtatggttgtgaccactggaaggcttgaacgctgatattcatcggatggggatggagatttcggtggttgggttgagtacaagattcaatttgctgtggtgaaaaattttaccatagtttgtttagacaataaataggcaaaatatatatgattcttttattttagcttacagtgcgtcccccttctccatagaaaattctgaaaagcaaaaaaaaaaaggaaaatctagaaaaaggaggaaaaaaaacttagataaagaacacttttgctgtaaatagttagtatgttacggaagtataaatattgtgaaattttgctgacgacacgacttcgctcaaacgtgtaatatactgttggacagtgttaacaaaatatatcccgtatcagtacgaaaactgtgtaaatttactgtaacgcacagtatgcattattt

SEQ ID NO: 156776 - DNA, 366 bp, Zea Mays
caaaggctatccattacattaacaagagcctgcctgatgacaagcgtctaaaatttttacacatggatctgagtaagctttctcgaaggaaaggcaccaatgtgcttgcactgttgaccaaggtggcatcagatgtgttggatctaactgaattcctccactgtgaaataagtacatcaacaaaacctgatgacacctcaagtggagaaagaactgctgccaaaccacatgatgacagaagtagcagtgatcaaactgaatgtgcagctaagttggcacctcttttattacagaagggtgtcctcaggacaaattgcatagactgcttagatcgcacaaatgttgcacaatttgcatatggtttag

SEQ ID NO: 156777 - DNA, 580 bp, Zea Mays
atcgttctctctcgtcgtctgttgatctgatcggatggaggctatgacgggtggcaaattccttcaaaagtttcgactctacgaaaccagatcgaaattttatcttattggaagagacaagagcaggattcactggagggtgctaaaaattgatcggttggagtccactgagctgggtgtcgatgaggatccaactatttacacggaaagtgaatgtcaagaactgctttggcggatccatgaggggaacatgttgactggtggactgaaatttgtcacaaaatgttacggaatagttggttttgtaaagtttcttggtccttattacatggttataataaccagtagaaggaaaatcggcacaatatgcggccatgaaatttattccgtcggcaagagtgaaatgattgcaatttcaagtgttacagtctggcccaacgtggcttattctagggacgagaacagatataagcgccttctttgctcagttgacctttcgaaggatttcttcttcagctactcttacaacatcatgcgcagccttcagaagaacataacccagaagaatactgggcaggct

SEQ ID NO: 156778 - DNA, 554 bp, Zea Mays
atcgttctctctcgtcgtctgttgatctgatcggatggaggctatgacgggtggcaaattccttcaaaagtttcgactctacgaaaccagatcgaaattttatcttattggaagagacaagagcaggattcactggagggtgctaaaaattgatcggttggagtccactgagctgggtgtcgatgaggatccaactatttacacggaaagtgaatgtcaagaactgctttggcggatccatgaggggaacatgttgactggtggactgaaatttgtcacaaaatgttacggaatagttggttttgtaaagtttcttggtccttattacatggttataataaccagtagaaggaaaatcggcacaatatgcggccatgaaatttattccgtcggcaagagtgaaatgattgcaatttcaagtgttacagtctggcccaacgtggcttattctagggacgagaacaggtctttttttttcaacatgtaaatattgtgtattgcctgttgtaatttaatcagtggttcttaacattatcaataattccagcttgcta

SEQ ID NO: 156779 - DNA, 220 bp, Zea Mays
gtcaactaatcatgcatggtgtgtgaaaggacattgtttggtgctgaacatcattcttattgagtgccttcttttcgtctgttcggttggtgcttctttatgttcaaatcatcttgacatctggccaaatttggattttttttggtgttacagacttacaggtccatagtacgttatactagtaattacatgcctatattaagtgataaaaaaataaaaa

SEQ ID NO: 156780 - DNA, 470 bp, Zea Mays
cacgagctcttcgacaagtgcagcgtccggcacgtgggagtgctggtggtcaactgcagcctcttcaacccgacgccgtcgcttgtcggccatgatcgtgaaccactacgagatgcgcgggaacatcctgagctacaacctgggcggcatgggctgcagcgcgggggtcatcgccgtcgacctgccccgcgacatgctgcaggccagcggcgcgggcctagccgtggtggtcagcacggaggccgtctccttcacgtggtaccccggaaggcgccgctccatgctcatcctcaacgccttcttccgggccgggtgcgactgcgcggcggtgctgctgtccaacagccgccgcgacttccaccgcgccaagtaccagctggagcacgtggtgcgacgcacaaggccgccgacgaccgcgccttccgctccgtgtaccaggaggaggatgtggtgcagcgcaacctgaacat

SEQ ID NO: 156781 - DNA, 983 bp, Zea Mays
gtgtcctctccgttgccttgccttcccctgccccgcccccatctccgatctcccctataaaacacaatgctccccgcgtcgccccccgaatcaattcccacagcaccaccaaaccaataggcaggcagcaaacacaagccaataggcaacacccgcggcgacgcaagagggagaagcgagcgtgcagcggtcctcctctcgatccacatggccatggcggcagcggacggcaagagccggaggttcgcgctggcctgcggggtgctgagccagtacgtcaaggccgagcagcagcagcagcagcagatggcggccccgcgcgccccggccaccacgaccctgagcctgatgcccggcgcggacgtcggcgccgacgagcagcaggaggcggccgccgctggggccgaggagatgcccgggcccgcccccgccgcggcgccgccgctcaccatcttctacggcggcagggtggtggtgttcgaggacttcccggcggagaaggcggccgaggtcatgcgcctcgcggccggcgacgacctgcccatcgcccggaaggcgtcgctgcagcggttcctggccaagcgcaaagatcgcctcgtcgagcgcgcgccctacgcccgcccgtcgtcccccgcggaggcggtcaagccggcctcgggctcggcctcggcctcctggctcgggctccgcagcacggaagccgaccgcctcaccatcgcgctgtgatttactggatcgacctcgaccagtggcgatttaattggctaatgatgggttcatgatcatgcctgcctttggggctggaatgctggatggagatgggagacagagacaggattgtagagatgttttttttttcatttcttacgagagtttcgctgctgtcgtgagatctgattcgataatagagagaagatgaagatcgaacaatttgtgcctttcgttgtgcttgtgcacgtatattctcctgcaaaaatccctga

SEQ ID NO: 156782 - DNA, 565 bp, Zea Mays
accttcaccagttataccttgtttgaactttgatgccaaattatggcaaaggcttgaaaaatgacattgactactgatcaaaactgatagttgggacatttctagcatcaaaggatcaaaagggcatgcgtggtttcttatccgcttcagctgaaacaacatttcagtcatgggtattcaagtttttgagtgattcaacactactgtgaagtgattaggctcaaccaggtactcttttgtggatggaagggtggtgttgttggctgcctgttttgctatgaattccttaggtggttgcctattattttgctcagtggccaggtgatgtatatggtggtggtgatgcctgattcttttgcacgtcttctaagctgatcaataaggcttaaggagatggatggtgctgctcatagctgaatgtttagcaccattatatatacatatttgtgtatgtgtgtaatagcaactaactcagactgtttcgaatctattttagacctattacctattaatcacctgtaatgaacatgttgtggagctattatgaactgattattagcttatc

SEQ ID NO: 156783 - DNA, 144 bp, Zea Mays
atgcagaaaatagaagtcggctctcccagattttggatttcaccattacctgtgcagtctatgactgaactaagtcatgcacaggatgaagaagtcagtgacaccactacatctatcattgttctagcatctgagactgtatga

SEQ ID NO: 156784 - DNA, 905 bp, Zea Mays
aaaacgtgacaaataaaaaagaacggagggagtactttttatgatatggtagtaaatatgtgtggcatgcatgttttcttatggtttgaacttgtttgtgataatagcaagcacatatttggaatcaaaggatgaagttcatgattttgcaagcctgcgacatgcagttcttgaacaggagctatacagtatacaaagcctgttggctcaggagaaggctagagaaacaacatatcgacaaagattacaaacaccacaattgcaaggcctcatccaggagcaaaatcccccaatcgatctctgtggtcttcacatcagcgaggcaatacacgtcctgaactacgagctcaacaaccgaagaaagatcgtgagatcaaccggtcgccgactccaggttatgataatatcaagcgcccgcaccccagcaaggctgactgccgccgtcgagcagtatctcatggaacacggccttctgtacacgcaggtgcaaccaggcctgctccgcatcctgctctagtaatggaactggtcgtcctagctgttgttcacaactggatcagatgaaaaagaagggaaaaagaaaagaaaagaaaagataagttgacctgtacttttgtatatggcagagattgctagcaggatagtagcgttaagaacttaagatagctcatgtaacattcatgtcaggctttttgtcagcaaatgtatacgtcttaaaatttgggagttagggaatattctcgttgtctttggtgccggtggatgcacacggcatagcgtcttcacagaatcacaatcatattctcgatcacaatcttcggtgctggtggatgcttaagttctgttcctgctggtgaattcaaattgtgagtaatgcctggtcgatgcattagttcttcacaata

SEQ ID NO: 156785 - DNA, 1152 bp, Zea Mays
gtttactgcatggatcttctacatacatttatgcctaataacagagtaaagtcgatggacgacgcagtcagaacctcaggtcactatcatttggaaattcaagtcctacatcaccagcatcatatgcccaaaatggtcttggaaactatgctggacgtgaacacgtatccctcgatgttcctagaggaaggtacaagacgactagtttgcctgttcctggtcttggttcaagcagaggttatcagttgttgggtggctcatataatggaaaccatgatatgatctcaaccaataccccacaaaacatggctggaattcagacaggaccagcttggcttgaaagtgacgctgaggcaagcacatatttggaatcaaaggatgaagttcatgattttgcaagcctgcgacatgcagttcttgaacaggagctatacagtatacaaagcctgttggctcaggagaaggctagagaaacaacatatcgacaaagattacaaacaccacaattgcaaggcctcatccaggagcaaaatcccccaatcgatctctgtggtcttcacatcagcgaggcaatacacgtcctgaactacgagctcaacaaccgaagaaagatcgtgagatcaaccggtcgccgactccaggttatgataatatcaagcgcccgcaccccagcaaggctgactgccgccgtcgagcagtatctcatggaacacggccttctgtacacgcaggtgcaaccaggcctgctccgcatcctgctctagtaatggaactggtcgtcctagctgttgttcacaactggatcagatgaaaaagaagggaaaaagaaaagaaaagaaaagataagttgacctgtacttttgtatatggcagagattgctagcaggatagtagcgttaagaacttaagatagctcatgtaacattcatgtcaggctttttgtcagcaaatgtatacgtcttaaaatttgggagttagggaatattctcgttgtctttggtgccggtggatgcacacggcatagcgtcttcacagaatcacaatcatattctcgatcacaatcttcggtgctggtggatgcttaagttctgttcctgctggtgaattcaaattgtgagtaatgcctggtcgatgcattagttcttcacaata

SEQ ID NO: 156786 - DNA, 3098 bp, Zea Mays
ctggcgaaggcaacaggggccgaagtgtcaacgtgtggctgcaatccacctccgcattcactccacgcgcacgccgctatacgcgacgctgccgagcgcatcgccgccggtccctccctcacttcctgtgcctgttctcagcccgccgcttctcagtccacttctgccgcagcccctcttctctcggtctagagatccgtccgggcgcggcagcctcgctttcgtttcggtaagcaatcatactcgagcttgcttggattccctagtccgaagggctttgttggcaatcgaaccctaaaatccttcttctgattcgttcagttagttgtagatttgtgtgctgacggatgccctgctaatccaatacatcgatccgtggcctgtctagatttttgttcttgaaaacgggcaaggtcgacatgagttgacagtgtacgagttcttgctttcttgttatctaatcaaggtgttggtgcagcttgtttaccaaaatttagggggtcacgtgaagcctgtccctgcttcaggaggggcgaatgttccttcttccaaattcccagttcgcgatgttttttccccttatggatggtcaatggtgcagtagctggcgtcaaatacttttagaatagagccttttctatctgatgtaccaatgctagaataaaactcatttgttcataactggatccctcaagcaatagtagttcttaatcttctacctttgttgaattgtgaaatatgacactgtgcttgcgctagtttgaagtccaacccaggagtgattagtggtgttcagctcagtaccgtagttctgctttgagcatgtttggtgtccggtgtccattttcgtctgcctcaatctgaatctttatgtttaccttttttccccactttcagcataatccaaattctatttgacatgttacctttttcatccatacctgtgatttggatttatgacttatcttgctgtaatttcctttgacctgattgtttagtcgtgttgaagaatgtagtatctgtggtagcatggccatgagaagccagtgattttgagttttctttgtcgttatttttctaagttagttccgcttaatatatcatgatcaaggccagttatttaattcttagaagcggtctgtgcttctgttaagtttctatttgcagaaatctagcttttactaccatgcccaattatgtctaataggcacggagaacaatcactttagaagacttgtactccttggcgtgtcatactctttgtaacaatcttaccattcttgagaagaggtacatctgtccgtcagcaatgtccatagaagagaggaagataagtgtgataagcaagagcattgcgctaaatccaaatgcagaggaatttgttccttcatcccttagatctgtcaatgattcctccaagagatcatatgcaactacggttgtctcagggatatctaaagaatccagcactgacaagccagagtcaattttacgaagtaactctgatgaagaagcacatcagtactggcagcaacagctccctgacgacattacccctgatttcaaagtcatgggacaagatgaaagtcctggacctgacagtctatcactcacagacctgtccataaatgatggcattggcacatcaatattttctccgaaccagacactgagcatgcagcaccgtgcttcgccttttatcagggacaaactaaatacacacccaaagattaacttgtctatcccaacttatatggatgaacggtcccaagccacaattttgagtccaactgcaggttccatgagtccaaatgctgctccatgggtgaagactctaaggaatgggggacattataacacaagcataagggatgccagtcagtacaatggagattctagcattggagcttcattgcacaaccttactgatgcatatcatggaagcaggcgcagcttaagctcgactatggatatcatgaatcagctggagagtaaagtcgatggacgacgcagtcagaacctcaggtcactatcatttggaaattcaagtcctacatcaccagcatcatatgcccaaaatggtcttggaaactatgctggacgtgaacacgtatccctcgatgttcctagaggaaggtacaagacgactagtttgcctgttcctggtcttggttcaagcagaggttatcagttgttgggtggctcatataatggaaaccatgatatgatctcaaccaataccccacaaaacatggctggaattcagacaggaccagcttggcttgaaagtgacgctgaggcaagcacatatttggaatcaaaggatgaagttcatgattttgcaagcctgcgacatgcagttcttgaacaggagctatacagtatacaaagcctgttggctcaggagaaggctagagaaacaacatatcgacaaagattacaaacaccacaattgcaaggcctcatccaggagcaaaatcccccaatcgatctctgtggtcttcacatcagcgaggcaatacacgtcctgaactacgagctcaacaaccgaagaaagatcgtgagatcaaccggtcgccgactccaggttatgataatatcaagcgcccgcaccccagcaaggctgactgccgccgtcgagcagtatctcatggaacacggccttctgtacacgcaggtgcaaccaggcctgctccgcatcctgctctagtaatggaactggtcgtcctagctgttgttcacaactggatcagatgaaaaagaagggaaaaagaaaagaaaagaaaagataagttgacctgtacttttgtatatggcagagattgctagcaggatagtagcgttaagaacttaagatagctcatgtaacattcatgtcaggctttttgtcagcaaatgtatacgtcttaaaatttgggagttagggaatattctcgttgtctttggtgccggtggatgcacacggcatagcgtcttcacagaatcacaatcatattctcgatcacaatcttcggtgctggtggatgcttaagttctgttcctgctggtgaattcaaattgtgagtaatgcctggtcgatgcattagttcttcacaata

SEQ ID NO: 156787 - DNA, 1623 bp, Zea Mays
ctggcgaaggcaacaggggccgaagtgtcaacgtgtggctgcaatccacctccgcattcactccacgcgcacgccgctatacgcgacgctgccgagcgcatcgccgccggtccctccctcacttcctgtgcctgttctcagcccgccgcttctcagtccacttctgccgcagcccctcttctctcggtctagagatccgtccgggcgcggcagcctcgctttcgtttcgaggtacatctgtccgtcagcaatgtccatagaagagaggaagataagtgtgataagcaagagcattgcgctaaatccaaatgcagaggaatttgttccttcatcccttagatctgtcaatgattcctccaagagatcatatgcaactacggttgtctcagggatatctaaagaatccagcactgacaagccagagtcaattttacgaagtaactctgatgaagaagcacatcagtactggcagcaacagctccctgacgacattacccctgatttcaaagtcatgggacaagatgaaagtcctggacctgacagtctatcactcacagacctgtccataaatgatggcattggcacatcaatattttctccgaaccagacactgagcatgcagcaccgtgcttcgccttttatcagggacaaactaaatacacacccaaagattaacttgtctatcccaacttatatggatgaacggtcccaagccacaattttgagtccaactgcaggttccatgagtccaaatgctgctccatgggtgaagactctaaggaatgggggacattataacacaagcataagggatgccagtcagtacaatggagattctagcattggagcttcattgcacaaccttactgatgcatatcatggaagcaggcgcagcttaagctcgactatggatatcatgaatcagctggagagtaaagtcgatggacgacgcagtcagaacctcaggtcactatcatttggaaattcaagtcctacatcaccagcatcatatgcccaaaatggtcttggaaactatgctggacgtgaacacgtatccctcgatgttcctagaggaaggtacaagacgactagtttgcctgttcctggtcttggttcaagcagaggttatcagttgttgggtggctcatataatggaaaccatgatatgatctcaaccaataccccacaaaacatggctggaattcagacaggaccagcttggcttgaaagtgacgctgaggcaagcacatatttggaatcaaaggatgaagttcatgattttgcaagcctgcgacatgcagttcttgaacaggagctatacagtatacaaagcctgttggctcaggagaaggctagagaaacaacatatcgacaaagattacaaacaccacaattgcaaggcctcatccaggagcaaaatcccccaatcgatctctgtggtcttcacatcagcgaggcaatacacgtcctgaactacgagctcaacaaccgaagaaagatcgtgagatcaaccggtcgccgactccaggtgcaaccaggcctgctccgcatcctgctctagtaatggaactggtcgtcctagctgttgttcacaactggatcagatgaaaaagaagggaaaaa

SEQ ID NO: 156788 - DNA, 1704 bp, Zea Mays
ctggcgaaggcaacaggggccgaagtgtcaacgtgtggctgcaatccacctccgcattcactccacgcgcacgccgctatacgcgacgctgccgagcgcatcgccgccggtccctccctcacttcctgtgcctgttctcagcccgccgcttctcagtccacttctgccgcagcccctcttctctcggtctagagatccgtccgggcgcggcagcctcgctttcgtttcggcacggagaacaatcactttagaagacttgtactccttggcgtgtcatactctttgtaacaatcttaccattcttgagaagaggtacatctgtccgtcagcaatgtccatagaagagaggaagataagtgtgataagcaagagcattgcgctaaatccaaatgcagaggaatttgttccttcatcccttagatctgtcaatgattcctccaagagatcatatgcaactacggttgtctcagggatatctaaagaatccagcactgacaagccagagtcaattttacgaagtaactctgatgaagaagcacatcagtactggcagcaacagctccctgacgacattacccctgatttcaaagtcatgggacaagatgaaagtcctggacctgacagtctatcactcacagacctgtccataaatgatggcattggcacatcaatattttctccgaaccagacactgagcatgcagcaccgtgcttcgccttttatcagggacaaactaaatacacacccaaagattaacttgtctatcccaacttatatggatgaacggtcccaagccacaattttgagtccaactgcaggttccatgagtccaaatgctgctccatgggtgaagactctaaggaatgggggacattataacacaagcataagggatgccagtcagtacaatggagattctagcattggagcttcattgcacaaccttactgatgcatatcatggaagcaggcgcagcttaagctcgactatggatatcatgaatcagctggagagtaaagtcgatggacgacgcagtcagaacctcaggtcactatcatttggaaattcaagtcctacatcaccagcatcatatgcccaaaatggtcttggaaactatgctggacgtgaacacgtatccctcgatgttcctagaggaaggtacaagacgactagtttgcctgttcctggtcttggttcaagcagaggttatcagttgttgggtggctcatataatggaaaccatgatatgatctcaaccaataccccacaaaacatggctggaattcagacaggaccagcttggcttgaaagtgacgctgaggcaagcacatatttggaatcaaaggatgaagttcatgattttgcaagcctgcgacatgcagttcttgaacaggagctatacagtatacaaagcctgttggctcaggagaaggctagagaaacaacatatcgacaaagattacaaacaccacaattgcaaggcctcatccaggagcaaaatcccccaatcgatctctgtggtcttcacatcagcgaggcaatacacgtcctgaactacgagctcaacaaccgaagaaagatcgtgagatcaaccggtcgccgactccaggtgcaaccaggcctgctccgcatcctgctctagtaatggaactggtcgtcctagctgttgttcacaactggatcagatgaaaaagaagggaaaaa

SEQ ID NO: 156789 - DNA, 91 bp, Zea Mays
gctcgtcggtgcatttgttagcagcactgattgtaaccatgagaagtgtacctttcttgtatatttttggccctggtgtttgggtgcatat

SEQ ID NO: 156790 - DNA, 2595 bp, Zea Mays
ccctattctactccactctgttttctggaggctgctaaactaaacccttcttctccccactccgccctcggacccgccgccgccgccgcttgccgggtctatagccatgtcaccagcggttgcctctgcctcatctggcgaccgcatacgaacctacgaagacttcgtgcgggtacacgcgtacctgctggccgcggcgggcatcccgccgtcgctgcaccggaggctgtaccgcaagctcgcggacgaggtcttcgacggcggggaggtctttgccgtagagccgtgcgaggacgggaggcagcggcgcctcgtgctcaccgccgatcagtctctaggaaaagagtccgatgtcttcctcgtcgaccatgcgtggtccttccgcctccctgatgcgctcaagcagttgagggaagtaccaggattggctgaaaggatggcagcattaatgtgtgtcgatttggaccgcaagattgaagcagatgagcaggatgatgacgagagtgggagcttggagcatgtatcgcaagtagtcgagaaagaaagggctagagttcaggagagaagtgattctacagcttggctggaacttgaagaacttggaattgatgatgacatgctagtagccttggatctatctgcaaattttccgaatctggtagctctgaacctatggggaaacaagctgcgggatccagagaaagttatgcaagaaatcaggaagtgcacaaagctaaaggcactttggttgaacgagaatcctgttcttggcaaaagtattgacaaagctgttttcgatggcctctctggattggaaatatacaattcacattttacaagtaaagccggagagtgggcactaggtttttgcgcagacattgttggagcagataatccctgttcttctgtggaaagcacattgtttgggagcattgggactattgacctttctgatagatgcattcacaagctaccagaggtgttctctcctagtaaattgccatctctgtcaaaattgaacattcgtggtaatcctctggatcaaatttctggcgatgatctcttaaagctatttggtggattcactcagttacaagagttggaggttgacattcctggccctctgggaaacagtgcaatctccattcttgagtctcttcctaatttatctttgctaaatggcgtggattcctcaagcataatagagagtgggaagcatatagttgactctgcacttgaaccacggcttccagaatggtcacctgaagaaccccttgctgaaagagttattggcgcaatgtggttgtatcttatgacataccggcttgctgatgatgaaaagattgacgaaacacctgtttggtatgtcatggacgagttgggctcagccatgcgccacagtgataatgcaaacttcagaatagctccattcttgttcatgccagaagggaaactgcacactgctataagttacacaattctgtggcccactcatgatgttcatactggagaagagtgtacccgggatttcttgtttggtattggtgaggataaacagcgttcagctaggcttacagcttggttccgcacacctgagaactactttattcaggaattcaggaggtaccaggaacagcttcaatcaaatagcatttgttcttcgacaaaaatagaagagacacagacaccctcaacccaaaagtgtacgctctaagggatggtcgcgtccttcgagtatatactgacatacctcatgtagaggagtttttaacacggccagaatttgttctcacgactgatccaaaggaagctgacatcatctgggtaagcatgcaagtagattcagaagtaaagaatgctgtagggctcacagaccaacaatacacaaaccaatttccttttgaagcttgcctggtcatgaagcaccaccttgcggagaccgtccacaaggcttggggctcacctgaatggcttcaacctacatataacctggaaacccatttgtctccactcattggtgattattgtgtgaggaaacgagatggcatggacaatttatggatcatgaagccttggaacatggcgagaacaatcgataccacagttactggtgatttgtctgctatcatcagacttatggagacaggccccaagatatgccaaaaatatattgaacgccctgcacttttccaaggaaggaagtttgatcttcggtacattgttttagtccgtagtatccgccctttggaaatatttctgtctgatgttttctgggttaggttagcaaacaatcagtacactttggagaagactagcttttttgagtacgagacccatttcactgtgatgaattatatcggaaggatgaatcatatgaacacaccagagttcgtcaaggggttcgagaaggagcaccaagttaaatggctggacattcatgaaagcgtacgatctaccatacgccgtatctttgaggcggccgcagctgtccatcctgagatgcagaacccattctccagggccatctacggtgtagatattatgcttgacaacagattcaaaccaaaggtttttagaggtacgtctcaaggactt

SEQ ID NO: 156791 - DNA, 1690 bp, Zea Mays
ccctattctactccactctgttttctggaggctgctaaactaaacccttcttctccccactccgccctcggacccgccgccgccgccgcttgccgggtctatagccatgtcaccagcggttgcctctgcctcatctggcgaccgcatacgaacctacgaagacttcgtgcgggtacacgcgtacctgctggccgcggcgggcatcccgccgtcgctgcaccggaggctgtaccgcaagctcgcggacgaggtcttcgacggcggggaggtctttgccgtagagccgtgcgaggacgggaggcagcggcgcctcgtgctcaccgccgatcagtctctaggaaaagagtccgatgtcttcctcgtcgaccatgcgtggtccttccgcctccctgatgcgctcaagcagttgagggaagtaccaggattggctgaaaggatggcagcattaatgtgtgtcgatttggaccgcaagattgaagcagatgagcaggatgatgacgagagtgggagcttggagcatgtatcgcaagtagtcgagaaagaaagggctagagttcaggagagaagtgattctacagcttggctggaacttgaagaacttggaattgatgatgacatgctagtagccttggatctatctgcaaattttccgaatctggtagctctgaacctatggggaaacaagctgcgggatccagagaaagttatgcaagaaatcaggaagtgcacaaagctaaaggcactttggttgaacgagaatcctgttcttggcaaaagtattgacaaagctgttttcgatggcctctctggattggaaatatacaattcacattttacaagtaaagccggagagtgggcactaggtttttgcgcagacattgttggagcagataatccctgttcttctgtggaaagcacattgtttgggagcattgggactattgacctttctgatagatgcattcacaagctaccagaggtgttctctcctagtaaattgccatctctgtcaaaattgaacattcgtggtaatcctctggatcaaatttctggcgatgatctcttaaagctatttggtggattcactcagttacaagagttggaggttgacattcctggccctctgggaaacagtgcaatctccattcttgagtctcttcctaatttatctttgctaaatggcgtggattcctcaagcataatagagagtgggaagcatatagttgactctgcacttgaaccacggcttccagaatggtcacctgaagaaccccttgctgaaagagttattggcgcaatgtggttgtatcttatgacataccggcttgctgatgatgaaaagattgacgaaacacctgtttggtatgtcatggacgagttgggctcagccatgcgccacagtgataatgcaaacttcagaatagctccattcttgttcatgccagaagggaaactgcacactgctataagttacacaattctgtggcccactcatgatgttcatactggagaagagtgtacccgggatttcttgtttggtattggtgaggataaacagcgttcagctaggcttacagcttggttccgcacacctgagaactactttattcaggcaattttgtatctgtgcttattctgtacaagaatatgcttcttttggtactgcaggctgcgagaataaccttatctt

SEQ ID NO: 156792 - DNA, 714 bp, Zea Mays
atggccgcctccagcgccgacccggctcagcaccacgcctcctcgaggccgccactcctcctcgccgtacgccacctgcccttcccgggcgtcccccgaacacgcacgttccccgtccccggccccgacgtcctcgcccctctcgcccgccgcctcgaggagctcgcgtccgcggcggccgcccacccgctcctgaagccgctcttcgccgcccactcccacctctcctccttctcccagcgcagtagacgggagccaacgccgctgtggtttgatggagcgagccacgagcagggcaggaggcgtctggtggcggcgcggcgtgccacggtgctgtcgtccggggagctctgcttcgcggcggtgctcggggactcggtggccgggacggtggtggccagcggcatcaataacttcctcaacctttacaacacggtgctcgtcgtcaggctcgtgctcacctggttccccaacacgccgcccgccatcgtcgcgcctctcagcacgatactcgctttcctcgtcctcaacgccttcaccagcacggccgccgcgcttcccgcggagctgccaagctgctcggcaacggcgcagcatcaccagaggactgctgtctcaccctgctcggcgccgcatgaggcgacgctcagccagaggaaatggatgcggagaatgcggtcacagaagccacagggagacgatggtgatcactag

SEQ ID NO: 156793 - DNA, 1938 bp, Zea Mays
gaggatgtcgagcgagttatctccggctcgaacccgtactcctcaagcaaaaccactggaggagcaccaagagttatctccggctcgaacccgagccaggtcctgactcctgatccgcaccgcacacggcaagggggcatcgccgacgggccgtcagcggcgagacccaagccaacacagcccagcgatgtcggcgcgtgaccgcgagacggccgaggcgctggtgcgcctcgccgcctcgctggacggggcggtgctcggcctcggcacggctgccgtcgccgtcgcgtcgtgggtcaagtacctcgccgtctcggggcagctacgcctcgtcgcctccgcggcgacggcctccatcgccgacgcccgctccctcctctcaggcgacggcgccgagccgcggatcgccgcggtgcggggctacgtgcgggcccatgacaagttcttccgggccccgttctcaggcgaggcgggcgtcgtcacgaagcacacccagatgtgtttgttcacagaatggagaggcatctttggatggacctttgatctgcatgctcttcttttcagatcatggaaagagcaaattgtgacgtcttttagatcggttccatttgttctggttagtactgaattaggaaatcctacgggagtggtacatataaatgtggataaggcggatcaaccgttgcctcttaccacagtgtttcataaacttatcccacttgagacgactccttacacattgtttcaaactattattggcaacggctatccgattgcgttgttggatgaagaaaaaatactaccgattggtaagaaaattacagcaataggactatgtcaagcaaaggatgcagaaagtgttgagataacatcgtgcccagagatcccctttttcttatctgaactaaccaaggatgagatgcaagctcagctggcttcacgtgctaggatactcttctggggtagtattgttttgggaaccttgtcggtttgcctagtgggccatgccatttacaggggctggacgagaatcaaactacgaagagaggctaggcatgcacgacagatgtttgaggaggctgaagatgctattcacagggatgactctagtgatgatgatgaaataggagacgggcaactatgtgttgtgtgcttaaggaagagaaggagggcagcttttattccatgtgggcatcttgtctgctgttccgaatgcgcattaacaatagagcgtacacctcatccattgtgccctatgtgtcgtcaagacatcagatacatgatgagggtttatgactcttgaggtatgctgctgataagatctacacgcttccttgctgacccatgcaaacctgaggagcacaactgttcgtcctgctgggcgttttcctagtcaagcacagggtttactgcaaataggttaaagatttggacattttctgccatctgatcgtcacctctagtgctgtggaagaggttgcaaaaaaaaaaatgctgctcgtcgtgatgaacgcaatgctgttcctgctctacggtaacctggcaccagataacagcggtgtcggagccttatgcttgccagcggataacatcgccgaagcgtgaagtcttgttctgatgctggctgcgtggtgtttggtttgctagaacagtggtgtccactctacgccgaatcattgagaaactctagtgttagcaaactgtaattttagaacaggcgtagagtggagtttttaaaactctaaactggctgcctggtgaatgctgttctagcaatactatggttttaaaaaatttattgcatgtataatgctccatgattttgttactgcggatgacgatgatggaaacgaagtcagtgacacttaggtctagttttgcaacacaatttttccaagagatttttaaaataatcttttttttcttatgaaaaaaaaa

SEQ ID NO: 156794 - DNA, 1933 bp, Zea Mays
gaggatgtcgagcgagttatctccggctcgaacccgtactcctcaagcaaaaccactggaggagcaccaagagttatctccggctcgaacccgagccaggtcctgactcctgatccgcaccgcacacggcaagggggcatcgccgacgggccgtcagcggcgagacccaagccaacacagcccagcgatgtcggcgcgtgaccgcgagacggccgaggcgctggtgcgcctcgccgcctcgctggacggggcggtgctcggcctcggcacggctgccgtcgccgtcgcgtcgtgggtcaagtacctcgccgtctcggggcagctacgcctcgtcgcctccgcggcgacggcctccatcgccgacgcccgctccctcctctcaggcgacggcgccgagccgcggatcgccgcggtgcggggctacgtgcgggcccatgacaagttcttccgggccccgttctcaggcgaggcgggcgtcgtcacgaagcacacccagatgtgtttgttcacagaatggagaggcatctttggatggacctttgatctgcatgctcttcttttcagatcatggaaagagcaaattgtgacgtcttttagatcggttccatttgttctggttagtactgaattaggaaatcctacgggagtggtacatataaatgtggataaggcggatcaaccgttgcctcttaccacagtgtttcataaacttatcccacttgagacgactccttacacattgtttcaaactattattggcaacggctatccgattgcgttgttggatgaagaaaaaatactaccgattggtaagaaaattacagcaataggactatgtcaagcaaaggatgcagaaagtgttgagataacatcgtgcccagagatcccctttttcttatctgaactaaccaaggatgagatgcaagctcagctggcttcacgtgctaggatactcttctggggtagtattgttttgggaaccttgtcggtttgcctagtgggccatgccatttacaggggctggacgagaatcaaactacgaagagaggctaggcatgcacgacagatgtttgaggaggctgaagatgctattcacagggatgactctagtgatgatgatgaaataggagacgggcaactatgtgttgtgtgcttaaggaagagaaggagggcagcttttattccatgtgggcatcttgtctgctgttccgaatgcgcattaacaatagagcgtacacctcatccattgtgccctatgtgtcgtcaagacatcagatacatgatgagggtttatgactcttgaggtatgctgctgataagatctacacgcttccttgctgacccatgcaaacctgaggagcacaactgttcgtcctgctgggcgttttcctagtcaagggtttactgcaaataggttaaagatttggacattttctgccatctgatcgtcacctctagtgctgtggaagaggttgcaaaaaaaaaaatgctgctcgtcgtgatgaacgcaatgctgttcctgctctacggtaacctggcaccagataacagcggtgtcggagccttatgcttgccagcggataacatcgccgaagcgtgaagtcttgttctgatgctggctgcgtggtgtttggtttgctagaacagtggtgtccactctacgccgaatcattgagaaactctagtgttagcaaactgtaattttagaacaggcgtagagtggagtttttaaaactctaaactggctgcctggtgaatgctgttctagcaatactatggttttaaaaaatttattgcatgtataatgctccatgattttgttactgcggatgacgatgatggaaacgaagtcagtgacacttaggtctagttttgcaacacaatttttccaagagatttttaaaataatcttttttttcttatgaaaaaaaaa

SEQ ID NO: 156795 - DNA, 1746 bp, Zea Mays
aaaaccactggaggagcaccaagagttatctccggctcgaacccgagccaggtcctgactcctgatccgcaccgcacacggcaagggggcatcgccgacgggccgtcagcggcgagacccaagccaacacagcccagcgatgtcggcgcgtgaccgcgagacggccgaggcgctggtgcgcctcgccgcctcgctggacggggcggtgctcggcctcggcacggctgccgtcgccgtcgcgtcgtgggtcaagtacctcgccgtctcggggcagctacgcctcgtcgcctccgcggcgacggcctccatcgccgacgcccgctccctcctctcaggcgacggcgccgagccgcggatcgccgcggtgcggggctacgtgcgggcccatgacaagttcttccgggccccgttctcaggcgaggcgggcgtcgtcacgaagcacacccagatgtgtttgttcacagaatggagaggcatctttggatggacctttgatctgcatgctcttcttttcagatcatggaaagagcaaattgtgacgtcttttagatcggttccatttgttctggttagtactgaattaggaaatcctacgggagtggtacatataaatgtggataaggcggatcaaccgttgcctcttaccacagtgtttcataaacttatcccacttgagacgactccttacacattgtttcaaactattattggcaacggctatccgattgcgttgttggatgaagaaaaaatactaccgattggtaagaaaattacagcaataggactatgtcaagcaaaggatgcagaaagtgttgagataacatcgtgcccagagatcccctttttcttatctgaactaaccaaggatgagatgcaagctcagctggcttcacgtgctaggatactcttctggggtagtattgttttgggaaccttgtcggtttgcctagtgggccatgccatttacaggggctggacgagaatcaaactacgaagagaggctaggcatgcacgacagatgtttgaggaggctgaagatgctattcacagggatgactctagtgatgatgatgaaataggagacgggcaactatgtgttgtgtgcttaaggaagagaaggagggcagcttttattccatgtgggcatcttgtctgctgttccgaatgcgcattaacaatagagcgtacacctcatccattgtgccctatgtgtcgtcaagacatcagatacatgatgagggtttatgactcttgaggtatgctgctgataagatctacacgcttccttgctgacccatgcaaacctgaggagcacaactgttcgtcctgctgggcgttttcctagtcaaggttaaagatttggacattttctgccatctgatcgtcacctctagtgctgtggaagaggttgcaaaaaaaaaaatgctgctcgtcgtgatgaacgcaatgctgttcctgctctacggtaacctggcaccagataacagcggtgtcggagccttatgcttgccagcggataacatcgccgaagcgtgaagtcttgttctgatgctggctgcgtggtgtttggtttgctagaacagtggtgtccactctacgccgaatcattgagaaactctagtgttagcaaactgtaattttagaacaggcgtagagtggagtttttaaaactctaaactggctgcctggtgaatgctgttctagcaatactatggttttaaaaaatttattgcatgtataatgctc

SEQ ID NO: 156796 - DNA, 2513 bp, Zea Mays
gaggatgtcgagcgagttatctccggctcgaacccgtactcctcaagcaaaaccactggaggagcaccaagagttatctccggctcgaacccgagccaggtcctgactcctgatccgcaccgcacacggcaagggggcatcgccgacgggccgtcagcggcgagacccaagccaacacagcccagcgatgtcggcgcgtgaccgcgagacggccgaggcgctggtgcgcctcgccgcctcgctggacggggcggtgctcggcctcggcacggctgccgtcgccgtcgcgtcgtgggtcaagtacctcgccgtctcggggcagctacgcctcgtcgcctccgcggcgacggcctccatcgccgacgcccgctccctcctctcaggcgacggcgccgagccgcggatcgccgcggtgcggggctacgtgcgggcccatgacaagttcttccgggccccgttctcaggcgaggcgggcgtcgtcacgaagcacacccagatgtgtttgttcacagaatggagaggcatctttggatggacctttgatctgcatgctcttcttttcagatcatggaaagagcaaattgtgacgtcttttagatcggttccatttgttctggttagtactgaattaggaaatcctacgggagtggtacatataaatgtggataaggcggatcaaccgttgcctcttaccacagtgtttcataaacttatcccacttgagacgactccttacacattgtttcaaactattattggcaacggctatccgattgcgttgttggatgaagaaaaaatactaccgattggtaagaaaattacagcaataggactatgtcaagcaaaggatgcagaaagtgttgagataacatcgtgcccagagatcccctttttcttatctgaactaaccaaggatgagatgcaagctcagctggcttcacgtgctaggatactcttctggggtagtattgttttgggaaccttgtcggtttgcctagtgggccatgccatttacaggggctggacgagaatcaaactacgaagagaggctaggcatgcacgacagatgtttgaggaggctgaagatgctattcacagggatgactctagtgatgatgatgaaataggagacgggcaactatgtgttgtgtgcttaaggaagagaaggagggcagcttttattccatgtgggcatcttgtctgctgttccgaatgcgcattaacaatagagcgtacacctcatccattgtgccctatgtgtcgtcaagacatcagatacatgatgagggtttatgactcttgaggtaattggaaaacatcctttttagggggtgtttgggaacaaagtttttctgcagtattgaagcaatactgtagtattaagcaatactgcagtattatatactttgaggtgtttggcaactcatctgaaatctctgtatactaaactgtagtattgtaaatactgcacttgttttgcagttttggaaactttggtctcaaccaaagtttttctccgtaaagagagcgctagctgggtcccactctggctgattggtctcaaccaaagtttttcccaaacaccttgatgtattggatactgttgtattcgaaaactgaagcattgtaaactgtagtaatatcatgactaaagtatactttagtatttgaaaaactacagtttggaaaaactgtgttcccaaacagggccttagtattttataaagatgactcactgttttatctcaatgcttttttctagctttacaattatgatgtaatattctgactaatacactgaataaaattgctatccttgttcggttgcttcattattggcatagttagttttggatacctcatccatacattctttatctagatttgacattcagactgaactttatttccttcaactggtagaaattgttaacacctcttccacttaggagcagtttttatcaaaagaataagaatgagcttgtaactatattcgacagtgtggttggtgcggtggttcttcaaattatgatcatgcatcttgaactattgctgctctatgcagtactactactatgaagaaccccctgagttgctgcgtgtttaatttgttcacagatgagacatctatctgtccattttgtctgaattttaccataatctaagtagcatatgaaatagagttcaggatgaattcgtttgattttatttgcaggtatgctgctgataagatctacacgcttccttgctgacccatgcaaacctgaggagcacaactgttcgtcctgctgggcgttttcctagtcaaggtggcctaccctggatttgtgaatataatgtcttgaccctccaaattatgctcttgattgcctgggacaaatagcttagctgaagtcatgaactaacgtagagttattttttgtttgctttgcgcatatgtctatccatcatgtaaagcacagggtttactgcaaataggttaaagatttggacattttctgccatctgatcgt

SEQ ID NO: 156797 - DNA, 2335 bp, Zea Mays
gaggatgtcgagcgagttatctccggctcgaacccgtactcctcaagcaaaaccactggaggagcaccaagagttatctccggctcgaacccgagccaggtcctgactcctgatccgcaccgcacacggcaagggggcatcgccgacgggccgtcagcggcgagacccaagccaacacagcccagcgatgtcggcgcgtgaccgcgagacggccgaggcgctggtgcgcctcgccgcctcgctggacggggcggtgctcggcctcggcacggctgccgtcgccgtcgcgtcgtgggtcaagtacctcgccgtctcggggcagctacgcctcgtcgcctccgcggcgacggcctccatcgccgacgcccgctccctcctctcaggcgacggcgccgagccgcggatcgccgcggtgcggggctacgtgcgggcccatgacaagttcttccgggccccgttctcaggcgaggcgggcgtcgtcacgaagcacacccagatgtgtttgttcacagaatggagaggcatctttggatggacctttgatctgcatgctcttcttttcagatcatggaaagagcaaattgtgacgtcttttagatcggttccatttgttctggttagtactgaattaggaaatcctacgggagtggtacatataaatgtggataaggcggatcaaccgttgcctcttaccacagtgtttcataaacttatcccacttgagacgactccttacacattgtttcaaactattattggcaacggctatccgattgcgttgttggatgaagaaaaaatactaccgattggtaagaaaattacagcaataggactatgtcaagcaaaggatgcagaaagtgttgagataacatcgtgcccagagatcccctttttcttatctgaactaaccaaggatgagatgcaagctcagctggcttcacgtgctaggatactcttctggggtagtattgttttgggaaccttgtcggtttgcctagtgggccatgccatttacaggggctggacgagaatcaaactacgaagagaggctaggcatgcacgacagatgtttgaggaggctgaagatgctattcacagggatgactctagtgatgatgatgaaataggagacgggcaactatgtgttgtgtgcttaaggaagagaaggagggcagcttttattccatgtgggcatcttgtctgctgttccgaatgcgcattaacaatagagcgtacacctcatccattgtgccctatgtgtcgtcaagacatcagatacatgatgagggtttatgactcttgagttttggaaactttggtctcaaccaaagtttttctccgtaaagagagcgctagctgggtcccactctggctgattggtctcaaccaaagtttttcccaaacaccttgatgtattggatactgttgtattcgaaaactgaagcattgtaaactgtagtaatatcatgactaaagtatactttagtatttgaaaaactacagtttggaaaaactgtgttcccaaacagggccttagtattttataaagatgactcactgttttatctcaatgcttttttctagctttacaattatgatgtaatattctgactaatacactgaataaaattgctatccttgttcggttgcttcattattggcatagttagttttggatacctcatccatacattctttatctagatttgacattcagactgaactttatttccttcaactggtagaaattgttaacacctcttccacttaggagcagtttttatcaaaagaataagaatgagcttgtaactatattcgacagtgtggttggtgcggtggttcttcaaattatgatcatgcatcttgaactattgctgctctatgcagtactactactatgaagaaccccctgagttgctgcgtgtttaatttgttcacagatgagacatctatctgtccattttgtctgaattttaccataatctaagtagcatatgaaatagagttcaggatgaattcgtttgattttatttgcaggtatgctgctgataagatctacacgcttccttgctgacccatgcaaacctgaggagcacaactgttcgtcctgctgggcgttttcctagtcaaggtggcctaccctggatttgtgaatataatgtcttgaccctccaaattatgctcttgattgcctgggacaaatagcttagctgaagtcatgaactaacgtagagttattttttgtttgctttgcgcatatgtctatccatcatgtaaagcacagggtttactgcaaataggttaaagatttggacattttctgccatctgatcgt

SEQ ID NO: 156798 - DNA, 1602 bp, Zea Mays
gaggatgtcgagcgagttatctccggctcgaacccgtactcctcaagcaaaaccactggaggagcaccaagagttatctccggctcgaacccgagccaggtcctgactcctgatccgcaccgcacacggcaagggggcatcgccgacgggccgtcagcggcgagacccaagccaacacagcccagcgatgtcggcgcgtgaccgcgagacggccgaggcgctggtgcgcctcgccgcctcgctggacggggcggtgctcggcctcggcacggctgccgtcgccgtcgcgtcgtgggtcaagtacctcgccgtctcggggcagctacgcctcgtcgcctccgcggcgacggcctccatcgccgacgcccgctccctcctctcaggcgacggcgccgagccgcggatcgccgcggtgcggggctacgtgcgggcccatgacaagttcttccgggccccgttctcaggcgaggcgggcgtcgtcacgaagcacacccagatgtgtttgttcacagaatggagaggcatctttggatggacctttgatctgcatgctcttcttttcagatcatggaaagagcaaattgtgacgtcttttagatcggttccatttgttctggttagtactgaattaggaaatcctacgggagtggtacatataaatgtggataaggcggatcaaccgttgcctcttaccacagtgtttcataaacttatcccacttgagacgactccttacacattgtttcaaactattattggcaacggctatccgattgcgttgttggatgaagaaaaaatactaccgattggtaagaaaattacagcaataggactatgtcaagcaaaggatgcagaaagtgttgagataacatcgtgcccagagatcccctttttcttatctgaactaaccaaggatgagatgcaagctcagctggcttcacgtgctaggatactcttctggggtagtattgttttgggaaccttgtcggtttgcctagtgggccatgccatttacaggggctggacgagaatcaaactacgaagagaggctaggcatgcacgacagatgtttgaggaggctgaagatgctattcacagggatgactctagtgatgatgatgaaataggagacgggcaactatgtgttgtgtgcttaaggaagagaaggagggcagcttttattccatgtgggcatcttgtctgctgttccgaatgcgcattaacaatagagcgtacacctcatccattgtgccctatgtgtcgtcaagacatcagatacatgatgagggtttatgactcttgaggtatgctgctgataagatctacacgcttccttgctgacccatgcaaacctgaggagcacaactgttcgtcctgctgggcgttttcctagtcaaggtggcctaccctggatttgtgaatataatgtcttgaccctccaaattatgctcttgattgcctgggacaaatagcttagctgaagtcatgaactaacgtagagttattttttgtttgctttgcgcatatgtctatccatcatgtaaagcacagggtttactgcaaataggttaaagatttggacattttctgccatctgatcgt

SEQ ID NO: 156799 - DNA, 1420 bp, Zea Mays
agtagtagcgggcgacgcggccgcgaggcaggcaggtagaccacgccgcacgccagccagcggccagcgcccgccccgccgcgcttcggcattttcccattttctctctctgccgccgctccctcccgcggcggactcgataccccgcctctcctctcgcgaactagggggcagcgggcaggtgccggcaggcggctcgatcccttcctcctccctcgtcgcggggactgctgctgctgctgccgtgaccgcgagcatggccaccggcgccgttacgccgccgccgctggctggcgcgcggcgattcccccgtggacgaagcttcctccaccggcgcctcgctacctcgcctatgaaagatgaatctgtgatttccacagatggtggaaatgaggagacagacactgacagcctccatgttgctagaggattgtctcatcctgggctttcgtcaagtttatccaataaggcatcagtggtcccaacccctttgcttccttctggacaatctgatctccggttcaatcgtcttcgaccctcaattgatgaaagtgattgcaaatacaaaagattatttggctgctatgttgctcgtgaggctgtgatcgatgaggaatactggatcgctgcatggttgagagcagaagatcagtatgaaaatgagtcaggcaatcgctatgttgaaagctttaaaagaaagtttgcatcaaaggaattccatgcattaaagaagagatgcaacacacaacatagagagaagtatatctgtcttgtcgcggtaaagaacgatgacatcaggcgaactgtcctgaatagtgttgttggtaccttagatgtatgtgtaaggcatcctctatatggggagaaatttcctgaggagcctggaaaaccgtctcttcactgtcgaatttatcagcctgatcagccaaaatttgggtatgtaacaaatgtatgtgttgctaaatatgcaaggcgtcaagggattgctagcaacatgctgttattggccatagatgctgcaaaacttaacggtgctgaaaatatttacattcatgtgcataaagataacttaccagcatggaggctctatgatcagattggattcaagatcgttgatcaggatgacgattgtcgttcatcagacctgtgcttactctccttcagttcataaggcttgctgactagataggaatagaagggacatggcccctagttccatctccctgtccagggaaatgccatcagtcctcgcgatttggaaaggcgggatggtatgtgccaagtaataccttcaccaccttgtatatgatgaaagtgtttccaaatgtttgcggctttcgagattgtcactagatcggtggcagttcagatccaccagaatgtttgaggtatttgtatacatcaaaagcttctgtcgtgt

SEQ ID NO: 156800 - DNA, 903 bp, Zea Mays
gtacccgtggccaatggcgcggtggcccagcaccagcctcgtcgtctcgtacactggcagctcgtcactgtacgcggcgccgccgtccgggtcaacggccgcgaaattctcgaggtcgaacagatcggagctggcgtcgctgctctcgtcgtcgtcgtcgtcgccgctgtccacctccatccggtggagcagcatctgctccagctccggcgccaccccgaccggcaccgtcctccggcgctcgccgccgccgtcgctgtccaggaaccgcacggtccgcttcggctggccccgcgtggacggcgtctcgctgaggcaggagcgcgagcaggaggacgccgacggcggcgcgcgcctgccgctgaagatggcgttgaggaaccccgccagccgcgcgccggggccgggggacgccggcttgcggcggaggtccctcagcctggcgcggatgctgacgccggccttcttcttctccggcgcgagtgcgggcgcggccacggccaccgcggtggtggcgaggctcgtgcgtatgggccgcaggcgccggtgctgcgacgactccgcctccgacgacgagaacccgccgtagctggagcactgatcggaggagctcgacgtggtggcggcctgtggcccccggggcgccgccgccctgctgctgccgcggtagctccccgccgccagcgacgccttgtagtagtagcagctgtggcgcaggtcctggttctgcttcttggcggcggttgaggaggacgatgttaccccgtcgtcaggctcgtccatggacctgtatatggcgtcgaggagcgtggacgagaaggacggctggtcgccgtaccgccgcgccctccccgccgccggagccgccgctcccttgtccttgtccctccacggcctctccat

SEQ ID NO: 156801 - DNA, 390 bp, Zea Mays
atggcgccatggcgggtcagacgggaagatcccgttcggattaggggggaacgcggtgaggtcggaggcggctggggaggtggattagaggtggaggtggtgagggtgccaagcgcatcgcaaagacggacaggaatgggtgcgggatgggagagggtccggacgacgctggaactcgggggcgggggcatatggaggtgtggacgcgagcggagcggagacggaccttccatcgacagcgcagaggctgtctttccatcgacccagcgccattatagttgggtgaggaggcgagaaggcggggtgagggcgagggtggaaggcagcgctgatggcgtgggtggaggaggcgagatttccggggggagggggtcgagggagcgcgactga

SEQ ID NO: 156802 - DNA, 433 bp, Zea Mays
catatttgtgttcgtttattactgatgatgacatgttctttatctgatgagtcaaaacaagttgccacgataatcaaaagcatgctgcaactgtctttggagttacgatcatgatttcaaagtattggtgacacttgagatttaccagtaaatcaactcagtaatctgcaataccttataaacttctctcaggtggacgtaattagaacaaagttcgagggtaacatcaaagatttgtatgttttgcattcgaaatcttcaaaatatggggagcttggtctttcctgtttctgggggtatcagaactacaatgagtatcattctatgaaagtcagcaaagatatggacagcttctgtttttgatacgacatcttaagaccggaggtttgcctttatctgtggggaatagctcaccttttaaaccattggtggg

SEQ ID NO: 156803 - DNA, 877 bp, Zea Mays
ctgctgggtatctggttcagcaagtgcacacaagagctgatccatagtttcagaattccacgtacatcactcagacaccaagcatagttttgagtactatatatagaacattaagtgcaaacagcgacaatccatgaaaatccgatagcaacaagggttcgatttatgctaggctacggcgcaccatctcttgcagaaggctactctgaaacaggggtgccaacttagtactcgtggtcatgttcactggaagttggagttgcctccttgaccctggtagccagggctgccaccagggtagccaggattgccaccacccgaatatggcggtacgttggggttgcctcctcggtagggaggtggaggtggtgggttgcttccttggtagggaggtggtgggttgccaccttgataaccagtgttaccaccttggtaggcagggcctgggttcccttggtaaccaccttgataccccggaggtccaccttggtagccaggagcagcaccttgctggtagtgaggagcaccgccagggttgtagcccgtctgtgggttttgcatttggggctgatagtttggttggccaccaccagcatgtggtggttgcggagacatgttgccctgactatggtgggatggcatctggttctggccaggtggaggtggggggccattgaaaccttgggcaggaggcccatctctgttctggtagttttgcatgttctcccttctcctgtcaaagttccttgacctgtcaaagttgcgaggcctatcattgcgccggtttctgtcattggcacgggcattgtttctcacccactcttcatgatatttaggatcataaggaacagcttgcccatttatgaagggttcgcct

SEQ ID NO: 156804 - DNA, 2028 bp, Zea Mays
ttcttccctctctaattatctagaccactcagcaaacattcaatcaagcttgtggagacggaaactcacgacacacatcacaatgagccgagccgcaggacggcgccgccgatcggccggcgaccagattggcatggaaatggacatccgttggtggcgccggccgggagggcctttcccgtcaaaacggcaccaaaagtgctgtgccaccagcccaccactgacaaaccggacccacgacgtgctgatacccatccatccaccaacaactccccgctccggtgtccggtcgccgtcgcgactcacgcaacctcctcggctcgctagccgctacgctactatctacgtcgccacgacatctcccataagatggtagccgcagccgcagccgcagctgcagccacagccacagccacagccacagccacagccgccgcgctcctcgcccccggtctaaagctctgcgcgggccgcgcgcgcgtctcctctccctccggcctcccaccccgccgcgtcactgccatggcctccgcccccaactcctccttccgcccagaggaggcgcgctaccctcccgccctcgagctcccgatcccgcggctctccaagttcaaggtggcgctgtgccagctctcggtgacggcggacaagagtcgcaacatcgcgcacgcgcgagcggccatcgagaaggcagcctccgacggcgccaagctcgtggttctccccgagatatggaatggcccttactcaaatgacagctttccagagtacgccgaggacattgaagctggcggagatgcagccccttcattttcaatgctgtcagaggttgctcgcagtttacaaatcactcttgttggtgggtccatagctgaacgttctggcaacaacttatacaatacatgctgtgtctttggttcagatggccagctgaagggtaaacatagaaagatccatcttttcgacattgacattccaggaaagatcactttcaaggaatcaaagactcttactgctgggcagagccctactgttgtagacacagatgttgggcgcattggtattggtatatgctatgacatccgtttccaggaactagcaatgttatatgctgcaagaggtgctcatttgttgtgctatcctggtgcattcaacatgactactggaccactgcattgggagttgctgcaaagggcgagggctgcagacaatcagctgtttgttgcaacatgcgctccagctcgagataccagtgcaggctatgttgcttggggacactccactcttgttggacctttcggagaggtgattgctacaacggagcatgaggaggcgaccataatagcagatattgactactcactgattgagcagaggaggcaatttcttcctgtgcaacaccagcggcgtggcgatctctatcagctggtagatgtccagagactgggttctcagtagcgagcctggatgcggctgtgtgcccgctctgcaggcttgctcgtactacttcggctctgcaggcttgctcgtactacttcgttcatgagatgcatgtctatgggttctagagatcgaccaacatgatgagtgaaggcggagaggacgcaataaggcgactgtagttgtaccttcagtggtgtctccagttgccaaataaattggttactttaacgtctgaagaaaacctccctccatgggacgaagataaaacggaggactgcgacttccctttgggcccgactagtttgaagtttgtactagcttcgggggtgtctgggagtcaagttttttttcacagttttggtagaatactgtagtattctcgaatactacggtattatatacaaaatgttgtttggcaatctagataaaatctatgtttttaaaactgaagtattgcaaataccttagggcatgtttggaaatgcggttttgaaatactgtagttttgagataccatagtttataattgtacatgacataaatactacggtattgctttaccacagtaaaactacagtattgctc

SEQ ID NO: 156805 - DNA, 1402 bp, Zea Mays
ttcttccctctctaattatctagaccactcagcaaacattcaatcaagcttgtggagacggaaactcacgacacacatcacaatgagccgagccgcaggacggcgccgccgatcggccggcgaccagattggcatggaaatggacatccgttggtggcgccggccgggagggcctttcccgtcaaaacggcaccaaaagtgctgtgccaccagcccaccactgacaaaccggacccacgacgtgctgatacccatccatccaccaacaactccccgctccggtgtccggtcgccgtcgcgactcacgcaacctcctcggctcgctagccgctacgctactatctacgtcgccacgacatctcccataagatggtagccgcagccgcagccgcagctgcagccacagccacagccacagccacagccacagccgccgcgctcctcgcccccggtctaaagctctgcgcgggccgcgcgcgcgtctcctctccctccggcctcccaccccgccgcgtcactgccatggcctccgcccccaactcctccttccgcccagaggaggcgcgctaccctcccgccctcgagctcccgatcccgcggctctccaagttcaaggtggcgctgtgccagctctcggtgacggcggacaagagtcgcaacatcgcgcacgcgcgagcggccatcgagaaggcagcctccgacggcgccaagctcgtggttctccccgagatatggaatggcccttactcaaatgacagctttccagagtacgccgaggacattgaagctggcggagatgcagccccttcattttcaatgctgtcagaggttgctcgcagtttacaaatcactcttgttggtgggtccatagctgaacgttctggcaacaacttatacaatacatgctgtgtctttggttcagatggccagctgaagggtaaacatagaaagatccatcttttcgacattgacattccaggaaagatcactttcaaggaatcaaagactcttactgctgggcagagccctactgttgtagacacagatgttgggcgcattggtattggtatatgctatgacatccgtttccaggaactagcaatgttatatgctgcaagaggtgctcatttgttgtgctatcctggtgcattcaacatgactactggaccactgcattgggagttgctgcaaagggcgaggtaataaatgagtttgaacctcaagttatgatgattatgcaagggaaatatagcgagttgaaatggtcacactttatttttgttaattagcatatctaaaagtagttcaaaacaagtcagaaccttgatcagaactcataattcttggaggtaatttcatatctgaaatgtttcactgctactttgccctgtgctgatgacat

SEQ ID NO: 156806 - DNA, 1762 bp, Zea Mays
tggccacgacaccaaccttccgtataaatatttcacttaccccctcgggatcccgaagaatcgcacactctgcgctgcttcacactactactagtctactaccttttttccgtctcgagaggacccggaattgctctgcttttctgtcctcggttggggtttctgctcgtcgtcgtcgtcccaggaggagcttctctgtcgtattggtggccggagtagagcaccatctgcagcgccgacggccgagatggttgtgcatctggctctggtttgggttgcagtctcgcgaggttcgatgcagttttgctaggcgacagttgctggtacctgctagtagtatatagaggagcttaattggaaggaagcagtactggaggaaacgatgagcttcggtactgtgggcatggaggaggagagcggcgccgcggcggcggccgcagcggcggaggagatccggcggctgccggccgaggtgaactgggagatgctcgacaagtcgcggttcttcgtcctcggcgcggcgctcttctcgggcgtgtccgcagcgctgtacccggccgtggtggtgaagacgcacctgcaggtggcgccgccgccacaggcggccagggcgacggccgccgccatcctacggcgggacggcctgcgggggttctaccgcgggttcggcgcgtcgctgggcggcacggtgcccgcgcgcgcgctctacatggcggcgctcgaggccaccaagagctccgtcgggccggccgccgtccggctgggcgtgtccgagcccgccgcgtcggccgccgcctccgccgcggcgggcgtgtccgcggctgtcgcggcgcaggtggtgtggacccccgtggacgtcatcagccagcggctgatggtccagacccccgcgtgctgccgctaccgcggcggcgtggacgcctgcaggaagatcctcctcgcggacggcgtccgcggcctgtaccgcgggttcggcctgtccatcctcacctacgcgccgtccaacgcggtgtggtggtcgacgtacgccgtggcgcagcggtgcctgtggcgcgccgtcgggcccgagcgctccgagagctgcgcctccctgatggccgtgcagggcgcgagcgcggccgtggccggtggcgccgcggcgctggtgaccatgccgctggacaccgtgaagacgcggctgcaggtgatggaggcggacgcggcgcggcccacgctcgcgagcaccgtgcgcgggctgctcagggagggcggctgggcggcgtgctaccgcgggctggtgcccaggtgggggtccatgtcgctgtccgcggccaccatggtgaccacctacgagttcctcaagcggctctccgccaaggacggctccttgggctagatccttcctttgccgccctcgctataaccgtagcgatcgtcaagcgactcctgccgtcctccaagtcgatggtcgatccgcggggatgggtggttaattaggaccctctctcctatcttgtacatattgctcaccaggttatttgccttcgttcttgttttcttgatccggcgctatagagagtgggcactgggcaggaagaagaagaagaagtagagggggttttaggatgcaaaattttgctgtgggcctgtgggcctgctgcttttgatgatgatgaaaacattgtgtgaagtgaagaacttctactgttccaaacttgcgtcgatgtccctgttcagtactagaatgacctggatctgccgatgggcgtagtatgtccgcgtt

SEQ ID NO: 156807 - DNA, 100 bp, Zea Mays
cgtctgatgacaaaactcgaccattatcgtcgtcccattttctgcggaaggatacaattaataggtgttaggattctagctgcatgaaactgaactgcta

SEQ ID NO: 156808 - DNA, 1206 bp, Zea Mays
catttcgaagctaggttaggtagctcctgcttgcattggcgttcaaaataaaccctcctccgactccccacgcagccacgctcgctggtccgatcccgtccaatggagagctacggccacaagcgcgcgtggaagaaggaaccgacgcgggggaagggcggcccgcagaacgcggcgtgcgagtaccgcggcgtgcggcagcggacgtggggcaagtgggtggccgagatccgagagcccaacaagcgcgcccgcctctggctcggctccttcgccaccgccgaggaggccgcgctcgcctacgacgaggccgcgcgcaggctctacgggaccgacgtcttcctcaacctgccgcacctccgcgcctcgggagtctccgccgccggcgccggcaacgcgcacgagaggcttaggtggctcccagctgcctccgccagaggcgccgccgtcccggcctacggcctgctcaacctcaacgcgcagcacaacgtgcacgtcatccaccagaggctgcaggagctcaagaacaacggctcgcccgccgatcatctccctgcagcggcctccacgtctccctgctcgaccgtcaccacccgcgcggctgcggccttgcctgcgcccatgtcctgcttccacgccctggagcaggcggtgaccacggtcgccacgaggacgacggtcgacgacgctgagccgtgcgagggcggcgcctgcccgtccggtgcggacaagccccagatcgacctcagcgagttcttgcagcagatcggcgtgctcaacaacaccgacgacgacggcatcaggactactgctaaagccagctttcgcggtgatgccgcggaggctggctgcttcggcggcaacggcgagttcgactgggacgcgctggcagcggacctcaacgacatcgcgggagcaggagtccatggcggcgtcaacggagggtttcagatggacgatctgcatgagcatgaggtcgagcagttcgggacctgcctgcccatccctgtctgggacgtgcagtagtgtggtgtcaaacgagtccatgcaatgttgaaatatcccgcccatctgcatgctgcacgtggcaccgcctttccctagcgcacaagctttagcttccaaattcatgtaatcgattcagaatctggtgggttgatgatgagtttggcatgatgatgaatttgtgaacaattgggcctacta

SEQ ID NO: 156809 - DNA, 2640 bp, Zea Mays
gatgatagtttgaccatgttcgcaatccgttcgacgaaatgccctgtggcatttgtgggcgtagctggcaccttggtggtgcttatcaccgctgtccatgtgttcatggtgccaatacttcctgcctccttctattacttcggttctcgcagcagtataagccacccaaagaatgtcctcccagccgtcgaggtggttgactcgcgcctcaaggggtgtttcccttctgattcatatggtgctgtggcattccgaggcgcgccatggaaggctgagattggtcgatggcttgctgggtgtcatgctaactcttcgtctgttgatgttactgaggccatgggtgcaaaacgctgcgtgaaagactgcagtgctcgtggtgtttgcaactataatctgggagagtgcagatgctttcatggatattctgggaaaggatgtgaggaggttctgaacttggaatgcaaccttccaagctccccagaatggcctgtaggtcaatggatagtttccatctgtgcagctcactgtgataaaacaagggcaatgtgcttttgtgggcctgggacaaaatacccagatcgtcctgtggcagaagcttgtggttttaaaacaattttacctgcaaaacctgatggtccaaagcttactgattggaaaacacctgacctggaaaacatacttacaacaaacagcagtaagttaggatggtgtaatgtggtccctgaggacgcatattcatccaaagtgaagtttaaagaagaatgtgattgcaaatatgatggtctctgggggcagttctgtgagacacgtgctgaatgcagctgcatcaaccagtgctctggacatgggcattgccgtggtggtttctgtaaatgtgacagtggatattttgggattgattgcagtatcccatcagcatattcgcttgcatatgactggccctcgtggctccagacaccagtgaatttaccagatctgaaaactttgaacagtaccaccattggtgttaaggccgttgttcagaaaaaaaggccactgatatatgtatatgatttgccagctgagtttgacagtcatcttcttgaaggacgacattacagattccagtgtgtaaacagaatatatgatgacatgaatagaactatatggacccagcaattgtatggtgctcagatagcacttcatgagagcattcttgctagccctcaccgcactcttaatggggacgaagctgattatttctatgtgccagtgcttgactcatgtctaataactagatccgatgatgctccacatcttctattgccgagggacctgcgccgaaggagctaccatgcacttgagtactatagaatggcacatggtcacatagctcagcagtatccttactggaaccgcacttcgggaagagaccatatctggttcttttcatgggatgaaggtgcctgctatgcaccaaaagagatttggaagagcatgatgcttgtccactgggggaacactaacacaaaacataagaattcaacgacagcttattgggcagataactgggatgatattcctttggataagagaggcaaccatccatgttttgatccaagaaaggatctagtgcttccggcatggaaggaacctaacccaggggccatatggttaaaactgtgggcaaggccaaggaacaaccgtacaacacttttttatttcaacggtaatctaggttcagcatacgaaggaggccgtccagaagacacgtatagcatggggattcggcaaaagctagcagctgaatttggttccacaccaaacaagcagggaaggcttggacggcagcatgcggccgatgtgacagttacctatctacgaactgaaaaatattatgaagaattagcaagctctgttttttgtggtgtcctgccaggggatggctggagtggccgtatggaagatagcatgcttcaaggatgcattcctgtaataattcaggatggaatttttctgccatatgagaacgtgctcaactacaatagttttgcagtccgcatacaggaagatgacatcccaggcctcataagcacactccgaggaataaacgatacgcaagtagagtttatgctgggaaatgtccgccagatgtggcagaggtttttctatcgagactctatattgttagaggcgcaaagacagaaaaaactcttctctgaagaggcaccctggtctgttgaggtatcgaaacttcctgatgacgacgatgtctttgcaacgtttatacaggtattgcattataaactgtacaatgacccttggcgtcaagatttcctgcaaacaaaggatactcggctgccgaacatctgttcaagaacttcctgaagcatttagtcaggcagcattgcaactgtaaagaataagcatatattcttaggaacaaaagtacaaaactgtagatatttcttgcattctggacaattgttcttttgactgatagcccaatttaattagaccatttcctgaaaaaaaagaaaagaaaaatgcactgttttcatctatcaaaacatggatagcatacatcgcatttacagctctggtgtttgcaatcccaagctacatcgatttttaccgagaaagaattggattttgtcgtcc

SEQ ID NO: 156810 - DNA, 966 bp, Zea Mays
ccgtctttgtcctcgcgtctgctccggtcgcaggaggcaggatcgctcggctgctccgtcctccgtccgcacggccccgctccctgctgccgccacgcgaccatcgccgcagccacctcaccgagcacccccgtgcgccggtcctgccaccgagccctccacgaccccgtggccgcgcccggccccggtcgcaccgcgctccgctggaccccagtaccatgtctccaagatccactctgaccttgtaggaacaccaattccaacgattctgacggctcgcgctttcatcgaagagttgatccttgtcaggcttgtgatccgcagccgcctctgtctgatcctgctcagctctcgccagccgccgctccgccggaggcctcacgctcctcaccgcgtccgtgcttaccctgaccccaccctcacttggctcccttgaactacggcgtcatcatcgacgccgacagcaggggaagcgcgtctccgcctgatgcccggatgatagtttgaccatgttcgcaatccgttcgacgaaatgccctgtggcatttgtgggcgtagctggcaccttggtggtgcttatcaccgctgtccatgtgttcatggtgccaatacttcctgcctccttctattacttcggttctcgcagcagtataagccacccaaagaatgtcctcccagccgtcgaggtggttgactcgcgcctcaaggggtgtttcccttctgattcatatggtgctgtggcattccgaggcgcgccatggaaggctgagattggtcgatggcttgctgggtgtcatgctaactcttcgtctgttgatgttactgaggccatgggtgcaaaacgctgcgtgaaagactgcagtgctcgtggtgtttgcaactataatctgggagagtgcagatgctttcatggatattctggttgatcttacttctcagtattcactttctattaataagagtcca

SEQ ID NO: 156811 - DNA, 1565 bp, Zea Mays
attggaactttgctttctaaacgaggaacaggtgctgatctatttcttgatttgcggcgctgcagattgccagcatccgaagacggccgaggatttcttcaagctgagccccagccccaagggcaagctgctgcgatcggtttccgccatgctgccgttcgccgaaagggacgccaacgccaccaacctcagggacggcagtagcaacctcaagtggcggggtggcggcgccgttgctgcctccacgccgccgaagccaaaggcagcgcccaagaagaggttccaggaggatagcgagaaccatgaccctgcgctggccacgccgcccccacggcaggcgccaagtaggccgccgttcggcgcccctcggtggaacaagaatgccaaggaggccatcaagtccagtgcggagaagcggccggacaatgctgagaaggaggcgctgctcaataagcacgtcccgccgaggcagctcaagagcaccctctcagcgaggaacctcttctctggaaaggatatacttggccagatttcggagttctacgatgagctgaagcggatggttggtggtggcgtcggccggcctgtcacagacacacaggaggagcacagctcagacccagtgaatccgagctatttgatggagaaggtggctcctgatgagacagtgaaggaggaggcgagacaagaaacggcgaaaaagagtccaagcccaatgaagggaaagaaagtggggctgaaggtggaagcagggaagcaaaggtctccctctgtgctgaaggaggtgagggcaacgccgccgactccacagcggtttctatccccatcgccaaaccgcattaagaatgttaaacctggagggatgtccacagcaggctcgccactcaaaaaggcaccaaaggagaaggggacacctagtaaggacctggagagcaaaaaagatgctgtgaggcaaccctttggtgttaaggatatgaacaatacaagagcagcgtgtgatgcagaagggagctccagcagcatgttttggttcttgaagccctgcactttccttgtggagtagcgtcataacactacaattttttaacgagcaacacttgatatagttagaatccattacttcattcatttccaaatattctctgttcctatttgattgattcatttcatgggtactctatacgggaagtaaacaaaaagaatcatgtatagtcatacaggttgaaagtcttctccatatgtataattcgagatatagcaaaacgtggttctgctgctttgtcgtttgttcaaataaactgcatttttttgtcccttgaagtgatatactgaggttatacaattcaactactacttatcagttcgaaacagtttgaagtgcaatctatatacattccttgggggtgatataagtcgatggtctgtttcttaattcatgaaggtttgtgcctgccacattggggatgttgtttctgtttcttcaattgttttggcacaaggatactttgtagtcctaagttgtaacaatgtggattcactggtctgtaaggaagtgcaagaattct

SEQ ID NO: 156812 - DNA, 1207 bp, Zea Mays
agacctacgagggcatcgaggccccgcactgggccgacctctccgaccccaacgccggccgcgccgccgtcgacgacgaggcctggttttgccgccccgattgccagcatccgaagacggccgaggatttcttcaagctgagccccagccccaagggcaagctgctgcgatcggtttccgccatgctgccgttcgccgaaagggacgccaacgccaccaacctcagggacggcagtagcaacctcaagtggcggggtggcggcgccgttgctgcctccacgccgccgaagccaaaggcagcgcccaagaagaggttccaggaggatagcgagaaccatgaccctgcgctggccacgccgcccccacggcaggcgccaagtaggccgccgttcggcgcccctcggtggaacaagaatgccaaggaggccatcaagtccagtgcggagaagcggccggacaatgctgagaaggaggcgctgctcaataagcacgtcccgccgaggcagctcaagagcaccctctcagcgaggaacctcttctctggaaaggatatacttggccagatttcggagttctacgatgagctgaagcggatggttggtggtggcgtcggccggcctgtcacagacacacaggaggagcacagctcagacccagtgaatccgagctatttgatggagaaggtggctcctgatgagacagtgaaggaggaggcgagacaagaaacggcgaaaaagagtccaagcccaatgaagggaaagaaagtggggctgaaggtggaagcagggaagcaaaggtctccctctgtgctgaaggaggtgagggcaacgccgccgactccacagcggtttctatccccatcgccaaaccgcattaagaatgttaaacctggagggatgtccacagcaggctcgccactcaaaaaggcaccaaaggtgaatccagcatggctctagtatttgcttactcagtgtccatggctttagatcatggagtttacttggtgaaattttcgttcttaatttctggcacttcaaattcttcaagggcatctaatgttcacaagaagcatggtcctcttttgtaaatcttagtatggaagaataccttagcgtgactacggactaaaaacttggccgaagagggaaagaccgccctcccggtattatattaaaaagagactgaaacatggtctcggatgagaaaa

SEQ ID NO: 156813 - DNA, 1352 bp, Zea Mays
agccagcggccatgcatatgcatgcatgatcaacccccgcccggccgcgccactctactactaatccccgcgcttctcgtcacactctcctctcctgtctcctcccagtcccacttggccacttcactacactgtacactctccactcctccaggccgtgtttcgacgaagctagctagctcctgcttgcatcggcgttcaaaataaaccctccctccctccctcctcatccaatgcagagctacggccgcaagcgcgcgtggaagaagggcccgacgcgggggaagggcggcccgcagaacgcggcgtgcgagtaccgcggcgtgcgccagaggacgtggggcaagtgggtggccgagatccgagagcccaacaagcgcacccgcctctggctcggctccttcgccaccgccgaggaggccgcgctcgcctacgacgaggccgcgcgcaggctctacggccccgacgccttcctcaacctgccgcacctccgcgcctccgccgtatcctccgccgccgcgcaccagaggctcaggtggctctctgcctctgccaggggcgccgccgccgtcccggcctacggcctgctcaacctcaacgcgcagcacaacgtgcgcgtcatccaccagaggctgcaggagctcaagaataacggctcgccagccaagccgccgccgtcgccgtcgctgcgcgtttctccttctgccccgcacaagcagctcgccccggccgatcatctccctgcggtggccaccacgtctccctgctccatcgtcgtcgtcacccacgtgcacgcggctccggccatgtcctgcttccacgccctggagcagacggtggccacggtcgccatgaggacggtcgacgacgccgagccgtgcgagggcggcgcctgcccgcccgccgcggacaagcctcagatcgacctcagggagttcttgcaacagatcggcgtgctcaacaccgacgacgacggcatcacggctactgctaaagccgcctttcacgccgccggtgatgccgccgtgtcttgcttcgtcagcggcaacggcgacttcgactgggacgtgctggcagcggacctcaacgacatcgcgggagcccacggcggcgccaacggaggggttcagatggacgatctgcatgagcatgcggtcgaccagttcgggacctgcctgcccatccctgtctgggacgtgtagtagtgctagtgttatacgagtccatgcaatataataatgttgaatatcccgcccatcagcatgctgcacgtggcaccgcctttcactaattgcccccatcagcacgcttcaaattcatgtagtctgaaaatctggcggatgataatgagt

SEQ ID NO: 156814 - DNA, 717 bp, Zea Mays
gttgaagatatagagcatgcactcatcatatctaagtgatcggagtgatattgattggcttattagatggatattggcccagtttatctttcattttttctatagctgttagaaatttactttgctcatagttcatactataattaatatgagactcttgttttgtggtccaagtgttcagggctcagggtgccttggaagtacgctagcttgttgtcatgaagaagtcattcaagttccttccagggagttattagttcatatgtatatttctgtttatatcttatcttgtttatgtttagatttatatgagcagcaacttaatgattgcaccagctgaagttggtgcataaggctgcaacaccatctagtggaggtagataaggcatcaaaactgtatttttatttgcaaatgcagcaacaatatactaatttgatgtacttttttctagtggtgttctggacaaagaaagcttgtaccttaaaacaggaggatacaagaagctggagtggttgtctgaaggcttttgaactgcttgaagcattagtgtagctttggtgcttttatgactaatcagctctggagcagctagagtgatatagttgtgggcttttgaacaatagttggagtgatataaaacattagtgatctagttgtgaatgatattattattgtgatgcttttgtgaatatataattgtggtgcttttgtgttta

SEQ ID NO: 156815 - DNA, 1382 bp, Zea Mays
tatcaaccgcatcctctattccagttcttctccacctcgtcctcgtgccttctcgcccgcccccccaaaattcacccggccaccctctaccaccacgtcggcgcgggtagcaagcagttggtctcatcgtcctcgcacctgacaacgtcgcggttcgcgctctcgcctcgtgccgcgcgcccattcctcgccctcgtctcctgcgagttcccacgccccccggtgccgccaccccggagccagtcctcgccgcattgttcccctcctcctggtgatcccgcaccgcgctgtgtccgctccatcttcctccgccgccacgctcatcgccggttcatgtttcatcttaaggaatgaccagcagtcgacaaatggaactgcactacataaacactggatttccatacacaatcaccgagagtttcatggatttctttgagggtctcacttatgctcatgctgactttgctctcatggatggctttcaggatcagggtaatccgtactggacaatgatgcatacaaactcatacaagtatggatactctggttctgggaactattacagttatgctcatgcctatgacattgacgattacatgcatagaactgatggtgggcgcagaacatgggataacactacacctgtaaacaatgtggattctgccaatgttgtcctgcagggtggtgaagctccccgcacaactgcaaatactactagtgaggattgcatccaacaggtacaccaaagtccgggtagtcctcaggttgtttggcaagacaacattgaccctgacaatatgacatatgaggaactcttggatttgggtgaggcagttggaacccagagccgtggtctctctcaagaatgcatttcattgcttcccatcactaagtataagtgtggattcttttcaaggaagaaaacacgccgtgaaaggtgtgtgatttgccaaatggagtacaggagaggaaatttgcagattacgcttccatgcaagcatgtataccatgccagctgcgtgacaagatggcttagcataaacaaggtatgccctgtttgctttgctgaagttcctggcgaggattctctgaggcaatgattcatcagttgtgatgccactatgaagttgctgctctgggtactgcgcccccaatggacgcatgatttctgctttgaaggcagcttgttgtccccactttagaattgtgtattagcgccatattaccaaataggttattacttatcagatgtatttaggtagtgtttggtttcagaatatggtaggatggagtcactttgctcctaatttattgttgtttgaattgatttcatgtaggacatagtaactctaaaaatggaaaaactatgcttaaatactgaa

SEQ ID NO: 156816 - DNA, 255 bp, Zea Mays
atggcggacatcgcgttgctggtggcggagcagttcgagaagacggcaaggcgaggcgcccccggcggggacagcggcagcagcagcgggagcggcggcgagacaaggaacttcggggccgtggccaaggtgtggagctcgtgggtggagtccgcctccgccgccgcgtccggggtcagattcaccgtcgcggtgcagctggagcccaagaccgggctcgcgctggccgctgccgacggcctcttctccgcctag

SEQ ID NO: 156817 - DNA, 3075 bp, Zea Mays
atggcaggtagcactgtgttccctgtgctgcgctcctccgagtacttcacaagtccgtcaattgatgagctggtagagagggaggtggctgatcctggctactgcagcagggttccaaacttcatcatagggagggctggatatgggcaggttaggttcttgggcaacaccgatgtgaggggcattgacctgaatgaaattgtcaggtttgaaaaacactatgtggtggtttatgaggatgagacttgtaagccacctgtagggcatggtcttaacaaagcagcagaagtatccttgctgctgaatccgaaggatcatccggagcccagtatccttgttgaagtgctaaggtgtcgtgcaagaaagcaaggttctaggtttctttcattcaatccagtgaatggaagatggaaatttgaggttgatcattttagtagatttgggcttgtggatgaggacgaagaggatgctgtgatggacgaggcagctgttcggcagccaattactgaagtaagagaaagagatccaccttcaaatagttatgagattgagctctcacattcattgcctgctcatctcgggcttgaccctgcaaaggtgcaagaaatgaggatggtgatgttttccaatgaggaagaagatgaatacatggaggatgggttcccttctgacaagaggtaccttagcagagaaaggatgaatgtggattcacctacctcaagcagtaaaggttcgaggttaaggtctctctctcccttgcacatgtcttctcagaaggctggcaggagatctggtatgcctgttcggaaagaacgtcaggcacttttggaatacaatttgaattcttcagagcttggttcatcgaatcagggtattcttatgtctgggcaaaacagaggatttccagtgagtatgaccaaggtggaaggctttaagctgccgcctgagcaagaaactcctgttgctggaaacacgtatactgtctgtgtagtggatgctgctttattcatgggtagatcatttcgtgttggttggggaccaaatggtttacttgtacattcaggtagtctggtcaatagtcctggaactggcctatcttctgttattcacatagagaaagttgcaagtgacaaagttgtgcgtgatgataaggataagattaaggatgacctaacagaactatgtttttctgctccaatggacctccataagagtcttgatcatgactttctagagactgagtctgactcgttcagattgaagcttcaaaaagtcatgacaaatcgtttggttttgcctgacatctgcaggtcatatattgatatcatcgaaaggcagcttgaagtcaatgatttatccatgtcttcacgtgtgctgttgatgcatcaagttacagtctgggagttaattagggtcttgttctcagagagagcaactggtagccagttggactctgttggtgatgatgatcaggaaggcatggttttagacaaaaaagaaggctctgtcgacatagaccctgaagcactccctttgtttaggagagcagattttagcaattggttacaggacagtgtttgccatcgggtccaaggagaggtgggttccttaaatgatgccaggtacttggaaaatatcctcgtccttttgactggtcgacaattggacacggccactgaaattgctgcctcaaggggtgatgttcggttggcaatcttgctaagtcaggcaggtgggtcaatgtcaaatcgatctgaccttgcgcaaacactggatcagtggaaaatgaatggtctagattttgattatattgaggaagactggttaaaggtatatatgttacttgctggtaacgtacaggccgcttttctagatttaccaattgactggaagaggtaccttggtttgattatgtggtatcaattatcacctgatacaccactcgatattatcattcgttcttacgatcaactccttggtgagggcaaagttccctatcctgttcctgtatatatagatgaaggacctcttgatgaagcacctcagtggtccccgggtgaccattttgatatctccttctacctaatgcttcttcatgccaataaagacgagaagtttgggctgctaaagactatgttcagtgcattctcatcttcattcgaccccttggattatcatttcatatggcatcagcgttcaattttggaggctgttggagctttcagttcaaaagatcttcacttgctagatttaagttttgtttatcaattgctttgtcttgggaggtgccattgggctatctatgtcattctgcacatgccgtatcttgacgatgccccatacattcatgagaaattaatcagggaagttttatcacagtattgtgagtcatggagtagagatgatgctcaaaggcaatacattgtagaacttggtataccagaagaatggatgcatgaagctctgtgcatgaaaattattacacatgaagcatgtgtagctaatgagctctatatacaggctctttatcacgaatactatggagataaacagggtgcactggagaatttgattcagtgtggcaactggaagaaagctcacactattttcgtgacttctgttgctcattctatgtttctgtcatctaaccatcaggaggtctggaggatcacaagtgccttggagaaccacaagtatgaaattgctgactgggaccttggtgccggaatatacatagacttctacgttctgaagaactcaatgcaagaaagaaatgccatggatgattcggattcactcgaggagatgagtgaatcatgcagaagtttctttggtcgattaaacgaatcgttgttagtctggggaagcaaattacctgttgagtcaagggcatgctactcgaagatggcagaggagctatgcgcgcttctggtggacaccccaagcgagacgctgaacctacccatggggtgtcttctgacgatgctcaacgctccagttccagacgagagcaggtcgtcgtacctgcaggatgcactctccgtcttcaccgaaatcctttgcagcgatccgtag

SEQ ID NO: 156818 - DNA, 1105 bp, Zea Mays
ccaagcccataaaagatccaacacgtacactgcataaataggcgagcagcgggagagagacgaccgacgaggacgaagaggaattaagccagcgatcgaggtggtgtagtgtagcttccgagcgaagctcctaccgttgccgccggccggagatatgtcgtcgggcggccgacgtggcaggatcagcgacgacgagatcaacgagctgatctccaagctccaggcgctcctcccggaatcctcacgccgccggaacgcgagccggtcgtcggcgtcgaagcttctgaaggagacgtgcgcctacgtcaagagcctgcaccgggaggtggacgacctctcggagcggctgtcggggctcatggagaccatggacaacgacagcccccaggccgagatcatccggagcctcctccggtgactccaggtccaggttccagccatgcatgccgcttgccgccccggtcgtccggcgcgcgcggccgccctcttctgctgcctgccatctagctagctgccgcagccagcgcaggtgcactggagattggagaaggagaagacgacgacgcacggccgagcttgtttgttcgctcgtttatttgttacggcgacgaccttaattgtgttcctttgtttttaatttgttctcctcctcctcctcctcctcattcgggtgcgtgtttgtttccgtgttgaattagttcaagagcaagagcccttgctcagaagaaggcgaccaagtgctctactcgatcttctcgtgtaccacgccagggggggttagtagagtagagataatatatggacttctattaaccaactaataccacgtactggtaggttgtagttgcagtagactactggtagtagggtgtagttttgcagtagactacagtagcagctctacattgcagatgcgtccaaagagttgttgttgttctgtagattgcatgctgctcttgtctctgtcctttagcttacgccaatgggcggcggacaaggagctgaacgacgaccactctgtctggtggagacaaatatatacactatcacgtgattttcctctctttagctccatcctgatgtaacttggtaatttactccatcc

SEQ ID NO: 156819 - DNA, 264 bp, Zea Mays
atgtcgtcgggcggccgacgtggcaggatcagcgacgacgagatcaacgagctgatctccaagctccaggcgctcctcccggaatcctcacgccgccggaacgcgagccggtcgtcggcgtcgaagcttctgaaggagacgtgcgcctacgtcaagagcctgcaccgggaggtggacgacctctcggagcggctgtcggggctcatggagaccatggacaacgacagcccccaggccgagatcatccggagcctcctccggtga

SEQ ID NO: 156820 - DNA, 1287 bp, Zea Mays
atgatgctggaagggaagtcctaccttgttccgcgctccctgctgagctcctgcgagacggagacgcagtgggcgtacctcgctcacgaggtcctcggcggcaagcgcccggcgccggaagacgtcgaggtcgaagacctcgacgaagctgacggcggcggcaagcgcagcaagccgccgtctccgcagccgcacacgccggacatctccgagggtcgcggctccagccgccatgcctccggttgcggagagcagcagggcactgggagcaaccccatgaattcaatcggccgtgacctgaccctcaattgcctcctccggctatctcggtccgactacggctcggtggcctccctcagccgggacttccgatccatggtccgcagcggggagatctaccgcctgcggcgccagaatggggtggccgagcattgggtctacttctcctgcaacgttcttgaatgggatgcctatgacccatatcgagagcgctggatccaagtgcctaagatgccgcctgatgaatgcttcatgtgctctgacaaggaatcacttgcagtgggcactgaactgcttgtgtttgggatggcacgtattgtcttcagatacagcatcctaaccaattcatggaccagggctcatccaatgaactctccgcggtgcctgtttggttcaacaagtgttggggaaaaggccttcgttgctggaggcactgattctattggcaacatactgagctctgcagagatgtatgactctgagacacatacctggacgcccctcccaagcatgaatagggcaaggaagatgtgttctggggttttcatggatggcaagttctatgtgataggtggtgtggctaacaacaacaaattgctgacttgtggggaggagtatgacttgaagaggcgttcctggaggataatcgagaacatgtctgaaggcctcaatggagtgactggtgctcctccccttattgcagttgtcagcaacgagctatacgccgctgattacagcgagaatgacctcaagaagtatgacaagaagaacaacaggtggatcacccttggaaaactgcctgaacggtctgtgtcaatgaatggttggggccttgctttccgagcctgcggtgactgcctgattgtcatcggaggtccgaggacctacactggccgtactattgagctcaactcatggaccccaaacgagcggccgcctgtgtggaatttgattgccaggcggccatctgggaacttcgtgtacaactgcgccgtgatgggttgctga

SEQ ID NO: 156821 - DNA, 597 bp, Zea Mays
atggctacgaacaggcatcacaggctgctggcggcgctagctgacgacgagggagccctcagcggcggccatggagcggcagtagtcggcgacctcgcggaacctgggcacgctcctgaggtcgaccttggtgccgtccctgagcgtgatgacgatgtcgccccactcgcccacgaaccgcggcacgaccaccacggacgtgacggacgagtaggggaagtcggtgcggtcggcgccggagagccccgagaccaccgtcacgcgccgggaggtgaagcggtaccgcaggatgaacgcgcgggacacggccgccagcgtcagcggcagccacagcagggtcagccccaggagcaggttcgccgccaggtcgccgtagtgcgcgccgccgtcgaagaacaccgtctcggcgtcgccgccgccgcgcgcccccgaggcggcggcgcgcgccacggcgagccgggaagcggctgcggcgccagctgatgagcgccgcctgatctgcgggaggggtacggggtggaaggatacggccggaggcggcgtcgggcggataatggaggagactgccgcggcggtggacggaggcggcatggctgg

SEQ ID NO: 156822 - DNA, 2954 bp, Zea Mays
ggctcttccgatgattcagccatcacaatggcatcctcctcttccttggcctccgccaaagccctagcacgctcccacgcgtccctcctcgcgccccaaacccagagaacaggtacccggtgtctcgctttctttctcgcaggattctctcgcccggtccctcagtccggtccgtgtctcgcggctccgtgcgaccgtgccgggcaattcaagctgctccccttcgacgatccgtcttccgccgtcactctgccgatggcttctgcacttcagcgcctgtatgtatctactgaatatgagcttggactttgattctcgtgccgtgatgcagtggtcgcgccagcgccgtcgcgctcgcgccgcgcctccgtcaggatgcgcgcctctgctgccgcgccggcggagccgaagaagaccgtctgggtgtggaccgagagccggcaggtgatgacggcggccgtggagagggggtggagcactttcctcttcggatccaaagacctcggcaaggactggtcatcaaccgctcgcataaatgctctcttcattgacggtccagggattttcgatgaggagaaccagaaggttgctgtaatttcacaagtctcttcgcccggtgaacttgaccttgtacaaccggacaacgccgaagccgagaacattgtcatagactttcgaggtggctggcaggttatacgggcagaaaatatagttgctgcattccaaggatgtaaaggaaatgtattggctgtatcaacgaacacaactgaggcgcaagtttttcttgaggccttggagcaagggcttgatggagttgtacttaaagtagatgacatggatgatatcattaagctcaaggattattttgatcgaaggaacgaggcaaagagtcaattaccattgacaaaggctactgtaacaaaggtcgaggttgttggtatgggtgatcgtgtttgtgtggatctttgcagtatcatgcgacctggcgaaggccttctggtttgtgttggatcgtatgccagaggaatgtttcttgttcattctgaatgcttggagactaattacattgcaagcaggcctttcagagtcaatgcggggcctgtacatgcatatgtcaccgttcctggtggcaagacaagctacctctcagagttggggtcaggaaaggaagtcatcgtgatcaatcagagtgggctatggcgtactgcaattgtcggtcgtgtgaagatcgaatcaaggcctctgatccttgtagaagcgaaggataactctggagacgagacgtatagcatttttctacaaaacgcagaaacagttgcacttattacccctaacacaggatcaagtggaaggaccgccattcccgtgacttcgctgaaagtcggtgatgaagttctggtgaggaaacagggcgccgcccgtcacactgggatagagattcaggagtttattgttgagagatgaaaatggaaacgctgaatgcaccagtttcacgtcgttttgaacaaaaaaatgatgtatgattgcaacattcatctgttctgttggttaagattgtgagattccattgcagcatacaattgtgagattccattgcaacgtacaataatagatcaagacattgatgccaagtgagtgaatttcggaacagtcacgacacaggtcaataatgaaccaggcctgacaacttatcataaggttgacatggtcatattcccgtggcacacaccatcgccgaaacatcagtagaagcaaaagctacaacatgctcagtgctcacagcttgagcccacaaacacacagcctacaggggccttggccccgctaataagtccagttctagtgcacttgggcaaagttctagtgcacttgggcagtgcggtatcctgccaaaggtgctgctgctccaagcgagcgccgtggcgaaggccgtgctgccggttgagctctcatcggcgattttggggtgctgctcagcggcgattttggggtgctggtcataggcgatttgggggcagcgtgcgaggctttccggatgtcgactaatggcgatggtgcaccatatttggcatcttgtagctgttccagctcttccagcacctgcgacattggaggccgcagcttggcgtcaccgcaaatgcattgcgaggcaatgcttgcaatggcatttgcgccctttttggggtactgtcctcccaacttcgtgtccatgatacggtacagtctgcgcttgtcgcccaggtgaggtctggcccagtcaactaggttctgctcaaagcctggttttgatttatccagagcccttcttccagtgagcagttcaagcaacaccaccccgaagctatagacatctgcctttgcagagagacggcctgcaaagacgcaagcaacatgaaactaaacagatccagaaccgccactgtaaattacctaaatcgaagatttatattccacgtgttgccactgttatgaacaaagttgactggactaatcttgttgactggagcattcaaggactaatctgatgtatcatgctgtttaaggaattgaagcacaaaattgaacaagtacaattgactccaaaagaaatataaatacagttatttgatggcaggtccccacaatgatttcttttagcttaaacaaatagccctttgttataccctgtatcaccaaatatgctttaggtagaaaatgaaatgttcaggcatccttagttgttgcagtacgaggaagtattattgacatctccctttaaaagttgaagccacaaaccagagtaatgcacaacactactaccccaatatttcatcagtacgcacgcgaggaaaaaatatctaacctgttgcaatgtactctggagctgcatatccatgagtacccatgacttgtgtggatacatgggttttatccccagttggaccggcttttgccaagccaaaatctgaaagttt

SEQ ID NO: 156823 - DNA, 2948 bp, Zea Mays
ggctcttccgatgattcagccatcacaatggcatcctcctcttccttggcctccgccaaagccctagcacgctcccacgcgtccctcctcgcgccccaaacccagagaacaggtacccggtgtctcgctttctttctcgcaggattctctcgcccggtccctcagtccggtccgtgtctcgcggctccgtgcgaccgtgccgggcaattcaagctgctccccttcgacgatccgtcttccgccgtcactctgccgatggcttctgcacttcagcgcctgtatgtatctactgaatatgagcttggactttgattctcgtgccgtgatgcagtggtcgcgccagcgccgtcgcgctcgcgccgcgcctccgtcaggatgcgcgcctctgctgccgcgccggcggagccgaagaagaccgtctgggtgtggaccgagagccggcaggtgatgacggcggccgtggagagggggtggagcactttcctcttcggatccaaagacctcggcaaggactggtcatcaaccgctcgcataaatgctctcttcattgacggtccagggattttcgatgaggagaaccagaaggttgctgtaatttcacaagtctcttcgcccggtgaacttgaccttgtacaaccggacaacgccgaagccgagaacattgtcatagactttcgaggtggctggcaggttatacgggcagaaaatatagttgctgcattccaaggatgtaaaggaaatgtattggctgtatcaacgaacacaactgaggcgcaagtttttcttgaggccttggagcaagggcttgatggagttgtacttaaagtagatgacatggatgatatcattaagctcaaggattattttgatcgaaggaacgaggcaaagagtcaattaccattgacaaaggctactgtaacaaaggtcgaggttgttggtatgggtgatcgtgtttgtgtggatctttgcagtatcatgcgacctggcgaaggccttctggttggatcgtatgccagaggaatgtttcttgttcattctgaatgcttggagactaattacattgcaagcaggcctttcagagtcaatgcggggcctgtacatgcatatgtcaccgttcctggtggcaagacaagctacctctcagagttggggtcaggaaaggaagtcatcgtgatcaatcagagtgggctatggcgtactgcaattgtcggtcgtgtgaagatcgaatcaaggcctctgatccttgtagaagcgaaggataactctggagacgagacgtatagcatttttctacaaaacgcagaaacagttgcacttattacccctaacacaggatcaagtggaaggaccgccattcccgtgacttcgctgaaagtcggtgatgaagttctggtgaggaaacagggcgccgcccgtcacactgggatagagattcaggagtttattgttgagagatgaaaatggaaacgctgaatgcaccagtttcacgtcgttttgaacaaaaaaatgatgtatgattgcaacattcatctgttctgttggttaagattgtgagattccattgcagcatacaattgtgagattccattgcaacgtacaataatagatcaagacattgatgccaagtgagtgaatttcggaacagtcacgacacaggtcaataatgaaccaggcctgacaacttatcataaggttgacatggtcatattcccgtggcacacaccatcgccgaaacatcagtagaagcaaaagctacaacatgctcagtgctcacagcttgagcccacaaacacacagcctacaggggccttggccccgctaataagtccagttctagtgcacttgggcaaagttctagtgcacttgggcagtgcggtatcctgccaaaggtgctgctgctccaagcgagcgccgtggcgaaggccgtgctgccggttgagctctcatcggcgattttggggtgctgctcagcggcgattttggggtgctggtcataggcgatttgggggcagcgtgcgaggctttccggatgtcgactaatggcgatggtgcaccatatttggcatcttgtagctgttccagctcttccagcacctgcgacattggaggccgcagcttggcgtcaccgcaaatgcattgcgaggcaatgcttgcaatggcatttgcgccctttttggggtactgtcctcccaacttcgtgtccatgatacggtacagtctgcgcttgtcgcccaggtgaggtctggcccagtcaactaggttctgctcaaagcctggttttgatttatccagagcccttcttccagtgagcagttcaagcaacaccaccccgaagctatagacatctgcctttgcagagagacggcctgcaaagacgcaagcaacatgaaactaaacagatccagaaccgccactgtaaattacctaaatcgaagatttatattccacgtgttgccactgttatgaacaaagttgactggactaatcttgttgactggagcattcaaggactaatctgatgtatcatgctgtttaaggaattgaagcacaaaattgaacaagtacaattgactccaaaagaaatataaatacagttatttgatggcaggtccccacaatgatttcttttagcttaaacaaatagccctttgttataccctgtatcaccaaatatgctttaggtagaaaatgaaatgttcaggcatccttagttgttgcagtacgaggaagtattattgacatctccctttaaaagttgaagccacaaaccagagtaatgcacaacactactaccccaatatttcatcagtacgcacgcgaggaaaaaatatctaacctgttgcaatgtactctggagctgcatatccatgagtacccatgacttgtgtggatacatgggttttatccccagttggaccggcttttgccaagccaaaatctgaaagttt

SEQ ID NO: 156824 - DNA, 2735 bp, Zea Mays
ggctcttccgatgattcagccatcacaatggcatcctcctcttccttggcctccgccaaagccctagcacgctcccacgcgtccctcctcgcgccccaaacccagagaacagtggtcgcgccagcgccgtcgcgctcgcgccgcgcctccgtcaggatgcgcgcctctgctgccgcgccggcggagccgaagaagaccgtctgggtgtggaccgagagccggcaggtgatgacggcggccgtggagagggggtggagcactttcctcttcggatccaaagacctcggcaaggactggtcatcaaccgctcgcataaatgctctcttcattgacggtccagggattttcgatgaggagaaccagaaggttgctgtaatttcacaagtctcttcgcccggtgaacttgaccttgtacaaccggacaacgccgaagccgagaacattgtcatagactttcgaggtggctggcaggttatacgggcagaaaatatagttgctgcattccaaggatgtaaaggaaatgtattggctgtatcaacgaacacaactgaggcgcaagtttttcttgaggccttggagcaagggcttgatggagttgtacttaaagtagatgacatggatgatatcattaagctcaaggattattttgatcgaaggaacgaggcaaagagtcaattaccattgacaaaggctactgtaacaaaggtcgaggttgttggtatgggtgatcgtgtttgtgtggatctttgcagtatcatgcgacctggcgaaggccttctggtttgtgttggatcgtatgccagaggaatgtttcttgttcattctgaatgcttggagactaattacattgcaagcaggcctttcagagtcaatgcggggcctgtacatgcatatgtcaccgttcctggtggcaagacaagctacctctcagagttggggtcaggaaaggaagtcatcgtgatcaatcagagtgggctatggcgtactgcaattgtcggtcgtgtgaagatcgaatcaaggcctctgatccttgtagaagcgaaggataactctggagacgagacgtatagcatttttctacaaaacgcagaaacagttgcacttattacccctaacacaggatcaagtggaaggaccgccattcccgtgacttcgctgaaagtcggtgatgaagttctggtgaggaaacagggcgccgcccgtcacactgggatagagattcaggagtttattgttgagagatgaaaatggaaacgctgaatgcaccagtttcacgtcgttttgaacaaaaaaatgatgtatgattgcaacattcatctgttctgttggttaagattgtgagattccattgcagcatacaattgtgagattccattgcaacgtacaataatagatcaagacattgatgccaagtgagtgaatttcggaacagtcacgacacaggtcaataatgaaccaggcctgacaacttatcataaggttgacatggtcatattcccgtggcacacaccatcgccgaaacatcagtagaagcaaaagctacaacatgctcagtgctcacagcttgagcccacaaacacacagcctacaggggccttggccccgctaataagtccagttctagtgcacttgggcaaagttctagtgcacttgggcagtgcggtatcctgccaaaggtgctgctgctccaagcgagcgccgtggcgaaggccgtgctgccggttgagctctcatcggcgattttggggtgctgctcagcggcgattttggggtgctggtcataggcgatttgggggcagcgtgcgaggctttccggatgtcgactaatggcgatggtgcaccatatttggcatcttgtagctgttccagctcttccagcacctgcgacattggaggccgcagcttggcgtcaccgcaaatgcattgcgaggcaatgcttgcaatggcatttgcgccctttttggggtactgtcctcccaacttcgtgtccatgatacggtacagtctgcgcttgtcgcccaggtgaggtctggcccagtcaactaggttctgctcaaagcctggttttgatttatccagagcccttcttccagtgagcagttcaagcaacaccaccccgaagctatagacatctgcctttgcagagagacggcctgcaaagacgcaagcaacatgaaactaaacagatccagaaccgccactgtaaattacctaaatcgaagatttatattccacgtgttgccactgttatgaacaaagttgactggactaatcttgttgactggagcattcaaggactaatctgatgtatcatgctgtttaaggaattgaagcacaaaattgaacaagtacaattgactccaaaagaaatataaatacagttatttgatggcaggtccccacaatgatttcttttagcttaaacaaatagccctttgttataccctgtatcaccaaatatgctttaggtagaaaatgaaatgttcaggcatccttagttgttgcagtacgaggaagtattattgacatctccctttaaaagttgaagccacaaaccagagtaatgcacaacactactaccccaatatttcatcagtacgcacgcgaggaaaaaatatctaacctgttgcaatgtactctggagctgcatatccatgagtacccatgacttgtgtggatacatgggttttatccccagttggaccggcttttgccaagccaaaatctgaaagttt

SEQ ID NO: 156825 - DNA, 2729 bp, Zea Mays
ggctcttccgatgattcagccatcacaatggcatcctcctcttccttggcctccgccaaagccctagcacgctcccacgcgtccctcctcgcgccccaaacccagagaacagtggtcgcgccagcgccgtcgcgctcgcgccgcgcctccgtcaggatgcgcgcctctgctgccgcgccggcggagccgaagaagaccgtctgggtgtggaccgagagccggcaggtgatgacggcggccgtggagagggggtggagcactttcctcttcggatccaaagacctcggcaaggactggtcatcaaccgctcgcataaatgctctcttcattgacggtccagggattttcgatgaggagaaccagaaggttgctgtaatttcacaagtctcttcgcccggtgaacttgaccttgtacaaccggacaacgccgaagccgagaacattgtcatagactttcgaggtggctggcaggttatacgggcagaaaatatagttgctgcattccaaggatgtaaaggaaatgtattggctgtatcaacgaacacaactgaggcgcaagtttttcttgaggccttggagcaagggcttgatggagttgtacttaaagtagatgacatggatgatatcattaagctcaaggattattttgatcgaaggaacgaggcaaagagtcaattaccattgacaaaggctactgtaacaaaggtcgaggttgttggtatgggtgatcgtgtttgtgtggatctttgcagtatcatgcgacctggcgaaggccttctggttggatcgtatgccagaggaatgtttcttgttcattctgaatgcttggagactaattacattgcaagcaggcctttcagagtcaatgcggggcctgtacatgcatatgtcaccgttcctggtggcaagacaagctacctctcagagttggggtcaggaaaggaagtcatcgtgatcaatcagagtgggctatggcgtactgcaattgtcggtcgtgtgaagatcgaatcaaggcctctgatccttgtagaagcgaaggataactctggagacgagacgtatagcatttttctacaaaacgcagaaacagttgcacttattacccctaacacaggatcaagtggaaggaccgccattcccgtgacttcgctgaaagtcggtgatgaagttctggtgaggaaacagggcgccgcccgtcacactgggatagagattcaggagtttattgttgagagatgaaaatggaaacgctgaatgcaccagtttcacgtcgttttgaacaaaaaaatgatgtatgattgcaacattcatctgttctgttggttaagattgtgagattccattgcagcatacaattgtgagattccattgcaacgtacaataatagatcaagacattgatgccaagtgagtgaatttcggaacagtcacgacacaggtcaataatgaaccaggcctgacaacttatcataaggttgacatggtcatattcccgtggcacacaccatcgccgaaacatcagtagaagcaaaagctacaacatgctcagtgctcacagcttgagcccacaaacacacagcctacaggggccttggccccgctaataagtccagttctagtgcacttgggcaaagttctagtgcacttgggcagtgcggtatcctgccaaaggtgctgctgctccaagcgagcgccgtggcgaaggccgtgctgccggttgagctctcatcggcgattttggggtgctgctcagcggcgattttggggtgctggtcataggcgatttgggggcagcgtgcgaggctttccggatgtcgactaatggcgatggtgcaccatatttggcatcttgtagctgttccagctcttccagcacctgcgacattggaggccgcagcttggcgtcaccgcaaatgcattgcgaggcaatgcttgcaatggcatttgcgccctttttggggtactgtcctcccaacttcgtgtccatgatacggtacagtctgcgcttgtcgcccaggtgaggtctggcccagtcaactaggttctgctcaaagcctggttttgatttatccagagcccttcttccagtgagcagttcaagcaacaccaccccgaagctatagacatctgcctttgcagagagacggcctgcaaagacgcaagcaacatgaaactaaacagatccagaaccgccactgtaaattacctaaatcgaagatttatattccacgtgttgccactgttatgaacaaagttgactggactaatcttgttgactggagcattcaaggactaatctgatgtatcatgctgtttaaggaattgaagcacaaaattgaacaagtacaattgactccaaaagaaatataaatacagttatttgatggcaggtccccacaatgatttcttttagcttaaacaaatagccctttgttataccctgtatcaccaaatatgctttaggtagaaaatgaaatgttcaggcatccttagttgttgcagtacgaggaagtattattgacatctccctttaaaagttgaagccacaaaccagagtaatgcacaacactactaccccaatatttcatcagtacgcacgcgaggaaaaaatatctaacctgttgcaatgtactctggagctgcatatccatgagtacccatgacttgtgtggatacatgggttttatccccagttggaccggcttttgccaagccaaaatctgaaagttt

SEQ ID NO: 156826 - DNA, 3114 bp, Zea Mays
ggctcttccgatgattcagccatcacaatggcatcctcctcttccttggcctccgccaaagccctagcacgctcccacgcgtccctcctcgcgccccaaacccagagaacaggtacccggtgtctcgctttctttctcgcaggattctctcgcccggtccctcagtccggtccgtgtctcgcggctccgtgcgaccgtgccgggcaattcaagctgctccccttcgacgatccgtcttccgccgtcactctgccgatggcttctgcacttcagcgcctgtatgtatctactgaatatgagcttggactttgattctcgtgccgtgatgcagtggtcgcgccagcgccgtcgcgctcgcgccgcgcctccgtcaggatgcgcgcctctgctgccgcgccggcggagccgaagaagaccgtctgggtgtggaccgagagccggcaggtgatgacggcggccgtggagagggggtggagcactttcctcttcggatccaaagacctcggcaaggactggtcatgtcagagctcacaacagtgcttcccttcattcgctgttccagcatctagatagatgtcgagatagcctggatccctggttcaaactgttgcgatttacaaatcccaaaagcaaactcagactctgctgatttcatgactcattggtgttctcatttgatttttcagcaaccgctcgcataaatgctctcttcattgacggtccagggattttcgatgaggagaaccagaaggttgctgtaatttcacaagtctcttcgcccggtgaacttgaccttgtacaaccggacaacgccgaagccgagaacattgtcatagactttcgaggtggctggcaggttatacgggcagaaaatatagttgctgcattccaaggatgtaaaggaaatgtattggctgtatcaacgaacacaactgaggcgcaagtttttcttgaggccttggagcaagggcttgatggagttgtacttaaagtagatgacatggatgatatcattaagctcaaggattattttgatcgaaggaacgaggcaaagagtcaattaccattgacaaaggctactgtaacaaaggtcgaggttgttggtatgggtgatcgtgtttgtgtggatctttgcagtatcatgcgacctggcgaaggccttctggttggatcgtatgccagaggaatgtttcttgttcattctgaatgcttggagactaattacattgcaagcaggcctttcagagtcaatgcggggcctgtacatgcatatgtcaccgttcctggtggcaagacaagctacctctcagagttggggtcaggaaaggaagtcatcgtgatcaatcagagtgggctatggcgtactgcaattgtcggtcgtgtgaagatcgaatcaaggcctctgatccttgtagaagcgaaggataactctggagacgagacgtatagcatttttctacaaaacgcagaaacagttgcacttattacccctaacacaggatcaagtggaaggaccgccattcccgtgacttcgctgaaagtcggtgatgaagttctggtgaggaaacagggcgccgcccgtcacactgggatagagattcaggagtttattgttgagagatgaaaatggaaacgctgaatgcaccagtttcacgtcgttttgaacaaaaaaatgatgtatgattgcaacattcatctgttctgttggttaagattgtgagattccattgcagcatacaattgtgagattccattgcaacgtacaataatagatcaagacattgatgccaagtgagtgaatttcggaacagtcacgacacaggtcaataatgaaccaggcctgacaacttatcataaggttgacatggtcatattcccgtggcacacaccatcgccgaaacatcagtagaagcaaaagctacaacatgctcagtgctcacagcttgagcccacaaacacacagcctacaggggccttggccccgctaataagtccagttctagtgcacttgggcaaagttctagtgcacttgggcagtgcggtatcctgccaaaggtgctgctgctccaagcgagcgccgtggcgaaggccgtgctgccggttgagctctcatcggcgattttggggtgctgctcagcggcgattttggggtgctggtcataggcgatttgggggcagcgtgcgaggctttccggatgtcgactaatggcgatggtgcaccatatttggcatcttgtagctgttccagctcttccagcacctgcgacattggaggccgcagcttggcgtcaccgcaaatgcattgcgaggcaatgcttgcaatggcatttgcgccctttttggggtactgtcctcccaacttcgtgtccatgatacggtacagtctgcgcttgtcgcccaggtgaggtctggcccagtcaactaggttctgctcaaagcctggttttgatttatccagagcccttcttccagtgagcagttcaagcaacaccaccccgaagctatagacatctgcctttgcagagagacggcctgcaaagacgcaagcaacatgaaactaaacagatccagaaccgccactgtaaattacctaaatcgaagatttatattccacgtgttgccactgttatgaacaaagttgactggactaatcttgttgactggagcattcaaggactaatctgatgtatcatgctgtttaaggaattgaagcacaaaattgaacaagtacaattgactccaaaagaaatataaatacagttatttgatggcaggtccccacaatgatttcttttagcttaaacaaatagccctttgttataccctgtatcaccaaatatgctttaggtagaaaatgaaatgttcaggcatccttagttgttgcagtacgaggaagtattattgacatctccctttaaaagttgaagccacaaaccagagtaatgcacaacactactaccccaatatttcatcagtacgcacgcgaggaaaaaatatctaacctgttgcaatgtactctggagctgcatatccatgagtacccatgacttgtgtggatacatgggttttatccccagttggaccggcttttgccaagccaaaatctgaaagttt

SEQ ID NO: 156827 - DNA, 133 bp, Zea Mays
tttttttttttttttggtaacgctgactagcactttaagcctcctgatttgtgtctcaaaatttaaaatggaccctagaatccggacaagcgcttagctaattcgatggttagggaaagttaggtagagttgg

SEQ ID NO: 156828 - DNA, 1444 bp, Zea Mays
agcttagagtttgtttggttagcacaagattggagtggattagaggggattgaagggaacttgtggagtttgaatgcaaggattgggccagcaagaaaatcaacataaaatatgaaattcgggaaagtaggaagggatacaaagcaggagccctgaagaagggcatggaacatagttacgcccaagaatgtgattttgttgccatctttgatgcagattttcaacctgatcctgacttccttttaagaactataccatttcttgtgcataacccgaagattgctctagtacagacacgttgggagtttggatgttcctgacctggcctttgccgggcaattttgcagtgaactacaatatttgcctactgacaaggatacagaagatgtcactagattatcattttaaggtagagcaggaatcagggtcatctgtgcatgccttctttggtttcaacggtacggctggcgtgtggcgggtatcagctatcggtgaagcaggaggatggaaggatcgcaccactgtggaagacatggacttggctgtgcgggcaagcctcaagggatggcagttcctgtatgttggtgatataagggttaagagtgaactcccaagtactttcaaggcctaccgtcatcaacagcacaggtggacttgtggtgctgccaacctcttcaggaaaatggccggggacattgttataagcaagggggcgactgtatggaagaagcttcaccttctgtacagcttcttcttcgtccgaagggtcatcgctcccatcctaacgttcctgttctactgcgtcgtgatcccactgtctgtcatggtccccgaagtcagcatccctgcctggggaatgttctacattcccactgccatcaccatcatgacagccatcaggaatccttggtctatccatctggtgccaatatggatcctgttcgagaacgtcatgtccatgcaccgaatgcgcgcggcgctgacggggctgctggagaccacgtacgtggacgagtgggtggtcaccgagaaggtgggcgatcatgtgaaggacaagctcgaggtccctctccttacaccggtgaagccaaccgagtgcgtcgagaggatctacttgcctgagctcctggtcgcgttctacctgttgctatgcgcgtcgtacgatgtcgtgctcggagccgggcactactacccgtacatcttcctccaggccttcgctttcctcgtgctggggtttggcttcgccggcaccgtgacgccctgctcttgttcataagccatcgcgcgcatagcgctagcgcccatggctattttgctgcattcttccctgattcgcctcctctaaagtctgtaactagaaaagagaaagcgattctttctgtaaatcgaacagaataaacgctgcacgcgtgtgcagcatttgagcagtaacttggtttttttg

SEQ ID NO: 156829 - DNA, 1894 bp, Zea Mays
aacggagccgagaggcccaacgagagccgaagccacagcagctgcaagcttttgcttcgtccgtccgtccgcccgcccgtccccgcatcattcccgaagtcccagcatggagttggaggggccgtgggcgcgggtgctgcacctgcacgatgcgtgcgagtggggccgggcggtgcgggcgcgcgcggtggcgccggcgctggaggccgcggcgtgggcgtgcctcgccatgtcggtcatgctcgtgctcgaggtgtgctacatgagcgtctccagcttcgtcgccgtcaacctgctgcgccggaccccacagcggcggtacagctgggagcccatgccctccgggaccgcccggggggacgatgaggaggcagcggtgggcgatggaggcggcgaggcgtacccgatggtactcgtgcagatccccatgtacaacgagagggaggtctacaagatctctattggagcggcatgtgccctcacatggccgcccgaccgtattataatccaagtattggatgattccaccgacccattcattaaggaacttgtggagtttgaatgcaaggattgggccagcaagaaaatcaacataaaatatgaaattcgggaaagtaggaagggatacaaagcaggagccctgaagaagggcatggaacatagttacgcccaagaatgtgattttgttgccatctttgatgcagattttcaacctgatcctgacttccttttaagaactataccatttcttgtgcataacccgaagattgctctagtacagacacgttgggagtttgtgaactacaatatttgcctactgacaaggatacagaagatgtcactagattatcattttaaggtagagcaggaatcagggtcatctgtgcatgccttctttggtttcaacggtacggctggcgtgtggcgggtatcagctatcggtgaagcaggaggatggaaggatcgcaccactgtggaagacatggacttggctgtgcgggcaagcctcaagggatggcagttcctgtatgttggtgatataagggttaagagtgaactcccaagtactttcaaggcctaccgtcatcaacagcacaggtggacttgtggtgctgccaacctcttcaggaaaatggccggggacattgttataagcaagggggcgactgtatggaagaagcttcaccttctgtacagcttcttcttcgtccgaagggtcatcgctcccatcctaacgttcctgttctactgcgtcgtgatcccactgtctgtcatggtccccgaagtcagcatccctgcctggggaatgttctacattcccactgccatcaccatcatgacagccatcaggaatccttggtctatccatctggtgccaatatggatcctgttcgagaacgtcatgtccatgcaccgaatgcgcgcggcgctgacggggctgctggagaccacgtacgtggacgagtgggtggtcaccgagaaggtgggcgatcatgtgaaggacaagctcgaggtccctctccttacaccggtgaagccaaccgagtgcgtcgagaggatctacttgcctgagctcctggtcgcgttctacctgttgctatgcgcgtcgtacgatgtcgtgctcggagccgggcactactacccgtacatcttcctccaggccttcgctttcctcgtgctggggtttggcttcgccggcaccgtgacgccctgctcttgttcataagccatcgcgcgcatagcgctagcgcccatggctattttgctgcattcttccctgattcgcctcctctaaagtctgtaactagaaaagagaaagcgattctttctgtaaatcgaacagaataaacgctgcacgcgtgtgcagcatttgagcagtaacttggtttttttg

SEQ ID NO: 156830 - DNA, 1932 bp, Zea Mays
aacggagccgagaggcccaacgagagccgaagccacagcagctgcaagcttttgcttcgtccgtccgtccgcccgcccgtccccgcatcattcccgaagtcccagcatggagttggaggggccgtgggcgcgggtgctgcacctgcacgatgcgtgcgagtggggccgggcggtgcgggcgcgcgcggtggcgccggcgctggaggccgcggcgtgggcgtgcctcgccatgtcggtcatgctcgtgctcgaggtgtgctacatgagcgtctccagcttcgtcgccgtcaacctgctgcgccggaccccacagcggcggtacagctgggagcccatgccctccgggaccgcccggggggacgatgaggaggcagcggtgggcgatggaggcggcgaggcgtacccgatggtactcgtgcagatccccatgtacaacgagagggaggtctacaagatctctattggagcggcatgtgccctcacatggccgcccgaccgtattataatccaagtattggatgattccaccgacccattcattaaggaacttgtggagtttgaatgcaaggattgggccagcaagaaaatcaacataaaatatgaaattcgggaaagtaggaagggatacaaagcaggagccctgaagaagggcatggaacatagttacgcccaagaatgtgattttgttgccatctttgatgcagattttcaacctgatcctgacttccttttaagaactataccatttcttgtgcataacccgaagattgctctagtacagacacgttgggagtttggatgttcctgacctggcctttgccgggcaattttgcagtgaactacaatatttgcctactgacaaggatacagaagatgtcactagattatcattttaaggtagagcaggaatcagggtcatctgtgcatgccttctttggtttcaacggtacggctggcgtgtggcgggtatcagctatcggtgaagcaggaggatggaaggatcgcaccactgtggaagacatggacttggctgtgcgggcaagcctcaagggatggcagttcctgtatgttggtgatataagggttaagagtgaactcccaagtactttcaaggcctaccgtcatcaacagcacaggtggacttgtggtgctgccaacctcttcaggaaaatggccggggacattgttataagcaagggggcgactgtatggaagaagcttcaccttctgtacagcttcttcttcgtccgaagggtcatcgctcccatcctaacgttcctgttctactgcgtcgtgatcccactgtctgtcatggtccccgaagtcagcatccctgcctggggaatgttctacattcccactgccatcaccatcatgacagccatcaggaatccttggtctatccatctggtgccaatatggatcctgttcgagaacgtcatgtccatgcaccgaatgcgcgcggcgctgacggggctgctggagaccacgtacgtggacgagtgggtggtcaccgagaaggtgggcgatcatgtgaaggacaagctcgaggtccctctccttacaccggtgaagccaaccgagtgcgtcgagaggatctacttgcctgagctcctggtcgcgttctacctgttgctatgcgcgtcgtacgatgtcgtgctcggagccgggcactactacccgtacatcttcctccaggccttcgctttcctcgtgctggggtttggcttcgccggcaccgtgacgccctgctcttgttcataagccatcgcgcgcatagcgctagcgcccatggctattttgctgcattcttccctgattcgcctcctctaaagtctgtaactagaaaagagaaagcgattctttctgtaaatcgaacagaataaacgctgcacgcgtgtgcagcatttgagcagtaacttggtttttttg

SEQ ID NO: 156831 - DNA, 2050 bp, Zea Mays
aacggagccgagaggcccaacgagagccgaagccacagcagctgcaagcttttgcttcgtccgtccgtccgcccgcccgtccccgcatcattcccgaagtcccagcatggagttggaggggccgtgggcgcgggtgctgcacctgcacgatgcgtgcgagtggggccgggcggtgcgggcgcgcgcggtggcgccggcgctggaggccgcggcgtgggcgtgcctcgccatgtcggtcatgctcgtgctcgaggtgtgctacatgagcgtctccagcttcgtcgccgtcaacctgctgcgccggaccccacagcggcggtacagctgggagcccatgccctccgggaccgcccggggggacgatgaggaggcagcggtgggcgatggaggcggcgaggcgtacccgatggtactcgtgcagatccccatgtacaacgagagggaggtctacaagatctctattggagcggcatgtgccctcacatggccgcccgaccgtattataatccaagtattggatgattccaccgacccattcattaaggaacttgtggagtttgaatgcaaggattgggccagcaagaaaatcaacataaaatatgaaattcgggaaagtaggaagggatacaaagcaggagccctgaagaagggcatggaacatagttacgcccaagaatgtgattttgttgccatctttgatgcagattttcaacctgatcctgacttccttttaagaactataccatttcttgtgcataacccgaagattgctctagtacagacacgttgggagtttggatgttcctgacctggcctttgccgggcaattttgcagtgaactacaatatttgcctactgacaaggatacagaagatgtcactagattatcattttaaggtagagcaggaatcagggtcatctgtgcatgccttctttggtttcaacggtacggctggcgtgtggcgggtatcagctatcggtgaagcaggaggatggaaggatcgcaccactgtggaagacatggacttggctgtgcgggcaagcctcaagggatggcagttcctgtatgttggtgatataagggttaagagtgaactcccaagtactttcaaggcctaccgtcatcaacagcacaggtggacttgtggtgctgccaacctcttcaggaaaatggccggggacattgttataagcaagggggcgactgtatggaagaagcttcaccttctgtacagcttcttcttcgtccgaagggtcatcgctcccatcctaacgttcctgttctactgcgtcgtgatcccactgtctgtcatggtccccgaagtcagcatccctgcctggggaatgttctacattcccactgccatcaccatcatgacagccatcaggaatccttggtaagtggcccatctttcccctgactgatgcgtggagcggatttccctagctagctatgcgctcgttaatctcgcgtgtctactgatgatgccactagtcatatttcgtgcacgccaggtctatccatctggtgccaatatggatcctgttcgagaacgtcatgtccatgcaccgaatgcgcgcggcgctgacggggctgctggagaccacgtacgtggacgagtgggtggtcaccgagaaggtgggcgatcatgtgaaggacaagctcgaggtccctctccttacaccggtgaagccaaccgagtgcgtcgagaggatctacttgcctgagctcctggtcgcgttctacctgttgctatgcgcgtcgtacgatgtcgtgctcggagccgggcactactacccgtacatcttcctccaggccttcgctttcctcgtgctggggtttggcttcgccggcaccgtgacgccctgctcttgttcataagccatcgcgcgcatagcgctagcgcccatggctattttgctgcattcttccctgattcgcctcctctaaagtctgtaactagaaaagagaaagcgattctttctgtaaatcgaacagaataaacgctgcacgcgtgtgcagcatttgagcagtaacttggtttttttg

SEQ ID NO: 156832 - DNA, 4223 bp, Zea Mays
atgggggataggagggttctgcttgttgcgtctcctgaggtagcagtctttggttatgatggggtcgtctcattggcaagcgttcaggacgctgtggatactgttccgttgaacaaccaaacgcgcaccgtcatcaggatcggtcctggtgtgcaccagcagcaggtgcgcattcctaggaccaagaacttcatcaccttgtgtggatcttcgataaaggacaccgtgatctgttgggacaacaggactacgacttgcatcaaacacactcagccatcaggagcgattggcacagggacactgagcagtgcaacagttatcgtggaaggggacgatttcatcgcagagaatgttatttttaagaactcagctccccagtctggacaagcagcagcagtccgtgtgacggctgacaggtgtgccttttacgactgcagattcctcgggtggcaggaaaccttacatttgcatggtggaaagcagctcctgaagaactgttacgttgaaggtagttatgacttcatctttggagattccgctgcccttctggagcattgccatatccactgcaaatcagcggggtatattactgctcatggccggaaatcatcttcagaaccaactggattcgtgttcttcaagtgtgttattactggcaatggagaagctgcctacatgtacctaggccggccctgggagcccttcgggagggttgtttttgcagaaactttcatggatcgctgcatagagcctgctgggtggcataattgggacaagcctgacaatgagcaaaccgcctgcttctacgagtacaggtgctccggtccaggatcaagctcatcaggacgggaacgttggtgcaaagaactgttcggtgatgaagctatgccgttccttgcacagactttcattgatccagatatcgagaatccatggttggtccacagcaaagccgttgcggtcgtaggagatctcggagatgcccaactcgttgcacaccctgacgagctcctccccgagcctccgggcagcctccttgtccagggggagccgacgaggcaatgcaaagtcaactcaagattccccgccggagtacaaagcaaatcccagacggagaagacggcggcggcggcttaccaccgtgccgcagggcgggtcgccgcagatggacttctgcagcgtgctgccgtagaagaggatctccttgttgtggtcgtcggcgagaacggcgtagagctgccggctggagcagaacaccgagagcctgggcttcgtcgccgtgccgttgaactgcagcagccagcgagagtcggcggaacggcggtttcgttacatcctgccggctgcaggccttttatcctgaaattcgaagacccaggtggagcatcggaacgttcgtactaccttcttctgcagccgacggttcctgaccttggcgctctccgtgcgagcgccgcgtctcgccgtcgcctcgatcatgggcgagaagtcgaggctggtcccggagcctatcagcgaggtcgtagggtgacggaccgggagcgcggggcgcggcgggtagcagcgccatcgccagtggggcaaatcgtcgaacagacgccgcgcggccagtgggctgctgcgctattggcctattgcctttgtttggcgtcagtttaccccaccacatcaagaggcccaaccgtcgagagaggaagcaggagtaccgagtactccgagatctggcctgtgtccacagccttctcttccctgacctcgacatcttgccgatctgcactgactccgcggcccgcgttcatggcggtgacctttccctctcccaccccgcggtccccgcgccggccggatgccattgtggctcctgacccctcgtctgctgacatgtcgccctccctcgacttcggcgacccgacctccttcaccgcgctgcgcgtcctcaccgacgggggtgccgccacccgccttctccacgagtgcgtggcctaccagcgcgccctcgacgcccgtctcgacgctctcctcgcccgccgcgccgacctcgaccgcgccgctgcttcgctcctccgctccgccccaccactgctctcgctcgcggcctccgacgccgccgcgcttaaggagtcctcctcctccaccgcggcgcttgccgacgcgctctcgtcccgcgtgcgccaccttgacgcggcgcactccagggcggacgccgcgctggcgcgcgccgaggccgcgctcgaccgttcccgcgcgctcgaagcaacgcggagggccttggccgctgacgacctcgccgctgccgccaccgccgcgcacgaattcctcgctatcgacgctcggttccccaccgacgacgatctccgccgcgatctgattgacatcaaacgtcgcctcgaggggctcgcgcgtcggaggctagcggcggtcgtcgacgcacaggaccaccctgccgtgctccgcctcgtccgcctattcccactgctcggactcgctgatgaagggctccaggtatacgtcgcctacctcaagaaggttgtcgctctgcgtgcccgtgcagactttgagcacctcgccgagctgacctccgcgacccagccgacctctgaccggccggattttgttggctgcctcactcgtctctttaaggacattgtgcttgctgttgaagagaatgatggtgtgctgcgtgagctcaggggcgatgatgttgcttatgccatcattgagctgcaggaggagtgtgattcgcggggcacccagatcctacgccgttatgctgattacaggaagcttgcacgtcttgcatcagatataaactcctacacgaagaacctcctttcagtcatgggttccatggccagtgctgctggaggcaatgaagggcctgatcccagggaaattgagctttatcttgaggagattcttgcgttgacacagcttggggaggactacactgaattcatggtgaataagatccgtgtattgagagatgtgaaacctgaacttgggccgcgggcgatgaaggccttccgtaatggtaactttaataaaatggagcaggatctgactgggttctatgttatcttcgaggaatttttcatggtggagaatgtgaggaaagccatacggattgatgagcccatatcagatggtctcacaacgtcaatggtggatgatgtattctttgtactgcagagttgctgccgccgggctacttccactgcaagcataaactccgttattgctgtgcttggtggggcaacgagccttctgagcaatgagtatcaggaggcactacagtggaggatgcgggagccaaatttgggtgcaaagctcttccttggtggtgttggggtgcagaagactggtgaggagattgcgactgcactgaacaacattgacattagctccgagtatgttctgaagctccgccatgagattgaggagctctgtgtagagatttttcatactccagctgatcgagagaagatcaagtcctgtttatcagagctaggagagatcagtgcttcctttaagaagatccttcattctgcgctggagcatttagtggcatctgtggcgccacgcatccgtccaatccttgacactgttgctactgtcagttatgggttggatgatgctgaatatggggaaaatgaggtgaatgatccatgggtgcagaagctaatacttgcagttaacactaatgttgcttggctccagccagtgatgacatcaaacaactacgattcctttgtgcacttgatcattgacttcattgtcaaaaggctcgaggtgataatgatgcagaagaggttcagccagcttggtgggctccagctcgacaaggaggtccggtctctgatcaaccatttctcagaaatgtcccagagaccagtcagagacaagttctctaggctttcgcagatgtcgaccattctaaactttgagcgggtatcagagatactggatttctggggtgacaatgctggccatctgacatggctgttgacacctgcagaggtgcggagggtgttaggacttaggactgacttcaggcctgaagctattgctgctttgaggctctgaatcgtgcgtctatatatacttgttaattcttcatatatgatagagcaacaagatgtcttagaattttttgttacaatgacaaacacctgcattgtaaagaaatctgtgaacatactttttgtctgttatgagcgaattga

SEQ ID NO: 156833 - DNA, 1478 bp, Zea Mays
ggtccgaagcgtttcggttcgcgtagcagaactgctcgtgcaacaagcaaacaacccaagagccgggagagttggtgactgcgaggccgagacaggggatagattgagagagccagagaggtgggcagatggcgacaccgtcgtcgtcgctttgctccagcttcgcctccctgcggaccgcctccatcggccacccccgcggcatcgcgtcatctacgcccaggaaggcgttccaagtgagggcatcagctcgggttgacaagttctcaaagagtgatatcattgtgtccccttcgattctgtctgcaaacttcgccaagcttggtgatcaggtaaaagccgtggaggtggcaggatgtgactggattcatgtcgatgtcatggacgggcgctttgtgccaaatatcacaattggacctttggttgttgatgctctgcgtcctgtgactgatcttccattggatgtacatctgatgattgtggaacctgagcagcgagtccctgattttatcaaggcaggtgctgatattgttagtgtccactgtgaacaaacatcgaccatccatttgcacagaacagtcaatcagattaaaagtctaggagcaaaggcaggagttgttttgaatccagcgactccactcaatgcaattgattacattcttgatgttgttgacctggtgttgattatgtctgtgaatcctgggtttggtggccagagctttatcgagagtcaagtaaggaaaattgcagaattgagaaggttatgtgcagagaaggtaatatccccttgtttcctttcaagtattctcactcactgccctcagtcccttatgttcaaagcattgtaggtgtcaatcactttctttttttctttttttgtagggagtgaacccctggattgaggttgatggtggtgttggtccgaaaaatgcctacaaggttattgaagctggggcgaatgccatcgttgctggctctgcagttttcggggctccagactacgctgaagctatcaaaggaatcaagaccagccaaaggcctgcagctgtacacgcataaggaactggacgtgtgatcgtgctctgttcaggtttagcagtgttgggattcgtatagatagatgtgtcttgttttcgagccatacgttatactggagatgaaaggagacggaggaaatatttctctacgtgggtgaatcaatcatgtggacggtaatcacatgacgacaaagcatatggacgagcgctggctcacgagacagagtaatcaacgggagaggcttctagacagctctgcatgtccattccctctataaacaggagagcagttcagtctccattgtaaaggcacccagatatagaagaaagaaataaagagctctctatttgtctctgtttctatcgtgttattctctatgcattgatagaacaatttcttatcaccacgagttctcccaaactttgtatgccagcgaacct

SEQ ID NO: 156834 - DNA, 1412 bp, Zea Mays
ttacaacgcacggacactcccctagtaatggaagatagatggtccgaagcgtttcggttcgcgtagcagaactgctcgtgcaacaagcaaacaacccaagagccgggagagttggtgactgcgaggccgagacaggggatagattgagagagccagagaggtgggcagatggcgacaccgtcgtcgtcgctttgctccagcttcgcctccctgcggaccgcctccatcggccacccccgcggcatcgcgtcatctacgcccaggaaggcgttccaagtgagggcatcagctcgggttgacaagttctcaaagagtgatatcattgtgtccccttcgattctgtctgcaaacttcgccaagcttggtgatcaggtaaaagccgtggaggtggcaggatgtgactggattcatgtcgatgtcatggacgggcgctttgtgccaaatatcacaattggacctttggttgttgatgctctgcgtcctgtgactgatcttccattggatgtacatctgatgattgtggaacctgagcagcgagtccctgattttatcaaggcaggtgctgatattgttagtgtccactgtgaacaaacatcgaccatccatttgcacagaacagtcaatcagattaaaagtctaggagcaaaggcaggagttgttttgaatccagcgactccactcaatgcaattgattacattcttgatgttgttgacctggtgttgattatgtctgtgaatcctgggtttggtggccagagctttatcgagagtcaagtaaggaaaattgcagaattgagaaggttatgtgcagagaagggagtgaacccctggattgaggttgatggtggtgttggtccgaaaaatgcctacaaggttattgaagctggggcgaatgccatcgttgctggctctgcagttttcggggctccagactacgctgaagctatcaaaggaatcaagaccagccaaaggcctgcagctgtacacgcataaggaactggacgtgtgatcgtgctctgttcaggtttagcagtgttgggattcgtatagatagatgtgtcttgttttcgagccatacgttatactggagatgaaaggagacggaggaaatatttctctacgtgggtgaatcaatcatgtggacggtaatcacatgacgacaaagcatatggacgagcgctggctcacgagacagagtaatcaacgggagaggcttctagacagctctgcatgtccattccctctataaacaggagagcagttcagtctccattgtaaaggcacccagatatagaagaaagaaataaagagctctctatttgtctctgtttctatcgtgttattctctatgcattgatagaacaatttcttatcaccacgagttctcccaaactttgtatgccagcgaacct

SEQ ID NO: 156835 - DNA, 589 bp, Zea Mays
aacggccagatcagcaccatccccatgccactctgagaacttcccgcacctgctcagctagtcctaacccggagccacgaaggcgatccatggcggcgacgggtttgctccgacgtgcggccgcgtcgtcgctaccccgcctcccttccggaatttccctcatacagcctcctctccctgcccctctcaccgagtcgcagtcgctcgtgatccccggcatcggcgccgctgccggaccagccatggagctcatggccgtccctaagaagaaggtctccaagtacaagaagggtttgaggaatggacccaaagccttgaagtctgtgccggtcattattcgctgcaggtgctgcggccgagtgaagctgcctcacttctactgctgcagcggagaaagaggaaacccaagcgagtcaagctcataaatgttttgctttcctactctggggcctgggcactatgctaattctcaactctgcatatcgtaataccactgaaataaattctcaaatgacatttggtatttcacctattgttctgtacacttactatagtttgaattgaaagttctctctgctcgtggcaagaa

SEQ ID NO: 156836 - DNA, 709 bp, Zea Mays
aacggccagatcagcaccatccccatgccactctgagaacttcccgcacctgctcagctagtcctaacccggagccacgaaggcgatccatggcggcgacgggtttgctccgacgtgcggccgcgtcgtcgctaccccgcctcccttccggaatttccctcatacagcctcctctccctgcccctctcaccgagtcgcagtcgctcgtgatccccggcatcggcgccgctgccggaccagccatggagctcatggccgtccctaagaagaaggtctccaagtacaagaagggtttgaggaatggacccaaagccttgaagtctgtgccggtcattattcgctgcaggtgctgcggccgagtgaagctgcctcacttctactgctgcagcggagaaagaggaaacccaagcgagtcaagctcataaatgttttgctttcctactctggggcctgggcactatgctaattctcaactctgcatatcgtaataccactgaaataaattctcaaatgacatttggtatttctagggatgaaagtggtaatccgaactgttagaacaaatttaatattttaaaatagatatgtataaaatttaatgttgatcttttcatatgttatcaaacacattagtacaaatatgaataaaatattatataagttgttttatgtattatttgctccctacaacataaaaagttgaaaaaaa

SEQ ID NO: 156837 - DNA, 4649 bp, Zea Mays
cgatggcagcaacaccggcctgggactgggaggaatcgcttgtattcttcctgcagccgttcttcctccacggcgtgagcgccgcggcccaccttatcctggcgctcgccgtcgcgggacgcttgctctttcgccgcctctccgccagccggaccaaggacggggaggtgggcggaggagatgctagccgcggcgttggccggtttcggtactggtacggggtctctgtctgcaccacgtgggctatgggtgcgttcgaggtcctcctcgccgtctactcatggtacgcgaacggcggcgccgggtggtcgcgcgacgcggtcgttgaacaggtggacgcggccgcgcgcgcggtgtcgtggctgctgctcgccgcgtacctgcagttcgatttctggtggcgtcggcagcgccaggagcggttccccgtggcgctcaggctttggttggcgctcttcatgctgctctccgtagtcaccgtcggcgttcacgcggcgatgatcctcgacgggtcccttgtgcccggtcgatcgtgggcgctcgacgcagtctctgttactgcagcagcggttctactctcagtctcagctgggttcttcggaaggaaggagggagagggaggcggccatgcttccgaggcgcatgaacctctgctgaacggcgcgcacgaggggtccggtgacgacgacgagaacagcagcagcgccgccgacgcatccttgttcactggcgccggctttcttagcgtgctcaccttctcttggatgacgcccctgctcggcgtgggtcacaggaagaccctcgtcccggaggatgtcccgggcctcgaaccaggcgacagcgttgctggcgtcctcccgcccttcaaggccaaccttgaggcgctcaccggcgacggcggcaggtcgagccggaaggccgtcactgcgttcaagctcaccaaggccctgttgcgcaccctacggtggcacgtcgcggtgaccgcgttctacacgctggtctactgcgtcgccgtctacgtcgggccgtacctcatagactccctggtccagtacctgtacctcaacggcgacgagaggtacgcgagcaaggggcagctcctcgtactcgccttcgtcgtggccaaggtgctcgagtgcctgtcgcagcggcacttgttcttccggttgcagcaagcggggatacgagcgcggtcggcgctcgtcgcagtcctgtaccagaagagcctcgcgctttccagccagtcgaggcggagccacacgagcggagagatgatcaacatcgtcagcgtcgacgccgaccgcgtcggcatcttctcatggtacctgcacgaggtctggcaggtaccgctgcaagtagtcatggcgatgttcatcctgtactccaccctcggggtggcctcgctcgccgcgctcggtgccaccgtggccaccggcctcgccaccgtgcccctgggaagaatgcaggagcggttccaggagaagctgatggacagcaaggacgggaggatgaaggcgacgtcggagatcctgcacagcatgaggatcctgaagctgcaggggtgggagatgaggttcctgtccaagatcatcgagctgaggaagacagaggcgaactggctaaagagatacctctacacgtcggccaccatgaccttcatcttctggggcaccccaaccttcgtcgccgtggtgaccttcggagcctgcatgctcatggggatccccttggagacggggaagatgctgtcagcactggccacgttccgcgtgctggaggaacccatatacgaacttccgggcactatcgcgatggtgatcaagaccaaggtgtctcttgacaggatagcatcgttcctgtgcctcgacgagctacccagtgacgccgtgcagaggcttccacgtggaagctctgccgacttcgcagtcagcgtcggcaacgggtgcttctcatgggaagcctcgcctgatgctccaacactgaaggacctcaacttccaagctaggccaggcatgcgcgtcgcggtctgtgggacagttggctccggcaagtccagcctgctatcctgcattctcggcgagattccgaagttgtcgggagaggtccggacctgtgggacgacagcgtacgtcagccagtcggcgtggatacagagcggcaaaattcaggagaacatactgttcggtatggagatggacagagacaagtacgacagggtgctcgagtcgtgcgcgctcaagaaagacttggagaacctgccgtttggcgaccagacagtcatcggcgagcgaggcatcaacctcagtggaggccagaagcagaggatccagatagcacgcgctctgtatcaggacgccgacgtctatctgttcgacgatccgttcagcgcagtcgatgcgcatacaggatcccacattttcaaggaatgcttgcttgcggatttggcttcaaaaacagtggtttatgttactcatcagattgaattcctacctgccgccgatctcatccttgtcatgaaagatgggaggatagcacaggcaggaagatacgacgaaatactgggttcaggcgaagagttcatggagctggtgggtgcccacgaggagtctctaacagcactggatgtggtcgatgccatgaacgagaacgaagccaacgtgtcatcctctcccagcagcaggatagagacgccgaacctgtccagatccctgtcgttagctgagaagaaacatggcgccaccaacgaggctgaaggggacgacgacgatgctcggagcgggcagctggtgcaggaggaagaaagggagaaaggcagggtggggttctgggtctactgggagtacctcacgcaagcctacaagggcgccctcgtgccgttggtgttgctggcgcagacgctctttcagatcatgcagattgccagtaactactggatggcttgggctactccggcgtcgaaggatgccgagcctccggtgagcgcgcccacgctgctcttcgtctacgtcgtgctggctctcggaagctcgctgtgcatcctcgtaagatcgctgctccttgcgacggctgcgtacaagacagcgactctgctgttcaacaagatgcacctgtccatattcagagctcccatgtctttcttcgattccactcccagcgggcgcatcttgaacagggcttcaactgatcaaagcgaggtggacaccaacatcgctgaccagatgggcaccgttgcattctccatcatccagctcgtcggaattactgcggtgatgtctcaggtcgcatggcaggtctttgtggttttcgtccctgtatttgctgcatgtgtctggtaccagcggtactacattgacacggcaagggagctgcaaaggctagtaggagtgtgcagagctccaatcatacagcacttcgcagagtcgatagcggggtcgagcaccatcagaagtttcggcaaggaagaccagttcgtgtcgactaacagccgtctaacagatgcctactcccggcccaagttctacaacgccggagcgagggagtggctttgctttcgcttggacgtgctgtcctctcttgcgttcgccttctccctgatctttctgatcaacctaccggccggtctcatcgatccaggttgtctggagcatgtgcactttggagaacaagatcatatcagtagagagaatcctacagtacatgggcgttcctgcagagcccccgcttgtcatgccagaaaacaagttggctcagagctggccatcgaatggagaaatccagcttcagaatctccatgtgaaatatgcgccgcagctgccgttcgttctgaagggccttacggtcgcttttccgggcggcgtgaagactggcattgtcggaagaacagggagcgggaaatcaaccctaatccagtccctcttccgcatcgtcgaccctgctgtcggccagatagtgatagacggcatcgacatccgcacggttgggctgcatgatctgaggtccaggctgagcatcattccacaggagccgacgatgttcgaaggaactgtcaggagcaaccttgaccctcttggggagtactccgacgatcagatctgggaggctttggattgctgtcagctaggggacgaagtcaggaagcaggagctgaagctcgactcaccagtggtagagaacggtgagaactggagcgtgggccagcgccagctcgtgtgccttggcagggtgatcctgaaacggagcaaggttcttgttctggacgaagccactgcctcggtggacactgcaaccgacggcttgatccagagaacgctgaggcggcagttcaaggagaccaccgtcatcacgatagcgcacaggatcacgtcggttcttgacagccacatggtgctgctccttgacaacggcgtggccgtcgagcacgacaggccggacaagttgctggaggacaagtcgtctctgttctcaaagctcgtagcagaatacaccatgcggtcggtgcttacatagcagaccacagaccagcatacaagagacgactgaagatggggtcataaatatatgatgacaccttttaagttttactagaaaccaaaaaggtctcgcgaaaggccttggacccattattacgcaatgtcatctcttcgtgggcc

SEQ ID NO: 156838 - DNA, 1438 bp, Zea Mays
ggctgaggctgccgtgtccacgttgcactccacattcccgtttcatttcctttcatttcactcctcgcctcggctttgttggaacgtaaaaaaaaaaaaaaatggcagctccctcgtcgtccctcaccccgccgccgccggcagcggctgtggcctccacaacgctgtccgggaacctcacggcctcctcgctcctgtctattacgccgccgcgaccgcgcctcgccgcctcgcaccgccgggcggtcgtggccgcggccgcgtcgccccgtcccccgccgacaccggagggcgacggcgacgagcaggaggtggagagggcgatggggatggacggtggcatccccgggacctcgggggagtttctgcgccgcgtctcctcccgcgcttacggcatgcggcgccacctcatggagtcgctcgactccctcgcctacgacgtactggagacaaacccatggagagaagattccaagccagtctatgtgctagccacaagcgataaccacctatggacaatgaaaactcgcaggagccgcaatgaagtcgaaagggaacttggaaagcttttctcaaacggagggggttctggagttggaactaaatcgaagtactctggcaccaagtttaacatggttgtcgaagatatcagagatggagtactggtatttgaggatgaggatgatgctgtaaaatactgcaaccttctgcagggcggcggccaagggtgcgagggaattgcggagatagaagcatcatcagttttcagcatgtgccgtaaaatgaaagcccttgctgttcttttccgccgtggaaagactcctccattgcctcaaagcctcgagcgcgacttgagggcgagaaagaggtcactggaggactagtgctgtctgtttacgctgcatagaagtgttaattgtactcatctagctgttggaagcatgggccctaggccttgtatacatcatagtagtacatagcagtccctagctgaactggaaccgagcctgacagaaaacacagacataattgctcgagaccagaaatctctttgaaattggatggatgttcttgtaattatgagcaacatgtttacaatgaataaaatgcgatacatcaagttattgtcattatttgattgatgtcttccaactggtgaatgaacagtacatacagacataattgctccagaaatctctttgagattggatggatgctctttaattatgagcaacgtttttacaatgaataagatgcgaatacatcaagttaatatcattatttgatgtcatccaacttatgaatgaataaatagtgcaagaggttgacgaccctgcttgacgacaaggcgagtctgaagaaattcctagtcatggctacttgttgatgatacatcgatacaggccgggatgtgattgtgaaatgtgtctcagaattc

SEQ ID NO: 156839 - DNA, 2179 bp, Zea Mays
gagaaaaaacataggggtcccggtgacctaactctgcctccgggccatcgccggagttgcgccgccgccctagtctacagtgctaccaccacctagataggctacctgcaggttgtggcgtcggatgcttcaccgtgcactcgaaccctacgagagtcttggaagttgcaactcgcgcgacggtagcgaggggaagcgaagtcagcagacggcaacagagtccagacgagggaggggaaggcggcttccggctccagccgagaacccaaaaggagatccggaaaacgacacgagcactgcctgcctgcgcaccgcctccagttggcacttggcagccgcctataaatcccaccgcgggccggatccccatcgtcctgcccccgtgccctcgccgatcagcgatcaacaaaccactcctttcctctcctctcgtcatggtgctgtagctgacagaaggcattcttgggagtactagcgacttaccgagccgagcaagcgctagctctccatgtccatggccgatgcaaaggacgacgcggcaatggcggaggcccagcccctgggacggtggccggtgctgtcctacggcgtcggccacatgctgaacgacatcacgtcggcatgctggttcacgtacctgctcctcttcttgcagcagatcggccttgctcccagggccgccgccgttgtgatgctctcgggccaggtcgcggacgggctgatgacgatcctcgcaggcgagatgatcgacaggtttggccgcttcaagctatggcacatcggagggtcggtcctcgtcggcttctccttctcctcggtctttggtggctgcctgctgtgcaccatcctggggacggactcgtacctcgtgaggaccgtgggctacagcttcttcgcggcggtgttcaacgttggctgggcggccacacaggtctcccacatgtccatggtgaactgcatgacactgaatccgacaagccgtgtagccttagcaagctgcagaaacgcatccactatggtcgcaaatcttggtttgtatgggattgcgttaggtgtctttggcgctataaaggcgaaagaatactcagacattgttactcagtaccgatggatcgcgtacctgtccattttcatcggatgctgcttcctggtggtctttcatgctggaaccaaggagcctactttgaagtctgaacctagctgtaagaaggcggctcggatttcctgggggtactggttcaagaagaccctgtactaccaagttgctctcctttatatgcttgcgaggctgatcacaaacgtatctcagtcgctcatcgctttctacgtcaccagagatttgagaatgaatgagtactcgaaagcaataataccagccatcatattctgctgcagcttcttcgtgtccatcgtactgcaggagatcaagtggaccagccggcgcctcaagtccctcctcaccgtcggcgccacgctatgggtcatctccggcgtggccgtcttcgtcctcccgagccagatgaacagcctgatgtaccctctcgccatggtcatcggcgccgccaacgcgctcgtcatggtcacgacgatcgggctggagggcgcgttggtaggggaggaccttaacggctgcgccttcgtctacggctccctcagcttcctggacaagatctcctgcggaatcgcgctgttcgcgctggaatcgtacgaagacacgatggtgagctacggcgagacgaggggcctcaacacggtgagcaggtacgggacgggcctgatcccctcctgcttcgccgtactctccctggtggtcacctccacgctgaggctgcaggacgacaccccgagagccgctgcactggatgccccgctgcttgtctgattgtgaccgaagaaaaaaaaaaccggtggtgtgatattgtcgctcgctcgggttggaagagagaagaaatgtgcagcctcttcaattaggtttgaggggggatacgtcgcctgctttcaattagttttgaaacgggccactttgtaataaaattttccattccattccgtggcgttggcatcatggcatataaacagattcatagtcttggtgttaaaaatgtatgagaacaggttgctataagtaacttttaagggctctttggaacaaagcaaatacgaaggattcctcccctat

SEQ ID NO: 156840 - DNA, 2196 bp, Zea Mays
gagaaaaaacataggggtcccggtgacctaactctgcctccgggccatcgccggagttgcgccgccgccctagtctacagtgctaccaccacctagataggctacctgcaggttgtggcgtcggatgcttcaccgtgcactcgaaccctacgagagtcttggaagttgcaactcgcgcgacggtagcgaggggaagcgaagtcagcagacggcaacagagtccagacgagggaggggaaggcggcttccggctccagccgagaacccaaaaggagatccggaaaacgacacgagcactgcctgcctgcgcaccgcctccagttggcacttggcagccgcctataaatcccaccgcgggccggatccccatcgtcctgcccccgtgccctcgccgatcagcgatcaacaaaccactcctttcctctcctctcgtcatggtgttccggacttcccgttgcctcgaaatccacagctgtagctgacagaaggcattcttgggagtactagcgacttaccgagccgagcaagcgctagctctccatgtccatggccgatgcaaaggacgacgcggcaatggcggaggcccagcccctgggacggtggccggtgctgtcctacggcgtcggccacatgctgaacgacatcacgtcggcatgctggttcacgtacctgctcctcttcttgcagcagatcggccttgctcccagggccgccgccgttgtgatgctctcgggccaggtcgcggacgggctgatgacgatcctcgcaggcgagatgatcgacaggtttggccgcttcaagctatggcacatcggagggtcggtcctcgtcggcttctccttctcctcggtctttggtggctgcctgctgtgcaccatcctggggacggactcgtacctcgtgaggaccgtgggctacagcttcttcgcggcggtgttcaacgttggctgggcggccacacaggtctcccacatgtccatggtgaactgcatgacactgaatccgacaagccgtgtagccttagcaagctgcagaaacgcatccactatggtcgcaaatcttggtttgtatgggattgcgttaggtgtctttggcgctataaaggcgaaagaatactcagacattgttactcagtaccgatggatcgcgtacctgtccattttcatcggatgctgcttcctggtggtctttcatgctggaaccaaggagcctactttgaagtctgaacctagctgtaagaaggcggctcggatttcctgggggtactggttcaagaagaccctgtactaccaagttgctctcctttatatgcttgcgaggctgatcacaaacgtatctcagtcgctcatcgctttctacgtcaccagagatttgagaatgaatgagtactcgaaagcaataataccagccatcatattctgctgcagcttcttcgtgtccatcgtactgcaggagatcaagtggaccagccggcgcctcaagtccctcctcaccgtcggcgccacgctatgggtcatctccggcgtggccgtcttcgtcctcccgagccagatgaacagcctgatgtaccctctcgccatggtcatcggcgccgccaacgcgctcgtcatggtcacgacgatcgggctggagggcgcgttggtaggggaggaccttaacggctgcgccttcgtctacggctccctcagcttcctggacaagatctcctgcggaatcgcgctgttcgcgctggaatcgtacgaagacacgatggtgagctacggcgagacgaggggcctcaacacggtgagcaggtacgggacgggcctgatcccctcctgcttcgccgtactctccctggtggtcacctccacgctgaggctgcaggacgacaccccgagagccgctgcactggatgccccgctgcttgtctgattgtgaccgaagaaaaaaaaaaccggtggtgtgatattgtcgctcgctcgggttggaagagagaagaaatgtgcagcctcttcaattaggtttgaggggggatacgtcgcctgctttcaattagttttgaaacgggccactttgtaataaaattttccattccattccgtggcgttggcatcatggcatataaacagattcatagtcttggtgttaaaaatgtatgagaacaggttgctataagtaacttttaagggctctttggaacaaagcaaatacgaa

SEQ ID NO: 156841 - DNA, 3337 bp, Zea Mays
ctagctgggacttctttggcgcgttaaaacctgccttcttggcagcccagctcgcagtcgcagtcgcaggtcactcactagctagcttgggccctcgtcatctcgttccgcccaggtgaaagtttggcgcgcatgcacgttagcaggcaggaagtagcagcttcgtcttaacacccacccacctactactaccctgctgcaaaccgcaaccgcgcccgcgcgggagagcttaccctcgcgcaccaccaagcccgcacctgcatttctttgcggccgcgcgcgcgcgggccaatggggagttcctgcgtgaacctctcccgcgccgtcctccccggcttcggcgccgccgagggatcccgccgccgccgtggcctccttctcccgctgctgtcgtcgtcgtcgaggcgcctgcacggcggcggcgccgtggcgtgctgctcgtcgtcgtcctccgctactgctgccggctcatcgaggccgccgccaccgctgccgtccttcgtcgacccggcgcacggggatccgcctggagctgccggcggcgggatcggtgtcgccgagtttctcggcgccaagaacttcctcatcaccggcgggaccggtttcctggcaaaagttcttatcgagaagattttgaggacaaaccctgacgtcggcaaggtgtacgtgctcatcaaggccaaggacagcgaagcagcgttggcgagattgcgaaacgaggacatccacggggaaggctacgacggcttcatcgcaaggaagctggtccccgtcgtcggcgacgtcagggaagccaacgtcggcatcgcgcccgacctcgccgacgagatcgccgaccaggtggacgtcatcatcaactcagcggccaacaccacgttcgacgagcggtacgacgtcgccatggacatcaacaccgtggggccgttccggatcatgagcttcgcgcagcgcttccgacgcctcaagctcttcttgcaagtgtctacagcctacgtgaatggacagaggcaaggcctggtgctggagaagccgtttcgcatgggagacaccatagccaaggagctgccggggtggtcttcttctccagggcacaagatacccgtgctggacatcgaggcagagatcaagctggccttctactccacaagacaccgccccgatgattctccctcgtttgctcaagaaatgaaagatttgggcctagagagggcaaaactccatgggtggcaagacacctatgtgttcaccaaggccatgggggagatggtcatcaactccatgcgaggagagataccggtggtcaccatcaggcccagcgtcatcgagagcacctggagggacccattcccgggctggatggaagggaacaggatgatggatcctgtggtcctctattacgggaaaggccagctgacggggttcctcgcagatccagatggtgttcttgatgtggtcccggcggacatggtggtgaacgcgacgctggcgtcgatggcgaagcacggcggcggcgcggcggggcccgggatgcacgtgtaccacgtgtcgtcgtcgacggtgaaccctctggtgttcggcgacctgagccggttcctgttccagcacttcacgcggtgcccctacagcgacgcggcggggcagcccatcctggtgccgcccatgcgcctcttcgacaccatggagcagttcgccagctacgtggagacggacgcgctgctgcgcagcgcccggtcgacctcgtcctcgtcgtcgctggcgcagcgggcgcgcgacctgtgcgccaggtccgtggagcagaccgtccacctgggcagcatctaccggccctacaccttctacggcggccgcttcgacaacgccaacacggaggcgctgctcgcggccatgtcgccggcggagagggcgcggttccacttcgacgtgcggggcgtggactgggcggactacatcaccaacgtccacatccctggactccggaagcacgtcatgaagggcaggggcgtcgccgccaaccagctgctcgccagcacctccgtgtgaccgcccggcatgcgcgacggcgggcgtgtacactatctgccaggcccagaccgttgctgctgctacatgccattgccatgccgccgtcacaccacacggccggtgaccgacgaccaatcttgccgtacgttccatcctcatactactgctacgtacgtagcagcaacctaaggttgcgcttgcattgcactaaagatagatataccatgctgttcatctctcctccatgttgagctgttgattcttgcgcttgtacttcaaaacaaaatgaactctgtgatggtcgtcagtaacaaatctgacgaaacatcgtggctgtctgatagtgtcattcccgacactgtaagccgttcttttaccaaaatttactttactgatggaaggagttcaacagttccttgcaattgatgaatggtgatacagattagcacacgcctatttgtagtacaagcttacgctacacaggtgcaaatggtactccggtctttttggccagttccacgactctgtaaaaactgcataaaacagagggcggccagagttgtaggtggatggccgcccttctctgtcgcctgaaaagggtgaaactctgggcatagtgcttcggcattcccctgttatttctgtctggcccttgatccagcagacgttgacatcgattatcacgacacaggctgggaaacggtaacatcgacagctcaaaggaaataatccggtgttcttcgcgtcacatctggctcacctctcctaggggctggttcaaactatgataataggtagacaaaattggtaaatcatatgcaataggcgtgtactaagaagtctgttttggggaccgaaaaaaacatctggatgtctttttaagaaaaaaacatatagatagtaaattcatatcagggtcatgccacaaaaatgagccaactaaaatggggaagtagcagaatgatgtggccacattacctggatgaatgtgtggctgttgcagtcgtcaacttccaaaatggatgccatattgccgcatcgatagcagtaatttggagcactgaatatggtgacaaccttttgctcctgtaaatacatgcatcgtgcatgatcagaaagattgcttcactcaaagctcagctccataagcgtctaaaagtcaaatcggcttacatgagcccagttatatccctccataactaattgatgagcccgagctacgagtttgagattgtttgtgtgattaaactgctctgatatgtcctggagaaacaaaggaacaaatgaataacttcaaactaaaaaggtatacaag

SEQ ID NO: 156842 - DNA, 3100 bp, Zea Mays
ctagctgggacttctttggcgcgttaaaacctgccttcttggcagcccagctcgcagtcgcagtcgcaggtcactcactagctagcttgggccctcgtcatctcgttccgcccaggtgaaagtttggcgcgcatgcacgttagcaggcaggaagtagcagcttcgtcttaacacccacccacctactactaccctgctgcaaaccgcaaccgcgcccgcgcgggagagcttaccctcgcgcaccaccaagcccgcacctgcatttctttgcggccgcgcgcgcgcgggccaatggggagttcctgcgtgaacctctcccgcgccgtcctccccggcttcggcgccgccgagggatcccgccgccgccgtggcctccttctcccgctgctgtcgtcgtcgtcgaggcgcctgcacggcggcggcgccgtggcgtgctgctcgtcgtcgtcctccgctactgctgccggctcatcgaggccgccgccaccgctgccgtccttcgtcgacccggcgcacggggatccgcctggagctgccggcggcgggatcggtgtcgccgagtttctcggcgccaagaacttcctcatcaccggcgggaccggtttcctggcaaaaggtgatacgtagtatactttgttactgtatttctctctccgatccacgcgcgttcatgcatggctcgtcgcctagtcctgtgcttcatttctctccctttctctctgctctctgctgttgcttgctctgcgtcagttcttatcgagaagattttgaggacaaaccctgacgtcggcaaggtgtacgtgctcatcaaggccaaggacagcgaagcagcgttggcgagattgcgaaacgaggtcgtggacacggagctgttcaaatgcctgcaggacatccacggggaaggctacgacggcttcatcgcaaggaagctggtccccgtcgtcggcgacgtcagggaagccaacgtcggcatcgcgcccgacctcgccgacgagatcgccgaccaggtggacgtcatcatcaactcagcggccaacaccacgttcgacgagcggtacgacgtcgccatggacatcaacaccgtggggccgttccggatcatgagcttcgcgcagcgcttccgacgcctcaagctcttcttgcaagtgtctacagcctacgtgaatggacagaggcaaggcctggtgctggagaagccgtttcgcatgggagacaccatagccaaggagctgccggggtggtcttcttctccagggcacaagatacccgtgctggacatcgaggcagagatcaagctggccttctactccacaagacaccgccccgatgattctccctcgtttgctcaagaaatgaaagatttgggcctagagaggtagctagctagctaggcaaaactccatgggtggcaagacacctatgtgttcaccaaggccatgggggagatggtcatcaactccatgcgaggagagataccggtggtcaccatcaggcccagcgtcatcgagagcacctggagggacccattcccgggctggatggaagggaacaggatgatggatcctgtggtcctctattacgggaaaggccagctgacggggttcctcgcagatccagatggtgttcttgatgtggtcccggcggacatggtggtgaacgcgacgctggcgtcgatggcgaagcacggcggcggcgcggcggggcccgggatgcacgtgtaccacgtgtcgtcgtcgacggtgaaccctctggtgttcggcgacctgagccggttcctgttccagcacttcacgcggtgcccctacagcgacgcggcggggcagcccatcctggtgccgcccatgcgcctcttcgacaccatggagcagttcgccagctacgtggagacggacgcgctgctgcgcagcgcccggtcgacctcgtcctcgtcgtcgctggcgcagcgggcgcgcgacctgtgcgccaggtccgtggagcagaccgtccacctgggcagcatctaccggccctacaccttctacggcggccgcttcgacaacgccaacacggaggcgctgctcgcggccatgtcgccggcggagagggcgcggttccacttcgacgtgcggggcgtggactgggcggactacatcaccaacgtccacatccctggactccggaagcacgtcatgaagggcaggggcgtcgccgccaaccagctgctcgccagcacctccgtgtgaccgcccggcatgcgcgacggcgggcgtgtacactatctgccaggcccagaccgttgctgctgctacatgccattgccatgccgccgtcacaccacacggccggtgaccgacgaccaatcttgccgtacgttccatcctcatactactgctacgtacgtagcagcaacctaaggttgcgcttgcattgcactaaagatagatataccatgctgttcatctctcctccatgttgagctgttgattcttgcgcttgtacttcaaaacaaaatgaactctgtgatggtcgtcagtaacaaatctgacgaaacatcgtggctgtctgatagtgtcattcccgacactgtaagccgttcttttaccaaaatttactttactgatggaaggagttcaacagttccttgcaattgatgaatggtgatacagattagcacacgcctatttgtagtacaagcttacgctacacaggtgcaaatggtactccggtctttttggccagttccacgactctgtaaaaactgcataaaacagagggcggccagagttgtaggtggatggccgcccttctctgtcgcctgaaaagggtgaaactctgggcatagtgcttcggcattcccctgttatttctgtctggcccttgatccagcagacgttgacatcgattatcacgacacaggctgggaaacggtaacatcgacagctcaaaggaaataatccggtgttcttcgcgtcacatctggctcacctctcctaggggctggttcaaactatgataataggtagacaaaattggtaaatcatatgcaataggcgtgtactaagaagtctgttttggggaccgaaaaaaacatctggatgtctttttaagaaaaaaacatata

SEQ ID NO: 156843 - DNA, 2543 bp, Zea Mays
tctttggcgcgttaaaacctgccttcttggcagcccagctcgcagtcgcagtcgcaggtcactcactagctagcttgggccctcgtcatctcgttccgcccaggtgaaagtttggcgcgcatgcacgttagcaggcaggaagtagcagcttcgtcttaacacccacccacctactactaccctgctgcaaaccgcaaccgcgcccgcgcgggagagcttaccctcgcgcaccaccaagcccgcacctgcatttctttgcggccgcgcgcgcgcgggccaatggggagttcctgcgtgaacctctcccgcgccgtcctccccggcttcggcgccgccgagggatcccgccgccgccgtggcctccttctcccgctgctgtcgtcgtcgtcgaggcgcctgcacggcggcggcgccgtggcgtgctgctcgtcgtcgtcctccgctactgctgccggctcatcgaggccgccgccaccgctgccgtccttcgtcgacccggcgcacggggatccgcctggagctgccggcggcgggatcggtgtcgccgagtttctcggcgccaagaacttcctcatcaccggcgggaccggtttcctggcaaaagttcttatcgagaagattttgaggacaaaccctgacgtcggcaaggtgtacgtgctcatcaaggccaaggacagcgaagcagcgttggcgagattgcgaaacgaggtcgtggacacggagctgttcaaatgcctgcaggacatccacggggaaggctacgacggcttcatcgcaaggaagctggtccccgtcgtcggcgacgtcagggaagccaacgtcggcatcgcgcccgacctcgccgacgagatcgccgaccaggtggacgtcatcatcaactcagcggccaacaccacgttcgacgagcggtacgacgtcgccatggacatcaacaccgtggggccgttccggatcatgagcttcgcgcagcgcttccgacgcctcaagctcttcttgcaagtgtctacagcctacgtgaatggacagaggcaaggcctggtgctggagaagccgtttcgcatgggagacaccatagccaaggagctgccggggtggtcttcttctccagggcacaagatacccgtgctggacatcgaggcagagatcaagctggccttctactccacaagacaccgccccgatgattctccctcgtttgctcaagaaatgaaagatttgggcctagagagggcaaaactccatgggtggcaagacacctatgtgttcaccaaggccatgggggagatggtcatcaactccatgcgaggagagataccggtggtcaccatcaggcccagcgtcatcgagagcacctggagggacccattcccgggctggatggaagggaacaggatgatggatcctgtggtcctctattacgggaaaggccagctgacggggttcctcgcagatccagatggtgttcttgatgtggtcccggcggacatggtggtgaacgcgacgctggcgtcgatggcgaagcacggcggcggcgcggcggggcccgggatgcacgtgtaccacgtgtcgtcgtcgacggtgaaccctctggtgttcggcgacctgagccggttcctgttccagcacttcacgcggtgcccctacagcgacgcggcggggcagcccatcctggtgccgcccatgcgcctcttcgacaccatggagcagttcgccagctacgtggagacggacgcgctgctgcgcagcgcccggtcgacctcgtcctcgtcgtcgctggcgcagcgggcgcgcgacctgtgcgccaggtccgtggagcagaccgtccacctgggcagcatctaccggccctacaccttctacggcggccgcttcgacaacgccaacacggaggcgctgctcgcggccatgtcgccggcggagagggcgcggttccacttcgacgtgcggggcgtggactgggcggactacatcaccaacgtccacatccctggactccggaagcacgtcatgaagggcaggggcgtcgccgccaaccagctgctcgccagcacctccgtgtgaccgcccggcatgcgcgacggcgggcgtgtacactatctgccaggcccagaccgttgctgctgctacatgccattgccatgccgccgtcacaccacacggccggtgaccgacgaccaatcttgccgtacgttccatcctcatactactgctacgtacgtagcagcaacctaaggttgcgcttgcattgcactaaagatagatataccatgctgttcatctctcctccatgttgagctgttgattcttgcgcttgtacttcaaaacaaaatgaactctgtgatggtcgtcagtaacaaatctgacgaaacatcgtggctgtctgatagtgtcattcccgacactgtaagccgttcttttaccaaaatttactttactgatggaaggagttcaacagttccttgcaattgatgaatggtgatacagattagcacacgcctatttgtagtacaagcttacgctacacaggtgcaaatggtactccg

SEQ ID NO: 156844 - DNA, 2416 bp, Zea Mays
tctttggcgcgttaaaacctgccttcttggcagcccagctcgcagtcgcagtcgcaggtcactcactagctagcttgggccctcgtcatctcgttccgcccaggtgaaagtttggcgcgcatgcacgttagcaggcaggaagtagcagcttcgtcttaacacccacccacctactactaccctgctgcaaaccgcaaccgcgcccgcgcgggagagcttaccctcgcgcaccaccaagcccgcacctgcatttctttgcggccgcgcgcgcgcgggccaatggggagttcctgcgtgaacctctcccgcgccgtcctccccggcttcggcgccgccgagggatcccgccgccgccgtggcctccttctcccgctgctgtcgtcgtcgtcgaggcgcctgcacggcggcggcgccgtggcgtgctgctcgtcgtcgtcctccgctactgctgccggctcatcgaggccgccgccaccgctgccgtccttcgtcgacccggcgcacggggatccgcctggagctgccggcggcgggatcggtgtcgccgagtttctcggcgccaagaacttcctcatcaccggcgggaccggtttcctggcaaaagttcttatcgagaagattttgaggacaaaccctgacgtcggcaaggtgtacgtgctcatcaaggccaaggacagcgaagcagcgttggcgagattgcgaaacgaggacatccacggggaaggctacgacggcttcatcgcaaggaagctggtccccgtcgtcggcgacgtcagggaagccaacgtcggcatcgcgcccgacctcgccgacgagatcgccgaccaggtggacgtcatcatcaactcagcggccaacaccacgttcgacgagcggtacgacgtcgccatggacatcaacaccgtggggccgttccggatcatgagcttcgcgcagcgcttccgacgcctcaagctcttcttgcaagtgtctacagcctacgtgaatggacagaggcaaggcctggtgctggagaagccgtttcgcatgggagacaccatagccaaggagctgccggggtggtcttcttctccagggcacaagatacccgtgctggacatcgaggcagagatcaagctggccttctactccacaagacaccgccccgatgattctccctcgtttgctcaagaaatgaaagatttgggcctagagagggcaaaactccatgggtggcaagacacctatgtgttcaccaaggccatgggggagatggtcatcaactccatgcgaggagagataccggtggtcaccatcaggcccagcgtcatcgagagcacctggagggacccattcccgggctggatggaagggaacaggatgatggatcctgtggtcctctattacgggaaaggccagctgacggggttcctcgcagatccagatggtgttcttgatgtggtcccggcggacatggtggtgaacgcgacgctggcgtcgatggcgaagcacggcggcggcgcggcggggcccgggatgcacgtgtaccacgtgtcgtcgtcgacggtgaaccctctggtgttcggcgacctgagccggttcctgttccagcacttcacgcggtgcccctacagcgacgcggcggggcagcccatcctggtgccgcccatgcgcctcttcgacaccatggagcagttcgccagctacgtggagacggacgcgctgctgcgcagcgcccggtcgacctcgtcctcgtcgtcgctggcgcagcgggcgcgcgacctgtgcgccaggtccgtggagcagaccgtccacctgggcagcatctaccggccctacaccttctacggcggccgcttcgacaacgccaacacggaggcgctgctcgcggccatgtcgccggcggagagggcgcggttccacttcgacgtgcggggcgtggactgggcggactacatcaccaacgtccacatccctggactccggaagcacgtcatgaagggcaggggcgtcgccgccaaccagctgctcgccagcacctccgtgtgaccgcccggcatgcgcgacggcgggcgtgtacactatctgccaggcccagaccgttgctgctgctacatgccattgccatgccgccgtcacaccacacggccggtgaccgacgaccaatcttgccgtacgttccatcctcatactactgctacgtacgtagcagcaacctaaggttgcgcttgcattgcactaaagatagatataccatgctgttcatctctcctccatgttgagctgttgattcttgcgcttgtacttcaaaacaaaatgaactctgtgatggtcgtcagtaacaaatctgacgaaacatcgtggctgtctgatagtgtcattcccgacactgtaagccgttcttttaccaaaatttactttactgatggaaggagtt

SEQ ID NO: 156845 - DNA, 3722 bp, Zea Mays
aactgagaactccaaggggacaattgagaaatttgcccgctcaccctcccgaccgacgacaccgggagaacccaaccactgggcctccctcctgcacctgcagcctcgccgcgacacgctccccagagatctcccccgcccgacttgtcagatccagcaatccgcatcaccgccgccgtgatctccctcttagatcccggagatggcggggacggaggccttcgaggcctacttccgccgcgcggatttggaccaggacggccgcatcagcggccaggaggccgttgctttcttccagggcgccaacctgccgcagcaagtcctcgcccaggtatggatgcacgccgatcggaacaagactggcttcctcggccgcccggaattcttcaacgcgctgcgcctggtcaccgtggcgcagagcgggcgtcagctcacgcccgacatagttcagtcggcgctgtatggtcccgccgctgctcgaattccagctcccaagatagccgcaggggcggttcctccacaaatgggtgctgcgggggcgcctaggcctcaggggagtgctgcgatgacgcccacaccagggcaggttggggcggctcagatgaatccggctgccacaccaaggccccagggaagcggtatggtgccgacatctacccaagtaagcgtgccgcaggtgaaccctggtgctgctccaaggccccaagggatcaattctacgatgccagctgcgagtcagggtggtgctctacaagcaactcagtttgctggaccaagggttatgcagccacagccttctaacttgggaattacgcaacagcagccttctagtaccggtttcatgcatccgccacaggttggagctccagcagcttcattacaagctcaagcacctggaatcaatcaaggtttggtcagtggaggcagcatgggaggatctgtcggttggcaaggttggcaaggcggtaatgctgcctcagtgggaggcattccacaagctataccaggagctgctccttcacaggcagcacaaggtggatttggcccaggtttacctagaacaataggtgtggcgctggtacaacaggtacaagcaatgtctccatcgccattgcctccgcagagcaacagtgccggtttgcctcaggattcaaaagctttggtaatgtctggaaatggccctgccatcagttctggatcaagcacagacatcttctctgcacttacacagcagaagccaagcatatctgcacctgcacctcagacaagctcgattccgagctcatccagttttatgcccacgccaactggctcccagaacctgactaatctcacacagtttggttctttgcaaggtagcagccaacgtcaacagactcagcctgttgtaaagcccagtcctgctccagctgcacctgttgtctctgctgggatttctaatccatctccccaatggccaaaaattactcagtctgacatccagaagtacatgaaagtctttggcgatgttgacagggatagagatggcaaaataactggcgcagaagctcgcactctgttcctcagttggaggcttccaagagaggtcctgaagcaagtatgggatttgtctgaccaagacaatgatggcatgctttctttgagagagttttgcgttgctctttatttaatggagaggcaccgagctggaactcctctgcccccagcacttcctgactctcttaggcatgatgagacactgttacgagctacaggcttgccttcaacagcatacaatgggccatcatggcaacagaatcaaggaggattatcacaaagaggccctggagcacctggggtgcctgctggtggtgtgcggccacccttgccaccacatttgcattcacaaactgatggggctagcagaccagggcagccaagatcttacatgtctgggatggataatcatgtggtagttcaaggaaacaaagatgacaaaagtggagtgaaccagtctgtgcaggaggtggcggatcctaagaaggttgaggtggagaagcaggtcctggattccagagagaagctggagtattaccgcacaaagatgcaagatcttgttctgtataaaagtcggtgcgacaataggctgaatgagattacagaaagggcgtcctctgataaacgcgaggtggaatcattggccaagaaatatgaagagaagtacaagcaagtagctgagttagcttccaaactagcagttgaagaagctgcatatcgcgatgttcaggagagaaaagttgagctgaatgatgcactgattaaaatggttcaaggtggaagtgttgatggtctgcttcaggttcgagctgatcgaatccaatatcaattagaagagatggaaaaagctcttagtgaacggtgcaaacactttggacttcaattcaaatcatccgcatcagttgaacttccttccggttgggaacctgggccacaagagggactcattgagtgggatgaagactgggataaatttgaagacgaagggtttagtattgttaaggataatggtacaatacaggaaaacccaatttctgctgaaaatggaaaagtgccatctctttgggatgatggtgatgatatgtctcctgttgcatcctctaatggtcatatcaaggaagaaaggcgttacagtgtaggtgatcaagtggctgagagtgaaatagcatatgattttggtgatgaatctgtgaggagtcctggaagtgctggaagaagtgcctcagggagtccatttaaatcttcccgctttgggatgcatgattcatctcccagtaaaagggaaagttacagtgaccatggcggttctgaatctgtttttggtgacaagtttggtgatgaaacttcctggaactttgatgatcaagatactgactctgtttggggttctactgcactgaacgctgaggcggaccaacacggtggcagtggcacacataactctttctttgggtccgaggcaggctctccaagtggcgctagtgtatttggaaagaagaggagttcgttctttgatgattctgtcccaagtacccctgcatacacatctgggttctctccaaaattcggtgaaagccgtgatgatagctcctcttatagctttgggaagtttgattccttcagatcccaagacactgggttcttcccccaggaaagtggtttctccaggtttgactccattagcagctccaaaggcgaggatgtatcaggattcgatacagggaatagctcaagaaattttggtcggtttgactctttcgatgacaccgatccgttcggttcgagcggaccttttaaagcatctggaagccggtctccacccaagttctgatacgttttctgctctgagtagggatttttgtgtcttgcgtcctgctgatttgtcaatacaaggttcagattctttgagcgaactctagcgtaacatgaatatttctcctttgctcgacatttcttccgtttgccttgtgtgcaatttttccaggccatctcacgtacaaagtggacaggtttgggttatatctttgtatttgtataaacatttttctgtatcttgtaaattacaccaagtctgtctttgtttatattagtttatacgtacgaaatcacttctcctcaacctcttatttcattcattgtatttacgttgctatggtatagcaggaaatataatattgcacttgcgt

SEQ ID NO: 156846 - DNA, 1187 bp, Zea Mays
gtgctcctgcgtgtacgtctcctccaggagcatttgtcttccttgtcgtgctcctatagatggccgtgcaccatggcggggatgcgaggatgactaggagcacggcgagcaagacgaccgagacgaacctgccaccgtcgccgagcaccgtgaggtccacctagtcgtcgtcgttcgagccgcatcgtccctggtggctgcgcggccgtcctcctcgtcggtggtcgcgcggtcgtccgtccagccggcagcagacgcgcgtgctcttctcctcctttcgatgagctgtcgtgcctgcgtccccggtggctgcgcgcccgtcctcctcatcggtggtcgcgcggtcgtccgtccagccggcagcagacgcgcgtgctcttctcctccttccgatgagaagtcgtgcttgcgtcctcggtggctacgcgcccgtccctggtggctgcgcgcccgtcctcctcgtcggtggtcgcgcggtcgtcctcctcgccggagatctggcacgcgtgcgacagcacagggtcggcgaacacggatagcggacgcacagtagccttccaggtttagcggctccggaagccgacctctattttagcgtttgttttagcggatgttgttggaggcttacaggacggtgacttccgctacaaatagggtacagactcattcacgccgctgtgttcctgccttcctggtggccacgggaatccaggccttacaagccgcagcgcagggtcggcgacggcgagggacagcgggtggcgccgcggcggcgtcgggggctcggggcgaggtctcgcgagatgcagggcgagggctggcgcctggcgactggcgacgggggtcgggctgtccgggagtcgggagatggagatgggagccggagttgggcctcgttaaattttttcacaattttaggtatggccctccgcccctgtgcccagatggttcagagcatggtgtgcctcactcattctggtcttgattctagagtttgaggtgcagcaatatagtgagcagtcaatcgtgatatgtgtatgggcaattacaggaagtgtacaagtggctgtgtcggtaattctcgaggtattgcctcccacaaccacagctgaggcattccgctcaagccttctatcagtttaattgtagtggactgtgtaaagattgaagagcaaggagccatgctg

SEQ ID NO: 156847 - DNA, 2362 bp, Zea Mays
atcctcgcacacggcaggcacgtgaccgacacccccagcgcacgaactccaaaatagcgagccgaagggggccacgaccacgagtcctccacctccctctccgccgcgtcgcacgcgcttgacgcgcgccgagagccgaatcggagccacgaggcagccgccccgggcggatcgatcctagggccagggcatgggcggaggggacgccgacgccggcggcgagcccgcggacgcgcaggccacgctccacatccggtgcaccaacggctccaagttcaccgtgcggaccgacctgggcgccaccgtcggggcgtttaaggcgatcgtcgcccacagctgcgacgtgccggcgccgcagcagcggctgatctacaagggccggatcttgaaggacgagcaaaccctagccagctacggtgtggagacagaccatacaatccacatggtacgtggtgctgtgctatcaccaacatctactgcacctgcagccaaccaagaacctaccactgctgctcctgccagttccccggcaacaggattgggtggcttgttgcaaagtctgggtactacaggcgctgctgctaacagtgaggggttgtttggatctgccccccctggattagaccaaatgcagcaacagctagctgaaaatccgaacttgatgagggaaatgatgaatatgccactcatgcagaatttgatgaacaatcctgaactcatacgcagtataataatgaacaatcctcaaatgcgcgagctcattgaccgcaatccggatcttgctcatgtcctcaatgatccaagcattatgcgccagacttttgaagcagttcggaatcctgaactcatgagggagatgatgcggaacacagacagagccatgagcaacatcgagtcttctccagaaggattcaacatgctccgtcgcatgtatgaaactgtccaagagccttttctgaatgcaacaacaatgggtagcgagggtgatcgaaattcgaatccattctctgctcttctaggaaatcaggggtctaaccaagcaagagactcagctgcaaatggaacaactagagcttcagaccccacatcagggtctccagctccaaatactaatccacttccgaatccttggggctcaaatgctggctctgcccaaggagcagcaaggtcctctcctgctagcaatgttaggagtactacagcaagtggcctaggagggttgggttcagcagatttgggaagtacgcatggtgccagtggtggtggctctgatgctaccttgttgactcaagttttgcaaaacccaactatgatgcagatgatgcagaacattatgtctaatcctcagtccatgaatcagctgcttaatatgaatccaaatgtacgtaacatgatggaatccaatactcaaatgagagaaatgattgagaatccagaatttcttcgccagttaacatctcctgaaacattgcagcaattaatttcgttccagcagtctttgatgtcacaacttggccaacaacaagctggacaggagcggacacaatcaggctctggtgcaggcaatgtcaacctcaacaccttgatgaacatgttcagcgggcttggtgctggtggtggcctaggtgttccaaatgctcctaatgcaccgccagaagaactgtacgccacacaattagctcagctccaagaaatgggtttctttgacacacaagagaacatccgagccttggccgctaccgctggaaatgttcatgctgcagtggagcgacttcttggaaatatgggctaatagaatatgatgatcataactgtactcagatattgtgatttttagttggcattgtgagatcatgtctggctcattggttttacacccgagggtgagaggcggcgtctagattttgtgttcaaggatgaataaagagtgtaccgggggaacctttcatatacatatggtctggtgtcatggttaaggccccgtttcaatctcatgagataaactttagcttcctgctaaactttagctatatgaattaaagtgctaaagtttagtttcaattatcaccattagctctcctgtttagattataaatggctaaaagtagctaaaaattagctgctaaagtttatctcgcgagattggaacagggccttaattgttgttgttggtacatttggttgctgtacatacatattgatcttttgctatcttatttgcagtgtacatggacaatgtcgtattctgtacaagagggagagggaatatgtagtgcagaccatgagaactaaaaaaactgtatttcgattgctcaagaaaatatatgagatgcatccataactcagagatgtattttgttgc

SEQ ID NO: 156848 - DNA, 2042 bp, Zea Mays
gttttcgaggcgtcgcagataagagatccctcccgcacctccgagccgccactcccaagacacagagcgtcagagcccgatcccgatccagcgaggcggcgaccctccctcctccccttgcttcgctcgtccagccctgaccacccgcatccccgtcagtcatggcagcggcagcaggcggaggcgcggtgcgtgcgctgtcccagaaggagcaggacatacagatgatgctcgccgccgacgtccaccttggcaccaagaactgcgatttccagatggagcgctatgcctttaagcgccgcaccgacggtatctgccttcgctctcgcatccgtgcctttttcctatccgtatgccaatacacgtagatgtagactgaaaataaaccaatcgctcgtgcccaagtgctacagttccgggccgagcgggaatatccagagtagttggtctgtgaacttgtgtcgtcgtatttgtactgtattatgagctttagatttttcgaggtaatgatcagagacagtagtcattcattcaaattgcgaaagtctagtgctatgacagcatgaggcttttatggggatctagtaattagctgtgatctatggagcacttttagcagcttctccatcttcaagattcttgctactgtttttatcaggcatctacatcatcaaccttggcaagacatgggagaaactgcagcttgcagcgagggttatcgttgccatcgagaacccgcaggacatcatcgtccagtccgcccgcccctatggccagcgtgctgtcctcaagttcgctcagtacactggcgctcatgccatcgctgggaggcacacccctggtaccttcactaaccagctccagacctccttcagcgagcctcggctgctcatccttaccgacccaaggactgaccatcagccaattaaggagtctgctctggggaacatccccaccattgccttctgtgatactgactctcccatgcggtatgtcgatatcggcatcccagcgaacaacaaggggaggaacagcattggatgcctgttctggcttttggccaggatggttctgcagatgaggggcactatcctccctgggcacaagtgggaggtcatggtggatttgttcttctacagggacccagaggaagcaaaggagcaggaggaggaagctgctgttgcccctgagtttgccgcaatcactgattaccaaggagctgatcagtggggtggtgaccagtggacctctgatgtgactgcgccgcctgttgctcctactggtgctgattggggtgctgctccagctccggttcctaccggtgatggctgggatcaagctggggcccctgcacctgtggtggacggcactgtacctcctctggttgctcctactggttgggaccaagcagccccgccaccgactgcccaaggctgggagtaggcgttgtccactctgagacctgtcttctgcggctgaagttcagtatttttctgtggtctgaatgtccaaattccggtggcatcttctatagctatgctttgctttgctttgaacacttgtgttttagggctttctagctgaacccgttgtccaatattgctgacgttgaaatttttggttaatcttaaaactggaaatgatgcttgcggttctctgagaggtcctgatacctgatcattgctaggaatgaattgcagcgctgctactactgttttgactgagtgtgcccagctgctagcagttatggcagtgtgctatctgcatctgttcaaactagtgtcaaacctcacttttgtcgtgatgtgacagtgaagcgaaatagcaacttgtatcggttccaaatttctctgctattggatcactgttacaattgctccgactcttgcaaacctcattttggtctatgttggggcttgggagtgcttgatgatgtcctgatctcggaatggtggcatagaatacttgaatgtcgatcatactagtgggaatgtaaatttctatgatcaatgtactccatccaatccaaaaagattgccgta

SEQ ID NO: 156849 - DNA, 1735 bp, Zea Mays
acggcccaacgcacgtctttgcagttgcagaagtttcctagggttttcgaggcgtcgcagataagagatccctcccgcacctccgagccgccactcccaagacacagagcgtcagagcccgatcccgatccagcgaggcggcgaccctccctcctccccttgcttcgctcgtccagccctgaccacccgcatccccgtcagtcatggcagcggcagcaggcggaggcgcggtgcgtgcgctgtcccagaaggagcaggacatacagatgatgctcgccgccgacgtccaccttggcaccaagaactgcgatttccagatggagcgctatgcctttaagcgccgcaccgacggcatctacatcatcaaccttggcaagacatgggagaaactgcagcttgcagcgagggttatcgttgccatcgagaacccgcaggacatcatcgtccagtccgcccgcccctatggccagcgtgctgtcctcaagttcgctcagtacactggcgctcatgccatcgctgggaggcacacccctggtaccttcactaaccagctccagacctccttcagcgagcctcggctgctcatccttaccgacccaaggactgaccatcagccaattaaggagtctgctctggggaacatccccaccattgccttctgtgatactgactctcccatgcggtatgtcgatatcggcatcccagcgaacaacaaggggaggaacagcattggatgcctgttctggcttttggccaggatggttctgcagatgaggggcactatcctccctgggcacaagtgggaggtcatggtggatttgttcttctacagggacccagaggaagcaaaggagcaggaggaggaagctgctgttgcccctgagtttgccgcaatcactgattaccaaggagctgatcagtggggtggtgaccagtggacctctgatgtgactgcgccgcctgttgctcctactggtgctgattggggtgctgctccagctccggttcctaccggtgatggctgggatcaagctggggcccctgcacctgtggtggacggcactgtacctcctctggttgctcctactggttgggaccaagcagccccgccaccgactgcccaaggctgggagtaggcgttgtccactctgagacctgtcttctgcggctgaagttcagtatttttctgtggtctgaatgtccaaattccggtggcatcttctatagctatgctttgctttgctttgaacacttgtgttttagggctttctagctgaacccgttgtccaatattgctgacgttgaaatttttggttaatcttaaaactggaaatgatgcttgcggttctctgagaggtcctgatacctgatcattgctaggaatgaattgcagcgctgctactactgttttgactgagtgtgcccagctgctagcagttatggcagtgtgctatctgcatctgttcaaactagtgtcaaacctcacttttgtcgtgatgtgacagtgaagcgaaatagcaacttgtatcggttccaaatttctctgctattggatcactgttacaattgctccgactcttgcaaacctcattttggtctatgttggggcttgggagtgcttgatgatgtcctgatctcggaatggtggcatagaatacttgaatgtcgatcatactagtgggaatgtaaatttctatgatcaatgtactccatccaatccaaaaagattgccgta

SEQ ID NO: 156850 - DNA, 1231 bp, Zea Mays
gccagcaagtaagcagagcagccggccgtgcgtccgatcgagaagaagactcacgggagcaagccgtactgtaccgatggcaatgacggccggggcgccgtccatggaggtggagcaggacctcccaggcttccggttccaccccaccgaggaggagctcctcggcttctacctctcccgcgtcgtccacggcaagcagctccacttcgacatcatcggcaccctcaacatctaccgccacgacccctgggaccttcctgcgatggcgaagatcggggagagggagtggtacttcttcgtgccgcgcgaccggaaggccggcagcggtgggcggccgaaccggacgacggagcgcgggttctggaaggccacggggtcggacagagccatccggagctccgccgacgccaagcgggtgatcgggctcaggaagacgctcgtcttctaccaggggcgcgccccgcgcggcaccaagacggactgggtcatgaacgagtaccgcctccccgaccacgccgccgccgccgcgccaccgcccaaggaggacatggtgctctgcaagatctaccggaaggccaccccactgaaggagctcgaacagagggcctctaccatggaggagatgcagaggcgcagcgacgcggccgaagcagcatcagcatccctggtccaggctgtaggctccgccgacgacaactacctgtcatcgggcgacacccacgacataagcgtcctgcagatcccagcctcgtcctcccccgcgccgtcgggcgacagctacggcgggcccgcgctcagggaggcccagacggaagccgcggacgccacgacggtcacggtggcgtcggcgtctctggtgcatgccgcatgcatggcaggcccggcagcgaggcatggtgacctgcccaccccgcaggtgccgacgcatctcggagtcgccgactggacgcagatgcaggacccgttcatgctgcgcagcctgtggcaggaccagctcttcttctcccccttagcccacctgctctactgaagtccgaaacgaggaagaagatgaactgtgtcactgtcacccaaatgcgatggccagccgcaaccgcaatgcttgcttagatagttagatgtcaattcggctgtacatattctgttcgtaaagactaaagactcgtagatgctcttttttgtttatgcatgcatttggtacgggaccttggacatgaaagtcataataaat

SEQ ID NO: 156851 - DNA, 2209 bp, Zea Mays
cataaatgtatatatatagacgccgatggatcggtgtcgtcgtcttcatcatccaggcgccgcagtgtaggtctagatcatccaatccaacacaccggtcgagcaatggcggcagggctgcaggtgttcggacagccggcgtccaccgacgtcgcgagggtgctgacctgcctcttcgagaagaacctcgagttcgagctcatccgcaccgacaccttcaagaagtcccacaagctccccgagttcatcaagctaagggtatgcctttgtcatcttggcctggtggtgcatgcattccatcactttccctttctcggatcggtcggttattggagatcggatcactattcactaggtcaggtgctagctagcaataagctgctgttgtgggtgtgactctgcaggatcctactgggcaggtgactttcaagcacggtgacaaaacaatcgttggtaagaactttgataagaaacagctaccagaacgaacaaagagagagctaatactatataaaaggctgaaaaatgagatgaaatgcatggcagattccagggccatttgccggtacctgtgcacgcagttcccggacgacgggtacaagaagctgtacgggacggggtcgctggagcgggcgtccatagagcagtggctgcaggcggaggcccagagcttcgacgcgccgagctcggagctggcgttccagctggcgttcgcgccgcacctcaagaacgtgcggcccgacgaggcccgcgccgcggagaacgagaggaagctgcacggcatgctgggcgtctacgacgacatcctctccaagaacgagtacctcgccggcgacgacttcaccctggccgacctctcccacctgcccaactcccactacatcgtcaactcctccgacaggggcagaaagctcttcaccgccaggaagcacgtcgccaggtggtacgacaagatctccacccgcgactcgtggaggcaggtcatcaagatgcagagggagcaccccggcgcgttcgagtgatcggtcggtggtctacgcggtgatgcatgcatgcatgcatgcgccgcggcgtgttcctcgatcgccgccagccaccggcggcttcgtcgtcgtcaggcttcgtaccttgacggggttgtcgacttcgtcgtacgtccctgtggcctgtgggctaaaataacgtgaagcctgcctacgcggtgtctcgtgtcttaccttttaaatttgcaccatatatacgcactgtcttttctgggtatttgttgtattgtgatgtacggagtattcatcaactccttttgcaagattggtcaattattcaggcatttttgctcgtttcgcgctatgtttgtttggcttctcaagatcaaactgagaaataccacgacgtctcgcatttgtagcatatctatactactctttaagatggtagtgtacatcctatggtgtacggttctgccaccatcttctccgagatcctctctgcgacgcacgcccgagtctgctcctctccgttctccctccgcatttcaccttctctcccttcctctccaagcaccgtcctcctcgcctagatccgtacaagcggcaaataacctctccggcggcgagacagttggagtcgacctctggcgaggatgcttcgaagcgcaacccactcccgtctgcgctcgtctccaacctacagtctgtgctcgctgcccgccgcccgtccgcggcagtggtcagcaccgccgccacaactagcgaggctgaggccttcgctcaggaagcagaagcgtccgatgcccccgcgggagatgggacgccggcgaggcccatcgtgctgctgacctgtgccgggggatctggtcggcgggtatcgcggcgctcgtcgacgccctcgttgccgccgaccgctgcgacgtccacatgtgtgccccccgaagggacaagcaagcatgtggccattcaattaccatccgtgaaaccatcgctgcgtcatccgtggatttcacaggcgctaaggcttttgagacattagacacgccggttgactgcgtctcgttggccttatctaggaggttgtttgtctgtttccttagtcgtctcctgctttggtgaccagtgatatcaacacgggatcaaattgtggatatgagaaaattgatcccccaagcattagcagcaaaaaggtttctggaacataaaattataatattaatgct

SEQ ID NO: 156852 - DNA, 1970 bp, Zea Mays
cataaatgtatatatatagacgccgatggatcggtgtcgtcgtcttcatcatccaggcgccgcagtgtaggtctagatcatccaatccaacacaccggtcgagcaatggcggcagggctgcaggtgttcggacagccggcgtccaccgacgtcgcgagggtgctgacctgcctcttcgagaagaacctcgagttcgagctcatccgcaccgacaccttcaagaagtcccacaagctccccgagttcatcaagctaagggatcctactgggcaggtgactttcaagcacggtgacaaaacaatcgttgattccagggccatttgccggtacctgtgcacgcagttcccggacgacgggtacaagaagctgtacgggacggggtcgctggagcgggcgtccatagagcagtggctgcaggcggaggcccagagcttcgacgcgccgagctcggagctggcgttccagctggcgttcgcgccgcacctcaagaacgtgcggcccgacgaggcccgcgccgcggagaacgagaggaagctgcacggcatgctgggcgtctacgacgacatcctctccaagaacgagtacctcgccggcgacgacttcaccctggccgacctctcccacctgcccaactcccactacatcgtcaactcctccgacaggggcagaaagctcttcaccgccaggaagcacgtcgccaggtggtacgacaagatctccacccgcgactcgtggaggcaggtcatcaagatgcagagggagcaccccggcgcgttcgagtgatcggtcggtggtctacgcggtgatgcatgcatgcatgcatgcgccgcggcgtgttcctcgatcgccgccagccaccggcggcttcgtcgtcgtcaggcttcgtaccttgacggggttgtcgacttcgtcgtacgtccctgtggcctgtgggctaaaataacgtgaagcctgcctacgcggtgtctcgtgtcttaccttttaaatttgcaccatatatacgcactgtcttttctgggtatttgttgtattgtgatgtacggagtattcatcaactccttttgcaagattggtcaattattcaggcatttttgctcgtttcgcgctatgtttgtttggcttctcaagatcaaactgagaaataccacgacgtctcgcatttgtagcatatctatactactctttaagatggtagtgtacatcctatggtgtacggttctgccaccatcttctccgagatcctctctgcgacgcacgcccgagtctgctcctctccgttctccctccgcatttcaccttctctcccttcctctccaagcaccgtcctcctcgcctagatccgtacaagcggcaaataacctctccggcggcgagacagttggagtcgacctctggcgaggatgcttcgaagcgcaacccactcccgtctgcgctcgtctccaacctacagtctgtgctcgctgcccgccgcccgtccgcggcagtggtcagcaccgccgccacaactagcgaggctgaggccttcgctcaggaagcagaagcgtccgatgcccccgcgggagatgggacgccggcgaggcccatcgtgctgctgacctgtgccgggggatctggtcggcgggtatcgcggcgctcgtcgacgccctcgttgccgccgaccgctgcgacgtccacatgtgtgccccccgaagggacaagcaagcatgtggccattcaattaccatccgtgaaaccatcgctgcgtcatccgtggatttcacaggcgctaaggcttttgagacattagacacgccggttgactgcgtctcgttggccttatctaggaggttgtttgtctgtttccttagtcgtctcctgctttggtgaccagtgatatcaacacgggatcaaattgtggatatgagaaaattgatcccccaagcattagcagcaaaaaggtttctggaacataaaattataatattaatgct

SEQ ID NO: 156853 - DNA, 1230 bp, Zea Mays
ttgctgtggtagagacaatatgattgttggcttgtcgcaagcaagaatccataccttgctctttgcctttgcacctctccttttttcatttacgctgtgtcaggtagcaaggcaagcatttcgtctctctagttcctttaaatacctggtggtagtagtgagacatgttagcatcaccattcttcatccctcgttgtcatctcacagcttgggctagagaccaaacaaaccaaagggaagcatggcagcaggcctgcaagtgtttggccagccggcgtctactgatgttgccagggttctgacgtgcctgtttgagaagaaattggagtttgagcttgtccgcattgatacatttaagacacatcacaggcttcctgagttcatcaggctgcgggatccgaatgggcaagtgaccttcaagcatggcgacaaaacccttgttgattcaagggacatatgccggtacgtttgcaaccagtttccaaattacggaaacaagagcctctatggatctggtgctctagaacgggcatcgatagaacagtggctccaggcagaagcccagaactttggccctcccagctctgcgcttgtgtttcagctggcgttcgttccgcacctcagtcacctgggcgttcgtcaggaccctgctgttattgctgaaaacgaggacaaactgaagcaggttcttgatgtttacgacgaaatactctccaagaacgagtacctggctggtgatgagttcaccctggccgacctgtctcaccttccgaactcgcactacatcgtaaacaccgagagaggaaggaagctcttcaccaacaagaagaatgtggcgaaatggtatgacaggctctcgaagcgcgagacatgggtgcaggtcgtcaagatgcagaaggaacatcctggtgcgttcaagtaatggcttgtcttggggagttgtgagtatggcttcatcgtccgtgttggtctggctcatcagtgttaaaagcccatcagtgtcgtcaaccagaataatgtgaagcccaactgtgatgtatggtcttttttttttaaaagcgcatttgtaaactattggctatttcttgcacgtgccaattcatcgtcacatataaaataaactgtatctttgaccttgtgtcatgtacgcaaaataaataagttttagtgatgttatcgagaaatatagtagaaagtatgttctaactgccagttggtatgttctaacac

SEQ ID NO: 156854 - DNA, 922 bp, Zea Mays
tttttttttctcccttcttttcctctttgtgcctagtctcgattctcaaataagttcaaaattgcacttaccccgtttgttaagtacaggatccgaatgggcaagtgaccttcaagcatggcgacaaaacccttgttgattcaagggacatatgccggtacgtttgcaaccagtttccaaattacggaaacaagagcctctatggatctggtgctctagaacgggcatcgatagaacagtggctccaggcagaagcccagaactttggccctcccagctctgcgcttgtgtttcagctggcgttcgttccgcacctcagtcacctgggcgttcgtcaggaccctgctgttattgctgaaaacgaggacaaactgaagcaggttcttgatgtttacgacgaaatactctccaagaacgagtacctggctggtgatgagttcaccctggccgacctgtctcaccttccgaactcgcactacatcgtaaacaccgagagaggaaggaagctcttcaccaacaagaagaatgtggcgaaatggtatgacaggctctcgaagcgcgagacatgggtgcaggtcgtcaagatgcagaaggaacatcctggtgcgttcaagtaatggcttgtcttggggagttgtgagtatggcttcatcgtccgtgttggtctggctcatcagtgttaaaagcccatcagtgtcgtcaaccagaataatgtgaagcccaactgtgatgtatggtcttttttttttaaaagcgcatttgtaaactattggctatttcttgcacgtgccaattcatcgtcacatataaaataaactgtatctttgaccttgtgtcatgtacgcaaaataaataagttttagtgatgttatcgagaaatatagtagaaagtatgttctaactgccagttggtatgttctaa

SEQ ID NO: 156855 - DNA, 2339 bp, Zea Mays
accgccccacctcgctacgcacctccatctcccctatccccaccaacgccacgacgcagcaatcccatcaggccaccaccaccatgcccccgcctctcccgccagatccgatcgagccgtgcgcgccggcgccggcgatggacgtggcgttgccagcagccgtcgtcgccacaatcctctcccgcctcgacgtccgctccctcctcctcgccgccgccgcctgccgcggactccgtgcctgcgcctcccacgcgctcgtattcctcccctccttccacctcctcgaggtggctcttacgcacgaactgctgcgcccgctgctgccgccgaacccgagcctgcggagcctgcgcctcgactgcgctcgcctcgaggacgctgccatcgcctgcctcgcgcgcgccggcctgcacgagctcctcctcctcaactgcgacaacatcagcggccgcctgctctgcgaactgggcaccacctgcagagatctcagggtgctttctctcaactctcttggtgcacgtaggggactggtggtaaatttctctgatctacaggaattgctcaatggatgttctcagctagagaatctgagattggcacttgatttctcaacttttgatgaccccaactttggtcgtgtatgggcatctgcttctgaaaggctatcatctcttgagattggttatattcctatgacaatgttacttgaacttctggtagcagttacagaaggacaacaatgcatggattatgttaagacaccagttttctttcctagccttcaaaagttatgcctggctgtggatttcataaccgaccatctaattggttccatatcagtcgcacttccatcactgacacatctggacctgcaagatgcaccaattgtagagcctaattcgtcatcagatctcaccaatgctggtcttcagcaaatcaatccgcatggtaaactgaagcatatttctctcatgcgcagccaggaattcttagtaacatctttccgccgggtgaatgatctcggaatcctgttgatggccgacaggtgttcaaatcttgaaagtgtatgtcttggtggcttctcccgtgttacagacactggttttagggcaatcattcactcctgttctggtcttcataagcttcgggtttcccatggaagccatctaactgatttggttttccatgacattatagccacttctctttgcctaacccatgtgagtctgaggtggtgcaaactcctaactaatgttgggattgagagattatcatgcaacaaggatctcaatgtactggatctcagggactgccgcagtttgggtgatgaagctgttagggctctgagctgccttcccaagttgcagactttgacattggatgccactgatattagcgaccaatcattgaaatatctaggacttggaacatgccctctaacttccttgtctctgaggggttgtcggaagcttacaaacgattgtatcaccttattatttgctggtcatgtgaaacagagcctacagatgttggatctctccagaattccaagtatcacggatgatggtatcatgttattagcaaggagcagaactcctcttattgagctcagaatgcgagaaaatccgaaaatcggggatgcctctgtgatggctcttgcttccatgcaaatagatggtggaacctacggtagtaccttgcagctgctggatctttttgactgtggtgggattacaccccttgcagcacgttggtttaagaaaccttacttccctagattgcggtggctgggaattacaggtagcttgaatagggttatggtggatgcactgtctcgaagccggccattcttacatatggcttgccgtggtgaagaattagggactatgctctgggacacctcctctgactggtatcggcataatgacgacgatctcgacgagcttgaacagtggctcttggaaggtgaaccggtttcagatgatgacaccatcatggaagaatgaggaaactgtttggtaagctggtgtcatgttcctgccatagttgcttgaccaaatacgatgtcaccaagctcgaattagctatgcgatgatctgttgtactagtagtgaagatattctcaatatatatgtatcattccttgggcagccattctgtgtgcatatggcaacctgacgttatgtatgtttgattcagatttttgttctggtccagttctcacgtgacattgacacattgaggagtcgtgctggccattccaagcataaagctagtgtgctgttttatgattttaacatattgatatttctactcatacttggcaaaattatttcaga

SEQ ID NO: 156856 - DNA, 222 bp, Zea Mays
cttcccgataagcattgtgtaaggctggctgcttcctttggtctgatatcatctgaggctcggaccactgttcttgtccagaagaatgtgtgtttatgcaaccaaagccatcatgcacagaagttgatatcaaaatatttgagacagacaattgtagttggtgacacgaagatataccgcatattttcagatggctctggttgctgtggtgattactggtga

SEQ ID NO: 156857 - DNA, 3621 bp, Zea Mays
cgaaacgaaacccatctccgcaagggcagcaaccctaccgggaccggcagctcgctcgccttgcgccgcgcattcccaccacgcgtctccccaaattcgcggccgtctatatatataaagaccccgcccaccaccacttttgccatcgcaacccctcgtccttttttgcacagcggccatgcctcccctcacgagctccctcctctcccgctccaccaccggcggctcctccgcccgcggcgtggcggtggccgcagcgatctccaggcccgccgcggacgccgccccttcctcctcgtccccgcctgcccgtccgaccccgaggccgcgcccaagcccggcgtcgcccttcgcgtccggcctcgcgggccgcctcttcggcggccaccgcgccgccacccgctccgcgtcgtctgcggccgccgtcttcgagcgccggtttgcctcagccgcgaccaggaactcgtacgatgaaatactgacgggcctcgggaggccaggaggcggagaggagtttggcaagtactacagcctgcctgctctctccgatccgcggattgatcggctcccatattctatcaggattcttctcgagtcggcgatcaggaactgcgatgatttccaggtcaccgggaaggatgttgagaagatcttggactgggagagaagtgcaccgaagcaagttgaaatcccgttcaagcccgcccgtgtcctcctccaggattttactggtgtcccggctgttgtcgaccttgcgtgcatgagggatgctatgagcaaactcggcagcgacccgaacaaaattaatcctctggtacctgtagaccttgttattgaccattcagtacaagtcgacgtggcaagatcagcaaatgctgctcaggcaaatatggagcttgagttctatcgtaacaaggaacggtttgggttcttgaaatgggggtcctctgcattccgcaacatgcttgttgttccacctggatctggcattgttcaccaggtattttgatgatatggttgttttttaaaataacttaatctagtcaaggttattttatctatcaaaaacttataatcctctatttcactttgttaggtgaatcttgaatatctggcaagggttgtgtttaataatggtgggatcctttaccctgacagcgtcgtaggcactgactcccacacaactatgatagatggtcttggagttgctgggtggggagttggtggtatagaggcggaagctgcaatgcttggccagccaatgagcatggtcttgccaggggttgttggcttcaagttatcaggcaagctgaggaatggagttacagccactgacttggttctaacagtaacccaaatgcttcggaaacatggtgttgtcgggaaatttgttgagttctatgggcaaggcatgagtgaattgtcacttgctgatcgggcgaccatcgcaaatatgtctcccgaatatggcgcaactatgggtttcttcccagttgatggaaagacgctggactatttgaagcttactggccgaagtgatgatacagtggccatggttgagtcctacctgcgtgcgaataagatgttcgttgatcacagccaggctgaagctgaaagagtatattcttcttatctagaactgaacctggaagaggtagaaccatgtctatcgggaccaaaacggcctcacgatcgagtgacattgaagaatatgaagtctgactggctttcttgcttggatagcgatgtaggattcaagggttttgctgtccccaaagagtcacaaggcaaagttgcagaatttttgttccacgggactcctgcaaagataaagcatggtgatgttgtaattgcagcaataaccagttgcacaaacacatcaaatcctaatgtaatgctgggagctgctttggttgccaagaaggcttgtgagttaggcctggaggtaaagccatggattaagacgagccttgcacctggttctggtgttgtgaagcagtacttggataagagcgggttgcagaaatatcttgaccagcttggcttcaatattgttggctatggttgcacaacctgcattggaaattccggggagcttgatgaatccgtatctgctgcaattactgagaatgatattgtttctgctgctgtattgtccggaaacaggaattttgaaggacgtgtgcatcccttaactagagcaaattaccttgcttcccctccattagttgttgcttatgccttggctggcacggttaatattgattttgagaaagaacctattggaatctcgaaagatgggaaagaggtttacttccgggatgtttggccatcaacagaagagatagccgaggttgtcaagtcaagtgtgcttcctgacatgttcaagagcacatatgagtccatcacccaaggaaatcctatgtggaatgagctgccagtctcaacaagcactctctatccctgggatccatcatctacatacatccatgagcctccttacttcaaggatatgacaatgactcctcctggcccgcgaccagtgaaggatgcatattgccttctgaactttggtgacagtatcacaactgaccacatctcgcctgccggaaacattcacccagacagcgcagctgcaacatatctgaaggagcgtggtgttgaaaggaaggacttcaactcatatggtagccgaagaggaaatgatgagatcatggctaggggaacctttgccaacattcgtctcgtgaataagttcttgaagggtgaggttggacccaagacaatccatgttccatctggggataagctttcagtttttgatgctgctatgaaatacaagaatgaagggcatgatactattatcctggctggtgccgagtacgggagtggtagctctcgggattgggctgcaaagggcccaatgcttcagggagtgaaggctgtgatagcaaagagctttgagaggattcaccgcagcaatcttgctggcatgggaatcatccctctatgcttcaaagcaggggaggatgcagacaccctgggcctaaccggccatgagcgctacacggtccaccttccaaccaatgtgagtgagataaagcctggccaagatgttaccgtgacaactgataatgggaagtcgttcacttgcacactcagattcgacactgaggtggagcttgcttactacgaccatggtggcattctaccatatgtcatcagaaagattgcggaacagtagattgagatgattgcgatgcggtgaatcgtaattggtgtaaacgacccatttttgagtacttataataacctctgagtttctcagagtgagctgtctgaacttttagtaaccttttgctttctttaagacactgttaataatatgttaactcctgcaatatctgaatatacatttggcagatgattccctatgttgtaaatgacactagttcataacactgacgcagttcaaagcggttcttgttatctggtggtactcaaattagtactgcaaacaatcgattagctgattttattttgagttttgtattacgaacctttttgactggtgaaacggttattccatttgcttcaagcgatttggaaatgattgttaca

SEQ ID NO: 156858 - DNA, 970 bp, Zea Mays
ttgttgagagtaacgtgatgctacaacacatcatcaaaagtaatgattcggactggtcaaatcatgcgccccaaacattatcttgagcagcgatgctgccagccttggtcatatcaacaagaaaaagagcgggatatgatgggctattagggaaaacatgttctggacaaatttacagccacctgtttcctccatgatgaagagaaaagagataagaacagagggagaagaaaaaaaaagaaaggatttgcgtcgctaacaaataacctaatttctatacctcgctatcagtacactaattaccaggcggagtcaagacggcagctttgcaaacagcaacagcacagcaggtgtacgagcaacagctacacttgattgctgcttctctcatcatctctagcagatctgcactgtgcccttcttttcaagagcagtagcagcttcagtgggtgccgttcaactgtgccggagccgagaagggtgcgagggacttggcgggaagggtgacgccgccccctcggagagaaaccgaggggctcttgctccagctagctttgctcatggcatccgagtcgaggaacaccacgacgacggttatatcgtcgtggaaatgcctcctcacgccacggtcgatcttcttgaggtctgagtatctcatctccctcttcttggcagcttcttgcatcgcggctttcactagtctccgagcgattccctgggggcgccaaggcaaggaaattacaggttcagcggaagtgaatggaaaggacactggaaaatgaacggtaggtgaaacatgttgacagactgacagatagaaacttgtaaggtaccagaacgcaatggtgactgggctatttcacaagagcaaactaatcaaatatacttccacaggtatcaggtatacttaagctttgcaatccagattatgtaataacttgtatgccataagttgtgagttacatccaca

SEQ ID NO: 156859 - DNA, 743 bp, Zea Mays
gaagacctttatctttgataccatattaagttgtgtacaatgactagttcaaccccaaaacttaaggtgatagggagtggtgagcaattcactcatactccaacaagtaaaaggagattactcacatcaggttataattgataaaagggtgctatttaatcataattcaatgctagtctgtcccatgcagtgtcagccttttggataaggtgcatgtgtttcccaagatatttttgggtaaccaagtcaaactggcgccatcatagtgagatttagttgaaggaggtaaggcggcattggtcactgtcgggggacttgcagctggtgcgactgtcggatctgcactggagaatttcctgcaggttgatctcgtgccctttctaggcatccactcccctgccgtcgttgtcagcgaatttattctcttctcccaattgctggtatcactgtttgttaggtaggatctgaaaccaagctgtcatcctggcatgtaattaactgaaacggatcgtgttcgatcttcaaagggtcagggaaatgcttgttttccgcacaaggtggaagcagcagctgtgtatagcaaaacaatacgtgggcatctctgtcccttataaagaccacctgtatctagtctagttctctcaagctcaatctcaagtctttcagatagaagcttgtatggattgcagaatgtggaatgtaaattcttggatcaatattctggaatataccgatccctctac

SEQ ID NO: 156860 - DNA, 1253 bp, Zea Mays
cttatccaaacttctcttacaaaaaaggcccagatttgttgcgaaataccacactccgagggccttgtgtgagggggaaaatcatccgcgcagagggacagggcacacgcactccgagggagcgcagccgaggagaaataatggccacggcgacgaccctctctttcagcggcggcggcggcggcactaccctgctccgcgggcacgtggccttgacgtcggggcggtgctgcacgttcccgagctcgcggtggaggccgccgcgcttgtcggcctcccgcgcggatgactcctcgccggctccgttcgagatgacggtggaggacgcgctgaagctgctcggcgtcgcagagggcgcgtcgttcgacgaaatcctgcgcgccaagaacgccgtcctcgcctcctgcaaggacgaccaggacgccgtcgcccaggtcgaagcagcctatgacatgttgcttatgcagagcttatcacagcggagggctggaaaggttgctaataaccgcatccgctttgctgatgttaaacctgtaaagagtgcaggagctgggacagtcccacagtggatgcaggcaaccatgaagaatgcacccattacatttgagactccatcttcgagcagcttgggcatccagtcatgtgtttatggtgcactaatggttttcacctatgctagtggaagctcgacatctttgccgtctgcgtacagtagccctgatgtgccaggttttatcctagcaacaggatttggtgcatcactgtattttctggcaaagaaaaatatgaacttaggtaaggcggcattggtcactgtcgggggacttgcagctggtgcgactgtcggatctgcactggagaatttcctgcaggttgatctcgtgccctttctaggcatccactcccctgccgtcgttgtcagcgaatttattctcttctcccaattgctggtatcactgtttgttaggtaggatctgaaaccaagctgtcatcctggcatgtaattaactgaaacggatcgtgttcgatcttcaaagggtcagggaaatgcttgttttccgcacaaggtggaagcagcagctgtgtatagcaaaacaatacgtgggcatctctgtcccttataaagaccacctgtatctagtctagttctctcaagctcaatctcaagtctttcagatagaagcttgtatggattgcagaatgtggaatgtaaattcttggatcaatattctggaatataccgatccctctac

SEQ ID NO: 156861 - DNA, 1229 bp, Zea Mays
cttatccaaacttctcttacaaaaaaggcccagatttgttgcgaaataccacactccgagggccttgtgtgagggggaaaatcatccgcgcagagggacagggcacacgcactccgagggagcgcagccgaggagaaataatggccacggcgacgaccctctctttcagcggcggcggcggcggcactaccctgctccgcgggcacgtggccttgacgtcggggcggtgctgcacgttcccgagctcgcggtggaggccgccgcgcttgtcggcctcccgcgcggatgactcctcgccggctccgttcgagatgacggtggaggacgcgctgaagctgctcggcgtcgcagagggcgcgtcgttcgacgaaatcctgcgcgccaagaacgccgtcctcgcctcctgcaaggacgaccaggacgccgtcgcccaggtcgaagcagcctatgacatgttgcttatgcagagcttatcacagcggagggctggaaaggttgctaataaccgcatccgctttgctgatgttaaacctgtaaagagtgcaggagctgggacagtcccacagtggatgcaggcaaccatgaagaatgcacccattacatttgagactccatcttcgagcagcttgggcatccagtcatgtgtttatggtgcactaatggttttcacctatgctagtggaagctcgacatctttgccgtctgcgtacagtagccctgatgtgccaggttttatcctagcaacaggatttggtgcatcactgtattttctggcaaagaaaaatatgaacttaggaggaaacctggtccaacatttaggttaacggtgctcttacaccaatcttcatgtgtggatttagcatgccatcaacactctctgtggtcctgtatccaggtaaggcggcattggtcactgtcgggggacttgcagctggtgcgactgtcggatctgcactggagaatttcctgcaggtaggatctgaaaccaagctgtcatcctggcatgtaattaactgaaacggatcgtgttcgatcttcaaagggtcagggaaatgcttgttttccgcacaaggtggaagcagcagctgtgtatagcaaaacaatacgtgggcatctctgtcccttataaagaccacctgtatctagtctagttctctcaagctcaatctcaagtctttcagatagaagcttgtatggattgcagaatgtggaatgtaaattcttggatc

SEQ ID NO: 156862 - DNA, 1060 bp, Zea Mays
cttatccaaacttctcttacaaaaaaggcccagatttgttgcgaaataccacactccgagggccttgtgtgagggggaaaatcatccgcgcagagggacagggcacacgcactccgagggagcgcagccgaggagaaataatggccacggcgacgaccctctctttcagcggcggcggcggcggcactaccctgctccgcgggcacgtggccttgacgtcggggcggtgctgcacgttcccgagctcgcggtggaggccgccgcgcttgtcggcctcccgcgcggatgactcctcgccggctccgttcgagatgacggtggaggacgcgctgaagctgctcggcgtcgcagagggcgcgtcgttcgacgaaatcctgcgcgccaagaacgccgtcctcgcctcctgcaaggacgaccaggacgccgtcgcccaggtcgaagcagcctatgacatgttgcttatgcagagcttatcacagcggagggctggaaaggttgctaataaccgcatccgctttgctgatgttaaacctgtaaagagtgcaggagctgggacagtcccacagtggatgcaggcaaccatgaagaatgcacccattacatttgagactccatcttcgagcagcttgggcatccagtcatgtgtttatggtgcactaatggttttcacctatgctagtggaagctcgacatctttgccgtctgcgtacagtagccctgatgtgccaggttttatcctagcaacaggatttggtgcatcactgtattttctggcaaagaaaaatatgaacttaggtaaggcggcattggtcactgtcgggggacttgcagctggtgcgactgtcggatctgcactggagaatttcctgcaggtaggatctgaaaccaagctgtcatcctggcatgtaattaactgaaacggatcgtgttcgatcttcaaagggtcagggaaatgcttgttttccgcacaaggtggaagcagcagctgtgtatagcaaaacaatacgtgggcatctctgtcccttataaagaccacctgtatctagtctagttctctcaa

SEQ ID NO: 156863 - DNA, 1929 bp, Zea Mays
acacataacgatggtccacaatgattattttccatcactattagctgtccataatatctgggatagtcaacagcagaaggaaccacactgattttgctgtattatattgagagtgttacaacattgtttttttgagacctctcacctctgttttaaatgtggcggcatctagatttttagatattttattttaaatatcagttcattttttcttgcagaatgtaaatcctgttgatttttctgtattatatttagagtggtacgatattgtttttttggagatctacgttttaaatgcgaggatattcagatttttagatattttattttaaatgtcagttcatatttttttccttgcagaatgttacccctaagaaggcagaagagactgctttgatatctgatgttgttgcagattcaccatacaagattttcatagcgggcattgctggagtgatctcatctaagatgctaatggagattgttagtgcatttggcccattggctgcataccgctttctttttaacaatgagctcggtggaccctgtgcatttcttgagtacgccgaccgctccgttacttctaaggcatgtgctggcctcaatgggatgatgcttggtggacgtgtactgactgctgtgcatgtgtttcctaatcctcatgtggaggctgctaatgaggcttccccattttatggtattcctgacaatgctaaattgcttctgaaagaaccaacaaaggtcctgcagctaaaaaatgtgtttgaacgagaagagtatatgctactttcaaaatctgagctggaagaaacattggaagatgtacgtgttgaatgtacgaggtttggagcagtcaaatctgtaaatgtagttgagtatcctgctgctggtgtcagtgctgcagaggagaacatagttgagctcaagattgaatgcactgaattttctgatacggaaaacattgcaaaggctgtatcagaatattctgtaccgattattccgagcatagatgttctaaatcattctgtcgcttcggatactaaagatgtggatcttattccagagagtcaggatcagaaggacaaacacctcccttcaaatgcagcactttgtgagagtgaggcacctgtagcagatgaggacgcagagcttgatgaaactcagtctagagctgctctccccacaccgcaacatgctgaagctgatcatacggaagcagctgtggatgagaataaacatacaggagcagggaaggttactgctactgcaacggacgacgatgcagtagaaaagagtcatggagacccaagaacctcagagacctgcaatcctgctggacctacagacaaagcggagaaacctggaaggtactccgaacaaggcgctggtgatgtgactgaagatcgtccagaaaaagaagcccaagctgttgggaccagcgacactggtttcgtgtttgaacctggttctgtgcttgtggagtttttgcgggaggaggctgcttgcatggccgcacattccttacatgggcgtcgcttcgggaacagaactgtgcatgctggatatgctccgtatgatctctacttgcagaaataccccaggtgattctgcgtttgcgactgcatgagttgcgatacgagctttgcctatgtgccagtatttcacagaaacttcagacttgtagttttggcttttgagcctttggatggttcttccggtccagatagtggtaccattagttgaacgaaatatttggaaatgttgttccacagtagatatcggatggacaataggatataagtactggatagagacacaagttgtcgttaacatcgttctttacttcgctattaatgtttttgatgacgtcagacattagtgtggatggatggatggaatggatttattgcaagattttgactgctataa

SEQ ID NO: 156864 - DNA, 2416 bp, Zea Mays
agatagaaatgctggaaggaatgagtatgcaacaccataccatggagaatcagagttgaaaaggagaaggtccagaagcagggatcatgatcgagaaagatacagtaggtctatctcaccgccactaagggaacaaaggtataattaccgtggacgtgattttggcaatcctccttactactctatggagaaatcaagggggaagtatgctgaagttgataaacaaagatcgtcggggagtggtggatacattggtgggttgcaccagagatatgaaagccggcttggtggatactcaccaaggaaaaagaaaacatcactgcaagctgagcaggcaactaccaagactccttccaaggtcattcagtccccagaaaaaaaatcagccacatgggatcagcctcctgttaaagcaaaccaatctaactttcctaccactttcctgccaactgttggccagatggctcctactccattcagtttcagcgtgataaaggacccttcaactacagctgtgacaatgttggcaggtaatagtttgactgcagattctgtccagcttacacaagcaacgcgcccactcaggaggttgcacattgaaaatttgcctgattcagctacagaggataagttgattgactgcttgaatgacttcttattgtctactggcagtaaactccagcggtctaaaccatgcctcagttgtacgataaacagagaaaaacgtcaggcttttgtggaatttcttacaccagaggatgctacagcagctatttcttttgatggaaggtctctaaatggatctgtgttgagaattcgacgccccaaagaatatgttgaaacggtgaatgttacccctaagaaggcagaagagactgctttgatatctgatgttgttgcagattcaccatacaagattttcatagcgggcattgctggagtgatctcatctaagatgctaatggagattgttagtgcatttggcccattggctgcataccgctttctttttaacaatgagctcggtggaccctgtgcatttcttgagtacgccgaccgctccgttacttctaaggcatgtgctggcctcaatgggatgatgcttggtggacgtgtactgactgctgtgcatgtgtttcctaatcctcatgtggaggctgctaatgaggcttccccattttatggtattcctgacaatgctaaattgcttctgaaagaaccaacaaaggtcctgcagctaaaaaatgtgtttgaacgagaagagtatatgctactttcaaaatctgagctggaagaaacattggaagatgtacgtgttgaatgtacgaggtttggagcagtcaaatctgtaaatgtagttgagtatcctgctgctggtgtcagtgctgcagaggagaacatagttgagctcaagattgaatgcactgaattttctgatacggaaaacattgcaaaggctgtatcagaatattctgtaccgattattccgagcatagatgttctaaatcattctgtcgcttcggatactaaagatgtggatcttattccagagagtcaggatcagaaggacaaacacctcccttcaaatgcagcactttgtgagagtgaggcacctgtagcagatgaggacgcagagcttgatgaaactcagtctagagctgctctccccacaccgcaacatgctgaagctgatcatacggaagcagctgtggatgagaataaacatacaggagcagggaaggttactgctactgcaacggacgacgatgcagtagaaaagagtcatggagacccaagaacctcagagacctgcaatcctgctggacctacagacaaagcggagaaacctggaaggtactccgaacaaggcgctggtgatgtgactgaagatcgtccagaaaaagaagcccaagctgttgggaccagcgacactggtttcgtgtttgaacctggttctgtgcttgtggagtttttgcgggaggaggctgcttgcatggccgcacattccttacatgggcgtcgcttcgggaacagaactgtgcatgctggatatgctccgtatgatctctacttgcagaaataccccaggtgattctgcgtttgcgactgcatgagttgcgatacgagctttgcctatgtgccagtatttcacagaaacttcagacttgtagttttggcttttgagcctttggatggttcttccggtccagatagtggtaccattagttgaacgaaatatttggaaatgttgttccacagtagatatcggatggacaataggatataagtactggatagagacacaagttgtcgttaacatcgttctttacttcgctattaatgtttttgatgacgtcagacattagtgtggatggatggatggaatggatttattgcaagattttgactgctataa

SEQ ID NO: 156865 - DNA, 3180 bp, Zea Mays
  misc_feature (3179)..(3180): n is a, c, g, or t
ctcccgccctagcttgataatgtgtccaaccctgccatactgatgtactacctgaattattgtcagatcataatgtagagagataacatatacatacatagaatgatgtgcttacactatattttttccagcttatcagcaaattaagagatcttctacagtagcaagggctaagacagacacgatacgatatattccatatatatattcagtaaaaacacaataatttaatgccctctactgtcaaatgactaaaaagagatcgtcattgcaaaatatattgttccataccagccagctaagacgtccccgttcatcggggtccgaggagtgaccgaattctttcaggacttcttcccaggccggaataagcagtctctgcgccaaaatagcatccttgcattagaccatgcaccgtaccaccagcagcagcatttataggacgtccaattttatgttcgctgcctttattgttggttcaatcctgtcttcgcttctatcccgtacctctcccgaccgcaattgtagcagagaaacttctgggagctgactagcttccttgctcctcggtgttgtcatcttggccaaaaaaaaaaacagagagaggaagtcatgcatgtgcatctgcatggccaaaacaggcttattttcggcccaccttgctcgcacacatgccccccctctcttctcccattatataaccacagagtagaaccatttctcttctcaaggatcaatgtaatatgttggagagattttttttacccgagaagctgcgccgcgcgccaatctgatcatctccatgcgctgaagatcgttggtgcccgccatgcttcccgatgattgctgccacatcgtcgctgaggaaatttcaagccccatagctgcacatatactcgacttctactacggcgacggcctgggcgatgacctctttgccgcggtgactgccacctctggcccattccctgccactgacgatgatgtttcttcgtctaccgctaccacccctcctatctgcggctacagtgaagacaccgcagctgctggtggagccacagcctacaccccgttgacatccttcgacaccactctcacagccctcctggaggaagagcagcaccatggccttgacgccgggttcctcccgcagatcgatggcctatcagaggtagcagcatactatccaactgccaccgatgaggccagcatagggcagttcgaccagatgggacttccagagaccttagacgagcaggtgcctcctccagtgcagatgagcagcagtgcatctgccttgatgccgctcgctacagactatgatgagtgcttcatggcagccgtagcagctggagggttcatgggtctggatggagccatgtatcagcaaactggagcagttcttccaggctgcagtgcagatgcatcacaacaggaattcttcagcagtgccggcagcaacagtatggtgatgattggcgagtatcagaagatgatggaaggtgaagggctgacaacaacatatgacgacacagattccatgcaagggacatttaacactaatgcagagatgcaggtaggaggaaataatcagcacctgataaacggatgcaacgggaacccagcaacgttacctccgacggaactatcagtactggaagactccacgtttaaggtcgtccgcttgtcgcctgaagagagaaaggaaaagatccataggtacataaagaaacggaacgagagaaatttccgcaaaaaaataaagtacgcatgtagaaaaaccttggcggatagcaggccccgtgtccgtggaaggtttgccaagaatgatgaactctgtgaagcagcgcaatcaggctcccagagtcatgaacattatgaacaaactgaccatatgaaagaagaggacatgctggacacatctgacattcttgcgcaactaaatggattaaatccctacaactacaagtataaatccaccattgaatcatggatatgattctcaagtctcaaccacacaaaaactaagacccaatgtcttatttgaagttgtgcgacgtcgagcacagtttttttatttccattaaaataaacttacatcattagaagctcaagaatttagttcaactaatgtagatttaatgtatgtgtcaatctgctgtcacttgtttaccattgtcacaagtgaatgtggtagtgagtctccagaagagtcatttgtgtatataactatgtcatctatagaaataaaagttctgaggatctcttaagtatttcttcgtagcagagtctagatttgatctgctcatcagagaatttcaaggatagaatgtagcaatggtacatcagagaatcaaaaaacatggcaacagagcacagtaataagtaaacttaatatattgggcctttttagcctgtgcccttatgtgcagaaggatcaagagttggaactaacaagaacaatatgaataagcatagcaaaaatgttcaacattatactctttgagtttagtaaggttaatgatcttgctgataaatcataggcccatgaaattccagatatccaattctgttgattttctgtttaatttgagttatccaagaacaaactacagatctatagagagtaatgtatccacagttgcattacggcaaagagtaaaatcttaatgaactaaaaggtttgacgctacggggtaagtaggcaatgtaccaggttgcaaatctccattacagctaagctacaatgagtggtcaaatttacaaactatgcttcacccaaaccagcattctacagaattggaactccgactggatggcaatctagaaaacaacactcagaattccatgtcagaatttactctggcaaaaaagatttgatcgatgaaatcaatacgattggatccttaatgaggtgtttggtttgatgaatcactctatccaaaatgaagtggtgcataataggttcattcctcaaatttggtgggatgactctattccacatattagtactaaacaactaactttgaggaatgaggtggtgatggattaactcactccatttcacaaaccaaacaaaaaagtgaagtgtgagaagatgatggactacatcattcctcaaaccaaacactctataaattgatgtacagtttcttgaaccacacttgtctattcgtacnn

SEQ ID NO: 156866 - DNA, 1768 bp, Zea Mays
ctcaaggatcaatgtaatatgttggagagattttttttacccgagaagctgcgccgcgcgccaatctgatcatctccatgcgctgaagatcgttggtgcccgccatgcttcccgatgattgctgccacatcgtcgctgaggaaatttcaagccccatagctgcacatatactcgacttctactacggcgacggcctgggcgatgacctctttgccgcggtgactgccacctctggcccattccctgccactgacgatgatgtttcttcgtctaccgctaccacccctcctatctgcggctacagtgaagacaccgcagctgctggtggagccacagcctacaccccgttgacatccttcgacaccactctcacagccctcctggaggaagagcagcaccatggccttgacgccgggttcctcccgcagatcgatggcctatcagaggtagcagcatactatccaactgccaccgatgaggccagcatagggcagttcgaccagatgggacttccagagaccttagacgagcaggtgcctcctccagtgcagatgagcagcagtgcatctgccttgatgccgctcgctacagactatgatgagtgcttcatggcagccgtagcagctggagggttcatgggtctggatggagccatgtatcagcaaactggagcagttcttccaggctgcagtgcagatgcatcacaacaggaattcttcagcagtgccggcagcaacagtatggtgatgattggcgagtatcagaagatgatggaaggtgaagggctgacaacaacatatgacgacacagattccatgcaagggacatttaacactaatgcagagatgcaggtaggaggaaataatcagcacctgataaacggatgcaacgggaacccagcaacgttacctccgacggaactatcagtactggaagactccacgtttaaggtcgtccgcttgtcgcctgaagagagaaaggaaaagatccataggtacataaagaaacggaacgagagaaatttccgcaaaaaaataaagtacgcatgtagaaaaaccttggcggatagcaggccccgtgtccgtggaaggtttgccaagaatgatgaactctgtgaagcagcgcaatcaggctcccagagtcatgaacattatgaacaaactgaccatatgaaagaagaggacatgctggacacatctgacattcttgcgcaactaaatggattaaatccctacaactacaagtataaatccaccattgaatcatggatatgattctcaagtctcaaccacacaaaaactaagacccaatgtcttatttgaagttgtgcgacgtcgagcacagtttttttatttccattaaaataaacttacatcattagaagctcaagaatttagttcaactaatgtagatttaatgtatgtgtcaatctgctgtcacttgtttaccattgtcacaagtgaatgtggtagtgagtctccagaagagtcatttgtgtatataactatgtcatctatagaaataaaagttctgaggatctcttaagtatttcttcgtagcagagtctagatttgatctgctcatcagagaatttcaaggatagaatgtagcaatggtacatcagagaatcaaaaaacatggcaacagagcacagtaataagtaaacttaatatattgggcctttttagcctgtgcccttatgtgcagaaggatcaagagttggaactaacaagaacaatatgaataagcatagcaaaaatgttcaaca

SEQ ID NO: 156867 - DNA, 2812 bp, Zea Mays
tgggtggctagcgtgcctctttttgttgtcgtaaaccctctctctctctctcgcgcagtctcgctccctctgtctctctcttagcgacgactgggcggccgtcgctgctggcctgctgccctacgccaggtgcccaagtcttcttcgggctcgtcgtcgtcggcgacgaccaccaccaggtccctgttgtttttaagaaaaacaaaacaatggaggcaacattagcattctcccaggacagcccaccaatttcgataatttgtgcagcaaagtttgtgggtctacccctaaccattgatcctagccttgcttctggcttggcacccaccctacgttttgcttctggagaatcactccatggtgtcaacccaatcctcctgtacattgccagcggtgcaacaattccctgcttctctgggaagaatgatattgagtttgggcatgttgttgaatggcttgaatatgtccccatctttctttcaggctctgaatttgaaaatgcctgcttatttgttgatggattcttggcctcccggacctttctggttggtcatggcctcacaattgctgacattgtagtttggtcaaatcttgctggaattggtcaacgatgggagagtctaaggaaatcaaagaaataccaaaatcttgtccgctggttcaacagcatagattcagaatacagtgacacactgaacgaagttttggctgcatatgttgggaaaagaggaattggaaaatctcctgcaccaagccttaaggaaaaggtacatgtttcaaaggatccatcagctccagaagttgatctccctggtgcaaaagttgggaaagtctgcgttcgttttgccccagaacctagcggttacctccatatcgggcatgcaaaggctgggctattgaacaaatactttgctgaaagatatcaagggcgcctaatagttcgatttgatgatacaaacccttcaaaagaaagtaatgagtttgtcgagaacgttttgaaagatattgagacgttggggatcaaatatgatgctgtcacatacacatctgattatttcccaaagttaatggaaatggctggaagcttgattaaacagggtaaagcatatattgatgacacaccgaaggagcaaatgaggaaagagaggatggatggtattgagtcaaggtgcagaaatagtaccgtggaggaaaatctgtcattatggaacgagatggttaatggaactgaaaggggtatgcagtgctgtgtacggggtaaacttgacatgcaggatcctaacaagtcactcagggatcctgtttactaccgctgtaatattgatcctcaccatcgtgttggttcaaagtacaaggtctatccaacatatgactttgcttgcccatttgttgatgcattggagggggtgacgcatgcccttcggtccagtgaatatcatgacaggaatgcacaatattatcgaatccttcaagacatggggttgaggagagtagaaatttatgaattcagccgattgaatatggtttacactcttctaagcaagcggaagcttctctggtttgtacaaaacaagaaggtcgaagattggactgatccacgttttcctactgtccaagggatagtacgtcgtggcttgaagattgaggcattgatacaatttatactccaacagggtgcttcaaaaaatctgaatctcatggagtgggataaactctggacaatcaacaagaagataattgatccattgtgcgcaaggcatactgctgtgctaaaagaccagcgtgtcatctttactcttacaaatggtccagagaagccatttgttcgaattttaccaaggcataagaaatttgtgggtgctggaaagaaggctacaaccttcgccaacagaatttggttagattatgctgatgcagcagccattagcaagggtgaggaagtaacccttatggattgggggaatgctatcgttaaagagatcaaggtggagagtggagtaattactgaactagttggagaattacatcttgaggggtctgtgaagacaacaaaattgaagatcacatggctagcagatatagaggagctagtccccctctcattggttgaatttgattatctcatcagcaagaaaaagctagaggaagatgatgacttcctcgagaatctcaacccttgcactcgacgagaaaacccagcccttggagatgcaaacatgatgaacctcaagcgtggagagatcatacagctcgagaggaaaggctactataggtgtgatgccccttttatcagatcgttgaaaccggtggttctgtttgcgatcccagatggccggcagcaggccttgcttaactaggcatgatgaccacttttggcacatggaattcctgagatatcggagtccgcaatcaatattgttgcattatacactttgatattgtactgtgactgggcttactcatggtgcgctagatggccaggcctatcctgtcaaccaagcagcacagccattttgattttggtctattatacttttacccgagcttaaaagtttcttatacttttctggcagtgcctttgctatttttattgcattgtctttttttcttttgctcatgtgttaattagcctagtgcctgtttggatatacatgactagttactgattagggctaaaaaatagtccaagttagctatggttggctgaaaaactagttgtaggctcggctgtagcccatctattagtcctcctgttttgatgcactagagctaattttgactaatttttagctagctagcaattagctcagct

SEQ ID NO: 156868 - DNA, 2020 bp, Zea Mays
ccgacgagtggcgttgaggacagaagacgacgagtggagtggagtaggacacgaggtggttccggccggcccactcgcagaatcttctgccactgcccttccatctcgtcccttagctacaagtcatctcgccgcaaccggaacccgcagccatggggacggaggcggagcagccggacatggacagccaccgaaacgacggcgtcgtggtggtgccagcgccgcgcccgcgtaaggggctcgcctcctgggcgcttgacctgctcgagtccctcgccgtgcgcctcggccacgacaagaccaagccgctccactggctctccggcaacttcgcccccgtcgtcgaggagaccccgccggccccaaaccttagcgtccgcggacacctcccggagtgcttgaatggagagtttgtcagggttgggcctaatccgaagtttgctcctgttgcggggtatcactggtttgatggagacgggatgattcatgccatgcgtattaaggatggaaaagctacctatgtatcaagatatgtgaagactgcccgcctcaaacaagaggagtattttggtggagcaaagtttatgaagattggagaccttaagggattttttggattgtttatggtccaaatgcagcaacttcggaaaaaattcaaagtcttggattttacctatggatttgggacagctaatactgcacttatatatcatcatggtaaactcatggccttgtcagaagcagataagccatatgttgttaaggtccttgaagatggagacttgcagactcttggcttgttggattatgacaaaaggttgaaacattcttttactgcccatccaaaggttgacccttttacagatgaaatgttcacattcggatattcacatgaacctccatactgtacataccgtgtgattaacaaagaaggagctatgcttgatcctgtgccaataacaataccggaatctgtaatgatgcatgattttgccatcacagagaattactctatttttatggacctccctttattgttccgaccaaaggaaatggtgaagaacggtgagtttatctacaagtttgatcctacaaagaaaggtcgttttggtattctcccccgctatgcaaaggatgacaaactcatcagatggtttcaactccctaattgtttcatattccataatgctaatgcttgggaagagggtgatgaagttgttctcattacctgccgccttgagaatccagatttggacaaggtgaatggatatcaaagtgacaagctcgaaaacttcgggaatgagctgtacgagatgagattcaacatgaaaacgggtgctgcttcacaaaagcaattgtctgtttctgctgtggattttcctcgtgttaatgagagctatactggcagaaagcagcggtatgtctactgcactatacttgacagcattgcgaaggtgactggcatcataaagtttgatctgcatgctgaaccggaaagtggtgtgaaagaacttgaagtgggaggaaatgtacaaggcatatatgacctgggacctggtagatttggttcagaggcgatttttgttcccaagcatccaggtgtgtccggagaagaagatgacggctatttgatattctttgtacacgacgagaatacagggaaatctgaagtaaatgttatcgatgcaaagacaatgtctgctgatccagttgcggtggttgagcttcctaatagggttccttatggattccatgccttctttgtaactgaggaccaactggctcgacaggcggaggggcagtgaagatacggcacctgcagattctgcacacgcgggtacatgttggaagttattgcaggacatgtatatgtataggacaagtttattacacatgtattcgaaccacacattacacaagtttattgcaggacgtgtattcgaaccacacattacacatgtatatgtgtaggacaagtttattacagtcctgattgattgcaaattactcagtctgttgc

SEQ ID NO: 156869 - DNA, 1830 bp, Zea Mays
ccgacgagtggcgttgaggacagaagacgacgagtggagtggagtaggacacgaggtggttccggccggcccactcgcagaatcttctgccactgcccttccatctcgtcccttagctacaagtcatctcgccgcaaccggaacccgcagccatggggacggaggcggagcagccggacatggacagccaccgaaacgacggcgtcgtggtggtgccagcgccgcgcccgcgtaaggggctcgcctcctgggcgcttgacctgctcgagtccctcgccgtgcgcctcggccacgacaagaccaagccgctccactggctctccggcaacttcgcccccgtcgtcgaggagaccccgccggccccaaaccttagcgtccgcggacacctcccggagtgcttgaatggagagtttgtcagggttgggcctaatccgaagtttgctcctgttgcggggtatcactggtttgatggagacgggatgattcatgccatgcgtattaaggatggaaaagctacctatgtatcaagatatgtgaagactgcccgcctcaaacaagaggagtattttggtggagcaaagtttatgaagattggagaccttaagggattttttggattgtttatggtccaaatgcagcaacttcggaaaaaattcaaagtcttggattttacctatggatttgggacagctaatactgcacttatatatcatcatggtaaactcatggccttgtcagaagcagataagccatatgttgttaaggtccttgaagatggagacttgcagactcttggcttgttggattatgacaaaaggttgaaacattcttttactgcccatccaaaggttgacccttttacaggaaatggtgaagaacggtgagtttatctacaagtttgatcctacaaagaaaggtcgttttggtattctcccccgctatgcaaaggatgacaaactcatcagatggtttcaactccctaattgtttcatattccataatgctaatgcttgggaagagggtgatgaagttgttctcattacctgccgccttgagaatccagatttggacaaggtgaatggatatcaaagtgacaagctcgaaaacttcgggaatgagctgtacgagatgagattcaacatgaaaacgggtgctgcttcacaaaagcaattgtctgtttctgctgtggattttcctcgtgttaatgagagctatactggcagaaagcagcggtatgtctactgcactatacttgacagcattgcgaaggtgactggcatcataaagtttgatctgcatgctgaaccggaaagtggtgtgaaagaacttgaagtgggaggaaatgtacaaggcatatatgacctgggacctggtagatttggttcagaggcgatttttgttcccaagcatccaggtgtgtccggagaagaagatgacggctatttgatattctttgtacacgacgagaatacagggaaatctgaagtaaatgttatcgatgcaaagacaatgtctgctgatccagttgcggtggttgagcttcctaatagggttccttatggattccatgccttctttgtaactgaggaccaactggctcgacaggcggaggggcagtgaagatacggcacctgcagattctgcacacgcgggtacatgttggaagttattgcaggacatgtatatgtataggacaagtttattacacatgtattcgaaccacacattacacaagtttattgcaggacgtgtattcgaaccacacattacacatgtatatgtgtaggacaagtttattacagtcctgattgattgcaaattactcagtct

SEQ ID NO: 156870 - DNA, 674 bp, Zea Mays
ccgacgagtggcgttgaggacagaagacgacgagtggagtggagtaggacacgaggtggttccggccggcccactcgcagaatcttctgccactgcccttccatctcgtcccttagctacaagtcatctcgccgcaaccggaacccgcagccatggggacggaggcggagcagccggacatggacagccaccgaaacgacggcgtcgtggtggtgccagcgccgcgcccgcgtaaggggctcgcctcctgggcgcttgacctgctcgagtccctcgccgtgcgcctcggccacgacaagaccaagccgctccactggctctccggcaacttcgcccccgtcgtcgaggagaccccgccggccccaaaccttagcgtccgcggacacctcccggagtgcttgaatggagagtttgtcagggttgggcctaatccgaagtttgctcctgttgcggggtatcactggtttgatggagacgggtatgtggtacttcctgtttggcttggaataatatcatagttcgtgcagtacatcgttctgtcctgcagtgctgccacttgcatatttcattcatgtatatttgattctttacagcggcatagcattagaagaattatatcatcagaaaattctcttcatatgcagttgcagctagtgacaggaaaacataatgaa

SEQ ID NO: 156871 - DNA, 296 bp, Zea Mays
gctttgttgtgaactctgtcactttcattcaaactgtgaatcccagttctgtgcattttgggctgctcgagacctgtattatagagttgcagcttcctaggccgtggaagctcgctggccaccggtttcctgcccgtggtggatggtggcaaggtagatagcagggagatgagataacaaagattttttttgggaaaacgcaggagaactgcgcctcaatatattaagaagaagagataaatccagatcaaagagatctggacagattacaaggcctcctcagggaggccagaaac

SEQ ID NO: 156872 - DNA, 240 bp, Zea Mays
tacctgcttgttgatctcgacgccgatggcgcgcttggtgacgttccagacgctcccggtgcggccgtggtagaacttgtgcggcatgcccttgtgcacggcgccgttaaccttgacgtcgacgtagtcgccgatcttgtaggtgcgcaggtacgtggtgagtgggatgtaccccttcttgcggaagggccgcgcgaacaggtcgcgggtccgcgaccgcagcccgtgccccgccggcat

SEQ ID NO: 156873 - DNA, 883 bp, Zea Mays
gattattcctctccggcactgttggttttcgccacctcagcgtgtgcgctcgttggtgttggtgttggtgggcggcgcctaaccttgctggggaaactgaagcggtgtcgccgtcgtgtgacgcgtgcgtgcaggtggtcggcgatcgcgcggtgcctgccggggaggacggacaacgagatcaagaactactggcggacgcacttcaagaaggcccggccgtcgcggcgcgcccgggcgcagctgctgcaccagtaccagctgcagcagcaggagcagcgccgccagtacctgcagctcctgcagccgcagcagctgcagcagcagcagctgggggtggtgaaacaacagcagctggagcagcagagcccgccggagcctcatcaccaggccatgatggacagcctgcaaagcacggcggcgtgctactgcagcccggtgccggaggaatgctgcccgctcccggccgacgacgacgcggtgctgtgggatagcctgtggaggctggtggacggggatggatgcggcgacggcgacggcgatggctccagcggaggcgactactagccggctagcacgtacgtgtgcgtgtgtatgccaggctgccagccagccagtgtaaagaaataaagcggaagaggaggttctcttcaggtttcagctgctgcaagccaaggatcctgctagtggtagtagagacatgctaattttcctacgagaatagacgatcatgcttcatgcttttttcccctttatccatgaaccatgagcaagtgacattgtgtatcgaagggccctctgtttatgttattatggcctgattacaaggttggaataccttcatgttccttttggtttcaagaatcaagatcatgttttagca

SEQ ID NO: 156874 - DNA, 1302 bp, Zea Mays
atacaagccgggaaccagaccccaccagcagcactccatatactgcatgcatagagatagatagatatatatagagcttaattactatagtcgtcgtcgtcgatcgtaactgcaatagctttagtttttgcagtcatcagataaatatagggtccataaatatatccatcagctagctgtaactgcaactgcagtcgcaatagctatagttttcagttgattagctagctactaactacaacaagctaggcaaatcgatcaaactaaggctcggcagcggcagcggcatggacgcgatcagcagcctgttgctgcagcagggatggaggaagggcccctggacggcgctggaggacaggctgctcaccgagtacgtgcagcagcacggcgagggctgctggaactccgtcgccaagctcacagggctgcggcggagcgggaagagctgccggctgcggtgggtgaactacctccggccggacctcaagcggggcaagatcacccccgacgaggagaccgtcatcctccacctgcacgccatgctcggcaacaggtggtcggcgatcgcgcggtgcctgccggggaggacggacaacgagatcaagaactactggcggacgcacttcaagaaggcccggccgtcgcggcgcgcccgggcgcagctgctgcaccagtaccagctgcagcagcaggagcagcgccgccagtacctgcagctcctgcagccgcagcagctgcagcagcagcagctgggggtggtgaaacaacagcagctggagcagcagagcccgccggagcctcatcaccaggccatgatggacagcctgcaaagcacggcggcgtgctactgcagcccggtgccggaggaatgctgcccgctcccggccgacgacgacgcggtgctgtgggatagcctgtggaggctggtggacggggatggatgcggcgacggcgacggcgatggctccagcggaggcgactactagccggctagcacgtacgtgtgcgtgtgtatgccaggctgccagccagccagtgtaaagaaataaagcggaagaggaggttctcttcaggtttcagctgctgcaagccaaggatcctgctagtggtagtagagacatgctaattttcctacgagaatagacgatcatgcttcatgcttttttcccctttatccatgaaccatgagcaagtgacattgtgtatcgaagggccctctgtttatgttattatggcctgattacaaggttggaataccttcatgttccttttggtttcaagaatcaagatcatgttttagca

SEQ ID NO: 156875 - DNA, 3416 bp, Zea Mays
tccatttctctattgcttcaaacaagctaaggcaatgaaaacacacttctgctactactgaaggagaagaaggaggcggcaaaggagcgaaggagaaggggagagcagaagaaccgagcatggctagtgctactccaatgcttggtagcactgcacgcctgctcttccccttatccttctccttggcgctgctgctcctgtgctgcagtgccgtctgcaacgccgccggcaatgacgatgagtccacggcgttgcttgccatcaaggcgtcgttggtcgaccccttgggcaagctcgcgggctggaacccggcgtcggcgtcgtcgcactgtacctgggatggcgtgcgatgcaacgcgcggggcgcggtcgccggcctcaacctcgccggcatgaacctcagcggcaccatccccgacgccatcctcggcctcaccgggctcacctcggtcgtcctgcagagcaacgcgttcgggcacgagctgccgctggcgctcgtgtccgtcccgacgctccgggagctggatgtcagcgacaacagcttcgacggccacttccccgccgggctcggcgcgctcgcctcgctggcacacctcaacgcgtcgggcaacaacttcgccggccctctcccgcccgacatcggcaacgctaccgcgcttgagacgctcgacttcaggggcggctacttctccggcacgatccccaagtcctacggcaagctccggaagctcaggttcttgggcctctccggcaacaacctcggcggcgcgctcccggccgagctgttcgagatgtccgcgttggagcagctcatcattggctacaacgagttcgtaggcgcgatcccggccgcaattggcaacctcgccaacctccagtatctcgacctggcgatcgccaagctggaaggccccatcccgccggaactcggcgggttgtcgtacctcaacaccgtcttcctctacaagaacaacatcggcggccccatacccaaggagatcggcaacctgacctccctggtcatgctggacttatccgacaacgcgctcaccggcacgattccgttggagctcgggcagctcgccaacctgcagctgctcaacctcatgtgcaacaggctcaagggcggcatcccggcggcaatcggcgacctcccgaagctggaggtgttggagctctggaacaactccctcaccggcgcgctgccgccgtcgctcggcggcgcgcagccgctgcagtggctcgacgtgtcgacgaacgccttgtccggaccggtgccggccggcctctgcgacagcggcaacctgacgaagctgatcctgttcaacaatgtcttcacgggcccgatcccggcgggcctgaccacgtgcgcgacgcttgtgcgcgtgcgcgcccacaacaatcggctcaacggcacggtgcccgcggggctcggccggctcccgcggctgcagcgtctcgagctcgccggcaacgagctgtccggggagatcccagacgacctggcgctctccacgtcgctctccttcatcgacctctcgcacaaccagctgcggtccgcgctcccgtcaagcatcctgtccatccggacgctgcagacgttcgcggcggccgacaacgagctcaccggcggtgtaccggacgagattggcgattgcccgtcgctgtccgccctcgacctgtccagaaaccgtctgtccggtgcaataccggccagcctcgcgtcgtgccagaggctcgtctcgctcaacctccggagtaatcgcttcaccgggcagatacctggtgcgatcgccatgatgtcgacactgtctgtgctcgacctctccagcaactccttcaccggcgtgataccgagcaacttcggcggctcaccggcgctcgaaatgctcaacctggcgtacaacaaccttaccggtcccgtgccaacaactggtctgctgaggacaattaaccccgacgaccttgctggcaacccgggcctgtgtggtggcgtgctgccgccgtgcggggctagcgcccttcgggcctcctcgtctgagtcgtacggcctccggcgctcacacgtgaagcacatcgccgctggatgggcgatcggcatctcggtctcgattgtggcatgcgtcgtcgtcttccttggcaagcaggtgtaccagcggtggtacgtgaatggcagatgctgcgacgaggccgtgggggaagacgggagcggtgcgtggccgtggcgcctcacggccttccagcggctgagtttcaccagcgccgaggttctcgcctgcatcaaggaggacaacatcgtggggatgggcggcacgggggtggtctaccgcgccgacatgccacgccaccacgccgtcgtcgctgtcaagaagctgtggcgcgcggccgggtgccccgaccccgaggaggccgccacggccgacggacggcaggacgtggagccgggcggcgagttcgccgccgaggtgaagctcctgggccggctccgccaccgcaacgtcgtgcgcatgttgggctacgtgagcaacaacctggacacgatggtgctgtacgagtacatggtgaacggcagcctgtgggaggcgctgcacgggcggggaaagggtaagatgctggtggactgggtgtcgcggtacaacgtcgcggtgggcgtcgcggcggggctcgcgtacctgcaccacgactgccggccgccggtcatccaccgcgacatcaagtccagcaacgtgctccttgacatcaacatggacgccaagatcgccgacttcggcctcgcccgcgtcatggcgcgcgcggaagagcccgtgcccgtgtccatggtcgccggatcctacggctacatcgcgccagagtgcgggtgcaggctgaaggtggatcagaagagcgacatctacagcttcggagtggttctgatggagctcctcacggggcggcggccggtcgagccggagtacggcgagagccaggacatcgtcggctggatcagggagcggttgcgcagcaatagcggcgtggaggaactgctcgactccggcgtcggcggtcgcgtcgaccacgtccgggaggagatgctcctggtgctgcggatcgcggttctgtgcacggccaagtccccaaaggaccgtcccacgatgcgggacgtggtgatcatgcttggcgaagccaagccgcgccgcaagagcagcagcgccacggtggccgccaccgtcgtgaacaaggacaggccggtgttcacgacgtcgccggactccagttacctatagactgcggtgacagaagacaacactggcgttagcgggcttgtatgtaaatgtaatcatgccatgtacagtttttaccatagttttgattcatactttggtaattcggtatgtttcagagggaaaagagcttaatgtaaccaatgtttatacttt

SEQ ID NO: 156876 - DNA, 2389 bp, Zea Mays
aaaaacttaaaatttcaggctcgcctaatagagaggactccatccatgagtgacctgaatgaagtgatatttgggcaggaacatctgtctcgagatgatctgtcttttatcttctccctcaaggtatcagacaatgcgccactatatggtgtttgtctgcatgttcaggaaatagttcaaaaggcacctggtatactaggtgctgtctcacccttaaaccctacttcctataagcccagtcgtttcttggtttctgcaccacgttgttactgtctacttacaaaggtacctttttttgagctacactatgagatgctaaacagcattattgcacaggagaggcttgacagaataacacagtttgctagtgaaattactctagctgagccagttcctcgtcctattaaagaacaagatggagtagacggtgattttgattcctcaaatgggattccatatattgactggacagaatatgctgtacctgtcaacagtatatcaggtctcatttcttcatccagtattccatcagaaagggacatgtcttcatatttgttcaggagctgggagcctaattcttctcaaagtatatctggtagtgagatttcagattctagttatgtaagagaagttgaggaggcaaggcatagtttccagcattatgaagattgtatagtagagaacttggaaccacgttgtgatagctttgggagagcaagttacatgtatgataatgggcatacttccccagatcttctgtccatgcattctcctgcctctagcagattagagcgtgcacaaagtgtggagtctttagaaagttcagtcaaaggtgcaacatcagatgaagaatatgaagtaaatgtgaagcatgaagtgattgttgatgatgaaaaagttgtaggatgggctaaggcacacaataacgaacctctacagattgtgtgtggttaccatgctcttcatctgccacctcgtggtggtgaacttgtattccgcccccttgaacatctccaacctgtgaaatactcccggcctggattacccttgttgggttttggagaggagattttggacaatgctttgactagggcagaaaaaaataagatcaatttacatttggtggctgcagaagaagctcttgcattgtcgatatggactatggctacagtttgtcgttctctgtctttggaaagtgtgctaggcttattcactggagttttgctggagaagcaaattgtggtaatatgcccaaatctgggtgttctgtcagcaattcttttgtctattataccgatgataaggccgttccagtggcaaagtctgttgcttccgattcttccgaggaaattgattgattttcttgatgcccctgtacctttcattgctggtgtacaacataaaccccctgatatcaagatgaaaggatctagtcttgtcagggtcaatgtccagaaagatcaggtccaaggcatgttcactgcctcgacttccacattacaaggagctcgtttctaatctcggtccacttcatgccagactatcgtgtgagaattctttggctaagagacatcccatctataaatgcaatgaagttcaggctgatgtagcttggaagttcttaaatataatgagaacctacttggaatcactttgctctgacctgcgctttcataccattacaaatgtacagtcaaataatgacagggtttctttgcttctgaaagacagtttcattgattcgttcccctcaaatgatagaccatttataaagctctttgtggagacgcagatgttttctgttctatcagattctcgactgtccagtttcgaaaatgaacggacataaaggcattgttccagtggagatcaaacacagtgatactctctgctttggttttggcgtctgcttcctggtgctacctttacatgtcatttccaatgcgcaggggattgggaagataaaaacaaggcacgtcgcgtggagtgcggaggatttcgattttgccgaagccacatcactaattagaagtgttctgaaaagtatctaggctcgtctgcaatgtaagaagaatacgacggactctcaggttataggaaatagatgcaacccgatcttctaaatgggaccgagctacatgtggcgcacaaggaaaacaaatgatgatgaatatagttgggtttctgcttgcgatcttgttttgctatgtaacactagtgtgtagtgacttagctatatttcatatagggaaaagaagaaccctgtatataggtgaagttattcattggagttacgcgtccccggtttgatcatgtaaatcatgacctggtgcgcaagaaaccggcatcagttttgaatagggaacgttttgcaatttagtgcatttaa

SEQ ID NO: 156877 - DNA, 2749 bp, Zea Mays
aaaaacttaaaatttcaggctcgcctaatagagaggactccatccatgagtgacctgaatgaagtgatatttgggcaggaacatctgtctcgagatgatctgtcttttatcttctccctcaaggtatcagacaatgcgccactatatggtgtttgtctgcatgttcaggaaatagttcaaaaggcacctggtatactaggtgctgtctcacccttaaaccctacttcctataagcccagtcgtttcttggtttctgcaccacgttgttactgtctacttacaaaggtacctttttttgagctacactatgagatgctaaacagcattattgcacaggagaggcttgacagaataacacagtttgctagtgaaattactctagctgagccagttcctcgtcctattaaagaacaagatggagtagacggtgattttgattcctcaaatgggattccatatattgactggacagaatatgctgtacctgtcaacagtatatcaggtctcatttcttcatccagtattccatcagaaagggacatgtcttcatatttgttcaggagctgggagcctaattcttctcaaagtatatctggtagtgagatttcagattctagttatgtaagagaagttgaggaggcaaggcatagtttccagcattatgaagattgtatagtagagaacttggaaccacgttgtgatagctttgggagagcaagttacatgtatgataatgggcatacttccccagatcttctgtccatgcattctcctgcctctagcagattagagcgtgcacaaagtgtggagtctttagaaagttcagtcaaaggtgcaacatcagatgaagaatatgaagtaaatgtgaagcatgaagtgattgttgatgatgaaaaagttgtaggatgggctaaggcacacaataacgaacctctacagattgtgtgtggttaccatgctcttcatctgccacctcgtggtggtgaacttgtattccgcccccttgaacatctccaacctgtgaaatactcccggcctggattacccttgttgggttttggagaggagattttggacaatgctttgactagggcagaaaaaaataagatcaatttacatttggtggctgcagaagaagctcttgcattgtcgatatggactatggctacagtttgtcgttctctgtctttggaaagtgtgctaggcttattcactggagttttgctggagaagcaaattgtggtaatatgcccaaatctgggtgttctgtcagcaattcttttgtctattataccgatgataaggccgttccagtggcaaagtctgttgcttccgattcttccgaggaaattgattgattttcttgatgcccctgtacctttcattgctggtgtacaacataaaccccctgatatcaagatgaaaggatctagtcttgtcagggtcaatgtccagaaagatcaggtccaaggcatgttcactgcctcgacttccacattacaaggagctcgtttctaatctcggtccacttcatgccagactatcgtgtgagaattctttggctaagagacatcccatctataaatgcaatgaagttcaggtactaatttttttaccactttatagatttatcattttactttctagtttgtaccattcattttttttttctctagaaggaaattatctctgcacttgatcatttaaacttctattggttatccaatttagtttttgaatgataaaacattacatatggatattattgcaggctgatgtagcttggaagttcttaaatataatgagaacctacttggaatcactttgctctgacctgcgctttcataccattacaaatgtacagtcaaataatgacagggttagcaatacgaacattgttctctacccttaataattatgttctttgttagttcacttagacatcgtaaaatccatttgagtaatgttagccctgaatgatcaggtttctttgcttctgaaagacagtttcattgattcgttcccctcaaatgatagaccatttataaaggtacgtatcttattgtttcacacagcagattccgtgtttattttctgtaagaaaaccacatatagttgatggaagtagcagatttcaggcctttctgtctgggcaacgcgtaaagtgtcaatagataagcagatcctcattgatagggtttttcttgatggaactcatatgatgctgtcacgctatgcgtgtttccagtagaatcagttttttttttttttttttgtcgctgctgtattttttccccattttgcctgcattctcattattcttaacatggtgcagctctttgtggagacgcagatgttttctgttctatcagattctcgactgtccagtttcgaaaatgaacggacataaaggcattgttccagtggagatcaaacacagtgatactctctgctttggttttggcgtctgcttcctggtgctacctttacatgtcatttccaatgcgcaggggattgggaagataaaaacaaggcacgtcgcgtggagtgcggaggatttcgattttgccgaagccacatcactaattagaagtgttctgaaaagtatctaggctcgtctgcaatgtaagaagaatacgacggactctcaggttataggaaatagatgcaacccgatcttctaaatgggaccgagctacatgtggcgcacaaggaaaacaaatgatgatgaatatagttgggtttctgc

SEQ ID NO: 156878 - DNA, 874 bp, Zea Mays
ttgacgctagattgccgcgaccctcggaatttcagttcgcggttggggcatggaggaagaggaactcacctccggcggcggcgacgcggcgttgctggcgccggaaccgcgcgaacaggcggccgaagaggggaggtcaccgcgagacgcggaggcgttcgaggacgcggtggaagaggcgtccgccgcctccacgtcgccggtggcgtgctgcaatggcgacgccgcggagacttcgtctccgccagcttggaaatcgcaggtcgacgggccgtcggccccggaggaagcggaaacgtacgagtcgccgtcggcttcgtcgtcggggtgtgcggcgatggaggtggagtcttcgttggtttctgaattgcgggaggagccggggagggtggatgctggaagcgccgcgtcgccgtcggggcagcgcgcgggaggcacggaggagcacgagaattcgatggccacgccgggggcaggatcgccgtccagggaggagacggactcgtgtatgcactcggcaccgtcgtccccgccgcgctcggcctcgtcgacgtcgtccccgccgcgctcagcctcgttgacgtcgtctccgccgctgccgcagattaagcagcagtcgcggcatgtgcgaaccggcagcttccagcggttccgtgagcagatgcagcgcgcttggaagtgggggcctattggaggtggaggaggtggcgagaggagtcctagggagcagttgttacggacgactgtgaacattgaggctatggcgaatcagaagcggcactggtatcaagtccgctccaagtcgcaggtgtggaacaaccttttttctcaatggtccttataatgattgtgcatttgtatgcaatttttcagt

SEQ ID NO: 156879 - DNA, 922 bp, Zea Mays
aaaccgtctcctcactcacatggcaagaatggcgtgccgagtggcgctcttcgccaccgtcctcctgtgcgcggccgcgggggtggccctgggggcgaagcgggcgcccatcccggacgacctgcgcgacgtgatagacgaggaggaggacgacgagtggcgccaatatcgcgttccctcgtcgcggggcccgggccgtggcgacggcccgccgcctgacctttcacggatggatccggccgccctccaggccgagctcctccgcgggcaaaccggcccgtcgttcggcttcgtgaagctccgccccggcaccacccgctcacgggagcatgtggtggggatcgcgaggaggtggagcaatgtgctgcggacgggatcggtggacgccagattcacggcggttaatttcgtaacgctcatgttcaccatggagagagggcgagacattctagagctgaaggagtttgtcctgagtcaggctgaggcctacgagttgaggatcggcgatcaagttttccgcaggcctggagacccacccttggaccaagttctccgtaagccacggaagaagaagcgccgcaagtctagagacgagctgtagattcatttgctaatcttgttctacatctcatgttcgttcgttcgttctttctctttcgtctacttcagttttgctctcatagcagtttttaccttgcgctgtgtgtcagaatcacagggagtagtggtcctccttgcctaatggtctgtattcttttttttcttcttcttttgaaagcagagaacttccattttattataaatttatgcagggggggaagagttaataaggcctaggccaaaatgttaaagaaaaacaagtgtacgcgcatcaggcgcgcggaaagacagtaattgccaaacgtgttgcctcctgctacgc

SEQ ID NO: 156880 - DNA, 1026 bp, Zea Mays
ccttattatactttctcggactcaacgtcttatctatactatctatatcaccttgttatactttctcggactcgcgtctttccttcgtgatttactcactcatgccaccctctcaaagtttcaaccgtgtgcccatcgcaataaaaataaaatcaataatagagagaggaggtagcaacaccggctgcttaatctcttccttttcctcttcctatctccagcgcatcccaagaggcggaaagggaggagcgtggagcggcgaattattgtttgtttccccaagatgtcttctccaagcaagcgccgggagatggacctcatgaagctgatgatgagcgactacaaggtggagatggtgaacgatgggatgcaggagttctttgttgaatttcgtgggcctaacgaaagcatttatcaaggaggtgtatggaagattagagtagaattgccagacgcatatccttacaaatccccatcgatcggtttcatcaataagatatatcacccaaatgtcgacgaaatgtctggttcagtctgtttggatgtcatcaaccagacatggagcccaatgtttgatcttgtcaatgtgttcgaggtcttccttccacaacttctgttatatcctaatccttctgatccattaaatggagatgcagctgcgttgatgatgcgtgatcgccctgcttacgaacaaaaagtgaaagagtactgtgaaaaatacgccaaaccaggggatgctggtgtcaccccagaagagcagtccagtgacgaagagctgagtgaagatgaagacgactcgggtgatgaggagataatgggcaaaccagacccatagtcaagttggcacctactatacctgtaatctgcacacgatgtttactgcagcaactgcaattaaacaccccatgaacatccgcgtgcagtctgagtgccatgtaaataaactgcaatttcaccaattggatttccagcataactatgtcttcgaatcatgagtgtagtgtaggttcgtgcgtttgaattggc

SEQ ID NO: 156881 - DNA, 1290 bp, Zea Mays
atggacgaggacgagcaggcgtcgcaggccgagggggacacggacaagacgccggagccgcctcggtgtgggaggcacccgtcccagctcctcacgggcatctgctcctcctgcctcatggagcgcctctcctccgtgcgggacccgcccgaggccgagatcgtcgaggtcgccgccgagggctcctccggcgccgcggaccggggcaggctgcgcaagacgctcatgctgctcttccagctcgacgactcgaccggcggaggcgccgcgcgtccgtccgaggggggcacccagtcggcggagtctcagtccgtttccgcaggaggaggtcctggtcgaggtggcaagcgcagggggcccgggtcgtggctccagtcgattcgtcgtctgccgaggggagcgctgcggtgggggaggaacgcggcggcctctgccagggagccctcgatcccgccgcgcggggtggcggtggatctctcgccccacggttccggcggcgcgcatgcggagcggaagcccagcttccgccgctcgtgcgagtggacggcgtcccggggcccgagcagaggctccctgcccttgcagccgccccgccattcgtgggacgggtccatggtgggcagggcgttcgcgtgctccttcgcctgcttagaggagcgggagcccccggatggggcgacgaggagcaacgcggaggaggcggtcggggagacccgcgccgcggctgctgagagcacgaatggcgggcactcgactgatgcagggggcgatgccgatgagcgccgtctcagcggaaggaggtcttgtgacactgggacggagatggccgtctctggtgctgggagacggaggtccagcaggtggagcagggtgtgggatcggagcataaccagtcctctcaaggagttcgtgaggaaaggggagcatgtcctcgagcgctccctctcggaatcgaggagggaagtccggaggggtaaaaatgcggaggcagcagacatgggcggcgaaactcaacccggccgcaacggacatgtgccgggcagagcaagccaaggctcaatccgaagctcacaggctgcaagcaatgtggatgtgcacagtttccggaccgattggctcaagaacagcaagattggcagaagcaggagcgtgcattacacatctcctgggaacctggacaacgggatgcttcggttctatctgacaccgatgagaagctccagaactgcgaacagggggaggaggagaagttcgcgcttgtttgcgcgaggacttttcggtttcatataa

SEQ ID NO: 156882 - DNA, 2863 bp, Zea Mays
cgcggaagccacgcacctcgccaccagaaatttcttccccagggccacgggagcgggcacaacacagcacagggccagcagccaggacccaggagggcgagagagctcccggccgaaattccccaacccctcggcaccgcgtccgcgtcccccgtgcgcctgcccacaccctacaccaccgaccaccgtctccgccgtcttcgcttcgccccccaccccgcgaccgaccagcgccatgcgcatccgccgctacgccgcgcgcctcctctccgccaccaccgccgccccctcctcgccgccgcggccgcccgccgcgtcctggctccacaccgacgacgacgacgactgctgcgccttctgcgagctcagccgcccggccccgcaggagggccaggacgccgtcaagcacaaggggcacattgccggccgggtgccggaatccgatgtcagagccgatgagcgcgtcggcctacaccagcgaccgcctgctcccgaagttaaaaaatgcaagattgatcatgtacctcctgtggataaatcttctgtcgggctgcaagttgtgaaatgtgcttctgaggtcagtggagctgtggcgaaaccagaaggtggtactcctgctagcgaagctgctgctggtcctgcagcgaaagctggtgcttttgttgtcaacgatgctgctagtgaacagggagttcaatgtatagcttctccactgggtggtgcctccaagctggaggaggttacagcagggaattcttttgcgaatgggccaaccactgaattaggagttttcaagggtgcatcccttgctaatgaattggctgatgtgccaggggttacgagcattatgccagaagttataggcaaacctagtactgacccaggggctataaccaccgtggtggaagttagtgatataggttctgtcgttcatgaaaccactgaactggaatctgcaggggaggattatattgccagtgaagctgctgctgaaccagaagatgctggcagagcttcttgcaatacagatgatactgctgctttagatgagccactgccgcctagttgtgatccgaacataggcaatgcgcaggttggaaatgcgatggacaccgttgccagtacagtgcggccttctcgatgtgatgctgcagaagaaggtgcttctgtgaattctacagccaatggtcctgttagagccagaggaccaaccgttaagggaggagtgcccaaggataaatctgttgcacccagtgttttacgtgtattggacgtagtgactagaagcattggtaaatcagggagaacagatgttatttgttatgctaggcggacaggtaagaggaagccagagctgcaggaagtgaagacggaaaatattgacttggaagatggtgttctatgcgagaaagaggaggcactgttgagaactgattgttgtgaaagtgtcttgtcaacagccgggtccatagatgttaaacttgccgacataaagaaagaccttatggataattcagctgcaagcaaggttacaaagatgaagagaaatatatttgaatgtaaaattgattactgccacatgacattcaagacaaaagctgagcttgctgcccacaagaagaacatgtgcacagtcaactcatgcagcaagcatttcagatcccacagttacctgaggcgccacgagagcgcacacaacgatgatatgccttacaagtgcccatgggatggttgtaatatggctttcaagtggtcatgggaccgggctgagcatttcaaggtccatgctggggccaagccttacaaatgcatgacgcctggatgcagcaaaatgtttaagtttgtttcagatttcacccggcataggaggaggtgcaaacctcagaggtaaaagcttgcttgatactacagaattaggatagcagtgaagtttgtgcttgctactgtagatgttctatttatttatttgctaggagatccatcgcacaactgttctgacaacttatagtgggattgcctgtttctttgttgaggaaaatgctaaaatctttagttagaaacttgagtttctcaaaatatcagtgtacatttgcggaaggtagttgtggtgattatgatcagcgctgtatcgaatctgagagctgtaaatgggaagcttatttttttatttcttttattttgtttcagcatagcattccatatttatctacttggattaacatggttgcactagagtacagcataagattagtctattttggtaacataagggtagtctattttgattactcaaccgcttgtatataaaaatggtttcagttacattcatctcatcatctttatactctcaagggttgcaatctctaatctttaaataatttgtgatgttgtttgcaactttgtattgcgtggttatggtcatagttattaaggcgtcgctatagtaacgctaaagcctcactaaagcggtaaggcaaggctgcaggcaagggcgtccggattgccttagtcatcggcataaggtgtccgccttaggctagagcgtcgcctttggcaggggcgaagccaggatttaagtttaggggggacaaatccgaatagagggctgctagagaggtattttgtattgtttacatggtgattagctaaaaaaattagtgtctcatgtagaactagaggagcattagagctcctccctgtctttgcccctggcctttggggcgcaaggcgtccgtaaggcgttggatagtagacgccttggctttgggtagggttggagaggggatacagatggaggggtggactgcggacctttggtggtggcggcggcggcggcagcagctttcctatcggcggcggcgac

SEQ ID NO: 156883 - DNA, 1656 bp, Zea Mays
atgcgcatccgccgctacgccgcgcgcctcctctccgccaccaccgccgccccctcctcgccgccgcggccgcccgccgcgtcctggctccacaccgacgacgacgacgactgctgcgccttctgcgagctcagccgcccggccccgcaggagggccaggacgccgtcaagcacaaggggcacattgccggccgggtgccggaatccgatgtcagagccgatgagcgcgtcggcctacaccagcgaccgcctgctcccgaagttaaaaaatgcaagattgatcatgtacctcctgtggataaatcttctgtcgggctgcaagttgtgaaatgtgcttctgaggtcagtggagctgtggcgaaaccagaaggtggtactcctgctagcgaagctgctgctggtcctgcagcgaaagctggtgcttttgttgtcaacgatgctgctagtgaacagggagttcaatgtatagcttctccactgggtggtgcctccaagctggaggaggttacagcagggaattcttttgcgaatgggccaaccactgaattaggagttttcaagggtgcatcccttgctaatgaattggctgatgtgccaggggttacgagcattatgccagaagttataggcaaacctagtactgacccaggggctataaccaccgtggtggaagttagtgatataggttctgtcgttcatgaaaccactgaactggaatctgcaggggaggattatattgccagtgaagctgctgctgaaccagaagatgctggcagagcttcttgcaatacagatgatactgctgctttagatgagccactgccgcctagttgtgatccgaacataggcaatgcgcaggttggaaatgcgatggacaccgttgccagtacagtgcggccttctcgatgtgatgctgcagaagaaggtgcttctgtgaattctacagccaatggtcctgttagagccagaggaccaaccgttaagggaggagtgcccaaggataaatctgttgcacccagtgttttacgtgtattggacgtagtgactagaagcattggtaaatcagggagaacagatgttatttgttatgctaggcggacaggtaagaggaagccagagctgcaggaagtgaagacggaaaatattgacttggaagatggtgttctatgcgagaaagaggaggcactgttgagaactgattgttgtgaaagtgtcttgtcaacagccgggtccatagatgttaaacttgccgacataaagaaagaccttatggataattcagctgcaagcaaggttacaaagatgaagagaaatatatttgaatgtaaaattgattactgccacatgacattcaagacaaaagctgagcttgctgcccacaagaagaacatgtgcacagtcaactcatgcagcaagcatttcagatcccacagttacctgaggcgccacgagagcgcacacaacgatgatatgccttacaagtgcccatgggatggttgtaatatggctttcaagtggtcatgggaccgggctgagcatttcaaggtccatgctggggccaagccttacaaatgcatgacgcctggatgcagcaaaatgtttaagtttgtttcagatttcacccggcataggaggaggtgcaaacctcagaggtaa

SEQ ID NO: 156884 - DNA, 699 bp, Zea Mays
atgacggggttcgggtcaccgtgcggagcgtgcaagttcctgcggcgcaggtgcgcgcgcggctgcgtcttcgcgccctacttctgcgacgagcagggcgcggcgcacttcgccgccatccacaaggtgttcggcgccagcaacgcgtccaagctgctcgcgcacctgccgctcgccgaccgcccggaggccgccgccaccatctcctacgaggcgcaggcgaggctgcgcgaccccacctacggctgcgtcgcccacatcttcgcgctccagcagcaggtgatggccctgcagacgcagctggcgtcgctcacggtcacggcgcaggggcagcagcgcgtgcacgacgtcgacgacgccaagggctacgtgggcaccgccgccgcggggcagctagggtgcagcagcaatggaagcgtcgcgccggccacgtacggcaatgtcgggcacgagtccctgaccgcgctgctgaggtcggagtcggactacttgcagcagtcgccgtgccacgcgttcgagcacgccggcgcggacgacaaggacgacgacggccggcaggggaacaccttcgacttcgaggcagcggccgactcctcgtcgttcggggcggaggagagcgggtggaggtcgttgtcagggtaccgagactgcgaggacctgcagagcgtggcttatgcttacctgaaccatctctcttaa

SEQ ID NO: 156885 - DNA, 474 bp, Zea Mays
atggggttcgtgtccttcgtcgggcgggtgctcttcgtcgccgctttcctcctctccgcctaccaggagtttaatgaatttggcgctgatggtgggccagcagctaaggcccttcagcccaagttcaatgtgtttgtaaaaaatatctctgcacatctgggagtagctgtgccgcacattgagttgaagcatgtgattgctgctacaattgctcttaagggacttggaagtctcctttttattttgagcagctccctcggtgcttatctcctgctgctgtacctcgctctgatcactcctatcgttcacgacttctacaactacgacacggagaaggaagaattcgcgcggctgtttgcgaagttcacccaggacgtggcgctggttggagctctcctcgtcttcctgggcatgaagaactccatcccgaagcggcagggcaagaagaaggctcacaaggcgaagacgaactag

SEQ ID NO: 156886 - DNA, 1139 bp, Zea Mays
cgacgcgccgtcatctcgtcttctctttcaacttcgttcgcaagaagctcagaagtcagatcagaagccgccgaggggaggcgccgacgccgagtttttgctccatcccgcatccaccgccagaatgtttctcacgaggacggagtacgaccgcggggttaacaccttctcgccggaggggcggctgttccaggtcgagtacgccatcgaggccatcaagttgggatccactgcgatcgggttgaaaacaaaggatggtgttgtccttgctgttgagaaacgtgtgacctcgccactgctggaaccaagcagtgtggaaaaaatcatggaaattgatgagcacataggctgtgccatgagtgggcttattgctgatgctagaacactagtcgagcatgctcgtgttgaaactcagaatcataggttctcatacggggagccaatgaccgtagaatcttcaacacaagctatttgtgacttagctctgcgctttggcgaaggtgacgaagagtcaatgtcacggccatttggagtctctcttctaattgctggacatgatgagaatggacctagcctgtactacaccgacccatctggtactttttggcaatgcaacgcgaaggcaattggatctggctctgaaggagctgatagctccttgcaggagcagtacaacaaggagctggcccttgaggaggcggagaccatagccctttctattctgaagcaggttatggaggagaaggtgaccccaaacaacgtcgatattgccaaggttgctcccaagtaccacctctacacccctgccgaggtcgaagccgtgatcgcgaggctgtgaaacgctttcggagctcgtgttattcatgtcatcaatcggtaatagacgatccttgtacgaagcgtggacatcttttgttcttgattatggctgtcatcgtactctgttgttaactccacaaggacagtcgatggtactttgattcacacctcagcccgattccgttgtctgattgcctagtgcctacacttgtttttttattttaccgtttcggcttccgttatgtgggcaattaagctgatactcgtgtggattttccaatccttcgtgaagtggcagcggtggtgctggctatttcctg

SEQ ID NO: 156887 - DNA, 678 bp, Zea Mays
atggcggcggcgccctgctctaccaccttctccggcgacgtgtgggcggagctgcgcctggcctccgctagcgatgtgccgcacatccaccgcctgatacaccagatggccgagttcgagctcctcaccgacctcttcgccgccaccgaagagctgctcacctccacgctcttcccctcgccgacgccgcctcccttcacctccttcacagccctcatcctcgacctatccccctcccccgtcgcccccgacccctcgtccaccatcgcctcccgccgcctcgacctctccgcgtccccgctcgcggaccccgaggccgccgccttcgcctccccgcgcggaggcgggcgcgtcacggccgggttcgtgatctgcttccccaactactccaccttcctctccaagcccgggctctacgtggaggacatcttcgtgcgcgcgccctggcgccgccgcgggctcggccggatgatgctgtccgccgtcgccggcagggcggccgagctcgggatgggccgggtggagtggtgcgtgctcgactggaacaagaacgccatcgacttctacgagggcatgggcgctgacgtgctcccgcagtggcgcatctgccggctcgccggcaaagcgctggacaagtacaaggggtccgccggcgggaaggctgcggctgcggaatag

SEQ ID NO: 156888 - DNA, 2890 bp, Zea Mays
acccggaagaaagaagctataaaggcgaacctatcccctcgcccctctcgtcttcatcttcacttcgccccccgaacccgagcacccgcaaatatctgtcgccgtctcgccaacagcaccaaccgcgcctcctcgaattcgaccgtcatggcgagccaaggcgagccgtcttcctccgatccgaaggggaagaaggattactctacggcgatcctggagaggaagaagtcgccgaaccggctggtggtcgacgaggccaccaatgatgacaactccgtcgtcgctctgcacccggacaccatggagaggctccagctcttccgcggtgacactgtcttgatcaagggtaagaagagaaaggacactgtctgcattgtgcttgcagatgagacatgtgaggagccaaaggtccggatgaacaagattgtcaggaagaacttgagggtacggcttggtgatgttgtatctgtccatcaatgcccagatgtcaaatacgggaagcgtgtgcacatacttccaattgatgacaccattgaaggcatcactggcaatttgtttgatgcctttctaaaaccatacttccttgaagcctatcgtcctttgaggaaaggagaccttttcctagtcaggggtggcatgagaagtgtagaattcaaagtcatagagactgatcctgcagagtattgtatcgttgcaccagatacagaaatattttgtgagggtgagcctattaagagggaggacgaggaaagactcgatgaggttggctatgacgatgttggtggagttagaaagcagatggcccaaatcagggaactggttgaacttccattgcgtcatccccagcttttcaagtctattggtgtgaaaccaccaaagggcatattgctgtttgggcctcctggctccggcaagacccttattgctagagctgtagctaatgagacaggtgctttcttctttttgatcaatggaccagaaatcatgtcaaagctagcaggagaaagtgaaagcaatctcagaaaggcatttgaagaagctgagaaaaatgcaccttccatcatttttattgatgagatagattccatagcacctaagagagagaagacccatggagaagttgaaaggcgtattgtttcacagctcttgactcttatggatgggctcaagtctcgtgcacatgtgattgttatgggtgccaccaaccgtccaaacagtatcgatcctgctcttagaaggtttggtaggtttgatcgcgagattgatattggtgttccagatgaagttggccgccttgaggttcttcggattcacacgaaaaacatgaagctggctgaagatgttgacttggagctcattgcgaaggatacccatgggtatgttggtgctgatcttgctgccctttgtactgaagctgctcttcaatgcattcgtgagaagatggatattattgaccttgaggatgagaccatagatgctgagatactgaactctatggctgtctcaaatgaccatttcaagactgcacttgggacaagcaacccatctgctctgcgtgaaactgttgttgaagtcccaaatgtctcttgggaagatattggtggtctggaaaatgttaagagggagctacaggagactgttcaatatccagtggagcatccagataaatttgaaaagtttggcatgtctccttcgaagggtgttttgttttatggccctcctggctgtggcaagactctgttggccaaggcaatcgctaatgaatgccaggctaacttcatcagtgtgaagggtcctgaactgctcaccatgtggtttggtgagagcgaggccaatgtccgtgagatttttgacaaggctaggcagtctgctccgtgtgtcctcttctttgatgagctcgactccattgctactcagagaggaagcagtgttggtgacgcgggcggtgctgctgacagggtgttgaaccagctgcttactgagatggatggcatgaatgccaagaagacggttttcattatcggcgcgactaacagaccagatatcattgaccctgccttgctgaggccaggacgcctcgatcagcttatctacattcctctgcccgatgagcagtccaggcttcagatcttcaaagcctgcctcaggaagtctcctgtggctaaggacgttgacttgcatgctcttgccaagtacacccagggtttcagtggagcagatatcaccgagatctgccagcgtgcgtgcaagtatgccatcagggagaacatcgagaaggacatcgagcgggagaggcgcaggaaggacaaccctgaggccatggaggaagacgaggtggacgacattgccgagatcatggctgcccacttcgaggagtccatgaagtacgcccgccgcagtgtcagtgatgccgacatccgcaagtaccaggccttcgcccagacactccagcagtcccgtgggtttggcagcgagttccggttctccgaccaaccgacggcagctgccggtgcggccgacccctttgcatccgcagccgacgatgacgacttatacagctaaactgcacttctattgtgacgcatctttcctccctccgtatatatgattatatcatatgttaatgcgtgtgtgggggtgttgctgtacctatacagtgaagttaatatttctgttttgcatgcttgcctgttgcctaatttcactaatttgagatgattaaggtagtgtttgtcggagcccagttgagaggagtggctctcgaagggctttttttttgtgaccgtttagtaaagattcacgataaactagaggtgaagctaccgaaagagtgtgccaaagggacactaagttgagccttaattaattttagtttaaaaataaatagaaa

SEQ ID NO: 156889 - DNA, 1768 bp, Zea Mays
atgccgaatgcagcagcgcgtgtgtgtgtgtgtggggggggggggggggggggggggggcagacgagacgaggatggtgggtggccgcactggaaggaaagcgaaagcgaagaaacattcctgcacgagcacactacggacagtgcagcagccagcaggcagcggccccctttgcctttacagccagagcccggaggggcgctgctgcagccgacccatgacgcccgagtgctcaacgcccccaacgacctggattcgcttttccccgagcctcagcagcagcaacgcgtcgcgcgtgcatcacaacgagattcagagcccgagcccgagccccagccccagaccaacgacgagaaaggacaaactgcggcggacctacccgaagtcggaggcagggcaaaaggcccgatcccccctccccgccggttgccgcgctcgtgccacggtgcggtagccccgtcgacgccggcggacagcgtgcactatgggttgctcctcctccgtgccagctagaaatactggagggctgaacactatcagcaacgatagctctccagacgccagttcaaaggacttgcgtgctaagttggtattgctgggagactcaggtgttgggaaaagttgcattgttcttcgttttgttcgtggtcagtttgatcctacttccaaggtaactgttggcgcatcttttttatcacaaacattggcattggaggattcaacaatagtgaagtttgaaatttgggatactgctgggcaagagaggtatgctgccttggcgccactttactacagaggagctgctgctgcaattgttgtctatgatataacaagtccggaatcatttagcaaagcacagtattgggtaaaggtaaagtataagcaaccctctactcttctgagttcttatccttggttttctccccattccctattatcgacctgtgcatcttcttgaagctctgatgtaatatgtatggtacctaaaacaccattacagattagaaacatattgacttggatattatcatatgatattcaattgactgtacctgagcaacattagaacttagaagctatcatgcaccttgaatatttatttatgtgtagcagttgactcggtgattatattcaatcttactgctctgaaattctattttcgtttgtaccctgtttttggtttcaagattaaatacaacactcctgtttttctttcccattccacaggaacttcagaagcatggtagtcctggtattgtaatggttttggttggtaataaggctgatctacatgataatcgaagtgtatcctcgcaggatgcgcaggactacgcagagaagaacaatatgtttttcattgagacgtcggccaagacagctgataatataaaccaactgtttgaggaaattgcaaagaggttgcctaggccaacggcatcgtgacagaacacttttgtgtattgcttgtaccatgtaatgcatgccagtccatatacacgggtactgtatggactacggaagacctctcatgtaaagatatttcccccattctgttatagttgtggatgacaattggtattgagaatatcctctgatgtcgcaaattggtcttctgatgaccaagtgtttttcttttcttttacctcgttctaggcattctaagggcctggagcatctggtttttaaggaactggtttataaaagttagtgtggttccaaatatatcggcttatatttcagtttatagaaattggatttatagtttctt

SEQ ID NO: 156890 - DNA, 1412 bp, Zea Mays
atgccgaatgcagcagcgcgtgtgtgtgtgtgtggggggggggggggggggggggggggcagacgagacgaggatggtgggtggccgcactggaaggaaagcgaaagcgaagaaacattcctgcacgagcacactacggacagtgcagcagccagcaggcagcggccccctttgcctttacagccagagcccggaggggcgctgctgcagccgacccatgacgcccgagtgctcaacgcccccaacgacctggattcgcttttccccgagcctcagcagcagcaacgcgtcgcgcgtgcatcacaacgagattcagagcccgagcccgagccccagccccagaccaacgacgagaaaggacaaactgcggcggacctacccgaagtcggaggcagggcaaaaggcccgatcccccctccccgccggttgccgcgctcgtgccacggtgcggtagccccgtcgacgccggcggacagcgtgcactatgggttgctcctcctccgtgccagctagaaatactggagggctgaacactatcagcaacgatagctctccagacgccagttcaaaggacttgcgtgctaagttggtattgctgggagactcaggtgttgggaaaagttgcattgttcttcgttttgttcgtggtcagtttgatcctacttccaaggtaactgttggcgcatcttttttatcacaaacattggcattggaggattcaacaatagtgaagtttgaaatttgggatactgctgggcaagagaggtatgctgccttggcgccactttactacagaggagctgctgctgcaattgttgtctatgatataacaagtccggaatcatttagcaaagcacagtattgggtaaaggaacttcagaagcatggtagtcctggtattgtaatggttttggttggtaataaggctgatctacatgataatcgaagtgtatcctcgcaggatgcgcaggactacgcagagaagaacaatatgtttttcattgagacgtcggccaagacagctgataatataaaccaactgtttgaggaaattgcaaagaggttgcctaggccaacggcatcgtgacagaacacttttgtgtattgcttgtaccatgtaatgcatgccagtccatatacacgggtactgtatggactacggaagacctctcatgtaaagatatttcccccattctgttatagttgtggatgacaattggtattgagaatatcctctgatgtcgcaaattggtcttctgatgaccaagtgtttttcttttcttttacctcgttctaggcattctaagggcctggagcatctggtttttaaggaactggtttataaaagttagtgtggttccaaatatatcggcttatatttcagtttatagaaattggatttatagtttctt

SEQ ID NO: 156891 - DNA, 1580 bp, Zea Mays
cccctcctcttcgtcagaccaaccggtacgcacaagtgcacatccactctgagaagaagaaacccaaacgatccagagaggactcccagtccagtctccgtccatgggtgcgggaaagggaggagacggcgaggaggccgcgcagcccgtcgtgctgaagctggacctgcattgcgccggctgcgcgcacaaggtcaagaaggccatcaggcgcgtgcctggtgtcgggtcgatcgtgacggacgtcgcggcgaacagggtcgtcgtggcgggcacggccgacgcgggcgcgctcaaggcgcggctcgaggccaagaccaacaagcccgtggaggtcgtctctgccggcggcgtccccccaaagccccccgccgctgagccccaacaggacgctggcgccggcgagaagaagggggacaagggcgcgaaccccaaggaggaggctaaggagcaacaggcggcggaggaggagaagaagaaacccaaggaggagacggtgctgctcaagatccgcctccactgcgacggctgcggcgaccgcatcaggcgacgcatctacaagttcaaaggcgtgaaggacgtggtgctggagggcaatgccaaggacgaggtgaaggtcacgggcaccatggacgtcccggacatgctctcgtacctcaaggagaagctcaaccgcgacgtggaggccgtggcgcccgccaagaaagacggcgatggcaaggacgaggacaagaaggacggcggcggcggcagcggcggcggcgaagacaagaacaagggcgcgggcgcggcgggcggcgacgacaagaaagacaagggcaaaggggccgacgacgtgccggtggccccgtccacggcggccgccgcggcgttgatggccgcgccggcgggggcgagcacgtaccgcgtggcgccgccgtacccgtacgggtacgtggcggcgtaccagcagcagcccccgccccccgccagctactacccgtacccgtcgtactacggcaatggcgacggcgtgggcctcgccaaccccgcccaccactacccgcagccgcagctggcgtacccgccgtacccgtaccgcttcgacgtggcgccgccgccgccgccgccgcagctcttcagcgacgagaaccccaacgcctgctccgtgatgtgacgtgacgggaaccgccgccggccgtgggcacgcacggtgtcccttggttgcgtcagcgagctcacccgatccgtcgtcggctttaacctttagccggccggccgaccggccgggaagaaaagaaatcgacatgtacatatcgtcgacggtagagctctagggttatttctctgacgcaattctgcctgcttcatccgttgaattgaatcctttcgttcccatcttcttgacgctctgttatgctcgaatgctggggtgcttcattcggtagcgaagttctgtaacagacgcgatgaacaaactggtcgggaagtgcgactgcgtggtcaccgacgctgaaccgtgtgctcctactcctgccgacgacctgggccgcattttctgacgttctgtagaatgcgtcggtccgaggcgttatccgaac

SEQ ID NO: 156892 - DNA, 420 bp, Zea Mays
atgtcgttgggcgaggtggagtccatggggacggagcccgagtccttgccgtcgcaggcgtcgctgatcttcttcttgaacgcctcgtcgatgggcgcggcgtcggtctcgatgaagaagcacctgcagacgccgatgctgtggccgccgcccagcatcgcgatcatctcctccgtgttgaagccctgcttgtcgaactcgtcgatgagcttgggcaccgcgatgtccgggcccggcaggttgtcggcgtcctcgcggttggacacgagcgagtcgcgccgccccaggagcaccgcgtattcgggccctcccgacagcttcaccgagtcgcgggcgctcaccgagatgatgtccgcgcacgacaccacgttggggcactccttctccagctccgtcttgatctcctcgatcacgtcgtag

SEQ ID NO: 156893 - DNA, 717 bp, Zea Mays
atggccgattcagccgcgctctccacctccctcccccgctctctggcgtccaggaggcccctctcgtcgcctctccacgccagagcccgggcccgctcccagcgccgctgccggctcggatcgcgctcgctccaccggttgcgtgctcgggcgggaaaggacgacccggaggacctctacgggccctacccctgggaccagcccttggatctcaccgctgggtccgacattcaatgggtgcctgaagacagagtcacgctattcacttctgatgggctgatccagattgggggttccttggttcctcgtcgagtttctgcttctgagaagaggcaacggaaactgaagagtggacaaaagttgcgccggtttcaggagagctcttacatggatccaaatcaaagtctttgccttggagcactatttaacatagcagcaacaaatggcctagacatgggcagaagattatgcatctttggcttttgccgttctattgaaatgttaagcgatgtagtggaagatacggtattggagcatggcggtgaggttgtcactgcagagaaggcaagcagtaacggcctccaggagaagctaaccatgtctgttgcagtaccattgctgtggggcgttcctccagcatcagagaccctccatgtcgcggtgcggagcggtggaggtattgtcgataagatctattggcagtgggacttattctag

SEQ ID NO: 156894 - DNA, 2738 bp, Zea Mays
ttttttttacaacttctccctctcagtttactgttgaaaaggcaaacaaaatcacttagccgcgctgcctctgtgtctgtcttttcgtttaattagggtttccggatctgctctgcgtcgccgccgaccaacctccaccgcgcgacgccatggacttcgacgagtacgagtatctggagaagacggtggaagcgttcgcagcgccggccaacggttcgtcgccgcccgggtcggggtacaaggacaaggagcgcagctcacgccgccgctcaacgggcggtgacgaagagcgcgacaacgtagaacgcagatcgaagcgttctcgccccgaggaaggccgcgaccgcgatagagagcggcacaggtaccgcgacggcgaccggcaccgcagcagtcgggagcggcgggaccgtgaccgtgacgtcaaggagaaagagcagggcagggagaacgacaaggacaggaggagccgcgaccgcgaacgggagaaggaggagagggagaaggataggcagcggaggagtcggagccggtccgagcggcgccgtgatgacgaagagcgtgatcgctaccgtgaacgcgatgtcagacgtaggaaagaggaagttgctgaacctgaagttgatccagaaagagatcagaggactgtgtttgcttaccagttatctttgaaggcagatgaaagagatgtatatgagttcttttctagggctggaaaggtccgggatgttcgcctgattatggatcgaaattcacgacgttctaaaggtgtcgggtatattgaattctatgatgctatgtctgttccaatggcgatagctctttctggtcagttgcttcttggtcaacaagtgatggttaagccttcagaggctgaaaagaatttagttcagtcaaatgcttcaagtggagctgcttcaggtggagcaaggaagttgtatgttggaaatcttcactcaaacattaatgaagaccagttgcgacaggtctttgaaccatttggacaagtggagcttgttcagttgccattagatccgctcagtgggctatgcaaaggttttggttttgtgcagtttgcacgtcttgaagatgcaaaagcggcccagagtttgaatgggcaacttgagattgctggaagagtaatcaaggtttcagctgtgacagaccaagcaggcatgcaagttagtggagctacgggagatttggatgatgaagaagctggaggcttggcactgaatgccagttccagagctcttctaatgcagaaattggaccgcagcggcattacgaccaggtacctttttggggttgattgcataataataattctgacattttgataagtataggtctttaaaaaactatttagtatagcaccgatatttggagtatatttatttatttgttaattaattggtaacagagctgcacatttgattactgaggtgctgaatggactattcctccataatttgttttttttgtggcgctgcagagacttcatttcattttagaattccattatcttgcttgcttgtatgagtgccatcatttgtacccaaatctctcattattgacctctactatattatcgtcaggattcaaccaccactacagcaacactgtttccatatatatctagcttatcaaggtcgttctccatggacctcctccagttctttggtgtaaagtggtttggctgaaatattttgtttactgcagttctagtatttagtgccagttgcattgattgcaaatttcaggatggcgaattgatgatgtttgaaagtggacataagagaggaatcttgttacaatgcccttaccattttgatgcagatttcaatgattggctccataagaaacttgagttaaattttgttatagtagatgtacccttttatgtgtagcttactcactggacacgccaaccttttgtgttcctgcagtttgactggtgggacgggcattgctggtttgactactccagtggcaataccaactgtatctgtccttggtgctgccccagctgcagcccctcttctgcaccctacagtgcctggtcttgcaattcccggggcaactcttccaattactaccccatctattgatttggctccacctagtcaatgcctattgctcaagaatatgtttgatccagctttggagacagatcctgatttcgatttggacatcagagatgatgttcaggaggaatgttccaagtttggtcaattaaaacatatttttgtagacaaaagtactgccggttttgtgtacctgcggtttgatagtataacagccgctatgagcgcacagaaagcactccatggaagatggttcgcagggaagatgatcacagcaacttttatgaccccacaacagtatgaaatgaagttcccgagctagtgaacagatgcatgattaatatggacgtagttgcttgggctcggtgggtgctggcatttctatattttagcgttttgagcttgtgtcaacttattactggaggtaattataaaaaaaactagtggaggaaaatttagtggaagctagtgtatcgggaaatggctaacgaaaaatggtgaaagaaagagtttccttgccctgtgggttagtgctcgaattgaaactgtactgtgtaatggagtttctccctgaagtgctagtactaatacctaaaatgatggaagaaagagttgacttgcgttgcgcttgttgatttgattatactcgtc

SEQ ID NO: 156895 - DNA, 2434 bp, Zea Mays
ttttttttacaacttctccctctcagtttactgttgaaaaggcaaacaaaatcacttagccgcgctgcctctgtgtctgtcttttcgtttaattagggtttccggatctgctctgcgtcgccgccgaccaacctccaccgcgcgacgccatggacttcgacgagtacgagtatctggagaagacggtggaagcgttcgcagcgccggccaacggttcgtcgccgcccgggtcggggtacaaggacaaggagcgcagctcacgccgccgctcaacgggcggtgacgaagagcgcgacaacgtagaacgcagatcgaagcgttctcgccccgaggaaggccgcgaccgcgatagagagcggcacaggtaccgcgacggcgaccggcaccgcagcagtcgggagcggcgggaccgtgaccgtgacgtcaaggagaaagagcagggcagggagaacgacaaggacaggaggagccgcgaccgcgaacgggagaaggaggagagggagaaggataggcagcggaggagtcggagccggtccgagcggcgccgtgatgacgaagagcgtgatcgctaccgtgaacgcgatgtcagacgtaggaaagaggaagttgctgaacctgaagttgatccagaaagagatcagaggactgtgtttgcttaccagttatctttgaaggcagatgaaagagatgtatatgagttcttttctagggctggaaaggtccgggatgttcgcctgattatggatcgaaattcacgacgttctaaaggtgtcgggtatattgaattctatgatgctatgtctgttccaatggcgatagctctttctggtcagttgcttcttggtcaacaagtgatggttaagccttcagaggctgaaaagaatttagttcagtcaaatgcttcaagtggagctgcttcaggtggagcaaggaagttgtatgttggaaatcttcactcaaacattaatgaagaccagttgcgacaggtctttgaaccatttggacaagtggagcttgttcagttgccattagatccgctcagtgggctatgcaaaggttttggttttgtgcagtttgcacgtcttgaagatgcaaaagcggcccagagtttgaatgggcaacttgagattgctggaagagtaatcaaggtttcagctgtgacagaccaagcaggcatgcaagttagtggagctacgggagatttggatgatgaagaagctggaggcttggcactgaatgccagttccagagctcttctaatgcagaaattggaccgcagcggcattacgaccaggattcaaccaccactacagcaacactgtttccatatatatctagcttatcaaggtcgttctccatggacctcctccagttctttggtgtaaagtggtttggctgaaatattttgtttactgcagttctagtatttagtgccagttgcattgattgcaaatttcaggatggcgaattgatgatgtttgaaagtggacataagagaggaatcttgttacaatgcccttaccattttgatgcagatttcaatgattggctccataagaaacttgagttaaattttgttatagtagatgtacccttttatgtgtagcttactcactggacacgccaaccttttgtgttcctgcagtttgactggtgggacgggcattgctggtttgactactccagtggcaataccaactgtatctgtccttggtgctgccccagctgcagcccctcttctgcaccctacagtgcctggtcttgcaattcccggggcaactcttccaattactaccccatctattgatttggctccacctagtcaatgcctattgctcaagaatatgtttgatccagctttggagacagatcctgatttcgatttggacatcagagatgatgttcaggaggaatgttccaagtttggtcaattaaaacatatttttgtagacaaaagtactgccggttttgtgtacctgcggtttgatagtataacagccgctatgagcgcacagaaagcactccatggaagatggttcgcagggaagatgatcacagcaacttttatgaccccacaacagtatgaaatgaagttcccgagctagtgaacagatgcatgattaatatggacgtagttgcttgggctcggtgggtgctggcatttctatattttagcgttttgagcttgtgtcaacttattactggaggtaattataaaaaaaactagtggaggaaaatttagtggaagctagtgtatcgggaaatggctaacgaaaaatggtgaaagaaagagtttccttgccctgtgggttagtgctcgaattgaaactgtactgtgtaatggagtttctccctgaagtgctagtactaatacctaaaatgatggaagaaagagttgacttgcgttgcgcttgttgatttgattatactcgtc

SEQ ID NO: 156896 - DNA, 2809 bp, Zea Mays
ttttttttacaacttctccctctcagtttactgttgaaaaggcaaacaaaatcacttagccgcgctgcctctgtgtctgtcttttcgtttaattagggtttccggatctgctctgcgtcgccgccgaccaacctccaccgcgcgacgccatggacttcgacgagtacgagtatctggagaagacggtggaagcgttcgcagcgccggccaacggttcgtcgccgcccgggtcggggtacaaggacaaggagcgcagctcacgccgccgctcaacgggcggtgacgaagagcgcgacaacgtagaacgcagatcgaagcgttctcgccccgaggaaggccgcgaccgcgatagagagcggcacaggtaccgcgacggcgaccggcaccgcagcagtcgggagcggcgggaccgtgaccgtgacgtcaaggagaaagagcagggcagggagaacgacaaggacaggaggagccgcgaccgcgaacgggagaaggaggagagggagaaggataggcagcggaggagtcggagccggtccgagcggcgccgtgatgacgaagagcgtgatcgctaccgtgaacgcgatgtcagacgtaggaaagaggaagttgctgaacctgaagttgatccagaaagagatcagaggactgtgtttgcttaccagttatctttgaaggcagatgaaagagatgtatatgagttcttttctagggctggaaaggtccgggatgttcgcctgattatggatcgaaattcacgacgttctaaaggtgtcgggaatatttgtaatatggtgtacctgctgggatactcagcaacttattaagatggaaaacaagatcatattggtatattgaattctatgatgctatgtctgttccaatggcgatagctctttctggtcagttgcttcttggtcaacaagtgatggttaagccttcagaggctgaaaagaatttagttcagtcaaatgcttcaagtggagctgcttcaggtggagcaaggaagttgtatgttggaaatcttcactcaaacattaatgaagaccagttgcgacaggtctttgaaccatttggacaagtggagcttgttcagttgccattagatccgctcagtgggctatgcaaaggttttggttttgtgcagtttgcacgtcttgaagatgcaaaagcggcccagagtttgaatgggcaacttgagattgctggaagagtaatcaaggtttcagctgtgacagaccaagcaggcatgcaagttagtggagctacgggagatttggatgatgaagaagctggaggcttggcactgaatgccagttccagagctcttctaatgcagaaattggaccgcagcggcattacgaccaggtacctttttggggttgattgcataataataattctgacattttgataagtataggtctttaaaaaactatttagtatagcaccgatatttggagtatatttatttatttgttaattaattggtaacagagctgcacatttgattactgaggtgctgaatggactattcctccataatttgttttttttgtggcgctgcagagacttcatttcattttagaattccattatcttgcttgcttgtatgagtgccatcatttgtacccaaatctctcattattgacctctactatattatcgtcaggattcaaccaccactacagcaacactgtttccatatatatctagcttatcaaggtcgttctccatggacctcctccagttctttggtgtaaagtggtttggctgaaatattttgtttactgcagttctagtatttagtgccagttgcattgattgcaaatttcaggatggcgaattgatgatgtttgaaagtggacataagagaggaatcttgttacaatgcccttaccattttgatgcagatttcaatgattggctccataagaaacttgagttaaattttgttatagtagatgtacccttttatgtgtagcttactcactggacacgccaaccttttgtgttcctgcagtttgactggtgggacgggcattgctggtttgactactccagtggcaataccaactgtatctgtccttggtgctgccccagctgcagcccctcttctgcaccctacagtgcctggtcttgcaattcccggggcaactcttccaattactaccccatctattgatttggctccacctagtcaatgcctattgctcaagaatatgtttgatccagctttggagacagatcctgatttcgatttggacatcagagatgatgttcaggaggaatgttccaagtttggtcaattaaaacatatttttgtagacaaaagtactgccggttttgtgtacctgcggtttgatagtataacagccgctatgagcgcacagaaagcactccatggaagatggttcgcagggaagatgatcacagcaacttttatgaccccacaacagtatgaaatgaagttcccgagctagtgaacagatgcatgattaatatggacgtagttgcttgggctcggtgggtgctggcatttctatattttagcgttttgagcttgtgtcaacttattactggaggtaattataaaaaaaactagtggaggaaaatttagtggaagctagtgtatcgggaaatggctaacgaaaaatggtgaaagaaagagtttccttgccctgtgggttagtgctcgaattgaaactgtactgtgtaatggagtttctccctgaagtgctagtactaatacctaaaatgatggaagaaagagttgacttgcgttgcgcttgttgatttgattatactcgtc

SEQ ID NO: 156897 - DNA, 713 bp, Zea Mays
ttttttttacaacttctccctctcagtttactgttgaaaaggcaaacaaaatcacttagccgcgctgcctctgtgtctgtcttttcgtttaattagggtttccggatctgctctgcgtcgccgccgaccaacctccaccgcgcgacgccatggacttcgacgagtacgagtatctggagaagacggtggaagcgttcgcagcgccggccaacggttcgtcgccgcccgggtcggggtacaaggacaaggagcgcagctcacgccgccgctcaacgggcggtgacgaagagcgcgacaacgtagaacgcagatcgaagcgttctcgccccgaggaaggccgcgaccgcgatagagagcggcacaggtaccgcgacggcgaccggcaccgcagcagtcgggagcggcgggaccgtgaccgtgacgtcaaggagaaagagcagggcagggagaacgacaaggacaggaggagccgcgaccgcgaacgggagaaggaggagagggagaaggataggcagcggaggagtcggagccggtccgagcggcgccgtgatgacgaagagcgtgatcgctaccgtgaacgcgatgtcaggtgcatgaactagctcaactcgagtttacaaactgctgaacgatctatattgcgtggattgtttttttgattgacctttaaaattatgctagaataaggcattgcaagcaactactcacaaatt

SEQ ID NO: 156898 - DNA, 1631 bp, Zea Mays
gtactcctccagcgccgccgtgacgacccgcccctcatcccgctcctggccgagcagggcgaaggccttgcccaggcaccgggccaggacgacgccgtcctcgagcgccgcgcacccgccctgcccgagctccggcgtcatggggtgcagcgcgtcgcccgccacgcacacgccgccgcggctgatgctgccgcggaccagcgccagcggggaccggaaccgcagcggcgacgacgccacgtcgctcatctcgctccgctccaccacctccagcgcctcggccgggaccttggcgccccgcagcttggcgaccacgtggctccgcatcttggccacgctctcctcggcgtcgccgtccgcgggggacgggtaccaggtgtagttccagtagacggaggtgtcggagcagggcagcacgccggagcggaagccgtggccgatgaactgcaggatctcggggccgaagccgtggccgcccgggtactcggcgaggcccctggtggccgagcgccccgacaggatcggcttcggcaggcccagccactgggccaccacggagttcacgccgtcgcacccgatcacgaccttggcctttatggtggaaccgtctgccaggtgcagctgcagggtcttggcgccgccgacgccgtcttcctccatggcgacaaccttggccgagtacctgatggtgccctccggcagctcgtcggccagcgtccgcagcaggaagtcccgcttcacgcaccggatctcgtgtggcccgctggtgtatttttcagaggatgtttcaggcttgggccgaagcaaatgggctggatttgttctcgtagtgatgtttctggctgctggcggctcaccgctcgtagagcaaatggtgctcccggatcttgtccccgacgccgagggcatccagggcgcggaaggcgttggtccacgtggtgaacgcgaaccccgacgcgcgcagcgccggcgacgactccagcaccaggcacctcacccctttcctgcaccacacgacacgacacgcacgagacgagaccagcagcccgtccgtcagcacggaggacagcaacggcggattgtgcttgtgcaggggagtaggtaggtagtgcttgcctgtgtagcccgagcgccgtcgcgaggccggcgaggcccgcgccggcgatgacgatgtcctccacggcgtcccccatcggcggttcccgcgcagaacgaactgatgaaggccgctgcagcagcttgctctgatgcctctttcttttttatagcaagcaaacaagcaagacgacgcagccgggatgggcacgcgcagcttcgccgatgcatcagcgcttcgggctggcttcttgggacttgggattgggaggagaagttggagtttgattcgccgaaaccaccggcgcggcgcggccgcacaaggaggctgcatgtgctgtgtccaccacctccatccactactcttgagaattacagaaacataataatctactgctctaccgattgtaaaaatagtccacgacatggcagcttctatctaggctttccacaacgtatgccgcacgacatctttgagtcgccatcgttcctcgttcgcttcactagtttcgtttaccaacatagccagaaaaaaa

SEQ ID NO: 156899 - DNA, 1612 bp, Zea Mays
aaaaagcgcgagaacgaaaggaatgaggcgaggaagaaagtatcgtcatctatcctaaggccataggatgtgaggctgcagtgaacgccgctccgcgtctccagagggctctgctcctcctcttcaatcccactcccgccccgatggccacctcctccgtgctcccgctccacctcctgtcctgcgcgcgccgggccagcaccagcaccagcaccgccgcgcgcgcctccgcggccccggcggtggcggcgacgaccgcgcagtccctggaggagtcgttcgggcggaagggcctgcggttcgtggccgacccggccggcgggcccctcgccgcggagctcagcgtgcggaacggcagctcgctgcatctccgcctcggcgacggcctcgtcacgtcctaccggcccaaggtgtactggaaggacgacgggtgccgggaggtgctgcacaccgtggcgggcaagggcggcgtcggcctcgtcctcaacgacgcgacgtcctcgtccgcccagccgtcgctggtcgacggcgccgagtgggccgtcagggacgccgactccgactcctacgacgccgtgcaggtggagctcgggtgcaccatagggaagctggacatctcgtacgtggtgacgctgtactcgctgagcatggcgacggcggtgatcgtccggaacacgggcagcaagccggtggcgctgacaggcgcggtgctgagccacatcaagttcgacaagcgaggcggcacggccgtggagggcctccgtggctgcccctactgctcctacccgccgccggccgcagccttcagcctcctgtccccggccgaggccatgaagcgggaggaccctggctggttcggcggcgccgaggagctgcgccagggcgtctggaccgtcgaggaggacctctacaccacgctcaagaagaaggtgagccgggtgtacgccgcgccgccagaggagaggaagaagcgcgtctacagcaccgcgccgtccaagttcaccaccatcgatcagtatagcgggctcgggttcaggttggtgaggatggggttcgacgacatgtacctctgcagcccgggaggcatgtacgacaagttcggcaaggactactttctgtgcacggggatggcgtccatgttggtgcccgtcgtcgtcaaccccggcgaggagtggaaggcggcgcaggtcatcgagcatgacaacttgtaacttcttcttcttcttttggtcaacggaattacagaatcgaatggcgcgcggctccattctcgaatacatgtcgatggtccgatctccagtgagatatatacatcaatacagatagttctttccatgggaagtgttaaacattgaatgtaaaatgagaaagtgaatgagaaaactatcatttttattgatctttgaaatctctactatatagagcacgagtttatttcattcgggcgtcacccctcctctttctgcataattgtgtacaagtgaggattcaaacctcgtagggattcaaaccttgattgttgtctccatgttcatatccgcctatcaaatgtaacatacgtatttatattcaaacataatacagatatttttatgaaaaaataaaaaataaa

SEQ ID NO: 156900 - DNA, 2766 bp, Zea Mays
cccctttttccccttcacagccccgtactactatccccgctaccgctagccgccgcgctgctcatctggtggcggctcgcctccctccccccatccgccgccgccggctcctcctctagctccctccttaccccgagctttaagctcgtgctacctgcctacctatccgtagggagagagagagagaggggagaaggttcggtcggtcggtcgggggctctcggatctcgccgctgcctccccgtttcttcgttgggatctcgctcgcttcgcgccatggccgccgtcgcgacgccaccggcccccgcgcccgccgcgccggcaccggcaccggcaccggctgctgctccggctcccgtcaccgtcgcccctgccgcggaccaaaccacggatctgctgcagaagttgtcgctggattcgcagcccaaggcggcgggtgcgacagagcctgctgctgctgccgccaaggagggtgctgtgacaagccagccgctgagtgtggccatcccgccggagcggtctatcacgccggtgcttcaggactttatggatcccaacctgttctatctaccagcgtattactatggaggctacgacagttccatgagcgagtgggatgattatccaagatatctaaattcagatggagtggagattgccccagcagtgtatggagatatttatggatatgggtatgctccttacggggcatactctccggccacttccccagttccaacggttgatggtcagatgtttggcgcacagcattaccagtatccaaccacgtattttcagcctcctacaccaattccttctaccactcaaagcaacctccagtcttccaacaatcctgaaaagccagcagctaaagcagatcctgccaaggcaaccgctaatggtgttccaaatggtactggtcacactcacagttacagtggaactgtaccaagccaacaaagttcagcactgacgcctgatggaacttatagggcgcccttgctaggtggagttccttctgctggttacctagacacgacatattatgggtatgacagcacaggggcacaatttgcatggtatgatggctctgcttatgcaaatggacagcaaagaacaaccacaactaatcgttttccatcctcgtcattcagtggtaatggttcatctgcaatatatcagaacaagagctccaccacgcagcagatgggtatgcagaatagaagacctacaactacatcagcagctcctacctatcccaataggatgtaccctagcccccgaccgtacacccagtatgggaattcagtaaaaactggtcttccctacgggagtaacggttatgattccaggatatatggtcgatgtggtcttggtaatggtatggataacaggtacaggcccagggcatgtagtggatactatggttatggcaatgagagtcaggatggaacaattgagttaaacagaggtcctagatctggccggttcaagaaccagaaattgtacggtcatactgtcactattgctgtgaaagggcagtctctcccttctagtgaaagcaagaatgatagtgctgtgcctgatagagcaaagtacaatagagatgacttccctgttcagtacgatgctgcaaagttctttgtcattaaatcgtacagcgaggatgacatccacaagagcgtaaaatacaatgtgtgggcaagcacaaccaacggaaacaagaagcttgatgctgcttaccaagaagctcagtcaaagggatctgcatgccctatattcttgttcttctcagtgaatacaagtgggcagtttgttggtgttgctgaaatgactggcgccgttgattttgagaaaaccctagagtattggcaacaggacaagtggaacggctccttctctgttaagtggcacattgtgaaggacgtgcccaacaatattctcaagcacatcatcctggagaacaatgagaacaagcctgtcacaaacagccgcgacactcaggagatacgcctcgaacaaggccttcagatgctcaagatattcaaggatcatgtcagcaagacttccatcctcgacgactttgccttctacgagagccgccagaagttgatgcaggataagaggtcgaaacagcagcagctccaaaagcaggtctgggacactaggacccccgtttctgtcaccggtgagcgaccgcaggaacctgctaatgggaagcccaatccgtccgtaccagatggtgtcacggcagaggtgaaggcggtgaaggctcccgcagagaacggcatcactgctcctgttgtttcctatgcagcaaaggtggcccagacagcaccagagaaacccgtcctctccaacggagtcgccaagaccggttaactcgatcgtgcaaccagagctccatagccaggatgcggtgcaagggaactggtgaccaaccaaggcaggctgtggaactggcagcatggccccataagcgttgctcgatctcctcatcgctactggatggagagcagttggctagttgttagcggtttccctagtttctcttcctcttgtgttccccgtttcagtttgcttatagccccgaagactcttttctcccgtagtgtcggaatgccagggtctgtccctgtgggtgtgttgcgtaactgggatccgagtataccctgctgtgttcgtcgttacattgaatggatctgaatgaaagtgggttagattggagctaaaaaagaaaaataaaaaggcagaaaaacaaaatag

SEQ ID NO: 156901 - DNA, 2754 bp, Zea Mays
cttcccctttttccccttcacagccccgtactactatccccgctaccgctagccgccgcgctgctcatctggtggcggctcgcctccctccccccatccgccgccgccggctcctcctctagctccctccttaccccgagctttaagctcgtgctacctgcctacctatccgtagggagagagagagagaggggagaaggttcggtcggtcggtcgggggctctcggatctcgccgctgcctccccgtttcttcgttgggatctcgctcgcttcgcgccatggccgccgtcgcgacgccaccggcccccgcgcccgccgcgccggcaccggcaccggcaccggctgctgctccggctcccgtcaccgtcgcccctgccgcggaccaaaccacggatctgctgcagaagttgtcgctggattcgcagcccaaggcggcgggtgcgacagagcctgctgctgctgccgccaaggagggtgctgtgacaagccagccgctgagtgtggccatcccgccggagcggtctatcacgccggtgcttcaggactttatggatcccaacctgttctatctaccagcgtattactatggaggctacgacagttccatgagcgagtgggatgattatccaagatatctaaattcagatggagtggagattgccccagcagtgtatggagatatttatggatatgggtatgctccttacggggcatactctccggccacttccccagttccaacggttgatggtcagatgtttggcgcacagcattaccagtatccaaccacgtattttcagcctcctacaccaattccttctaccactcaaagcaacctccagtcttccaacaatcctgaaaagccagcagctaaagcagatcctgccaaggcaaccgctaatggtgttccaaatggtactggtcacactcacagttacagtggaactgtaccaagccaacaaagttcagcactgacgcctgatggaacttatagggcgcccttgctaggtggagttccttctgctggttacctagacacgacatattatgggtatgacagcacaggggcacaatttgcatggtatgatggctctgcttatgcaaatggacagcaaagaacaaccacaactaatcgttttccatcctcgtcattcagtggtaatggttcatctgcaatatatcagaacaagagctccaccacgcagcagatgcagggtatgcagaatagaagacctacaactacatcagcagctcctacctatcccaataggatgtaccctagcccccgaccgtacacccagtatgggaattcagtaaaaactggtcttccctacgggagtaacggttatgattccaggatatatggtcgatgtggtcttggtaatggtatggataacaggtacaggcccagggcatgtagtggatactatggttatggcaatgagagtcaggatggaacaattgagttaaacagaggtcctagatctggccggttcaagaaccagaaattgtacggtcatactgtcactattgctgtgaaagggcagtctctcccttctagtgaaagcaagaatgatagtgctgtgcctgatagagcaaagtacaatagagatgacttccctgttcagtacgatgctgcaaagttctttgtcattaaatcgtacagcgaggatgacatccacaagagcgtaaaatacaatgtgtgggcaagcacaaccaacggaaacaagaagcttgatgctgcttaccaagaagctcagtcaaagggatctgcatgccctatattcttgttcttctcagtgaatacaagtgggcagtttgttggtgttgctgaaatgactggcgccgttgattttgagaaaaccctagagtattggcaacaggacaagtggaacggctccttctctgttaagtggcacattgtgaaggacgtgcccaacaatattctcaagcacatcatcctggagaacaatgagaacaagcctgtcacaaacagccgcgacactcaggagatacgcctcgaacaaggccttcagatgctcaagatattcaaggatcatgtcagcaagacttccatcctcgacgactttgccttctacgagagccgccagaagttgatgcaggataagaggtcgaaacagcagcagctccaaaagcaggtctgggacactaggacccccgtttctgtcaccggtgagcgaccgcaggaacctgctaatgggaagcccaatccgtccgtaccagatggtgtcacggcagaggtgaaggcggtgaaggctcccgcagagaacggcatcactgctcctgttgtttcctatgcagcaaaggtggcccagacagcaccagagaaacccgtcctctccaacggagtcgccaagaccggttaactcgatcgtgcaaccagagctccatagccaggatgcggtgcaagggaactggtgaccaaccaaggcaggctgtggaactggcagcatggccccataagcgttgctcgatctcctcatcgctactggatggagagcagttggctagttgttagcggtttccctagtttctcttcctcttgtgttccccgtttcagtttgcttatagccccgaagactcttttctcccgtagtgtcggaatgccagggtctgtccctgtgggtgtgttgcgtaactgggatccgagtataccctgctgtgttcgtcgttacattgaatggatctgaatgaaagtgggttagattggagcttttcttccatctccggtt

SEQ ID NO: 156902 - DNA, 1084 bp, Zea Mays
ccgagccctgggctcgggcgaggcggagttcgtcgtcttccggagccgaggctgagtccgagccctggggtcgggcgaggtggagttcgtcgtcttccggagccgaggctgagtccgagccctggggtagggcgaggcggagttcgtcgtcttccggagccgaggctgagcccgagccctggggtcgggcgaggcggagtccatcgtccgaggccgagacgggggccgagcaacccatcaggcctttgcagctttgtgctgatgagggttaccagctgagattaggagtcttgggggtacccctaattatggtccccgacaaatggtaatgtcacatgatggttttactaaacagtactactaattggagtgaggagaacactaaaattgtctgtgaatttttttgccgatgaagttcaagcgggaaatcgtgacagcacacatttgaataaatctgggtacaaaaatgtgatttaaaggtttcatcaaagaaccggtattttgtatgaccgaaaaaagttcaagaacaagtgggacaagttgaaaatagattatggaatttggaagcaactatctatcagggaaactgtcataggatgggatgcatctcacacacatattatcatgcctgagtcatggtggaagaagatgtctagtgtagtgtcatcgccacaaatcaacattaatgatgatgagaaagaagttaactatgatgatgatagtgagctagaggatgtgacacccacaagctctagatcagtgagagcaagagtgacctcacaaggcaaggggaagaagcgaaaaaccagtagcggccgatggtttcaggataagattggagagcttgttgctatgaatgagaggaccactgcttcttgtgaatcaatggcattggctagtaaggagccaaaatctgactttccattaaagaagtcatgacattggtgaaggcatgtggtgccacccctggacaaatgagcatttcattgcgacatgtctcttcaccaagaaagctgatagggagatgttcatgactctagacactcctagagagaggtttgaatggttaaagaggaagcatgaa

SEQ ID NO: 156903 - DNA, 3624 bp, Zea Mays
tttctccctgccccgctcccgacgccgaacccgcggactccgcttgcggactccgcttcctcccctttatcgcgtcgccggcgcccggccccgctattgcttcgctgtggagtccggtaaagtttatatttgtctcgatcaatgcggcattgcagttagcccctgccgttttcttctcccgtagtcccgtcccaccggcccccctccgccgcctccacacgccaggtgtagcctcgtcgatcccttcgccggcgaagagcccctactaggattcaagatgggtcatcgtaggaattattctgacgacgaattttcagttgctagcgagaagccagaagtagaattcatggacttccagaacggtgacacttttcaggattattcatctgaagatacccctgtgctcgtctcagctcctttccctttcgagcatggaaaaccaaaatctgtacttgttggagaaacatcggctgatactattcagattgagaatacctctcctgaacctgtaaatttgtggagtgtaagaattttctcctcaaatccagaagacagctacgtgttatcgatgatgagacctccatcaaatggtgctagcgaagaggaaaagcaggcttttcttgctttgacatcggtggaagaccgtacacttcggcctggacaaaccctcacagtttggctgtcttgtacgccaaaagatattggtttgcatacatcaatcgtgcatgttgatatcggcaatgagaagattgagcgtgtggcttttcttttggcagatgacaatgtctccaagtcattattttctgataagccttattctaggagacgtgttcaagttaagaaatttgagccttcaccatttgtgccaggttgccgtccaactcagcagcatgttcaaggatacaaacataagcttcctcagtatgcaatacctgcacatatccgtgagctcattgaaagtaaacagacacctgatgtcctatatgatgagttgagcatgataaactatgcagaatatttcagcactcttatagtcatggaagaactcaatttggaggaggaaatgagagcatatgacatggagggtgtcttaatgagaaggaggggtatgcactttttgtctcttgaagtccctggtttggcagaaagaaggccatcactagtccaaggagacttcatattcgctagatatgctgggaatgattctcagccttaccaaggtttcattcacaaggttgaagctgatgagatatttttaaaatttgatcatcagttccacatgaatcacagagaaagaaaccagtaccatgttagcttcacatataacagagtgaacatgagaaggctttacaaatcaattgatgatgcaaaatatttgggacctggcatcttgtttccccacaaatcaccttatagagttttgaaaaggttgccatttaagcctctcgatccatatataaatactgagcaagctgatgctgttgcgagcatacttgcctgcagaggagttccaccatatgtgatatatggacctccaggaactggcaagaccatgaccattgtagaggctgttttgcagctttatacgggcaagaagagggcaaatattctcatttgtgctgcttccaatactgcagctgatcatgtattggaaaagctccttcaaggcagccatccgatccgtccaagagatatctttaggctaaatgctccaagccgtcaatacgaggatgtcaataccgattttatcaagttttgcttcttccaagatctggtgttcaagtgccctccgttacaagcactggtgcagtacaagataattatatcgacctatacaagttcatatctgctgcaggctgagggcattcgccaagggcatttcacacacattttcttggatgaggctggtcaagcctctgaaccagaggcgatggttcctttgtcggggttgtgtggaagagacactgtggttgtgttagcaggagatccaaagcaattagggccggtggtttattgcagggaagcggagagatgtggtctggggacatcatatctggaaaggctgctaactggcttcgagcagtaccaaacagggaatgctaactatgtgacaaagctggtgaggaattatcggtgccatcctgcaatcctagagctaccatcagagcttttctacgagggtgaattgattgcctgtaaagaaggagaatcatctgcttacgactgcatcggccttcctaacaagtcgttccctgttctcttcgtcgggattcaaggatgcgacgagagggaaggcaacaatccatcatggttcaacaggattgaagttagtaaagtagtatctatcatcaggaacctgacaaggggtgaggatgttcatgaatctgatataggagtgatcactccatatcgtcagcaagttgccaagataaagaaagccctggaggcatttgaaatgcccagcttcaaagtcggaagcgtcgagcaattccagggccaagagagggaggtgataatcatctccacagtcaggtcgaccgtaaagcacaacgagtttgacaaattttttaacctgggattcttgagcaaccatagaaggttcaacgttgccatcactcgcgcaaaatcgctgctcgtcatcatcggaaacccttacattatcaccaaggaccgtcactgggataggctcctgcggtactgcgctgacaacggctcctatcaaggatgcccccttccaccaccagagtctccttattcagacgacgccagattcttttccaagtacgacgaagaccaaggtggaccttctgggcaggactacagccaagagcctgcctactgcaactacaaccaagagcctgcctactgcaactacgacgaccaagagccttctgacttcggttcggggcatgacactggtgttgctcaacctgaacctgcttcggagaatcaagagtcatggtccgaggagttgcctgaagacgagagccagccattcagcaacccccaagcagatgttgaggagacgccgaagcaggacggcgaggaaggggctgcagctgcacagggagacgcgcaggccgaccagtcgttgaccaacgacgacagtcagctccaggacgcaggcgcggggaagtacaccttccctcccggttggtgcgacgtttcgagcatcccggcaacgggctggggcgactgatcagacccgcaaccgcaaccgcccctggcaggggggtacgttgggagaataactgaggctgatggcctttcaccctccttccatcaagcctccactcagctcactgctgaacagttgttgtagcgagtgagctgcgtccgtgtgtttaggccacgtgtgccaggtgctggcaacgtgcaatatggtgggttagctcgcgtgccattgagcgtgtgctaatggtttttaaatgcttaggcctttttcggttacaagggataaaattctaccatggatttaatccgaccagaattaagtaaattcatacctcacatccaatcacatggtgggattaaatccattaattaatccatgtatatctcaaagatagttattcttttaatccatggattttaatataaacttgtgcaatattgtcatggatt

SEQ ID NO: 156904 - DNA, 433 bp, Zea Mays
ctccccttaaacccctgcaccattcatttctccctgccccgctcccgacgccgaacccgcggactccgcttgcggactccgcttcctcccctttatcgcgtcgccggcgcccggccccgctattgcttcgctgtggagtccggtaaagtttatatttgtctcgatcaatgcggcattgcagttagcccctgccgttttcttctcccgtagtcccgtcccaccggcccccctccgccgcctccacacgccaggtgtagcctcgtcgatcccttcgccggcgaagagcccctactaggtatgccccctcccccttcctcctctccccttcctccctgctgtgcgaaactgggctcccgaaccgtaaccctgaactatctgggtatgtgtattcggatctgatctaatacaagtgtatctttctcgcaaaaaaaaa

SEQ ID NO: 156905 - DNA, 112 bp, Zea Mays
catcaatgtcacggaccagaaaatggagatccttgcaaatacttttcattgcaaaattggatcattgccctttacttacttagggcttcccttgggtatccaaagacctaaa

SEQ ID NO: 156906 - DNA, 279 bp, Zea Mays
atggcgatggcgatagggtccatggcggcttggcggcttgaccatcgaatcattgcacagagatattatacagtgctgacgaaggatctgttatcaattgggttcgaccaaggatggccttcattcctgctgtcgatggattcgactagctcaatgagaaaaagtcttgtcctcgcgtgtgttcctactgaattagctgactacgtctttggtgaaaagtcaatttttagttggtcggtaatggcccaggggaaagatcgtagctttataaacttgtag

SEQ ID NO: 156907 - DNA, 1417 bp, Zea Mays
agcagagcgctctccgtctccggtccagtatctccgctcgccctcctccctcctcctcctccttcgcttcaggttcaggagccagttagaacattggtgttagcgcgcgctctttcctccaagcagaatcaagattttgttcccatcctcaagtacttactcctcctctcccccactctccagccgtcctctctccttctccatcaaatcacaggctttgtttatagggaaaaaaaaacaaacaaacaaacagttgtctctgcgcccgcccgcccgccttggcttcttctacctacatcagctgtccatttcgcagcacgcagcagcagtctctacgctacggctgcatgagtgttagctagcagcaaggatgagagatggcagcaacaccaccaagaagagcaagctgtcgtggtccaagagcttggtgaggaagtggttcaacatcaggagcaaggcccacgacttccacgccgacgatgtggccgcgattggtaggacagttgcaggagggggcgatgacgagtggaggaggggcagcagcttcacccgtagggagccgagcacagtgaagaagagcaagacagagaggtcctcgaggaggagcaatgggcactcgaggcggggaaagattgaccttgatgccgccgaagccacagtgacattggactataggatatttgttgctacatggaatgtgggcggccgttccccgccaaataacatgagcctcgaggactggctccacgctgcacctcctgctgacatctatgtcctcgggtttcaagaaattgttccactcaatgccggtaacgtccttgggacagaggacaatgttccagcgaagaggtgggtgtcactggtcaggaggacactgaacaatttgccaggtactagtggcaacgggagcttccggacaccatctccggctcctaaccctgtggtggagatcgacgatgattttgagggtttgtcatcgaagcagaacagtgcaagtttcttccatcgccggtctttccaggctgggcttagtcggagtttgaggatggagggtgacattcttgctcctcagccaaggctggaacgtcggtacagtgtctgtgaccgagcaatctatggccgtaggcctagcgactatgagaacaactaccgatggggtggatcgtcagatgatgagaataatactggagagtcaccgagcactgtgtattcaccagtgtcgtacggttacggcaatgcatcatctctggaagatggtcaaagacggcctggccaaactagatactgtctggtggcaagcaagcaaatggtagggttgtttctgatgatttgggctcggaaggacataagagatgacataagaaatctgaaagtttcttgtgttgggagaggactgatgggctaccttgggaataag

SEQ ID NO: 156908 - DNA, 2136 bp, Zea Mays
gacgatgcgtgcgtgaatgattgacacggactacgcgtacacttgcaataatgctgccgcatgcccccagcagcaccccgtcccctccccctattaataaaaaaaaagattctgacagccgaaagcgcgcacggtgcttgctgctgacctgccctgcccacgccatgttcgcgcccacccgcttcacgtggccggctccccgcggctgaccggatcgttgagcccggtcgtacgtacgtcgcccgctgccccctcgtcgtcgcaccccggcattccccattcccgttcccgttcccaggcaggtacgtgctcggtgctcgccgcggatcggtcacgattcacgcgctacgacgacgatgtcatgtgatatgatgtatgtacacggccggcgccgccatcgtacacgtactccgtgtagtgcgttgcttgcagttgcggtgggcggcggcggaggcgtcgacgaagcatggggaaggcggggcgctggctccggagcttcctgtcgggcaagaaggacaggcaggcggcgcctcccaaggacaagcggtggagcttcaggcgccccccgccggcggcgcaggaagggacggcggcggaccagcaccaccatgggccgccgctcggtctgccggcgccgggcgtcgacgagctcgacttcgaccagaagaagcacgccgtggcggtggccgtggcgaccgcggcagcggccgacgcggcggtggccgccgcgcacgccgccgccgcggtggcgcgcctgtcctcccgcgccgcgccgcgcttcgcaccgccgccgtgcctcgtcgaggacgccgcggccgtcaggatccaggccaccttcagaggctatctggcgcggacggctctgtgcgcgctgaggggcatcgtgaagctgcaggctctggtgcgggggcagctggtgaggaggcaggccaacgccacgctccgctgcatgcaggcgctcctggcggcgcagtcccagctgcgggcacagcgcatgctggccctccagctccacgaccaccaccacccgacgcctcccagaccacgccagtcgccgcagcacccgaggcaccgccgctcctacgagatggaccggtcgtgcgaggacaacgccaagatcgtggaggtggacgtgggcgagcccgtgcggcggggcgcggcggggaaggacaggcagctctacgccggcggccggtcctccccggcgccgtcgctggcggcgacggagctgctgagcccgcgggcgtacagcgcccacttcgacgacctctcggtggccaacacggcgcagagcagcccgcggcaggcgccggaggcctgctgcccgggctacatggccaacacggagtcgtcccgcgccaaggcgcggtcccagagcgcgccccgccagcgcaccgacgcgctggagcggctgcccagccgcaggaagcaggggacgccgcccagggccgccgccaggatgcacttgcagcgctcgtcgtcgctggccggcaactactcctccccgtggtcgtcgtcggctgccaggctcgacgtctccgccgcgtcgctcaaggacagcgagtgcggctccaccagctccgtgctcaccgccgccaccctctacagccggacgcggtcgctcgtcggctccgaggtgcgccgtggcctgtactgagaggagctagctcgtgttcctggcgaccccatggatggatgctgatagcttctgttcttccaatggtccgtgattcttcgatgggagatgggagcttcaaataaatggaatgcttatgaccagttcgtgctacataaaatagtcgcgtttcaaactgtacatttttgtagcccacttgtggccgtctgcaggtattgggtactagtatatagacgtgtacagctacacaaaatgtttgtacaacaaggtttgcgatcgcttgtaatgggtctgcttagctgccaagaagcaggggttgttaatgcgatcgcttgtaatgtgtctgcgatgacgaagatgggtaaatgatccttggcttcgtgctgaagcccccaagggctgctggcccgcatcccaactatatattgtgcacgtctagtttaatttatgtagttttttcgtgctactgtcgtgccaatctaacaagtgaaattatctgc

SEQ ID NO: 156909 - DNA, 1901 bp, Zea Mays
agcaccccgtcccctccccctattaataaaaaaaaagattctgacagccgaaagcgcgcacggtgcttgctgctgacctgccctgcccacgccatgttcgcgcccacccgcttcacgtggccggctccccgcggctgaccggatcgttgagcccggtcgtacgtacgtcgcccgctgccccctcgtcgtcgcaccccggcattccccattcccgttcccgttcccaggcagttgcggtgggcggcggcggaggcgtcgacgaagcatggggaaggcggggcgctggctccggagcttcctgtcgggcaagaaggacaggcaggcggcgcctcccaaggacaagcggtggagcttcaggcgccccccgccggcggcgcaggaagggacggcggcggaccagcaccaccatgggccgccgctcggtctgccggcgccgggcgtcgacgagctcgacttcgaccagaagaagcacgccgtggcggtggccgtggcgaccgcggcagcggccgacgcggcggtggccgccgcgcacgccgccgccgcggtggcgcgcctgtcctcccgcgccgcgccgcgcttcgcaccgccgccgtgcctcgtcgaggacgccgcggccgtcaggatccaggccaccttcagaggctatctggcgcggacggctctgtgcgcgctgaggggcatcgtgaagctgcaggctctggtgcgggggcagctggtgaggaggcaggccaacgccacgctccgctgcatgcaggcgctcctggcggcgcagtcccagctgcgggcacagcgcatgctggccctccagctccacgaccaccaccacccgacgcctcccagaccacgccagtcgccgcagcacccgaggcaccgccgctcctacgagatggaccggtcgtgcgaggacaacgccaagatcgtggaggtggacgtgggcgagcccgtgcggcggggcgcggcggggaaggacaggcagctctacgccggcggccggtcctccccggcgccgtcgctggcggcgacggagctgctgagcccgcgggcgtacagcgcccacttcgacgacctctcggtggccaacacggcgcagagcagcccgcggcaggcgccggaggcctgctgcccgggctacatggccaacacggagtcgtcccgcgccaaggcgcggtcccagagcgcgccccgccagcgcaccgacgcgctggagcggctgcccagccgcaggaagcaggggacgccgcccagggccgccgccaggatgcacttgcagcgctcgtcgtcgctggccggcaactactcctccccgtggtcgtcgtcggctgccaggctcgacgtctccgccgcgtcgctcaaggacagcgagtgcggctccaccagctccgtgctcaccgccgccaccctctacagccggacgcggtcgctcgtcggctccgaggtgcgccgtggcctgtactgagaggagctagctcgtgttcctggcgaccccatggatggatgctgatagcttctgttcttccaatggtccgtgattcttcgatgggagatgggagcttcaaataaatggaatgcttatgaccagttcgtgctacataaaatagtcgcgtttcaaactgtacatttttgtagcccacttgtggccgtctgcaggtattgggtactagtatatagacgtgtacagctacacaaaatgtttgtacaacaaggtttgcgatcgcttgtaatgggtctgcttagctgccaagaagcaggggttgttaatgcgatcgcttgtaatgtgtctgcgatgacgaagatgggtaaatgatccttggcttcgtgctgaagcccccaagggctgctggcccgcatcccaactatatattgtgcacgtctagtttaatttatgtagttttttcgtgcta

SEQ ID NO: 156910 - DNA, 1767 bp, Zea Mays
gacgatgcgtgcgtgaatgattgacacggactacgcgtacacttgcaataatgctgccgcatgcccccagcagcaccccgtcccctccccctattaataaaaaaaaagattctgacagccgaaagcgcgcacggtgcttgctgctgacctgccctgcccacgccatgttcgcgcccacccgcttcacgtggccggctccccgcggctgaccggatcgttgagcccggtcgtacgtacgtcgcccgctgccccctcgtcgtcgcaccccggcattccccattcccgttcccgttcccaggcagtgcgttgcttgcagttgcggtgggcggcggcggaggcgtcgacgaagcatggggaaggcggggcgctggctccggagcttcctgtcgggcaagaaggacaggcaggcggcgcctcccaaggacaagcggtggagcttcaggcgccccccgccggcggcgcaggaagggacggcggcggaccagcaccaccatgggccgccgctcggtctgccggcgccgggcgtcgacgagctcgacttcgaccagaagaagcacgccgtggcggtggccgtggcgaccgcggcagcggccgacgcggcggtggccgccgcgcacgccgccgccgcggtggcgcgcctgtcctcccgcgccgcgccgcgcttcgcaccgccgccgtgcctcgtcgaggacgccgcggccgtcaggatccaggccaccttcagaggctatctggcgcggacggctctgtgcgcgctgaggggcatcgtgaagctgcaggctctggtgcgggggcagctggtgaggaggcaggccaacgccacgctccgctgcatgcaggcgctcctggcggcgcagtcccagctgcgggcacagcgcatgctggccctccagctccacgaccaccaccacccgacgcctcccagaccacgccagtcgccgcagcacccgaggcaccgccgctcctacgagatggaccggtcgtgcgaggacaacgccaagatcgtggaggtggacgtgggcgagcccgtgcggcggggcgcggcggggaaggacaggcagctctacgccggcggccggtcctccccggcgccgtcgctggcggcgacggagctgctgagcccgcgggcgtacagcgcccacttcgacgacctctcggtggccaacacggcgcagagcagcccgcggcaggcgccggaggcctgctgcccgggctacatggccaacacggagtcgtcccgcgccaaggcgcggtcccagagcgcgccccgccagcgcaccgacgcgctggagcggctgcccagccgcaggaagcaggggacgccgcccagggccgccgccaggatgcacttgcagcgctcgtcgtcgctggccggcaactactcctccccgtggtcgtcgtcggctgccaggctcgacgtctccgccgcgtcgctcaaggacagcgagtgcggctccaccagctccgtgctcaccgccgccaccctctacagccggacgcggtcgctcgtcggctccgaggtgcgccgtggcctgtactgagaggagctagctcgtgttcctggcgaccccatggatggatgctgatagcttctgttcttccaatggtccgtgattcttcgatgggagatgggagcttcaaataaatggaatgcttatgaccagttcgtgctacataaaatagtcgcgtttcaaactgtacatttttgtagcccacttgtggccgtctgcaggtattgggtactagtatatagacgtgtacagctac

SEQ ID NO: 156911 - DNA, 393 bp, Zea Mays
gcggccgtccacatgggccagcgacgacggaacctgtccgccgcggtgctcctcctcgtcctccacctgctgctacttttctccgcccccgggacgtgcacgccggcgagggggagaggcggggtggcgccgacgaagggggaggaggacggctactcctggttctgggccacggcggcgcgccgggcgctggtggggccggggtcgtcaccgcccacgtgccgcagcagctgccggggctgccacccctgccgccccgtccacgtcgccatccagcccggccggagcttcccgctcgagtactacccggaggcctggcgctgcaagtgcggcaacaagctcttcatgccctgacctacaacgccaacgccacctctgcctgctgctgcttcg

SEQ ID NO: 156912 - DNA, 2734 bp, Zea Mays
atggctgtgcaagcccattcaaggccacagaatgtttcgcggcaattatggcccgtgcttcaccatgccgtcagcgagtgctgcttgatcataatgctcgttacgactgctgtgttgtcatacatggccacaaggttcgcacgcatgtgcagcctccggtcaccatgtatgttatgttcgaggttggatcaatttctacatggcaaggcatggttctctgaagaactagtttgtgctacacacaggatagaaatatcacgtttgtcatattgccagagtcacaacaagcttgagcgctctgatgatatgtgtgataagtgcatgctttcttgcatgacctcaagtggcaagacctataacctgacaaacatgcatggtagggataaggtgaagtctcggtcgagatctaggcacaaacacatgtgctcctgttgttcgatgcagttcaagaagaaacgagattcacatatgctacctgacataacaaatagctggtttccaggtgacgatatgagcaaattaaaacaaagaaacatagtcatgtcaagtgttgggtattcttcaaatgacgactatgatcacttgccttatgaaggatatagaaaactaaagcttggccatgaatctgaatatgatattcacatctcaaatagtgataatgacgagagaaatgcagtatctcatgaagctagagaaagagccaatcacatgcctagtcatgatgcactgctgcaaccaatgatctctaatgccagcggcttgttgatgccttcttttgataatactattatgacaaaggccacacaaccactgaataatgtgagagatactgacactcactctagtgataccaaggatgcaaattctttggatcatgctattgggcttgttttggatgatatcagctggagtcaaatcaatacaagtgacaaaaatattgacgtacagtcgaaggctatccctgaagaagttttagcagagctcccaaaagagaaaaattttcttattggtactgaagaagttggtgattcttttgaggatatttcaggaagccctggtgttgaagctgcaaaggattttaatgcttctgcaaatgctggaacaagatcaagtgtagacactcatattagctggaacaacagcccaaaaattgcttctgcatgtagaggctattataaatctcctcgtttgtctgaaataatctcagcccgggacaccaattcaaaaacaaatgaagaagtcaagacatttctatcacaattgtctactgcacggggatttgatagctctttgaatgagatgacacctagaagtagcacacatattgatgactaccgacaacatgatgctactggtatgacaccatttcttgataggaacaactcaaatctagattcatttgatgccaacacaactagtgaagatgaaggtgaaagttctttggaacacttgaagaagcaggctaagtttaacaagaaaaaaatgggtatgctttataaggagctcgaggcagaacgaagtgcttcagcggtggcagtaagtgaagcaatggctatgatcaacaggttgcaagaggaaaaggcttcaatgcacatggaagcactgcagtatcttcggatgatggaagagcaggctgatcatgaccaggaagcaattgaaaagctaaatgacttgctaacagaaagggagaaagaattacttgacctagaagctgaacttgagggttaccggagcaagcttcatgatcaaccatttgatgttggaaaatttggtgctactgatggagctatggcattcagagtcttggaaggctcagatttcatgaggcataccatatttgattttgaagatgaaaaggcaaagattttggagtccttgcacagattggaggaaatcctaggcatgcccagcattgacatgggtgatgcaaatgattctctacagaacagtctactgagtgatcagtcaatgcacattagccaggatatagaaaattcagagttggaaagtttatcgttgcctcgagaggacatgattagtgaatcaatttcttcacagtgctatgatgagcaggaatctgttaaatacatgcataagcacatgcacaatcacgaacaagatgataatgaatccgttgataagcaacaaaagaatgtaacttcatgttcccactcagatgatggaaatattcatactatgaaaagtgttaaacatgaaatttctctccttaatgcaagattcaaggcacttgaagcagatcaggattttctcaagcaaatcctaagatctcttaatgttagcagtgatggagtagaatgtatccaggagataacaagccatttgcgagagctgcgaagaatcatggcagaccaaagggacatgacagtttttatgaggtcatgataattgattggtcactatgaagtttttgcatcgttgatgacgctactgctagctactgtgccatgatggcgaatttcatggtagcatgatgctcgaagatgtggcaaatggaaatggcagtgggagagcatcacccaggcgtgattctgcacagcatgggaactccaaaacatacatctcggggatctgacaagatccctaggcaccagtgataatttactaccgagaaatagatatttatatatattgtatgatctagttgttgtggtggttaactgctaggagctagtttgttaatgtaattaaaaatctctaggttttgttgagatca

SEQ ID NO: 156913 - DNA, 2430 bp, Zea Mays
atgaggaggtggtggccggctgccctgctgggctgcgcagtggcggtgtccgttctggtggccgccgtggaatgcgctgtgacttacgacaagaaggcggtgctgattgatgggcagaggcggattctcttctccggatccatacactaccccaggagcacccctgatgtaactgcattctacaaaatctcttctccccccactattccctggagaggtttatggctgcgaatctatggatctgaaatgtgggaagggctgattcagaaagctaaagacggaggcttggatgtcattcagacctatgtcttttggaacggacatgagcctacgcctggaaatgattcggatggtattttttttcgcttcgagcagtactatttcgaggagagcggcttcccagtttggttgaagtatgtaccgggcatcagcttcaggacagacaacgaacctttcaagacggccatgcagggtttcactgagaaaattgtgggaatgatgaagagcgaaaacctctttgcatcccaaggtggcccaattatcctctctcaggcaagtataatcttttccttagatttgattgagaatgagtatgggccagaaggcagggagtttggtgccgcaggtcaggcatatatcaactgggcagcaaagatggcagtcggattgggtactggtgtgccgtgggtgatgtgcaaggaggaggatgcacctgatccagtgatcaatgcatgcaatggtttctactgtgatgcattttctcctaacaaaccttacaagcccacaatgtggactgaagcttggagtggctggttcacggaatttggtgggaccatccgccaacgaccggttgaagatcttgcatttgctgttgctagatttgtacaaaagggtggttcttttatcaattactacatgtatcatggaggaacaaattttgggcgcactgctgggggtcccttcatcacaacaagctatgattatgatgctccaattgatgaatatggacttgttagagaaccaaagcacagtcatcttaaagaactccacagagctgttaagttatgcgagcaggctttggtttctgttgacccagcaattactacccttggtaccatgcaagaggcccgcgtcttccaatctccatctggttgtgcagctttccttgcaaactacaattctaactcctatgcgaaagttgtgttcaacaatgagcaatacagcctaccaccttggtcgattagcatccttcctgattgcaaaaatgttgtttttaacagtgccacagttggtgttcagacatctcagatgcaaatgtggggagatggtgcctcatcaatgacgtgggagaggtatgatgaggaggttgattctctggcagctgctccattgctcaccacaactggtttgcttgagcagcttaatgtcacgagagacagcagtgattatttgtggtacatcaccagtgttgacataagctcatctgaaaactttctacaaggtggcggcaagcctctgtctctcagtgtgcagtctgctggtcatgccttgcatgtctttgtcaatggacaacttcaaggttctgcttatggtaccagggaagatcgaagaatcaaatataatggcaatgctagccttcgagctggtactaacaaaattgcactgctgagtgttgcctgtggattgccgaatgttggagtgcattatgagacgtggaacactggtgttggtggtcctgttgtgcttcatgggctggatgaaggttcacgagaccttacttggcagacttggtcctatcaggttggcctgaaaggcgaacagatgaatctgaactccatagaaggctcaagctcagttgaatggatgcaagggtcattgatagctcaaaaccagcagccattggcctggtatagggcttactttgagactcccagcggggacgagccattggctttggatatgggtagcatgggcaagggccaaatctggataaatggacaaagcattggacgctactggacagcatatgcagatggggactgcaaagaatgcagttacacgggaaccttccgggcacccaaatgtcaatcaggctgtggtcagcccacgcaacgatggtatcatgtgccaaagtcctggctgcagcccaccagaaacctgctggtagtcttcgaggaacttggtggggattcatcgaagatcgccctagtgaagaggtcagtctcaagtgtctgtgctgatgtatctgaggatcacccaaacatcaagaactggcagatcgaaagctacggcgagcgcgagtaccacagggcccaaagtgcacttaagatgtgcacgtgggcagtccatttccgcaatcaaattcgcaagctttgggacacctacgggaacctgtggagatttccagcaaggagattgccactcagctaa

SEQ ID NO: 156914 - DNA, 1018 bp, Zea Mays
caagaaagatcgctagagacgggggcattcaattttttgccactttaatgtagcagccgtttaatttgtgtcatttacaccatattcactgattcaaatagtgggaaatagttaacttttaactagagatgttgtgaaactaggaaaacccggcgcccactgcaggacaggactcgcgctgccacgctctggttagagataagatgacctgttctcgcagcaagtgatttggctcttgccatggaggtgccgctctccccaccgcgtgcccacgccagcctcctctgctgcagctccactcccgtcgtcctcggcctccgatcccgctccgccaccgctccgagccgccgcgcgcggccactccttgcccgcaggaaccgggacagccggagcgacgaggagaccgcggcggagcccaagatcatcacggtcgggcggccggggaagagcgggcggcggcgcaacaggaagcagcagcagcagcagcagcagacggcggcgaaggaagaagaagaagaagaagaggaggaagatgaggacgaggaggaggagcgtgacgcgacgatcccggaggtggtgacgaaccggatgatgcggcgggtgggcgcgtcggtggggcttccgctggcgctgggcgtggggttgttcccggtgttctactacctgaaggcggtggcgaaggtggacgtgccgacgtggatccccttcggcgtgtcgttcgtcttcttcggcgcggcgctggccggggtgagctacggcatcgtgtccgcgagctgggaccccgcccgggagggctccctgctcggctggaacgaggcgcgccgcaactggcccgtcttctgggactcgctccggggacgctcccagtccccacctcgccggggctaggagtagagtagggcagggacagacaggaccgccccagtgtgatgactgacatgacactcttgtgcgtttgtctcggaaaaacttgggctcttgcattggtgctgctgtgtaaatccacgtcgatcgctcg

SEQ ID NO: 156915 - DNA, 966 bp, Zea Mays
gtgttgtacgtaaacatcatgtctttacatagtcttttatcaaaacctggtgtttgggcacctgtctgtcaatgtaaggatcatgagatatatattattgctttttacacctgcaggtttgttactatggccagcattaccattgttttgccttcaaggatggacggtgggtcatgtatgatgaccagacagtcaaggttattggtagttggggtgatgtgctcgtgatgtgtgaaaagggccatttgcaaccccaagtgcttttctttgaggctgcaaattaattattcttcagagtcgcaaaacgcgctacagcggttaacatgccctcaaatataggttttttccctgcggccatgaagattagaaatagggtagcagattcgttttgagcggggatatatagtactagcattcaacggtgcttttcgttgtgagtccgtaataagcagtcatctgagcattctagagcaaaaaagggagctgtttatcccccccttttttgctttaacctttggtgtaggcgctgaacttctgatctcatctgccaataaatcttcactgccgatcaagcgggtggagcattcgacttgaactgccatccaacagttgtagccgaatctgcatgaactcttcgttatacaccaatcatctatagaattttctgcttacattgggccgggcgggcgttctctctctctctgttttttttttggggtgggggtctggtataggagtgacagttttgaggccaccagatatagaatggaatgatatgggaatgggtgatgcggtgtgaactgtattttgctgtggatgatcttttgaaaagagtaaagctatctggaatatggatatggtaagaaatctgtagtacacgagtctatatatacaatgactcaatgggattatgcgagatgattataacgatgaataccaaaatctttatcacaactgttggttaca

SEQ ID NO: 156916 - DNA, 3736 bp, Zea Mays
tcccaaatctcattcccatgggccgtaaaaagcgaacatctacaccaaaccctacttcgccaccgtcgtacgccccccgccggccggcgggggctaaggtggctggcaacggcggggaagatgatggcgtgcgcgccgaggtcgaaaaggcactcgcctgcctgcagcgggggaaccacgcgcgggcggtgcgcctcatgagggacgccatcgcccaccacggggaggcctccacgccgcttctcctgcgggcgcatggtactgtcctcgcccgcgccgcctccgtccttgacgacccggccgcccgcgcgcgccgccaccgggcagcgctccaggcggcccagcgcgccgtcgagctcgcgccggactccatcgagctctcccactttcatgccatgctgctcttcgacgccgccaccgacacccgcgcctacgaggaggtcgtcgccgagtgcgagcgcggcctcagcatcgaggccccttccgaccccgcgccccactccctcaggctgcccggccccgacgtcgaccaggtccagtccgagctccgcaacctgatccagaaggccaatctcgcctcagtatctacctggtttaaaaccctgcgtagcgcgggcgacgataagtttcgcctcatccccgtgcaccgttttgccgacgaaccaatggaggcccggctcgtcccctcggcgccctctccgcgccgctcaaacgagatcaagaaggcgaccaagacctccgaggagcgccgccaggagatcgaggtacgcctggctgccatgaggctgctgcagcagcagaaggagcagagcaatggtgttgtgtctgccacccctgcctcttcccagtcacagggagatgaggccccctcatcgtctctgtcattggtgggtggacatcgagctgacaggagaaaaggcgggtctaggaaagcaacaggcttatctgcatctgaacgcactgaccaggcgcgtgcctactggggttcgataccagtggatcaaaggcttgcgttcttaaacactagcatttctgagctcaagtcacactatgcttctgcaatccataaggagaaagatgttgccagtgcagcatctgatgtgctgaatgaggtgatacgatttgccaacaagcatggcaactgggagttcatggtatgtggtaggtgtcggggacagtttacagatgttgaggcacaccggtggcatgtcatgggggaacatgttgggctactctcatctgagctgcaggaaatggtgccgcaggagattgatgctgactgggtagaaatgctcattggttggaactggagtccattggatgctactgcagcactgaaactgtttgaggaagatcaaactgacaatcttggaacagataggggcaaagaatcggatccgacggataattggagtaacaaagacaaccctgacatgtcagaatcctctgcctcgccacacaacggggagtgtaatggctttggagtggtggtgagggaaggtgacggtacgtggccactatcagatgatgacgaaagggcaaaaattttagaaaggatccattcattgttcaaaattcttgtgaagaaccataatctttcagtgtgcaatctaaacagggtgattcgatttgctgtagaggaactcagggggttgtcatctgggtcactactgcttaatcactcattggacaagtcgccgctttgcatttgcttcttggaggcatcgtcactgtggaaagtagctaaattcttgcaggatttagtgcaggcctctggaattaatagaaacctggagaatgatggactaggtgacagggatagttccccccaaaaccacaatgtactggagaaggttattcttagttctgattcttctgaactgatcattgatgggcaaacttttggtggaaagtttgactctgagagtgttgatactgacacactgttttcatggttgtacgctggatcctcaattggtgagcagctattggcttggaaccgtatgattgacgaaaggtcaaatcagtgcatggaccttattcgggcacttgggagggagttcaacaacttgcaaaactcatgtgaacggaagcttgaacagctgagaaatgaggaggcttttatttctgtagaggacctcttatgcgaagagcaaacacgaagggagcaggtggagcagtatgggttccaaagttttgaggagatcctcaggaagcggcaggcggagttgttggaacgcaatactgaggtgcagtccgacagtaacagatccgagatagatgcaatctcagctgttttgaagaaactccacacttcacacttcggttatgatgatgccttttctggaatggccccacgcctttttgacttggacggggtcgaagatgaatggaggctgcatgattttatacatccaaatgattcaatggtacacactgttatatcaaagatgaaggaaaaagttactgtggagattagcaagatagatgctcagattatgcgaaatttatctgtgatgcggcatctagagcacaagcttggacctgcttctgctcttgattatcgaatgattcttttaccccttatgagatcgttcttacaaagccatttgggagagctggtggataaggatgccaaagagagatctgatgctgcaagggaagccttcctggctgaactctccttggatgctaagaagaatgcaagcaaaggggctgatatgaaacaatcccatgaaaaatcaaaggataaaaagaagttcaaggattctcgaaaatcaaaggagctcaaggattcaagctggagcaaccagtctctcattcaccaagacagtaccgatgagggaacatcagagacatctcaaatgcttgctgattgtgatgatctgtgttgcaaatgctcgacaagtgaggattacttcaatgaacaagaggaagaacttaggcatagggtacaacttgaagcagaggaaagaaaattggaagaggctctagaatatcaacggtggatagaggaggaagcaaagcagaaacatcttgcagaacaatgtagaagtacacatgcatcttctgttattggcataaagtttggtgactttagctacaccgagaacgagaacaatttcagccagaaactcaatggaatcgagttcgactcatctgatgcacatgcattaaccagcagtgatatgagtgtttctatgttgacgttgaaaatgaatggggtttgcaataatgcacaacctataaagcctcttggtaattttggcacccaaaatcccaagagaagttctagtgaaccacaaaggtattctcaaggtcactctgcaggaatagagaagccaaattttgagaaaggtagctatttttgtggtccacaaatctacgtataaaataatttgcaatatcagttgaagaagcttcaaacatactgctaaggtttacacactaaattcgcatactgtgggcatgtacaataatagtagttgctgttttttcccagctgcatggcatcaaattgtacaagcaccctcaatgttttggtatgaaaacatacaagcatcacaatgtcctttctatatctaacctaagtagctacttgcctatatggttaaatatgagtttttttggtttcctactatacgaatctgttcatgagtaatatgattcacttagcagattgttaaaaataagtttaacacagctaaaagcttatcatgcattgaaatatatcaaa

SEQ ID NO: 156917 - DNA, 1315 bp, Zea Mays
cgacctgaccgtacgtattccgcggcgaatcatcgacccgggagagcttcgtctatcattagctacagcgtctacctggaggaggagctagtaggaagctaagaggcatggatcagctggtcgccatggcgatggctcagccgtcgagcccgacctcgctgcacgtcgcgcacaagatcccggccggcgacgggccttacgcaagggccaaacacttccagctggtggagaaggacctggacgcgtcgatcgcgtggttctggaaggcgatcggcacgggcgacaaggtggacagcgcgctcaaggacatggcggtggtgatgaagcagcgcgggtacctggcggaggccatcggcgccgtccggtcgctgcggcacctgtgcccgaagcagtcgcaggagtcgctggacaacatcctcctcgacctctacaaggccagcgggcggaccaaggaggagatcgagctgctcaagcagaagctccgcaagatctaccttggcgaggcgttccatggcaagaccaccaagcgcgcccgctcgcacggccgcaagatccacgtctccatcaagcaagagacctcgcgcgtcctgggcaacctcgcgtgggcgtacatgcagcagcgcaacttcatggcggcggaggtggtgtaccggaaggcgcagatgatcgacccggacgccaacaaggcgtgcaacctcgcgctctgcctcatcgagcaggcccggctcgccgacgcccagctcgtcctcaccgacgtgctcgctgggaggtaccaggcgcgcgaccagcaggacggcaagatcgtccggaaagtggaggaactgctggcccggatcatggcgcagacgtggcagggcggcggcggcggtcgacgacgccgggacgagagcgacgacgacgactgggttgagaaccagatgctggctctgctggacgtggcggtgccgtaccggaagaccagcaggaggctgcccgtcttcgaggagatctcgcctatctacaaggagcaggtggcttgctagaagctacactacatatatagatcagtagcagcagcatcttttgatcgagtcgagtgtgtgccgaatttttgtctagctcacagcttttggatcaactccgtagcaacagcagtagcatcagctcatgctcaagcatacatgtgtgcagtgcatatttatgtcatatatagtcgtgtatgtgcttgatgtgtacatatctttgttcattccatttctccgctagtcatcagtcagaaagtgttacggaagcagattgagatggattacaggagaaatttgttcgttttgccgtc

SEQ ID NO: 156918 - DNA, 1414 bp, Zea Mays
atccgaattcggagcagcagccgccgcggatgccgttaaaccctaactcccaacctcttctttgtcacactatttctagggttttacatgcaccaacaggagccccttccgtcacttcgcctccaacaacagcagcgccgccgccgccgccgccgccacttaatcgccgggatcgtcgccggaggaaagcgccatggatcggtaccagcgggtggagaagccgccgcccgagcccgccgccatcggcgagaatgaggtccgcatcaccactcagggcctcgtccgcaactacgtcacctacgccacctccctcgtccaggaaaaacaggtgaaggaaattgtgttgaaggctatgggacaggctataagcaaggcagtggctattgctgagatcataaagaagaggattcctggtttgcatcaagatacaataatcagttctgtcagtattactgatgtatgggagcccattgaggaaggacttgtaccattggagatgactcgtcatgtttcaatgatatcgatttccttgtcacctaaggagcataacaagaattcacctgggtatcaagctcctctacattcggatcttaagccacaaagatatcagcaacctcagcaatatcaacagtaccagccaagacaacatcaagttcaaacggattcatatggacgcggccgaggcagaagcaggggccgaggaaggggctggggtactaggggtgggtacggcggaggctatggtggatatgaatatgataacaaccaagtaggttatggtgggtatgaacaccacggtggatatggacatcaaggtggatatggaaaccagggaggatatggccacaaccaaggtggctatggccacgaccaaggtggctatggcggttatggttacaaccaaggtggatatggaggatatgaaaatggaggctggaactacaaccggaacagaggcggtggcggccgaggacgaggcaattggggctatggtggtcctggatatgaccgtggtggcagaggcgcaggtggccctggcggcaggggctatgttcgaggccgtggacgaatgggtggcggccgtggacggggcaaccaaaactactattagagcaagggcattttccacggccgtattgctgtatgtttcctctagtcctcccagattttagtataatcgccaatggtgcctgtaccattgcatcaattccgtgggattttgacattagtccttcagttttccctgggacatctttcctgtatttaagagtgcatttttgatagttcatcagcatccagttacgcgtttctccgcactgtgtattttggtgatagtttaagagcccagctgtttgtaccttggctccagaagaactggaacctgttgactgttgtgctgtagtgattctacggc

SEQ ID NO: 156919 - DNA, 1930 bp, Zea Mays
tgccactgcccgagcggcctatataaaccaccgatccgccacggccgtgccagcacaccagcccactcgcgccaccacctcacctcgcctccgcgcgcggtcgatcactccaccaccacacacatcctccgtcttgcacgaccagctgcacggtgtagccatggaccagctccccaagcgcccggccaactacgtgccgctgagccccgtggggtttctggcgcgcgccaatgccgtctacgccgaccgcgcgtccgtcgtctacggcggcgtccgcttcacctggcgccagacgtacgagcgctgccgccgcctcgcgtccgcgctgctgtccctcggcgtccgcaggggggacgtcgtctccgtgctcgcgcccaacgtgccggccatgtacgagatgcacttcgccgtgcccatggccggcgccgtgctcaacgccatcaacacgcgcctcgacgccgccgccgtcgccaccatcctgcgccactccggggccaagctcttcttcgtcgactacgactacgtgcgcctcgccggcgacgcgctccgcctgctcgccgccgccgccggcggcaccgtcccgctcgtcgccgtcgtcgacgacatcgactcgcccacgggggcccggctcggggagctcgagtacgaggccctggtcgcgcacggcgaccccgacgccgacctcccgccgctcgccgacgagtgggacgccgtcacgctcaactacacgtccggcaccacgtccgcgcccaagggcgtcgtctacagccaccgcggggcgtacctgagcaccaccagcctgctgctgcagtggggggtggccaccgaccccgtctacctctggacgctccccatgttccactgcaacggctggaccttcacctggggcatggcggcgcgcggcggcgtcaacgtctgcatccgcgacgcgcgccgcgccgacatctaccgcgccatcgcgcgccaccgcgtcacccacatgtgctgcgcgcccgtcgtcttcagcatcctcctcgacggcgacggcgacggcgacggcaggcagctcgaggcccccgtccacgtcctcaccggcggcgcgccgccgccggccgcgctgctggagcgcgtcgagcggatcggattcaaggtcacgcacgcctacggcctcacggaggcgacggggcccgcgctggcgtgcgagtggcgcgaccagtgggaccgcctcccgctcccggagcgcgctcgcctcaaggcgcgacaggggatcagcgtcctgtccctcgccgacgccgacgtcaagaacgtcgacaccatggccagcgtgccgcgcgacggcaagagcctcggcgagatcgtactccggggcagcagcgtcatgaagggctacctcaacaacccggaggcgaacgacggcgccttcaggggcggctggttcctcaccggcgacgtcggcgtcgtgcacccggacgggtacatcgagatcaaggaccggtccaaggacgtgatcatcagcggcggggagaacatctgcagcaaggaggtggaggaggtgctgttccggcacccggccgtggccgacgcggcggtggtcgcgatgccgcacccgcgctggggcgagacgccgtgcgccttcgtcgtgcccagggacggcaaggcccacgggctcagcgaggacgacgtgctcgcgttctgcgccaggcgcatggcgcgcttcatggtccccaagaaggtggaggtcatcggtgcactgccgaggaacgcgctgggaaaggttgagaaggtcaagctccgggaggcggcacgtaagctggcgccaaccgtgccggcgcagataaagccaaaagggaagacgacgacctcaactgtggtcggcggtggtcgctgcgaggagcagccggtgtcgaggttataggtagcaaaacactacagaccataacttgtgttcaac

SEQ ID NO: 156920 - DNA, 3164 bp, Zea Mays
atggcgaccaattgcaggaccacacaacaaccagcggcgtgcacacggagcgttctgccatcacgttctgccatcgcgccccgccccgcaatccccgccgccgagcacagccgcccgcagtcctgcaattccgccgcccgcattcaccgcgccacattcaccgtgccatcgcgcccgcattcccctccctgcgcccgcagttcccgccccgccccgcagtccacgccgccgagcacagccgcccatcgcgcccgcagtcccctccccgcgcccgcagcccatcgcgccttcagtccgccctcccctcgccgcctccccagaccgcagtctctcctcaacctccctccccaaggagctggcggcagcgcggctgcgtcgggaggaggaggacgccgcgcgggggctgcggcaggagctcgactccgagcgggcctccccggagatggcagccagatccggccattgagccccctaaccgagcggatccaaggtactacacggtcttgccctcgcccttttgcttgctttgtcgtcctctcctcaccgtggggggacccggcgtacgagcaggaggtgttcctcgccacgcggcgcggcaggcgcatgctcgacctgtcccggttccgcgaccgcgaccgcgcgcggtgccacgactggtgcttcgccgcgttcgtgcacgcctacgccacgtacctcgacgaccggctcaaagaacggatgcaggcccgcagagcaggcggggccagcccgggcaaatggcacgtcgacggcgaccctgtcgggatggcgtgccaggtggccgaggcctgggagctcgtgccgcagggaaggtcggcgtcggcgacggagacgacggcggcagaggatgtcatcgggaaggcgcagcagctgaagcacctcctaggccggttcatccagtgccggccgacggggaaggcgatgacgaacccggtggtgacagcggcgctgtacagactggtgaaggagagcgcggcgatgtactgcgagctcacggagatgtcgggacctaataaatctccatttagtggagtggctgatgatttgaaaggaagagcaggttgctacaaacaagactggaaccatggatttcgttctggtttaaggatactggcacctacgctctacatattctttgcatctacagtccctgttatagcctttggggagcaattgagcaaagatacagatagtgcactaaccacagttgagacattagcatcagcggctatttgtggcatcgtacattcaataataggtggacaaccactattgatcgtgggtgttgcagaaccgacaattatcatgtacacttatatctacaattttgccaaaaatcagccaaacctgggagaaaaaatgtttctgccatgggctgcctgggtttgcatctggacagctgttatgctgttcctcatggcaattttcaacgttgcagctattctaaacaaatttaccagtttttttatgcaagaggcgataaaggggatggttggtgaattcagtgcccctgacggtagtaatcaaagtcaatcaacattccagttccagtggctatatattaatggtttgcttggatttatcttttcaatgggtgtactatatactgcattagctagcaggagcataatacctgcagcatggcaaaggagcttaattgcggactacggtgttccactgatggtgatactttggacatcattgtcatattcattgccaagcaggatcccttcaggggtccctaggaggctcttcaccccacttccttgggaacccaagtcgctccagcattggacagtagcaaaagatctgttttcagtccctacagtacatatattcctggctattgtgcctgccaccatggtcgcagggctctctttctttgaccacagtgtagcttcccagatgagtcagcagaaactctttattaatgtgtttcttgttctcataccatggaaatgtggtgtagaccttgatctgtggtgtggtcttcttggcattcctccatctaatggagtactcccccagtctccgatgcatacaagaagcctagcggtcctcaagaggcagttgctttgcaagaagatggtccaaactgccaaggagggcatgatgaataatgctaccagttccgaagtttatgtcaaaatgcaagatgttttcataaaaatggaccacggaggcgacactgtttctgctcacaaagaactgaaggacctgaaggatgcaattattccagaagggaatggatcaagaacagtgcctgaagtatttgatcctgaaaagcatgtagatgcttacttgcctgtccgggtgaatgagcagagagtaagcaatctgttgcagtccctgttgattactggttgtattggagttacaccgctcattcagaagataccaacatcagtcctctggggttacttcgcctatatgtccatcgacagccttcctggaaaccagttctgggagaggatacagcttcttttcatcacgcctcaaagacgctacaaggttcttgaaggagcacatgcatccttcatggagtcagtgcctttcaacacaatatgcaccttcacactcttccagctaatctatctgttgatcgtctttgggatgacatggataccagtagcaggaatcctcttcccactgctcttcttcttcctcattatcatcagccacctgagggaattagatgcagccgagtacgaagaactgaaaggttttacacctgatccatcagtgtgtgaggacgagtctgttcgcagcggagatgctcagcctggatatgcttccgaaatactcgaggaattcacgactcaccgtggagagctgaagcgcaggaactctaccttccatgatgggagactacttcagcttaactctgtcaagatgacgagagagctttctcgggttccttcttggcttacaagaatcctggaagaatacgcggtttctgaatccgagctccaattaagcatgggggtgcgaagtctcatagcctcattgcttacagagtattctctgaagcaagcaactcattttaggtactgactttgggggcaaatacacggggatgagcagaggaatgtagcagagctagaaaatgtttgtaaaaaataaagacaaaaagaaatgcatgttaa

SEQ ID NO: 156921 - DNA, 1848 bp, Zea Mays
atggcccagcatcccgggctgcagctcccgtgtttgtgtcgcctggcttgctcgggagccaggctgtgggcgtgcaaatttagcctctcagcctggctccacagaaacgagctcaaggaagcttacttagcaaaaactctatctacgttaaataagatctgatctacaacgcatgcatgcatgcacctatacagtgtacatgttgactactacattatgcaagcagtacactattgtacatatgttgccaggcacacaaaccgaatgaaacaagagcgaaaatcgaatgcatgcatgccaaaaggcaggtggtcgtctcgtctgtagaatcgcagtcgtttgtcattattcgaccacgacgcgaatggctggccctggccgccggatcggatcctgacgtgaccgatcgatgagcatataggctggcacagagagagcacgagcagaataggagagggaatgagtggaaaataaaaaaggcagtgaccttttcagttggcgttggaacagcgtcgcctcctcctcctcctttgcaggcttatttggcgagtggcggcagcagatgcagcagggggcatcgccacacccatggtcccgctgctgctgtatattggtatgcatgcctcctccacctacgtatacgtgctcctgatcctccgtccctgaccacaacaaagatcgtcggcaaaggaggggaagaataatggccgggggttagcttgctgccgctgggttttgtgttttctggctctggactgatcgatgagagtacagcagtcagcagctgcgtgtgcatgcatgcatggaggataaagcatatcactttacttctgagtagtatcgtttagctagacgacgctgcatgatgcatgatgttgccaaaaccaaaaacacaaacacgcgcgcaaaagaagatggctatcggcaatcgtgccatccatgcatgcatggacagctggagagatcagttttttttctctctctcccatgaccatgagttcaattcccttcaagacaaagagacagcagcagcatttgtttgatgactagtgaatgatcaagtaacactgtactttttttggtctaaatcattcttagtctggttaattagactgtcatttcactcactccatggatttatgcttttttttaaaaaaaatatagacttgatttgtttggcgagaatctcgttagccatttttagtgtctctggaggaccctagaagctacaggcgggaaaaaggatatatatacgtgctttcttttcagttttcctaacgtttctgggagcaaagagaagagatagctgtgcctgaactacttgatcatttagggtatgtaccttgcattccaagatcatttctcatgttcctgtacatctgcttcgacacattcagaaggaaaaaaaaaactatccagtcagtgcgcactctcataaaaaaaggaaactatgatatatactccatatatactagttaactgtagtagatagcagaaggagatgaagaccataatccgagaccaagttctagagaggacctgcagatggcttttgacatgagatatggtgagtcctcccacccccatcagctgcagcactcgcttcggcgtagcccctgcaacgaccacagcatgcaggttcagaggagagaaacgcatccagtccgggcgcagaccagagaaagatcgacgagagcaatgaaaccagatggatatcaagctaggagagaggggccgggcccgggtcattgcgtggaagcagcacacatactgtccgggcctccgagcttgtggatggcgtggacgaagcagtggtgcagatcgggcgtccacctgaggcgaggcacc

SEQ ID NO: 156922 - DNA, 162 bp, Zea Mays
atggcccagcatcccgggctgcagctcccgtgtttgtgtcgcctggcttgctcgggagccaggctgtgggcgtgcaaatttagcctctcagcctggctccacagaaacgagctcaaggaagcttacttagcaaaaactctatctacgttaaataagatctga

SEQ ID NO: 156923 - DNA, 1291 bp, Zea Mays
ccccatttccattcctcgctcaccaagccaacaaccaaatcgaattcgccgacgactctctttattcctcccgctcgccgccgcggccgccgcctgagggcaagaagcgagcgagcgcaccgcggatctccctcccggccccgccgcgcgcaccggtgaagacgacgagcccctcgtgaatggtgggagcccgcgcgacgtccgtcgcctcgcagccgcagccggaggaggcctccttccgcggcttcggttactgcatgcagggctggtaccaccgctgcatcggtctcgacccctgaaccccgccgccacttgcttctttgatttgatttcattcggttcgttcggtgcccctcccgtcctggatctgttgcgcgagagcgcggcagcgcgcgagattcgcccccttctcttctcataggaagcaggaagcaagccgatcgctcgctgagcgccgccgccgatggccgtcgcggtgccgatgaagctctggagggtggagacccgcggcaaggccgccgccgcggggcccgacgaccccctgcgcgtcctggtgacggtgaccgtcctcgggagcgccggcccgttgcgcttcatcgtcctcgagggcgacacggtcgccgcgctcatccgcggcgcgcttcgctgctacgcccgcgagggccgcatgccgctgctcggcaccgaccctgccggcttcgtcctctccaccgccaacggcggatccggcgcactcggagaagacgagaggatcagcttcaacgggtgccggaacttcctgctttggcagaaggctgcggctcagggtgccgccgccaaccacgccgggtccgatgctctgacggcaaccctgagccccggcaggaagggcagcggtggattcaaggctactgatccgagccctggcaggaaaggcggcggcggctggaaggctggactgaacaagttcctcctcagcttcagcatcaaggtgtgatccatacgtggacgagagaaggggggcgtttcttggtgtcgaggcaccgcgcaacaataaaaatgcattgcattggtttgtctgttttttcaattaatcaggattgtttgttgccgccagtgagatggcgaagtgtaattcgtcatgcgaatccgagtcgagtcgaggcaatgtgattcatcgtatgtttgagtcgagtcgtgtcagttgcttagtttatttggctgttctatttccaaatcatcggatcgggttcctctgatctcttgttaaaggttcttcattcaataatccatttgtgcgtgctggtctcat

SEQ ID NO: 156924 - DNA, 1056 bp, Zea Mays
ttttttttgatcgtcttcatcccgcatccggcacaaaccaactgcatcaagctccaccagagaagacaggcccgccgacggccgcagccgcgggcggactcgtgagtcgcgactacgccgctgcagttcccaactcagggtgcctgcccgtaacctacccaagagcggccccgccatgcgcgcggaggtcacccagatcagcgccctaaccgccgtggccgcgcacgtgctctgctctgcgggccttgctgccgcccacgccctcgctggccgcggcgcgctcgtctccgaccccgcgctcgcccttcgccttctcgtggtctgtgaagcgcccatagtcatcgcagtgttcagctacctccggcgtgatgctaaaagttgctcgtttttcagggctgttgcaagaggattgatcggcttgcccgtgggagcgttccttaatgcatttggagcaatcattcttggggcacctgttggagtcaagtactggatagctactatttactggtcgcttgtcatgtccctgtttacgtttgttcccgcagcatgtgtctttggagcatccaggatcgattggcaggatgtgctttctcactccatttatttcacgccaactgatgttgagaactacatgatctctgcaccttgccatggagctgtgctaggagcgtggctcggtgcttggcctatgccacttgactgggagagaccatggcaggaatggccaatctgtgtcacttatggtgcagttgctgggtatttgttcggaatggcagtgtcattggtcctaacagcactttacaaaagaagggttcgtgcaaaagctgactagccgttcttcccacaaagcaatgtatttgctgataacatttcttgttcctgcgagtactcatcactttcagtagccttttcacccaggttcacattgttgtattcttttgaagcccccctcattttttttgcagttgtacattgttttcttgaatgtaatgtgaaggactcagtttattactgtaaaacacacgtttgttgagagagtgcgtgttacacaaagtt

SEQ ID NO: 156925 - DNA, 2125 bp, Zea Mays
gtacattaaaatatggtttgtattcggtatgttccagagataaaagatgcgacggttgacaccgagctcagtggagtagtggtcacggcggacggattgggcctctatcgctggtgaccggctgaccgcgctgctccgctccggatgaggtgccccagggtcctctgctcatgtccacgtccatgtccgctccggctccgacccccgtcccgctgacctccttcgccctgctgcggcaacaccactcgcagctcatccgtctcggcgtcgcctcccacgccgcccacgcgcgccgccttctctccttccttgcccgggaccccgactcccacttcccgtacgcgagccgcctcctggcgcaccacccggacccgcacccggcgctcttcaacccgctcttctccgcgctcccgacgcgccacgccgcgcggctcctggccctcatgctatccctgcccctgcgcccggaccacttcaccttcccgcaaatcctcccgagcgcccagccgctccacctggtcgcccagctccacgcgctgctcctcaagctcggcttccacgcccacacgcagtcgctcaacgcgctgctcgccgcctacctcgccaacgcgagacccgacctcgcctcccgcgtcttccgcggcggcggcggagctctcgacgtcgtgtcgtggaccacgatggtcggcgggctcctcaagctggggctgttcgacgacgcgcgggtgctgttcgacgggatgcctgagcgaaacctggtgtcgtggaacgcgatgatgtccgggtacgtcaaggcctgcaggttcctggacgcgctggaggtgttcgacgagatgcgggcgcgcggggtggacggcaacgtcttcgtcgcggctaccgcggtggtggcgtgcacgggcgccggcgcgctggcgcgcgggagggaggtgcaccggtgggtggagcagagcgggatccagatggacgagaagctggccaccgcggtggtggacatgtactgcaagtgcggctgcgtcgaggaggcgtggcgtgtgttcgaggccctcccgctcgctgccaaggggctcacgacgtggaactgcatgatcggcgggttcgcggtgcacgggcggggcgaggacgctctgaagctgttcggacggatggagagggagggcgtggcgccggacgacgtcacgctggtgaacgtgctcactgcctgcgcgcacgcggggatgctcagcgagggccgccactacttcaactacgttcctcagagatacggcattgagcccaagatggagcactacggctgcatggtcgacttgtatggaagagcagggcggctggaggaagccaagaaggttatccaggacatgccgatggagccagacgtcggcgtcctcggtgcgctcttcggcgcgtccaagatacacggcgacgtcgacctgggcgaggcgatcgggtggcgcgtcattgagctggatccccagaacagcgggcgctatgtgctgctggcgaacctcctcgccacggccggccggtgggaggacgtggccagggtccggcggctgatggacgagcggaacgtgagcaaggaagcagggcggtctgtgatcgaggtccaaggtgaggtctgcgagttccagtgcggcggcctgtgccacccccgggcggaggaggtgtacgccatggccagggacatgatgagggagatcagggcagagggctacgtgcccgatacccgggacgtgctgcacgccattgcagaggaggagaaggagacgccactgctttaccatagtgagaagctggccatcgccttcgggctcctgcacaccagacccggcgacacgatgcggatcaccaagaatttgagagtctgtagagattgccatgaagcgaccaagttcgtgtctcgcgtctttgagcgccagattgtggtcagggacaggaaccggttccaccattttaaggacgggcagtgctcgtgtaaagattattggtaaaagtccattataatgttattatactcaaagactgagctaggaatgttcggaaatgctgatttagttccgaaaatacttggaactggacctttggagcctggacacatcaaaataccaaatatctcttatttgtttag

SEQ ID NO: 156926 - DNA, 87 bp, Zea Mays
cgccacggtcgaggaagaggcggaggcggtggcggatcccccgaggcggcgcgtgctcgagcgtgtggggcaggggtgtgctcgagc

SEQ ID NO: 156927 - DNA, 2883 bp, Zea Mays
cgcactccacccaccgccacctactcgctacactctccatggctgccagataacggctggtgcttaaactactccggccgagctggccgtgctaatgccgctgcggctgcgtgcggtggcacagcgcggcctgcccctgtcgcgatgacacgccgcccggcctcctccgcgccttcggcggcccggctcctcctcctcctcctgcttcttctgctgctgcactgccagtgccaccgcgccggcgcggcgacggacgcggagcggcgggcgctgctggacttcaaggcggcggtgacggcggacccggggggcgtgctggcgtcgtggacgcccacgggggacccctgcggcttcgtcggggtcacctgcgacgcgtccacgggcgccgtgaagcggctgcgcgtccacggcgccgggctggccggcgcgctctcgccctccctcgcgcgcctccccgcgctcgagtccgtctcgctcttcggcaacgccctcacgggcggcgtcccgccgagcctccgcttgctggcgcccacgctccgcaagctcaacctcagccggaacgcgctggccggcgagatcccgccgttcctcggcgccttcccgtggctccgcctgctcgacctctcccacaaccgcttcgccggcgggatccccgccgcgctcttcgacccctgcccccgcctccgctacgtctcgctcgcgcacaaccacctcaccggccccgtcccgcccgccatcgccaactgctcgcgcctcgccggcttcgacttctcctacaaccgcctctccggcgagttcccggaccgggcctgcgcgccgccggagatgagctacatctccgtccgcggcaacgcgctctccggggacatagccgccaagctcgcctcctgcggcagcattgacctcttcgacgtcgggagcaacagcttcaccggagctgcgccctttgcgctccttgcatcggtaaacatcacctacttcaatgtctcctccaacgcctttgacggtgaaatccccagcattgcgacttgcggcaccagattctcgtacctggacgcgtccggcaaccgcctcacggggccggtgccggagagcgtggtgaactgccgtggcctcagggttctggatttgggggcgaatgctcttgctggagctgtaccgcctgtgattgggacactgcggtcgctctccgttctccggctcgcgggcaaccctcgcatttccggttccattccggctgagcttggagggattgagatgctcgtcacgctcgacctcgcgggccttgctctcacaggagagattccagggtcactcagccagtgccagttcctgcttgaactgaatctgtccggcaacaagctgcaaggagtcatcccaggcacactcaacaacataacctacctcaagatgcttgatctccacgggaaccagctccaagggggcattcccgtcacgcttgggcagctcacaaaccttgttctcctagacctctcggagaaccagctgactgggccaatccctcaagagcttgggaacctctctaacctgacacacttcaacgtgtccttcaacaacctatctggcatgatcccttccgagccagcattgcagaaatttgatttcaccgcatacatggataacccgttactatgtggctctccactgcccaataactgtgggcctgggactgggatgaagcaccggaaacgattgcgtgtgcctgtcataatcgccattgttgctgcagccctgatacttgttggaatatgcattgtttgcgcgttaaacatcaaggcttacacacgtaagggcacagacggggacgggaaggaagaggaagaggttcttgtgtccgagagcacccctccagctgcctctccaggctcgaatgcaatcatcgggaaactggtgcttttcagcaagagcttgccttcaaggtatgaagactgggaaactgggaccaaggcgctacttgataaagactgtctcatcggtggtgggtcgattggtacggtgtacaaggccacttttgagaacggcctgtccattgctgtgaagaaactggagacagcagggagggtgagaggccaggatgagttcgagcatcagatgagccagcttggtaacctcagccaccccaacctggtcgcttttcagggctactactggtcatcctcgatgcagttgcttctgtcagaattcatggccaacgggagcttgtacgaccacctccacggctaccgtcctcctcctcgcgctctctctgagagcagcagcagcagcagaggtggtggaggtgaactgttctgggaacggaggttcaacattgcgctcggagcagcccgtgcactcgcttaccttcaccatgattgctggccacagatcctgcacctcaacatcaagtcctccaacatcatgttagatgggagatacgaagctagactgtctgactacgggttggggaagctgctgccgatactaggaagcattgagctgagcagaattcacaccgcgatcgggtacattgcgccggagctggcatctccgacactgagatatagcgacaagagtgacgtgtttagctttggggtggttttgcttgagatcgtgacggggaggaaacctgtagacagccctgggataggagctacagctgtggttctccgtgactacgtgagagggatattggaggacggaactgcgtcggactgcttcgatcgaagcctgagggggtttgtcgaagctgagctggttcaagtgctcaaactgggcctggggctcatgaaggagctcttcaccatcgcgtgttctttagctgcacggctccggcctccggggctgctgcacatggacgtgccaaacggtgcagaatgcacgtga

SEQ ID NO: 156928 - DNA, 223 bp, Zea Mays
gcagcgagtggtgtgatggcaactcttcttgtattcctgtctgttggtttagttggtgctactgatggtataggcttccatttaactgggaaggtagtaaactggagtggcatgccctttgccattggtatttatggatttttctactctgggcattcagtattccaaacatctaccagtcaatgtctgaccactctaagttccctatggcactattcatatg

SEQ ID NO: 156929 - DNA, 2624 bp, Zea Mays
agggggctgcttaggggcggcgttgcagttagtctaagcaggagcaggcaggaggccgcgcggcgcgcgggcagggtgctgcggcaacagagccacagcgggcaacgacaagggaacgggaaaagccagccagatgcgacggcaaaacggcacgagggaggaagaagggcactggggacagtgggacatgatggactcgggaggcgccgccgtccataaaatggagggagagaggccgtcgactcaactgacgggcctcaggccgagccaagcagaccacgcgaccccagctagctactccagttaccaggcacagcacaggcgcccacgcgctccagcagtgagggagggaggccctgccacccgtgcgtgccgtgccgtcctggtcccgcccctcccctgcggccaagagagagagagagagcgccgagcccgccccgccagcgccgcgcgattcgccgatggccagccatgaggcgtgctgcggcaccatgttctgggtgtacctcatgtcctgcgtcggcctcgtcatgttcgccggcctcatgtcggggctcaccctcggcctcatgtccctcagcctcgtcgacctcgaggtgctcgccaaggccggcacgcccaaggacaagctcaacgccgccaggatcctcccggtcgtcaagaaccagcacctgctcctctgcacgctcctcatcggcaactcgctcgccatggaggcgctgcccatattcctcgacacgctcgtgccgccctacgtcgccgtcctcatctccgtcacgctcatcctcgccttcggggagatcatgccgcaagccatctgcacgcgctacgggctcagcgtgggggccaaggcggcgcccgtggtccggctgctgctcatcctcttcttccccgtcgcctacccgatcagcaagttattggactggctcctgggaaagggacattttgcactaatgagaagagctgagctaaagacgttagttgatatgcatggcaatgaggctggaaaaggtggagagctgactcatgatgaaaccactatcattacaggagctctggagctgactcaaaagattgcaaaagatgccatgactgctatatctgaaacattctcacttgacataaatgctaagctggacttacacacaatgggcatgataatgactagagggcatagtcgtgttcctatatactctgggatgccaagcaatattatcggccttatattggtaaaaaacttgattacttgccgcgctgaagatgaagtgcccattcgtaatcttactatcagaaaaattccaagggtggctgatgatcttcctctctatgacattctaaatgagttccagaaaggtcacagccacatggctgtggtaattaaacgaacaaaggaagcaggagtatccactgaaaagcaaaagagcacaactgccgattataaaataaaccccaaagatgctcgtgctgatggctcatccccttcttatggtagcactgccgtaagtcgtagaattaacatagagaagcatggagatgggcgcccatacaataagaaatcagaaaggaagcgggaaaacattcttgattttaacaacgatccacttccaagctattcaatggatgaggaggcagtgggaataatcacaatggaagatgtcatggaagaacttctacaggaagaaatctatgatgaaacagatgagtatgttgatgtacataacaagatcaggataaacatgttgactccaggcaaatcgctgtcacctgctatatctcctggtggtgggcccttatctcaggggtttcgaaggactcctatggcatctccgttctcaccataccaccatggtagttctgtcttgcgttccccggcttcgaaccatggtcagtcacctgggactttaccgacaatactgtcccctggaagatcacctactgcacagacacctgggcaaagttcaccaaacggaagtcaggtttcaataaactccaacggtcaacataaaaaggacggtgagagctaacatcccagaagattggttctcggatgaaggtctcgtctcaagacggcatgcgtgatcaaattatgacattgctagcgtaggattaagctgcgagtataagtagcacagctctcttggcccatagttttgatcgcttgcctgtacatatatgcttcagcatccggacctttagtatgtcctaatcctcgctctgtattgtagaggtcacatcttatatagttataatatatctggtgagggggaaaagagctaagcgttggactgaatatattaaagaaaaaatcaagctgattttgcgacttgtgatcgatcactgttttcatggactcggtggagacgataacaactcagatgcatatcaggtcaagccgatggttgctgtcagttcagcagcatcaatagagaatgatcagagtgttgcagtcacccatcttctaggttcgtagcgttgtatacccggccgtatgcttgcgacccaaggcacgcacgcggcgatgctcgcactcccgctgcctctgcctggcttctagattccagccgtgccccctgcccccacgcagacgcagcgcactcgtccgttggttgtttcgtgagccgaag

SEQ ID NO: 156930 - DNA, 2780 bp, Zea Mays
agggggctgcttaggggcggcgttgcagttagtctaagcaggagcaggcaggaggccgcgcggcgcgcgggcagggtgctgcggcaacagagccacagcgggcaacgacaagggaacgggaaaagccagccagatgcgacggcaaaacggcacgagggaggaagaagggcactggggacagtgggacatgatggactcgggaggcgccgccgtccataaaatggagggagagaggccgtcgactcaactgacgggcctcaggccgagccaagcagaccacgcgaccccagctagctactccagttaccaggcacagcacaggcgcccacgcgctccagcagtgagggagggaggccctgccacccgtgcgtgccgtgccgtcctggtcccgcccctcccctgcggccaagagagagagagagagcgccgagcccgccccgccagcgccgcgcgattcgccgatggccagccatgaggcgtgctgcggcaccatgttctgggtgtacctcatgtcctgcgtcggcctcgtcatgttcgccggcctcatgtcggggctcaccctcggcctcatgtccctcagcctcgtcgacctcgaggtgctcgccaaggccggcacgcccaaggacaagctcaacgccgccaggatcctcccggtcgtcaagaaccagcacctgctcctctgcacgctcctcatcggcaactcgctcgccatggaggcgctgcccatattcctcgacacgctcgtgccgccctacgtcgccgtcctcatctccgtcacgctcatcctcgccttcggggagatcatgccgcaagccatctgcacgcgctacgggctcagcgtgggggccaaggcggcgcccgtggtccggctgctgctcatcctcttcttccccgtcgcctacccgatcagcaagttattggactggctcctgggaaagggacattttgcactaatgagaagagctgagctaaagacgttagttgatatgcatggcaatgaggctggaaaaggtggagagctgactcatgatgaaaccactatcattacaggagctctggagctgactcaaaagattgcaaaagatgccatgactgctatatctgaaacattctcacttgacataaatgctaagctggacttacacacaatgggcatgataatgactagagggcatagtcgtgttcctatatactctgggatgccaagcaatattatcggccttatattggtaaaaaacttgattacttgccgcgctgaagatgaagtgcccattcgtaatcttactatcagaaaaattccaagggtggctgatgatcttcctctctatgacattctaaatgagttccagaaaggtcacagccacatggctgtggtaattaaacgaacaaaggaagcaggagtatccactgaaaagcaaaagagcacaactgccgattataaaataaaccccaaagatgctcgtgctgatggtacatgtcttttaatttttttctagtaacttttctacagtgattaagcttcacgctaaaaattgtgtgtttctgtatgcacagtactgttccattttcctttcgctggtcacacatatttccaggaaattatactggtctttctttggctttcaggctcatccccttcttatggtagcactgccgtaagtcgtagaattaacatagagaagcatggagatgggcgcccatacaataagaaatcagaaaggaagcgggaaaacattcttgattttaacaacgatccacttccaagctattcaatggatgaggaggcagtgggaataatcacaatggaagatgtcatggaagaacttctacaggaagaaatctatgatgaaacagatgagtatgttgatgtacataacaagatcaggataaacatgttgactccaggcaaatcgctgtcacctgctatatctcctggtggtgggcccttatctcaggggtttcgaaggactcctatggcatctccgttctcaccataccaccatggtagttctgtcttgcgttccccggcttcgaaccatggtcagtcacctgggactttaccgacaatactgtcccctggaagatcacctactgcacagacacctgggcaaagttcaccaaacggaagtcaggtttcaataaactccaacggtcaacataaaaaggacggtgagagctaacatcccagaagattggttctcggatgaaggtctcgtctcaagacggcatgcgtgatcaaattatgacattgctagcgtaggattaagctgcgagtataagtagcacagctctcttggcccatagttttgatcgcttgcctgtacatatatgcttcagcatccggacctttagtatgtcctaatcctcgctctgtattgtagaggtcacatcttatatagttataatatatctggtgagggggaaaagagctaagcgttggactgaatatattaaagaaaaaatcaagctgattttgcgacttgtgatcgatcactgttttcatggactcggtggagacgataacaactcagatgcatatcaggtcaagccgatggttgctgtcagttcagcagcatcaatagagaatgatcagagtgttgcagtcacccatcttctaggttcgtagcgttgtatacccggccgtatgcttgcgacccaaggcacgcacgcggcgatgctcgcactcccgctgcctctgcctggcttctagattccagccgtgccccctgcccccacgcagacgcagcgcactcgtccgttggttgtttcgtgagccgaag

SEQ ID NO: 156931 - DNA, 2014 bp, Zea Mays
ctccctcgacacgcacgcagttctcttgcttcttcagtcgcatcgcatatgtaagcagcacaagcacagcagcagcagcagcagcagcaggcaagaagaatccaaagcggaagggtctctccccccatctctgttccaccaggtgcggcgggcggcgatgggggcgcggaggcggctgcaggcagacgcgccgccggggcatcgccacaggcagggcgcgccggcgccggactggagcgccgggtacctcaacgggtggctgtcgcagccgacgcccgtcttcggcctccgcctctgggtgctcatcggcatcgccgtcggcgccgccatcgtgctcgtgctcctcctcatcttcgtctgcctctcccgccgccgccgccgccgccgcctcgccgccaacccctactaccccgccgacaccaagctgctcaagaagcacctgcagcagcaggccacgcccacgcccacgcccaccaaggacatccaggagatcgtccgccgccagcaggagcccgcggtgcagctcgccaaggccgtgccgcagccgcagccgcagccgcagactcctccgccgccgccgcctccgcagcacaggccaccggcgcggaagacgcccggcagcggcgtgtcggccacgactagcggcgggagcgagcgggacggcgccacgcctaggagcaccggcagcggcgcggggctgccggaggtctcgcacctcgggtggggccactggttcacgctccgcgagctggaggaggccaccggcgggctcgccgaggagaatgtgatcggcgagggcgggtacgggatcgtgtacaagggcaccttgcacgactccactttggtcgccgtcaagaacctgctcaataatagggggcaggccgagaaggagttcaaggtggaggtggaagcaatcggtcgtgttcggcacaaaaatctcgtcaggttgctcggctactgcgtagagggtgcttacaggatgctcgtgtatgagtatgtggacaatggtaatcttgaccagtggcttcatggtgatgttggcgaagtgagcccactgacatgggacatcaggatgaacattatgcttgccacagctaaagggctggcctacctccacgaggggctggaaccgaaggtggtccaccgcgacatcaaggctagcaacatccttcttgaccagcagtggaacgccaaagtatcggatttcgggctcgcaaagctgttgtgctcggagagaagctacgttacgacccgtgtcatgggaaccttcggttacgtggcgcctgagtacgccagcaccggcatgctgaacgagaggagcgatgtgtatagcttcggcgtgctgataatggagatcatcaccggcagatgtcctgtggattacacaagggcggctggagaggtgcagctggtggagtggctcaagaacatggtggccgagaggaaagcggaggaggtagtggacagtaagatggccgagaggcctcctcccaagacgctgaagcgggcgctcctggtggcgctccgctgcgtggaccctgacgcgaacaagcggcctaagatggggcatgtgatccacatgctcgaaatggacgatctccagttccgagacgataagaggcccggggccgggagagatggtcgtcgtccccagggtccggataggtacagctccaagctaggtggaggaagggagcctcagcaagcgcgagcaccagcgtcggtacagatgagatgattgtcattagagagtagcgatattaaccatgttatttttttcccgtcagtaaatacattctttcccaactcgttccatcgattctcaatggtcttcgattgtattatatatgtggagcaaccatcattctgtgacgatacttgaatcacacacacacacacacacaatgtagtggtaggatggtgctgtgtgacttaacatgcccaggccgaaaacctacagtttgtttacatggacgacagagaagagaagtcgccttcgttttcaacggctagc

SEQ ID NO: 156932 - DNA, 483 bp, Zea Mays
atggcgaatatacaagcttccttgcgtaccatcacaagttcacaacaacagattgggaaaaataagaaaattacacggcgccaatggccgcacgggaggaaagcagtggaagcagttgctgccgctcctccgaagtccgaacccgtctcgctgaccagtgcaacatttgcgagtgcatcacaagggatattcacaagggaggtgcgcgtgtgttcccttgtcacaagggaggctataaaggatggggctgatgctgtgatcgctgttggaggtgatggtacgcttcatgagctcattccacttggaactggctcagattttgcttggacatttggctggacaaatgatcctcgtgtcgcaattgatcgaattatcaaaggcattcacccagctttattagaaagctcaacaaagaccaatgatccagtgttggggaatccagcttacagatttcaagaagatcttagcaagcagcaagtctag

SEQ ID NO: 156933 - DNA, 1135 bp, Zea Mays
agctcgcgcagtccagcggcctcctccactcctacgccgcccaccacagccccttcctctccccgcacgacaagcacgacctcgactccttcctcgcgcagtacctgatgctgctgtgctcgttccgggagcagctgcagcagcacgtccgggtgcacgccgtggaggccgtcatggcatgccgcgagatcgagcagtccctgcaagacctaactggggtgacgctggaggaagggacgggagcgaccatgtcggaggaggacgaggacgaggcgccgatgctggaggtgggtctggtggacatgggctccgacgggcacgacatgatgggcttcggcccgctcctgcccaccgactccgagcgctcactcatggagagggtccgacaggagcttaagatcgagctcaagcagggtttcaagtcaagaatagaggatgtgagggaggagattctgaggaaaaggagggccgggaagctgcctggggacaccaccagcatcctcaagcaatggtggcagcagcactccaagtggccataccccacggaggacgataaggcgaggctcgttgaagagaccggcctgcagctgaaacaaatcaacaactggttcatcaaccagaggaagaggaactggcacaacaactcccagacgtcaaccctcaaatcaaagcgtaaaaggtgatggagagctgcgccaccatgtactgcacacctgacacgtataccaattaccaacacgctaatcaaacgacgtacggccatgcatggcgactcacaagaaataaagaggatcgatcgattcaactgtatatttctagtcattagtcactagtcagagaggtgacaggttcatgacacacacaaacacacgtacactagtctgaccactggcatatttgcttgctgctgtgattaatatattttgagccgatcatgtgctcggaccatactttattcttgttattattgtatagccatagtttgtccaccccaccccctgtgcacatatatacagtgacctgatctgaccatctcatctgctggcaggaagagatcgaagaacagagaggttaattgcattcatctttgtaccatataagctgtttctactctgtttgtcaacgagaatcagtc

SEQ ID NO: 156934 - DNA, 392 bp, Zea Mays
acccaacgacgcacgcgcgtgcgcaaaccaccaaccagagcgagtaccaaccggccggcccgcccaacaagcaggcggctagccatcgacgaccgaacacatcgagctgccccccggccggtcatatatatatgcagggcggcggcggtgatcaaacaggagggagcctgggcatgggcgtgggcgtggggtacgccggcggcggcggcggcggcggcgccgagtgctcgtcgtcctcggtggcggccgcggctgccgccgccgcggcagcggcggaggcggaggagcggcagctgctaaggggggaagatcgcggtgcacccgctgtgcgagcagctggtggcggcgcaacgtgggggtggctgcgcgtggccacgcccatcgaccacctc

SEQ ID NO: 156935 - DNA, 2522 bp, Zea Mays
ggaaatttggatccataccattaaaagatcaccactttggatccataccattactatctcacttacatgtgggtccacatgagtcaatgacatgtggggtccatgatatatatctaaagtttggattttttaatggtatagatccaattgttaaaaaaaaagagaagtggatggagtaaaataaaagaaagaaagagaagagcgactactagtagaaataatctcccgaggccgaggcgagccgagaggggaaggtggagagagaaaaaacgcggtggcgcgaacgggagggaagccttgctatcctatccggctatccccgccccgtcgcacgcacacatcacccaccccgtcgcagtcgcacctgcactgcatcctgcgcctgcccgatacccaattattctccctctctatggatcaccaccgcacgccgatggagaactcggcgtcctcgaagccgccgacgccggcgtccacgcccaactcgcgcctcgcatcggcgccgtcaccccgccactccgccacgccgccgcacgcgtccgcgccggcgtccgccccggcgccggcctcgcgcaccgtctacagcgaccgcttcatccccagccgcgccggatccaacctcgcgctcttcgacctcggcccctcgccctcgcccgccgccgccgccgcctcctcgtcctcctcccacgaggccggccccgcggcctcgtccggatctgcgcccgccgcggcgtcgccctactgcgcgctcctccgcgccgcgctcttcgggcccgacacgcccgaccgggtcgcgtcctcggccgccgcgtgctcgtcctcctcctcctccccggggctctcgcctgtgggcacccccgccaccgggaacatcttcagattcaagacggaggtgcgccggaacgccaagagggcgcttttttccggaggggaggaggaggaggacgccctgttccccggcattttcaccaccaggggcgcgggaccaaggaaggtcccgaggtcgccctacaaggtgctggatgcgcctgcgttgcaggacgacttctacctcaacctcgtcgattggtcttcacataacgtcctcgctgttgggttgggcaattgcgtttacctgtggaatgcatgcagcagcaaggtcaccaagctttgcgatttgggggtggatgacaacgtttgttctgtggggtgggcgcagcgcggcactcaccttgcagtaggaacaaatcaaggaaaagttcagatctgggatgcaactcgctgtaaaagaataaggacaatggaaagccatcgcatgcgtgtaggtgctcttgcatggagttcttcgttgctttcttctggaagccgtgacaagagcatcctccaccatgatatccgtgctcaagaagatcatgttagcaagcttaccgggcataaatctgaggtttgtggactcaagtggtcttatgacaatcgtcagcttgcatcgggtggcaatgacaacagactttttgtttggaatccacattcagtacagccagtactgaagtatactgagcacacagcagctgtcaaagctattgcctggtcacctcatctccatgggctgcttgcatctggtggaggaactgcagatagatgcatacgattttggaatacgaccacaaatgcacacttgagctgtgtggacactggcagccaggtctgcaatctcgcgtggtcaaagaatgtaaatgagcttgttagcacccacggctactctcagaaccaaataattgtttggagatatccaacaatgtcgaagcttgccactttgacagggcatacatacagagtattgtacttagctatttcccctgatggccagaccatagttactggtgctggtgatgaaacgctccggttttggaacgtgttcccctctccaaagtcccagagttctgatagtttaagttgtgtcggaggaacatctttcgttagaagctacatccggtgacaccgagttgtagttttgctgagctcataggactgttgcagcacatgttgatgaccatcaacatcactccatttgcatcaaccatcaaaggtagcccactttttgagatggcgcgatacagtttggtgaaccggcttgcgaatccaggcatggctctttttgctaggagtgtacatatttatcagagcaacggctttataggagtggacatagaggaggggggcttcaagcatcagcattgtcccaactgataagaatacgcccttttgtttgtttgctcaatacgtcggcttgagctgtttgtgtagtgcgcgagcagctaacctattcgaaacatttaccggactgtgaacacgcccacttcatccatgttggcaccatggtgtaaaatgagaacactcgtggctccaggtttattttatagtgtcttggaaggaggggctgattttgccctcacctggcttgtttcacatagagacaaccaagaaacgtgtgttcattgtttattgagatatggataccaaagcaatgctgaacttttagcata

SEQ ID NO: 156936 - DNA, 722 bp, Zea Mays
caggttatatcattgacttcatgtaagtctaggattttcaccaacttttaactgattcctgtctttatttgttttgtagactgattgggaaggtggatacttcccactcacccttcatttcagtgaggattaccctagcaagcctcccaagtgcaagttccctcagggtttcttccacccaaatgtctatccttctggaacagtctgtctttcgatccttaatgaagatagtggttggagaccagctattactgttaagcagattctcgtcgggatccaggacttgctagatcagccaaatcctgctgatcctgctcaaacggatggctatcacctttttatccaggatcctacagaatataagaggcgtgttaaactgcaggcgaagcagtatcccgcgttggtctgagaacttcgccctactagggatccaagctgcacattcgcatagaggaagactactataaagattgtgagttctaggccattgttgcttcgatcaaccaccatgtggatagtcgttagttttctagcttatgttataaagatattcaatttatgtaataaagtttatgatattggtttgcagagaaatcatcatatttgtataatctggtcttgactcctagctacacagtaaaggttcaagatgttatttttttaaaaaatgacatccagacctcaactaggtaatttttcaaagctagaataaaaaaatgaaa

SEQ ID NO: 156937 - DNA, 859 bp, Zea Mays
ggagggggcgtaagttctattcgcgcaaccgcgtagaaaaaaaaaaggtccagtcctcaaactctacagcgggggcgagccgaggaagaagaggtcgccgccgccgccaccgcttccatgtctgggggaatcgcccgcggccgccttgccgaggagcgcaaggcctggcgcaagaaccacccgcacggtttcgtcgcaaagccggagtcgctgcccgacgggacggtgaaccttatgatttggcactgcaccatccccggcaagcaagggactgattgggaaggtggatacttcccactcacccttcatttcagtgaggattaccctagcaagcctcccaagtgcaagttccctcagggtttcttccacccaaatgtctatccttctggaacagtctgtctttcgatccttaatgaagatagtggttggagaccagctattactgttaagcagattctcgtcgggatccaggacttgctagatcagccaaatcctgctgatcctgctcaaacggatggctatcacctttttatccaggatcctacagaatataagaggcgtgttaaactgcaggcgaagcagtatcccgcgttggtctgagaacttcgccctactagggatccaagctgcacattcgcatagttgttgctagtgtcttgaatggaagactaaaggtaacatggtgctttgaggagtaactatcgccattctggacctaacagtgttatttaactatttggagtgtttttttgcgggatgatgtgaaaaccttgctgtgtctggtcatcaaggattgctgatttgtctataatgccttgttcggatatttctatcccatacggattggatgtgattaaaa

SEQ ID NO: 156938 - DNA, 98 bp, Zea Mays
cggaccagacaatcttagtatcactactactacatcaaaactaccaaatgtgtcaaggacgtcagagtatgggggcagcttcccttgacgccctatga

SEQ ID NO: 156939 - DNA, 1309 bp, Zea Mays
gtctccgcctccaaccatccacatgggcatggcgatggtgttaacggacggcgaggtcggtgctctcatcaaggtctccgcggctgtttgggtggcgatgtcctacgcccgcctcgccgcggcgcgtctccgcccaggcgcgcttcgcctcctggcgctgctgcccgtcgtcgcgctcctctgcgcgatccccttcgccttctcgacgtccacgttccgcggcacctcgggcttcttcctcgcctggctcggctccttcaagctgctcctcctcggcgccggcattgggcccctcgacccttccctccgcctctcccacttcgtctgctcggccaccctacccgtgaagctccggcggcagtccaaagagaagagccaagcccccgcccgtggtccggcgaggatactcctctccggcgccgtcatcccgggcgtcatctacgcgtaccagttcaagagctcgatgggcaggtaccagctcctcgcgctctactccgtgcacatctacttctcgctggatctcctcctggccaccgtccacaccgtgatccacgacctgctcgggatggagatggagccgcaggtggaccgcccctacctggcgtcgtcgctgcgcgacttctggggccggcggtggaacctcatggtgccctccatcctgcggccgtcggtgttccgccccgtccgcgcgcgcctcggcaacgcggccggcgtccatgcgacgttcctcgtgtccggcctcatgcacgagctcatgttctactacatcatgcggagcgcgcccagcggcgaggtgaccgccttcttcctcctgcacggggcgtgcgcggccgcggaggggtggtgggcgtcgcatgccggctggtggcgcccgccgcgcccggccgccgtgccgctcacgctggccttcgtggccgggacggggttctggctcttcttaccggcaatggtaaagggcggccttgacgagatggttctgcgggagtgccagggcatggtggtgctcatggagcaggccgcccggcggctcgccggcgccacagatctcgtctcgtcaaccatgtgaatttgagcaaacagcatgttgcaagctggctgtctctgctgcttgacgttatctgcaccgcaggatttagatctgacggatgtagtggtggggttggtggatactatactgtttctttcgtgatgggctgtgactgtgattgacaactatccgtaattgaatacattgtctttcagatccggatgataggaatgatatgatagttgggatttgggagagatgcaaatgcaatgcaagttgatt

SEQ ID NO: 156940 - DNA, 840 bp, Zea Mays
gaatttcaggattgctatcttcttcatgttctgaacgagaggcacgatagcatgataatgatctttgtgcgcacctgtgaatctactaggctccttgcccttatgctgaggaatcttggtttaaaagctatgtctattagtgggcagatgagtcaggacaagagattaggtgctttgaacaggttcaaagcgaaagattgcaatatccttattggcactgatgtagcaagttgtggccttgacattcaaggagttgatatggtcatcaattatgatattccaatgaattctaaggattatgttcatcgggtgggtaggaccgcacgtgcagggcggtcaggatatgctgtatctttggtgaatcaatatgaagcccagtggtttgtgctgatcgagaagctccttggcaagaaaattgaccatcgtaaggtggacagagatgaagtcatgatacttaaagggcctatatccgatgcaaagagaattgcacttactaagttgaaggagtccggtggtcacaagaagcggggaaaagtgggagatgatgacgaagaggtggaaaatcattctcattctaaaagaccgaaatccttcaagaaatcaaacagacgatgaaggctctggagcccgccagatgagatagaatccgagtgtacagctgcttcattttactctggtcatctgttgttcagcgcagaccctatggatttgcagtgatgctttggctatattattaggctcagttaagacatttacttgccaccattacttcggttgacgcaagtctcccaattttgccatcctgacccaaacaatgttgctcaagcaaatcatttttat

SEQ ID NO: 156941 - DNA, 512 bp, Zea Mays
gccccgcgcgccgacgccagcggccgtggagcacgggacggggacggtaagtcaaagccgcagaggcgggcggacatgacggcatgtacacgaaacacgacgacgaacgcgcgcgcagaggcggagaggacgacgtacggccggccggcccgggccaccaagagagaagggcatgcgtacgcagaggcgtggatcagcggcagcgctaggccggggaccaagcaagcaaccatggcaagtgatgtgcttgcggtgccatgccatggcaacggctgcactgcgtgccgtggtccagcgcagcgcagcgccgggtggagaggagcaggagaccatctactgtaacttgactagtgtttacttacttggctgggtggctggcaggaccagtactccggtggtgaagggtactgacgactgtagctggactggactgaaggctgaagagagcgtggtacagtacagtacagtagcagtgtttgaatagcatggctatatatctatgtagttttttc

SEQ ID NO: 156942 - DNA, 965 bp, Zea Mays
ctctaggatcccaggcctcgcctatggccgcctatccccttcctcctccttcctgttccatcgcacagtgctgcagctgctgctaatccttaacctttcgactactagtcggagtcctcggctcgacgctgctcgtagtcgtagctccagctgctgctgcgtggacggaggagggtggttcctgttgcaggctcgcaagttgcaacttgcagtgttgcactgcttcagcagcagctgcctcattgcgtgctgcagttattgctaccgctactgtatacgtagagaccgagacgtcttgccatttgctaagctctgatggagaggatgcaactgcaagggcccatcgcctcttcgctgtggacggacaaacagcaggtggtggccagcaccagcgccgcaatggcggcgcagatgcccttcctggcgttgctccagggcgcaggcgtcgtggtggagggggcggagacggagcagcagcagtacgagcacgagcacgacgggcgcaagcggcaggccttggcgcgcgccgtctccaaactcgacctgctcgagagctgtctcacgcaggcggcggctcccgcggcggcggcgtgtgcgccagtggccagcaggacgaccgagaggcggatgaagcggccgaggacccgcgcgcgagccgcgccaccgccggagaagcgcaggaagcccgaggaggccgagagccagcggatgacgcacatcgccgtggagcgcaaccggcggcgcctcatgaacgaccacctggcctcgctccgctcactcatcccctccagctatatcccccgcgtgagccatgcaatgcaaagcccatgcatgcatgctgcgttccgtttcgatctgacgacgcaacggttacatgcaatgcaatgcagggcgaccaggctacggtggtgggcggtgcgatcgactacgtgaagcagctggagcagcagctagtggcgctgcag

SEQ ID NO: 156943 - DNA, 1271 bp, Zea Mays
ggacgacgtaggcggtcgatcggttggcagagttcgcggacgggcctgcgttcgcgttcgggtccgcgaagcccacactgggacgggttggaagaagccaagcccaactcgagtacacaaagcccagatgctgcggcttgcgggcgatggttgcgccgaatagataaggccgttgcgttgccttgctgccgcgctctccgtcttggcgcacccggcacccccttatccggactccggaaaactcttcagtccccgctccccgccaccgttcccgtgcgtcgctgcaccaccaccgtagcctcctcctctcacccggtcgcggccgagccagaatggttagcgagcaacaagctcctgcggcggaggtggtggtggagggcagcgaggcggcggcggaggtgcccgtggagagcgaggaggcggccgcgcccaaggcggaggagcaacaggatgacgaggcgccggtcgtcgaggacgtcaaggaagacgaggacgaggatgacgacgacgaggacgacgacgacgctgacgatgatgacgccgatggaggcgccggcgcaaccgagggcaccaagcagagccggagcgagaagaagagccgcaaggccatgatgaagctcggaatgaaacccgtcaccggcgtcaccaggataaccatcaaaagagccaagaacatactgttcgtggtgtcgaagccggacgtcttcaagagcccgacgtcggagacgtacgtgatattcggcgaggccaagatagaggacctgagctcacagctgcaggcgcaggcggcgcagcagttcaggatgcaggacctcagcaaggtgatggccaagcaggacgcggccgccgccgcggcggcgccggccgacgaggaggaggaggtcgacgaggccgggatagagccccgcgacatcgacctcgtcatgacgcaggccagcgtcacccgcgccaaggccgtcaaggctctcaaggcgcacgacggcgacatcgtcagcgccatcatggagctcacggcctgatcatgatatgccagtgcatgccggccgtacggccgtttcttcctcgttattgcagtctgcttcgctcagcgtcgctgttcatttttgggatttgcatacaagacgagctttgaataagagatgtactgtttgttcaccatatgaacgttgttgcatcatgtcagtttccggattattattattgccactccttaagttgttatgattatttgattctcatttgcacatttaattggcttaagttgttaaggt

SEQ ID NO: 156944 - DNA, 1504 bp, Zea Mays
gggagccaatctgaaacctcaggctgatttctgggcagttgtgtgctcgcctttctgtggaagtttttgttgttgtatcgaccagattgagagttgacttgtagttcacgacattagaccaggcttctgtcagatccggcagttcattggttttatcacttggatttggtgtttaccaacactggttgggagaagaaaagaaaagaatttagttgtttgctggatctgcagagacagtcagcagaggaagatatttagttgtttgcatatctcagcctctcgaatttttttgttggtccatactccaatcaatttctatcctgataaatatggttttcgtgtggtggtcgattactcgatttgttcctgaaccaactagcttgtggcgttcttaaaaaaactcggccggggagggaaagaccgtcctcccggtattatattaagaagagaccgaaacaatggtcccggccgagaaaatccccgaaccctggcccccccatcactaacgggccggcgtcaactgtccactctgcaacgacccaaccggagggtggcgcacaggacatcataacccgagagtggatggggcacaacgaggagatttttttaaccaagcctgaaaattcgcttccgaggggaatcgaacccaggacttggaggtgctacttggtttgtccttttccactaggctagaggccctttcgcagctcgtggcgttcttgctggcttcattttccagttgcctagcttgtggcgtcttcttgggagatgcaatttggttcgttcccgtgaatctctcactgctggaaatgaaccatttacttctgaaggcctccatggctcttcccagttggcttcagtttcgaccgtcttgtttcggatgcgttctgtctttgtgttgtgaaatttggtagaggaaatatgctccgttcgaactgcttgggcaccatgtcctcttcgcgggcgtggaccacgtcctgtgtgttgaatgggattgaagagtcttgccttacagttgaagatgtcagaagcacttgagaaagataaggaaatttgtgaagaggaagaggagtacgtattggtagagttggacatatcactgggtgctccaattgtactctctggtttgcatacattcatctcctaccttaatagtaggtgacagtctgaagatgccaaaactgaaacaaaacctacaaacgatgagatcacaccttctgaagaaaatacagacaaaccagctcacagcagtaacgaagcaccctcgaaggaggtgatccatctcgccatcgttcaaaagatcctcaaatttcggccattcagtgcgggagtatccgcagcatggagcatatcatcacaaggacaaggagctccagataaaaaaaagccgttttcttgttcaatacctccagtgtacatttaggtagctcattgacccgtccaaacgaggtggcttgtatacttgctgagttcatctatatatatctgagctaacatatcgatc

SEQ ID NO: 156945 - DNA, 1873 bp, Zea Mays
cagcccccgccccacacccagcccccgccacctgagtacctgacacacagcgaaacgccgaaaccgcgtcaagttccccttctgcgatcccccaatcgccgtaaccctagactcgccaccgccggcgcgatgctccgctcgccgggcaattcgccccgccgcctctcacgtcgcccacacccgcgcactccacccctcgcccggcctccccgccccctccaccgcccctcctcgaagcgccgccggtcggaagtgctcgacgaggacacctacgtcgccgccatcgagcgcatcatcgagcgcgactacttccccgacctgccccgcctccgggaccgcctcgactggctgcaggccgtgcggtcccacgacccgctcatcctacgcgacgcgcagctcaagatcctagaccgccgccgccgcgcccagcgccacgcggcggggcccgtccccacgccgacgccggccacctccaccgcgctccgctccccgtcctttctcaccacccccgccggatccgtcgccggcggcgtgggaggtcccgacgccgaccacgacgacgacgtcgcggccgcggtctccctcgacggcttcttccgccgcttcaccagcgaggacaacgactccttctcgcgcatcctagacaaggtgaaccagcgccgccgcgagcgctacgcgcacctgctggagccgccgccgcctaccgaggcggggagcaaagcgtcagagggcgccaagcgcgacaggatcacggacgggtacggtacatcggggcagccaccgagtacgctcgagggcgccaagttcacggcaaagaaccagctcatgtactacccggctgaccagggggaagcgcccctcacggaggaggagcgcgcagagcggctcagggggatgaccaaggagataaacaagccgaacaccaggctacatggcagagccacggctgatgacgcgaggcccaaggaggagggggctgccatactttacgcgctagttgcaggctctactccgggagggatggcctaccacgaccctgacaagttgaagaagtacgatctggaggacctgaggaagaccccgaaccctttctacctcgagtcggacaagaaggccggcaacgggtacagttttgtgaggacgccgtcgccggcacccggcgtggacgagtcgccgttcatgacgtggggtgagatcgatggaacgccgctgaggctggactcggatgagacgccgggcggtagcgagagagcgcatttcaagatgccgccgcctcctgctcgcgatgtcaaggcgcacctgctttcgagggacgccgctcggaaaataaaggagcggtctaataccttccataggccgcccctaccctcccctgcgaggggtgtcagcgcaagccctagaaccctctcgcgggccgcacaaaaattcgtgaggaacgccatcaccaagtcggcaaagtcctccagcgccattgacgaatctctccgtgcaagctacagaggctcgaccccatctgcgagcactcccaagtcaaggttttcaaaagaccctggcctcgcatcgcgttctccatccacaaggcagggttccacccctccctggtgagtgttagtaaaccacttaatgttatttcataaaatgggtaggtggcccatcctgtactgtaacaaattgtataatgatggaagacatgaaatgatgaagtgatgcttatttactcttatattatctgagccacccttaccaaaatcaatgtcatgagcatatctttgcatagtaaattgctaagttccaacttgaattttaaatttcaaaggcataggcgtcggggcagaccatatgtcgtctttggaacaatgggtttggcaaaaac

SEQ ID NO: 156946 - DNA, 1204 bp, Zea Mays
agaaaaatcgccttatgaaatgaagaaggaagttgggttcagaaatgaaacagtggaagctgcttttgttgaacatctgcaggaggaagaagctcccacaagtaaagatggccaaaaggtccaagctgctagcactacagttggtgatcaagaaaatgcagccctgaagagcataggggaagatcatgtgcaagaagatgctggtgcaggaagcttgaatggatgtgacaaaagaaaaaatgaagatgggacagtgattgaaagtgaaactgcgaaagatgatgccagaacatatggagttaatttgtcagaatcagatgttgcagttggtattcagtctgcctacagagggtatgatgttcgaaaatggcaacctttggataagctctggaagatcaagcatgtgcatgaacagatgcaagttgtgaggaagcagattcaatgccttttagattcttgcagtaagccaacacaaaaagagcaagtggccataggtgaaactattatgaatttactcctgaagcttgacgcaatccagggcttgcatccaagtgtaagggaagctaggaagtctgttgctcgagaactgatttgcttgcaggagaagcttgatactttatgcaaagccgcatctggagacttgaatcacacagatagtaatgatgatgaatctgaggggaccaagaacattatccaaactgcagctcctactgtaataactgaagcttctgatagacagaagagaactattgaactgggtaaggtacaagaaccatgttcagtggactccatggagccatgcaacgcagttccatctggagtttcctgggaggtgaggccagatgtagacgctagcgaggagaagaatgaaaacaagagtcatgtagcaccacagtggatgaagcacacgaagaaaacagagggcgcactgggaacagaaagcaggggcgcggcagggctgagggcgagctcggcgagcaccaagggggaggtggaggcatcatccgccatggctgagggcgagctcactgtgaaggttgaacagagccagggcgctgggaggagcagaggtgagggcgccatgggagggatggggaagacgacctggcggccggcactagaggaagatggggaagatgacctcaggagcgcttgctcaggtgctcgagtggaggtcggcaatggggagcaggcggcgccgtga

SEQ ID NO: 156947 - DNA, 589 bp, Zea Mays
aaaacagaagatatacaaacatcctagcaaaaggggtctcatgtttacttatcaaaacgaagggatctgcaattggtattggaaaacacgaccatttagtgattccatatgtagaaataagtttaagttttttttcaaacaagtagtagaaccatgtataattatattacattaagaagaaaacaagtttaaggtttagctgatgcgagtaccactaaacctgctagatagatcagacaggccacaccacacatttagacttcatattgaagaaaaggtaaaaactttcataagcacatgggataatgcaatcatgcttgtggacaaattatttatcctgcatcacttgtcaattgagaggttcatctatcttgccaataaatgtttatcgaagaaagaaaaagaaaatgattgattggcagattgataattgataccaaaatacataaattgcagaaaatttcctggatatcctgataagctccataccttcacactaataatatcaaatagtgtttcattgtcacgagcataggcgtagtttatctgcattccaagaaacagtcaaagcaaccaatgcccaaattcc

SEQ ID NO: 156948 - DNA, 831 bp, Zea Mays
gcacccagcaacaagcaacctcgtccccaaacaagcaaccaccgcctccccgatctcgtcgagaggaagcccaatcccgaaaccgccgccctattccaatggcgcccaaggccgagaagaagcccgccgccaagaagcctgcggaggaggagccggcggcggagaaggccacggcggggaagaagcccaaggctgagaagcggctccccgcgggcaagtccgcaggcaaggagggtggcgagaagaaggggaagaagaaggcaaagaagtcggtggagacgtacaagatctacatcttcaaggtgctgaagcaggtgcacccggacattggcatctcgtccaaggccatgtccatcatgaactccttcatcaacgacatcttcgagaagctggcggcggaggcggccaagctggcgcggtacaacaagaagcctaccattacgtcccgcgagatccagacctccgttcgcctcgtcctccccggcgagctcgccaagcacgccgtctccgagggcaccaaagccgtcaccaagttcaccagctcctaggcgagcgatgcgacgtgcactcgtctcctcttcttgcaggagtacaatagtagtacggttaggtgtgttgccgcggtggtagttgccgctgcgtttgctttctgggctcggttgatgtcttttatgtaagaaagtaactgtattgtgtctgcagtaccttaccgtgcatgttttaagtagcatcccataatctataaggccccgtttgtttcgttagaattgaattccattttaaaaattataatttagataaaactaattaagttcatttatttatatatgt

SEQ ID NO: 156949 - DNA, 898 bp, Zea Mays
cgactggcagactgggccgccgccgccctaaaccagctgaggctttcgttggtctcttcgccggcaacgagcaccaccagcggcgtctctcttgtgcggggcgacagcggcggaacccgcgccgccgccgccgcaagagttcgctcgtctcgcacctcccaaccttgccgtcgcctgagcacgcggccggaggcccgcgccggtgcgaggatgtcggtagcgaggcctctctgttttactcacgcgttctctgcccaaacggcggcgccgacctcaatctggtgtgctatggcccgatatgtggcgacggcgtggtgtcgtgtgggtgggaatccacttcgagctggtgaggtgtttaagatgtcagaagcacttcagaaagataaggaaattggtgaagaggaagaggaagaggagtatgtattgttagagttggacaattgtctttattcagacatatcgcctggtgctcagttcgtactctctggtttggatacattgacgcctaccttgatagtaggtgacaatctgaagatggtcggggaatatgatgaaactattggcacctgctatctattttctgaaagtgaaactgaaccaaaacctgcaagtgatgagctggcaccttctaaagaaaacacagaaacaccgcttaacagcagtaaggaagcgcccttgaaggaggtgaaccatctggccagcgttcaaaagatcctcaaatttaagccaatcaatgtggagcactcgcagcatcgagcatatcagcacaaggacaaggaactttagaggaaaaaaaatacctgctgttttcttcagtcaatgcattcagtgtacagttttaggttcattgaaatgaggtgggctgtatacttgttgaatgttgagttcatctatatat

SEQ ID NO: 156950 - DNA, 83 bp, Zea Mays
tcacaccacttactaccaaaaccttttttctccatcatattataaagaaaatgccaattcactttgtcataagctttttcaaa

SEQ ID NO: 156951 - DNA, 2529 bp, Zea Mays
cccaaactttgctataaagccacaacccctccccctcctcctttccctccctctctctccttcctcatgcgcgcgcctgccattagcccaggctgtgtacattatttgtagctgaccattcattcatatagagctagttgagcaggcctggttggctgtccataatttttgcttcggatagcattgctgccaggcgactgcaaagctccaagcagacttttgctgtgaggatttttttgcgaggaagggcagagggagcaatggcgccagtcagtttgcctcctggtttcaggttccaccccactgacgaggaactcatcatctgctaccttaagaggaagatcaacgggagacagatagagctcgaaatcattccagaggttgatctttacaagtgtgagccctgggatctgccagaaaaatcatttcttccgagcaaagaccttgaatggtacttcttcagccctcgggaccgcaagtacccaaatggatcgaggacaaaccgcgcaacaaaatctgggtactggaaggcaactgggaaggacagaaaagtgaactcgcataggcgtgcagttggtatgaagaagaccctggtgtactatcggggccgagctccacatggttctcgcactgattgggtcatgcatgagtaccgcctcgacgagagggaatgcgagactgacactggcttacaggacgcatatgctttgtgccgagtgtttaagaagacagcgcctgggccaaaaatcatagagcattatggcgcagtgcaccaccccatcgagcaaactcagtggatgggaagcagcgttgagcgctccccaacgctggacttgtccagtgatgttagaggtgatgacttcgacagcagcagtttctcgttcccgacagaggcgccaatggactcctccatgcatggtgggttgttcgggatgcagatgagtgcacctcacgaggatgccaaatggatgcagtttctgagcgaagacgcctttaacgcaaccaatcctttcttcacgaatccagcttcttccagcttctcatgcctcccatccaaggtggatgttgcactggaatgtgcaaggcttcagcacaggctctcattacctcccctggaagtggaagacttcccacacgacgtcagcctcgacacaaaggcgagcgtgctccgcagcagcaaccccaacaacgaggttgacatccttcaagagttcctctccgtggcgtcggcctcccaggagctaatcaacggaaccagcagcagctacgctgcagaaatgtgggcaggcgctggcacgagcagcaccagcgacacccactacgtcaacgaactatcttccctctttgagtttggggtgaaggctaaagaggaggccgacaatttctaccacatggactgcattggcacatcttcaggcttctcaccgaagccggtccgtgtcgatgaaccggttaggttggttgagatcgctgacatggaggagttcaaggaagagaagaggcgagtagagaaccttagaggagtgaggctgcacaacaatgacgacctaggagagattccaacagactgctgcatcacacaataccccatatcggacactgctgacatttcaggagaagccggtcacctgaccaatcccactagcgccggcggcctagacactgcacccatcttctcgcaatctcaacctgacgacttcgctattgggttcagtgacgacgccgaccccaatgcatctttcgacctatgcgagagggttgacgtcaagcatgggctcttcgtctcaacggtgggtgcgcccaagacgttcttccaccacgttgagccatcgaagaaggtcagcttccacctgaataataatcccgtagcaagcgacgacgacgtcagcaaggcgacgaccgggaagtcccgttcacccattattagtgtgatgacaaccaaagatagtggcagcagcttttctgtttttagcaagttgaaggcgctcatcagggacaaattcctggtgaagaagctgccttcatcgtgccagaggtccttgttaggcagcaaagaaacagcggcagtgagcgagctgctgcagatggtggtgtcgtcgctcctcttaacaccaacggaggtgacaggccccactaccgagcaagaaaagttggccaggaaggcgatgaagccgggaccccgtcgttgtgatggaagccatgcgtggcttcttccactccccaaaaggagcaaaggcatttccagcatgttttttagtgggaaatgggcatttctgacatccgcattggccatccgcgctccaggtccagggtgcaatcactgaaagaaaggtcttccttctggtcatagctcgtgtaaaaattaaagtacggctctttataatgctactgcttaggaaactcgtatcgggtgccagtgcacgggacgcatagtctttcgtgcatcagacagttaacagcgggtgtataacgggagaaatgtcataattcgtatttattttttttattcgtccttatattaacacgtct

SEQ ID NO: 156952 - DNA, 3291 bp, Zea Mays
atggaacagagcggacagagacacttgggggggatttgcgaagcgattacatacaggaaccaacgcgccattgccattgccattgcagctgagcttgctgcgtcacagatgatgggttaccctgcctatacaacagtcgcctgcctacttccttcgccatacgtacaccggtcacactcaagattaccacataccgctactgaccttgttggagggatacatgccgtttgccgaccaatgccggggcactcatcaattgggcatttgggctgggagctacgcctacgcggtggccttcgccggcggtatcacgatcgggctgcggactacgtgatccctcgacacccacttcaggttgccctcgacgccgccgacggccggcggcccgctccaccgcaccgtcacggtgaagctccgcttctcgttcaccctgtcgaaccgcagcgtcgggggccgcaccaccacggacacggccctgctgggcatgtccaccacggccctgtacacggagctggccttcccgacattggtcacggtgcggcggacggtgaccgggcgggacagcagcttcaccaccagcgacgggtagttgagctccgcctcggtgatggccttcagccgcttgccgccgcaggcgacgcggcgccccgttatctccttcacgccgccgtccccgatgcccaggccgcagaggtaggcgacgtagtcgccggcgccgaggtcgtacaccagccccgggtccacggcgcgggacgggttcacgtacccggcgcccatgctgtagaagctcgcccgccggtactgctcgtccttgatgggcacgcccgcgtggtccgccgcgtccgacgacgtcatgatcgccgacttcaccgccgcgggggaccagctcgggtgcaggctcttgatgacggccgcgatcccgctcaggtgcggcgtcgacatggacgtcccggactccacgaagaagggcaggctcacgtcgtccgcgaactccgggtgcatctcgctgggcgcccacgccgccaggatgttcatgccgggccccgtgatgtccggcttcaggatgcccgggctcgccctgttgggcccgcgcgacgagaagaaggccacggacggcgccggggacgaccccatcaccgtgccccggaacgcgatggacgccgtgggcctgggcgccgacctggcgtacgccgcgatcctcgaccccgcggcgtggctcacgtgcgacgcggccagcacgtgcgcgtcggcgaaggtggtgtacccctccgccgccttgttcatcaggaccatgccggcgccgccgtacgcggccaccgtctgcccctgctcgacgtgctcgctgatggagcggctctcgcacagcaccaccttgcccctcacctcggcctccaccagcgcgctgcagtcgcgggactccgggaagacgagcggcagcgggcgccccgcggtgttgttccggggctggaacagcgactcgccgtggaactcctgcccgttgccgagcctcacggttgtgcgtatcgcgcggtccgtggtgcccgccgcgaccgtgagcatccacggcgcgccgttggtgatggaccccgcggcggggccgtcgttgccggccgcggcgctgacgaagatgccgtgctccatggccttgaacgtggcgatggcgatgaggtcgtagttgaactgcgcgccgtcggtggcgccgatggagaaggagagcacgtccacgccgtccctgacggcggcgtccaggccggcgacgatgtccaagatggagcaccggctccgcgtgcacaccttgtagatggccaggtgcgcgtgcggcgccatcccggacgccctgccgtgcgcgttgccccgcacgccggcgttctgcacgaagttgcccgccgcggtgctggccgtgtgcgtgccgtggcccgcgtcgtcgacgggcggcgccgtgtcgttgatggccgcgctcccgaacgcgcgcgcgccgatgaccttgttgctgcacccgccgcgggcgacggacctgaactggcaggcgcccttccacttcttgggcggcggtggcatccccgcgtcgccgaaggacgggtgggtgggcaggatgccggtgtcgaggagcccaatcacgacgccgcggccgaacccggatcggccccagaagccgtgcttgcccatgtggaggccgaggaagcccggcgagtgggtggtagccagcggcaggaactcctccgggtacagccgcaagcacccctccttgcgcctcagcgtctgcgcctccgcgtcagtgaggctggcggcgaaccccgtcagcacgtggctgtacgagtggatgatcctgggcccgtcatccgccgccgagtccagcgtggcctccggcaagaaagaccggtgccactcctccaccgacccgccgccgccgtcgtcgtccctcggctcgagatgaaccacgtagttcttgcgctcctgcgcgtcggcgacggcgagcagcgcggcggacagcagcaggaggaggggaaggaggtttctttgggtcctcatgaggcaatgcaatgcaggactggaccgggtgagggagacagctagacaaagggaggtagcggctgctgttgctggatgcttggcgttgctcactaccgccgaaacgatttgaagcgcagggtgcaggaggagggcagtggagtggagtggcgtggcaagaacgagggattgccgggtgttatgtagggcgactacgatcagacgagtgagtggcagtgggcggtgagctgtagagcagaagtggagccggaagagaggactggactggactggactggactggactgcactgattttgaatttgatttgggtgatgccactggcgttcactgtttcccccttgctctgctctgccctgccccgttgcgccagaaaacaacgtgtcaatggctgctgcttgcacgggcacgggcacgggcacgccaaaacacaatggggctcgagagtgatggtgatcggtgcggtcgctttggtaccgggcccacctctcggcgacagcgctgttgatgggacggtgggccaaatcctccgcggctagtgtgcatttctgtgaataaatgggcgcagggtcaatcattctcttcaccccgctgcggctttacggacagacacatgtctgtctgagagccaggagcagcgttcgaaagcgtttcgaatgatagagatgggagtgcgcttttttttaagggtttagggtttagtaccatcccaatcagcatcgtattgttgttcttattattaatatatgtttgttcaaactta

SEQ ID NO: 156953 - DNA, 2047 bp, Zea Mays
ggcccgggccactgcactgcgccatccaaggacgactggacgaggaagaaaaaggatttcgaaaaagcgacgctgccgggtatatatacggcgccggcgccgaggagagaggaccccggccgatcccgcacccctgactgtcagccgcgatccgctcttgtaggctccctccctctccgacccgcgtctccctcctcccactccactgctcctgttttgcgtgcagcggcggagcaggagagatggcgtcggaggccaaggacgtgggcatcctcgccatggacatctacttcccgcccaactgcgtgctccaggaagagttggaaacacatgatggcgtgagcaaagggaagtataccattgggcttgggcaggaaagtatggcattttgcactgaagttgaggatgttatttcgatgagcttgacagtggtgaagtccctcctgaaaaattataacattgacccaatgtgcattggacgtttggaagttggcagtgaaacagtaatagacaagagcaagtctataaagacatggctgatgcagatatttgaggaatctggcaatactgatattgaaggagttgactcctcgaatgcatgttatggtggaacagctgcattgtttaattgtgttaactgggttgaaagcaagtcatgggatggtcgctatggacttgttgtttgcacagacagtgcggtttacgctgaaggtccggctcgccctactggtggtgcggctgctattgcaatgctgattggaccaaatgctcctatttgttttgaaagtaaatatagaggatctcatatggcccatgtatacgacttttacaagcccgatcttgcgagtgaatatccggtggttgatgggaagctatcacaaacatgctacctcatggcattggactcctgctacaatgtattttgcaaaaagtatgaaaaacatgaggggaagcagttttcaatttctgatgcagattatgttgtgttccattctccatacaacaagcttgtacagaaaagcttcgctcgtttgtactacaatgatttcttgagaaactgcagcacggttgatggagagtcaagggaaaaattggcaccctatgcaggcttgtcatctgaagaaagctaccagagtcgcgaccttgaaaaggcatctcagcaagtcgccaagaatctgtacgagaccaaggttcagccaacaacattgatcccaaaacaagttgggaatatgtatacagcatcactctacgcagctcttgcatcggttgtccatagtaggcatgaaactctggcaggccagaggattgttatgttttcgtatggcagtgggttgacatcaacaatgttctctttcatgattaatgaaggccatcaccctttcagtctgctaaacatcgcaaacatactggatatttccaagaagctgaaggcaaggcacgtggttcccccagagaaatttgtggaggcactgaaactgatggagcaccgctatggggcaagagatttcgtgacgaatcaagatacaagtctgctatccgcaggcacatactatctcacgcacgttgactccaagtacagaaggttctacgacgtgaaaggtgacggtgtcgccactgcaatgtccaacggccactgatctttcttctgcccgaagctgcaacaagtcaaataacagaggcaagtgtcctaagcatccttagattattatatctattaagaggggaagctcgagttatagattaatctatgcccagctgtaaggttgtaaagttagttagagctgcgcatgcttgtttagtaaaagctctgctgctcttcagttatttagcgaatcaagcacactgctgggctaataagaattgtaaacaataatctgcagaatcactggctacatccaggttatgctgatgaatgcacgatttcatgtttaacacgatcaatgcatctggttacatccaggttatgctgatgaatggacattttggttccatccccatatcctaatgtagtcactatataattcctttccctctttgatgaagtttc

SEQ ID NO: 156954 - DNA, 1992 bp, Zea Mays
ggcccgggccactgcactgcgccatccaaggacgactggacgaggaagaaaaaggatttcgaaaaagcgacgctgccgggtatatatacggcgccggcgccgaggagagaggaccccggccgatcccgcacccctgactgtcagccgcgatccgctcttttttgcgtgcagcggcggagcaggagagatggcgtcggaggccaaggacgtgggcatcctcgccatggacatctacttcccgcccaactgcgtgctccaggaagagttggaaacacatgatggcgtgagcaaagggaagtataccattgggcttgggcaggaaagtatggcattttgcactgaagttgaggatgttatttcgatgagcttgacagtggtgaagtccctcctgaaaaattataacattgacccaatgtgcattggacgtttggaagttggcagtgaaacagtaatagacaagagcaagtctataaagacatggctgatgcagatatttgaggaatctggcaatactgatattgaaggagttgactcctcgaatgcatgttatggtggaacagctgcattgtttaattgtgttaactgggttgaaagcaagtcatgggatggtcgctatggacttgttgtttgcacagacagtgcggtttacgctgaaggtccggctcgccctactggtggtgcggctgctattgcaatgctgattggaccaaatgctcctatttgttttgaaagtaaatatagaggatctcatatggcccatgtatacgacttttacaagcccgatcttgcgagtgaatatccggtggttgatgggaagctatcacaaacatgctacctcatggcattggactcctgctacaatgtattttgcaaaaagtatgaaaaacatgaggggaagcagttttcaatttctgatgcagattatgttgtgttccattctccatacaacaagcttgtacagaaaagcttcgctcgtttgtactacaatgatttcttgagaaactgcagcacggttgatggagagtcaagggaaaaattggcaccctatgcaggcttgtcatctgaagaaagctaccagagtcgcgaccttgaaaaggcatctcagcaagtcgccaagaatctgtacgagaccaaggttcagccaacaacattgatcccaaaacaagttgggaatatgtatacagcatcactctacgcagctcttgcatcggttgtccatagtaggcatgaaactctggcaggccagaggattgttatgttttcgtatggcagtgggttgacatcaacaatgttctctttcatgattaatgaaggccatcaccctttcagtctgctaaacatcgcaaacatactggatatttccaagaagctgaaggcaaggcacgtggttcccccagagaaatttgtggaggcactgaaactgatggagcaccgctatggggcaagagatttcgtgacgaatcaagatacaagtctgctatccgcaggcacatactatctcacgcacgttgactccaagtacagaaggttctacgacgtgaaaggtgacggtgtcgccactgcaatgtccaacggccactgatctttcttctgcccgaagctgcaacaagtcaaataacagaggcaagtgtcctaagcatccttagattattatatctattaagaggggaagctcgagttatagattaatctatgcccagctgtaaggttgtaaagttagttagagctgcgcatgcttgtttagtaaaagctctgctgctcttcagttatttagcgaatcaagcacactgctgggctaataagaattgtaaacaataatctgcagaatcactggctacatccaggttatgctgatgaatgcacgatttcatgtttaacacgatcaatgcatctggttacatccaggttatgctgatgaatggacattttggttccatccccatatcctaatgtagtcactatataattcctttccctctttgatgaagtttc

SEQ ID NO: 156955 - DNA, 2270 bp, Zea Mays
ccgagggaaaaggacagcgagcccggacagcccagcgtcaacgtcaggtgcccgccccgggcggttcccagtcccagtcccactcccaccacggcccgggccactgcactgcgccatccaaggacgactggacgaggaagaaaaaggatttcgaaaaagcgacgctgccgggtatatatacggcgccggcgccgaggagagaggaccccggccgatcccgcacccctgactgtcagccgcgatccgctcttgtaggctccctccctctccgacccgcgtctccctcctcccactccactgctcctggtctctctctctctctccttctcctccccccgtccgtggccggagatcgacggtttccattttccagatcgcagttcattcagttgctctgttacctttacacggtctgcatgcctctattgtgtctgcagttttgcgtgcagcggcggagcaggagagatggcgtcggaggccaaggacgtgggcatcctcgccatggacatctacttcccgcccaactgcgtgctccaggaagagttggaaacacatgatggcgtgagcaaagggaagtataccattgggcttgggcaggaaagtatggcattttgcactgaagttgaggatgttatttcgatgagcttgacagtggtgaagtccctcctgaaaaattataacattgacccaatgtgcattggacgtttggaagttggcagtgaaacagtaatagacaagagcaagtctataaagacatggctgatgcagatatttgaggaatctggcaatactgatattgaaggagttgactcctcgaatgcatgttatggtggaacagctgcattgtttaattgtgttaactgggttgaaagcaagtcatgggatggtcgctatggacttgttgtttgcacagacagtgcggtttacgctgaaggtccggctcgccctactggtggtgcggctgctattgcaatgctgattggaccaaatgctcctatttgttttgaaagtaaatatagaggatctcatatggcccatgtatacgacttttacaagcccgatcttgcgagtgaatatccggtggttgatgggaagctatcacaaacatgctacctcatggcattggactcctgctacaatgtattttgcaaaaagtatgaaaaacatgaggggaagcagttttcaatttctgatgcagattatgttgtgttccattctccatacaacaagcttgtacagaaaagcttcgctcgtttgtactacaatgatttcttgagaaactgcagcacggttgatggagagtcaagggaaaaattggcaccctatgcaggcttgtcatctgaagaaagctaccagagtcgcgaccttgaaaaggcatctcagcaagtcgccaagaatctgtacgagaccaaggttcagccaacaacattgatcccaaaacaagttgggaatatgtatacagcatcactctacgcagctcttgcatcggttgtccatagtaggcatgaaactctggcaggccagaggattgttatgttttcgtatggcagtgggttgacatcaacaatgttctctttcatgattaatgaaggccatcaccctttcagtctgctaaacatcgcaaacatactggatatttccaagaagctgaaggcaaggcacgtggttcccccagagaaatttgtggaggcactgaaactgatggagcaccgctatggggcaagagatttcgtgacgaatcaagatacaagtctgctatccgcaggcacatactatctcacgcacgttgactccaagtacagaaggttctacgacgtgaaaggtgacggtgtcgccactgcaatgtccaacggccactgatctttcttctgcccgaagctgcaacaagtcaaataacagaggcaagtgtcctaagcatccttagattattatatctattaagaggggaagctcgagttatagattaatctatgcccagctgtaaggttgtaaagttagttagagctgcgcatgcttgtttagtaaaagctctgctgctcttcagttatttagcgaatcaagcacactgctgggctaataagaattgtaaacaataatctgcagaatcactggctacatccaggttatgctgatgaatgcacgatttcatgtttaacacgatcaatgcatctggttacatccaggttatgctgatgaatggacattttggttccatccccatatcctaatgtagtcactatataattcctttccctctttgatgaagtttc

SEQ ID NO: 156956 - DNA, 555 bp, Zea Mays
cgctgcctgggcacctgtggcaagtgcattgtgtatcctcatccatagcttacaatttgtgtttgtcatatgtatcccatgccttcactccaggacctggcaacaatagtcccaaatctagaacctgctggcttggaccttctctctgtaagtcaaatggatttctgttgatgatcatgaccgctgcatcatatatatcctctctgtattgaattcacctgtttccgtctgctgacagaaaatgcttaggtatgagccaagcaaaagaatcacagctaggcaagcacttgagcacgagtacttcaaggaccttgagatggtacagtgacctgctaaatgtgcttcgcgttgctttggcatttgtaattgtctgagctgagtcgctcattcctttttatgggcgtctgtactctctcattctctctgcatttttgtcgttcagctggatattttgaatctggtgtgttttgagatgtattaaggaatatcaaatagattaccgccttggtctctatttactgaaagtaaatatcctccatgtttatttcccccgaa

SEQ ID NO: 156957 - DNA, 1390 bp, Zea Mays
gttcggcagcagcgagggaaaagccaaagccccccagggcagcaggaagcaatagaagcgagcgaggcagcggcgtggggcgaggagtggaggacaccgatccccgccggagagcgcgtccatcccaaatggcgactgcagcttcgcccgccgctgcctttccccacatcctctccctctcctcctaatcccctcccaatccccccctctctctctcttcctcgccagctggttcgttccgcacccgccgccgcattgggtgccgaggagggacgcaatggagcagtacgagaaggtggagaagatcggggagggcacgtacggggtggtgtacaaggcgctggacaaggccaccaacgagacgatcgcgctcaagaagatccgcctcgagcaggaggacgagggcgtcccgtccaccgccatccgcgagatctctctcctcaaggagatgaaccacggcaacatcgtcaggttacatgatgttgtccacagcgagaagcggatatacctcgtcttcgagtacctggatctggacctcaagaagttcatggactcttgcccggagtttgctaagaatcccactttgattaagtcatacctctaccagatactccgtggcgttgcgtactgccattctcatagagttcttcaccgagatttgaaacctcagaacttgttgatagatcggcgtaataatgcactgaagcttgcagactttggtttagccagggcatttggaattcctgtccgtacatttactcatgaggtagtgacattatggtacagagctccagaaatccttcttggagcgagacagtattccacaccagttgacgtatggtctgtgtggctgtatctttgcggaaatggtgaaccaaaagccactattccctggtgattctgagatcgacgaactgttcaagatattcagggtgctaggtacaccgaatgaacaaggttggcctggagtcagttgtttgcctgacttcaagactgctttccccaggtggcaagctcaggacctggcaacaatagtcccaaatctagaacctgctggcttggaccttctctctaaaatgcttaggtatgagccaagcaaaagaatcacagctaggcaagcacttgagcacgagtacttcaaggaccttgagatggtacagtgacctgctaaatgtgcttcgcgttgctttggcatttgtaattgtctgagctgagtcgctcattcctttttatgggcgtctgtactctctcattctctctgcatttttgtcgttcagctggatattttgaatctggtgtgttttgagatgtattaaggaatatcaaatagattaccgccttggtctctatttactgaaagtaaatatcctccatgtttatttcccccgaa

SEQ ID NO: 156958 - DNA, 1414 bp, Zea Mays
aatggagtgagcaacgagggttgggttcggcagcagcgagggaaaagccaaagccccccagggcagcaggaagcaatagaagcgagcgaggcagcggcgtggggcgaggagtggaggacaccgatccccgccggagagcgcgtccatcccaaatggcgactgcagcttcgcccgccgctgcctttccccacatcctctccctctcctcctaatcccctcccaatccccccctctctctctcttcctcgccagctggttcgttccgcacccgccgccgcattgggtgccgaggagggacgcaatggagcagtacgagaaggtggagaagatcggggagggcacgtacggggtggtgtacaaggcgctggacaaggccaccaacgagacgatcgcgctcaagaagatccgcctcgagcaggaggacgagggcgtcccgtccaccgccatccgcgagatctctctcctcaaggagatgaaccacggcaacatcgtcaggttacatgatgttgtccacagcgagaagcggatatacctcgtcttcgagtacctggatctggacctcaagaagttcatggactcttgcccggagtttgctaagaatcccactttgattaagtcatacctctaccagatactccgtggcgttgcgtactgccattctcatagagttcttcaccgagatttgaaacctcagaacttgttgatagatcggcgtaataatgcactgaagcttgcagactttggtttagccagggcatttggaattcctgtccgtacatttactcatgaggtagtgacattatggtacagagctccagaaatccttcttggagcgagacagtattccacaccagttgacgtatggtctgtgtggctgtatctttgcggaaatggtgaaccaaaagccactattccctggtgattctgagatcgacgaactgttcaagatattcagggtgctaggtacaccgaatgaacaaggttggcctggagtcagttgtttgcctgacttcaagactgctttccccaggtggcaagctcaggacctggcaacaatagtcccaaatctagaacctgctggcttggaccttctctctaaaatgcttaggtatgagccaagcaaaagaatcacagctaggcaagcacttgagcacgagtacttcaaggaccttgagatggtacagtgacctgctaaatgtgcttcgcgttgctttggcatttgtaattgtctgagctgagtcgctcattcctttttatgggcgtctgtactctctcattctctctgcatttttgtcgttcagctggatattttgaatctggtgtgttttgagatgtattaaggaatatcaaatagattaccgccttggtctctatttactgaaagtaaatatcctccatgtttatttcccccgaa

SEQ ID NO: 156959 - DNA, 1652 bp, Zea Mays
agcagctgcggacttgcgagcccaggcaggagaggactcgtccacatctattccttccttgttcggccgcccttcctcagttggtcgtcccctcttaccattacttctcctcctccctcgccccgtcggcgggcggccattgacgactggatccttcattcttgttctcaggggaaggacgacccaagacaggaggaggaggaggaggaggaggaggaggaggaggaggaggaggaggaggaggaggaggacagtgccgccatgaccggaggaggggaggagcaggggaggtcgctgttcggcgtgtctctgacaaacaggcctaggtggcagcagttcatgatctgctcctcgggcttcttcttcggctacctcgtcaatggcatctgcgaggagtacgtgtacaacaggcttcagttcaggtacacagctacggctggtacttcacgtttgtgcaggggttcgtgtacctggcgctgatacggctgcaggggttcacggtgaagcagatggtgaacccgtggcggacctacgtgcgcctctcggcggtgctcatgggctccaatggcctcaccaagggatccctcgccttcctcaattaccctgcacagatcatgttcaagtcaaccaaggttctaccggtgatggtgatgggagccttcatccctggtctgaggcgcaagtacgcgttccaagagtacgtgtcggccgtgatgctcgtcgtcggcctcatactcttcacgctcgcggacgcgcagacgtcgcccaacttcagcatggccggcgtggccatggtgtccggggcgctcgtcatggatgctttccttggcaacctgcaagaagcaatcttcaagatgaacccggacacgactcagatggagatgctgttctgctccactgtcgttggccttccgttcctagcggtgcccatggtgttaacaggagagctcgtgacggcttggacttcctgctcccagcatctgtacgtgtacgcggtgctggtgttggaggcgatggccacgttcgtcggccaggtctccgtgctctccctcatcgcgcttttcggtgcagcaaccacagccatggtgacgacggcgaggaaggcggtgacgctgctgctgtcgtacctgatattcaccaagcccctcacggagcagcacgcgacggggctcctcctcataaccatgggcatcgtcatcaagctcctgccggagaacaaggagagacgcccgcgccggctgcccaagaatgacgacgacgacaagccccgggagagcagagaagcgggggaggaaacagcatgactgctgctatagacccgacacccgagcaaagcagaactgacgccagctcgatcagcaaccctagaagaaattctcagtcctccaaaacagcaatcccaggaggaggatgggatatacatgcaggatagagcactacatacagtaataataacctttttcctcgctcctcccctcgcttttctcatgtgctgtggttaatgttaattgtgcacttcgctctaacatcttaagctttttataaaggcaagggccagaggtctgaattctaattagcgcaatatctaaggtcttgttcagttattcctatcctatgtggattgtatgagattaaaaaaaatttataaaaga

SEQ ID NO: 156960 - DNA, 1011 bp, Zea Mays
cgcaggcacaacaccttgccctctttgctagggatctcaaattctggtggctggtgtatgtagatctcctcctttaagtcgccgttaaggaacgccgactttacatcgatgtgatgaacacgtcggcgctcctgggctgccagcgcgaggagtcgcacggattttgtcagtacctcaagattgagggtttttatgcaaaataggcatagccatgtgttggcctgcggcacatccgcatagctccaaatgctctcctgtgagcaaacacaaacacgagtaaacctgatgctctaagattttcccatttgattatgaatgctctaataaacatcaaaagctatctcatcatatgtttttatggcataattttgtaacattttggcactttttttaatgtagattgggttgccgcaaggtgtgcaaatgttgaaaattttcaaggaacagcctcagggaacatcaattctggatgattttgatttttatgaagaaaaggcgaatgcacgccgcacccaaaagagaggaaattcagagtcgacatatggagctcgattctctgatgactcgaaatctattgaaaatttggaggcaaacatggagagttggagtttgttcgagactttggagtaatgcaaatatagatatctgcacaactgaaataaagatcaagatgggtcagtgaactagttgaaggcactgacgctccttcaaagtgtttatatggttgcaattgaaactgcttataattgttatatagtgtttacgtagaagcacggatgtgctggtaaatacagccccggtgcaattttaacaccagacgtttcctgaaacatgtttactttgatatattatagaattccacagttttgttgttttggtgctctcctacgtgctagagtcaatcttattggcatttcacggttaggaacagaaaacccaagaatagctaggaatatcttgcttcaggacacaacggtagcctgttgtggtaacagatgaggacataaacgc

SEQ ID NO: 156961 - DNA, 2382 bp, Zea Mays
atgcccccccaacccttgcactgcctgtatctcgcctgcacgcgtggaggatcagatgtgacagcgtttgacaaagaccaagagggattcagggatgtccccatgccttcgattcagacggctggctctgtcccacatcttcgggttgagaagctaccgatgcaggaggtttctgatccaccagaaacagtaaggaaagcagaaacaaaaaatattacttccattgggaaggatgtgattttcgagcaagatccatgctcttcatatcagttatggggcagtatgaaatttgaagaagatggccatttgctgtctcaggcaaagagggatttgtcacatttggattatagagcacagtctgccgacaccaaatatgttactgaacttgggtcacatgcatgtttgaaggatccattgccaatgggaagagattatcataggcagaagctacaattttctacttcagactgttcttttgagaaggcttctgcattagaagcagcatcaagtagcccagatgcattagggacaatgagaaccaaaatcaaatccagcaccctcagtgcaagtccagattatctttcgtcttatcctactgctgctccttgcatgcggaagtgtccaggagcagttgaacttgatcacggtttgggtcattcagaacattccaacagaagatcagaccaatttactttattttcaagccgtaatggtcgatctgtagaaaaatgcaaagagatggttcaatatgccagagggttccaccatgcagatgagatcaatcatgttccatttcaatggtgctttgaggatgaaggtccttcagtatcaagaggcctgcagtatggcgatgagatcccttctttatctaggaagaagtataacgtggcaccttcacgctcaagtcagtggcactatggtcctcaaaccgcactgtcctcaaggagacccgactatggtgatgagatcccgtcactctctcttcactatggttaccgagataggacccatttgcgttctggtaattggtgccatgatgctgaggcacgtataccgtcaagataccagcaaggtacttctcatggcaatggtcactcaaggaattgtttttccaggattaataccaacgagcaagccaaagttatcacaagcaaacatacctttgcaaaacctaggatgattaacagaaactgtagtgaccaacataggatcaatatgaaaggtaatcgctggagaaattctgaggatttaatggaccaagttcgtgggccgagggcaaataaattgaacaatgcttcagtatcctccactgtgaaagatatcacaagtccattgatccgtagaaatcagtataatagatcagatttttcagttcaatataatcaggccaagttttttatgataaagtcatatagtgaagatgacattcataaaggtatcaaatacaacgtttgggcaagtacaccaaatgggaacaataagctggatgctgcataccatgaagctcaaaatttaatggacagtggggaaaggtgccctgtcttcctattcttctcggttaacaccagtggacagttcgtaggtttggctgaaatgttaggtcctgttgatttcaagaagaccatggatttttgggaagaagataaatggagtggctttttccctataaaatggcatattataaaggatattccaaatcggttgttcaaacatataattcttgaaaacaatgacaacaggattgttacttttagcagggacacacaggagattgggttgccgcaaggtgtgcaaatgttgaaaattttcaaggaacagcctcagggaacatcaattctggatgattttgatttttatgaagaaaaggcgaatgcacgccgcacccaaaagagaggaaattcagagtcgacatatggagctcgattctctgatgactcgaaatctattgaaaatttggaggcaaacatggagagttggagtttgttcgagactttggagtaatgcaaatatagatatctgcacaactgaaataaagatcaagatgggtcagtgaactagttgaaggcactgacgctccttcaaagtgtttatatggttgcaattgaaactgcttataattgttatatagtgtttacgtagaagcacggatgtgctggtaaatacagccccggtgcaattttaacaccagacgtttcctgaaacatgtttactttgatatattatagaattccacagttttgttgttttggtgctctcctacgtgctagagtcaatcttattggcatttcacggttaggaacagaaaacccaagaatagctaggaatatcttgcttcaggacacaacggtagcctgttgtggtaacagatgaggacataaacgc

SEQ ID NO: 156962 - DNA, 1927 bp, Zea Mays
catcgagcaaggcagcaatcacaaagcggaacggcaccctagggcagcgggagcccgcagcgcacaccgtcgtgccgccgtccgcctgcccccccatcgccctgcgccggtgctccaggcgcgtctcgcccgactcagctacgcacttccgctggccacccgcggcctgttgggcggctcgacctcgttcccgcccttaccctcgtcgcatcggcctcgcagcctcgatcgaggccgacgacctccagcgacctactgcccaggcccaggtagagcgctaggggcctccagtcaaacccatccttgccgttgccggccgatttggtttcttgctttagagatgcaggaggtttctgatccaccagaaacagtaaggaaagcagaaacaaaaaatattacttccattgggaaggatgtgattttcgagcaagatccatgctcttcatatcagttatggggcagtatgaaatttgaagaagatggccatttgctgtctcaggcaaagagggatttgtcacatttggattatagagcacagtctgccgacaccaaatatgttactgaacttgggtcacatgcatgtttgaaggatccattgccaatgggaagagattatcataggcagaagctacaattttctacttcagactgttcttttgagaaggcttctgcattagaagcagcatcaagtagcccagatgcattagggacaatgagaaccaaaatcaaatccagcaccctcagtgcaagtccagattatctttcgtcttatcctactgctgctccttgcatgcggaagtgtccaggagcagttgaacttgatcacggtttgggtcattcagaacattccaacagaagatcagaccaatttactttattttcaagccgtaatggtcgatctgtagaaaaatgcaaagagatggttcaatatgccagagggttccaccatgcagatgagatcaatcatgttccatttcaatggtgctttgaggatgaaggtccttcagtatcaagaggcctgcagtatggcgatgagatcccttctttatctaggaagaagtataacgtggcaccttcacgctcaagtcagtggcactatggtcctcaaaccgcactgtcctcaaggagacccgactatggtgatgagatcccgtcactctctcttcactatggttaccgagataggacccatttgcgttctggtaattggtgccatgatgctgaggcacgtataccgtcaagataccagcaaggtacttctcatggcaatggtcactcaaggaattgtttttccaggattaataccaacgagcaagccaaagttatcacaagcaaacatacctttgcaaaacctaggatgattaacagaaactgtagtgaccaacataggatcaatatgaaaggtaatcgctggagaaattctgaggatttaatggaccaagttcgtgggccgagggcaaataaattgaacaatgcttcagtatcctccactgtgaaagatatcacaagtccattgatccgtagaaatcagtataatagatcagatttttcagttcaatataatcaggccaagttttttatgataaagtcatatagtgaagatgacattcataaaggtatcaaatacaacgtttgggcaagtacaccaaatgggaacaataagctggatgctgcataccatgaagctcaaaatttaatggacagtggggaaaggtgccctgtcttcctattcttctcggtcagtaaggataaggataaaatgctttcttcaaattatttattatctttttgcctgtttgtaggttgtaacagttgtacttgtagcagcaaagactactatgatttgtatattagaggccagtgatcctaatatcttgtaaaatcaatttttgagacatcactgcttaagatacttaattgagacatc

SEQ ID NO: 156963 - DNA, 327 bp, Zea Mays
atggcgctttatttgaccgagaacgttgcctgcactgggtggtactcttggaaggcttgtttagatccaagaacttgcggcaatgaaaaatcgcaaggtaggcaggtacctgttgagggcgagggtggcggcgatgtggctagggcgcactccgcgatcgacgaggccggtgatggtatgggtggcgaaagaaggtgttgtgattggatatacgagcgtgctcaggcgacggaagatgcggcgaggagggcggcggacagaggtatgggaggcgacttgtgggagggcacagggaaaggcggcgtggaagtcctaggtccgggttaa

SEQ ID NO: 156964 - DNA, 2145 bp, Zea Mays
atgtgggtgacgtcgatgccgcaggtttgggacgaggagggcgcggccaagggcggcgcggtgaccccggcgccggccgcggccatgctgggctcgctggcggggtggctgtcccggaccgtgcagccgcagccgccggcgccccgggtgtgcggcaccgcggggggcccgcccgtgacggcgcccaggctcaggctccgcgacggccgccacctcgcctactgcgagagcggcgtgccccgggaccaggccaggttcgccgtcgtcttctcccacggattcaccggctcccgcgaggacagcgtccgcgcctcccagggccgctggacagcgacctccgtatactgtttgtccacatgcaatgcaaagctggagtttggcgagctacagctagtcagctacacagggtcgctgccattggccaggcgtctatcggttggctgccacttccactcccaggcagcggacggagcattgcgtcgcgacgcggtcatcgcggcgagcgacgcggactgggcgctcattaggataggactagtagtaggacccttggaggagcagtcgcgtcacggacatgcggacacagcgggatccagcaccaagagcctaggaaggccaggggcaggggtcctcgccctcgccgcaatggagctgctggccaaggcgcccgtgctgggctgcgccgggaagatgcagaggcagcggcaacgggggtccgcgctgggcaggtggatttgccgtgccgtggcgccgccgagggccgcgccagccacgccgccgagggtgcggctcagggacggccgccacctggcgtacgccgagtccggggccagcaaggaggacgcgaggttcaaggtcgtcttctcccacggcttcaccggctcccgcctcgacaccgtccgcccggcgccggaagttgcggaggagctgggcgtgtacatggtgggtttcgaccgcgccgggtacgggcagagcgaccccaaccccaaccggtccgtcaagagcgcggcgctggacgtggaggagctcgcggacgcgctggggctcggccccaagttctacgtcatcggcatctccctcggctgccatgccgtctggggcgccctcaaatacatccccgacaggatcgccggcgcggcgatgatggcgccggtggtgaactactggtggccagggttctcgccggagctggcggcggaggtgtacgcgaagcaggaggtgggcgaccagtgggcgctgcgcgtgtcgcaccacgcgccgggcatcctccactggtggatggagcagagctggctgcccacctccacggtggtggccggcaccacgccgctgcccaacgagcgcgacgccgagatccggagcaagatgaaggcggacggcacgttccagcagaagcgggagcaggcgacgcagcaggggatccacgagtcctactaccgcgacatgaccgtcatgttcggcaagtgggagttcgaccccatggcgctgccggagccgccgtgccccgtgcacctctggcagggcgacgaggacggcctcgtccctgtcgtgctgcagaggtacctcgccggcaagatcggatggatcaactaccatgaactccctggcaccggccacttcctgtcgtcggtgcctgggctcggagacaacgtccttaggacccttttcagtgacaagcagtaaacaaacaatcctccctcacgacgtatcgaagctttcgagcatggtggtggtggtggcgcattagttcattttattattgtaaaggcccgtggttgtcgctgattagagatgataaaataatggtgatgtagatgcaagaccttaaagtgaaatactatatcagagatgtaatatacatacatagtgatgacctttctgttttcattataaaacaaattgtctagtcaagtgtgtgtgtgtgtgttttgccacgataacaaaggtgtcgctaaaaagataaacccagttaatcgcatgacagatcaaaattcgctttgtggcgaatatccatatacagactctctacatgctcgtgcaaatggatatccaggagcaggttaggctttagcttctccagatgacccaagcaagatccatagcgactgaaacatagcaatttcaattgttaaaaaaaaaaagaaa

SEQ ID NO: 156965 - DNA, 1914 bp, Zea Mays
cgcgctgggctggaccaatgaagcagcgccccacgcgtgaccgaccaggaacggctgccccgccgagtcaaaaggccgccgagctaggtgagcgagttccgggacgggcggacggacggtggcccacccaccaacctctgaccccgacccggcgcgtctcgccctgaagcttaaatactagtcttggctagctactatattatactagccgtctagccctcgagccgtccagggcgcggcgacgacacccacaggccacagccacaggccacacgacaccaccgctcggtctcggcgtccgcctccacgcacgcttcctcccgcaggccatccacccgatccgatccgatccgagcgtccaccatgtgggtgacgtcgatgccgcaggtttgggacgaggagggcgcggccaagggcggcgcggtgaccccggcgccggccgcggccatgctgggctcgctggcggggtggctgtcccggaccgtgcagccgcagccgccggcgccccgggtgtgcggcaccgcggggggcccgcccgtgacggcgcccaggctcaggctccgcgacggccgccacctcgcctactgcgagagcggcgtgccccgggaccaggccaggttcgccgtcgtcttctcccacggattcaccggctcccgcgaggacagcgtccgcgcctcccaggaagttgcggaggagctgggcgtgtacatggtgggtttcgaccgcgccgggtacgggcagagcgaccccaaccccaaccggtccgtcaagagcgcggcgctggacgtggaggagctcgcggacgcgctggggctcggccccaagttctacgtcatcggcatctccctcggctgccatgccgtctggggcgccctcaaatacatccccgacaggatcgccggcgcggcgatgatggcgccggtggtgaactactggtggccagggttctcgccggagctggcggcggaggtgtacgcgaagcaggaggtgggcgaccagtgggcgctgcgcgtgtcgcaccacgcgccgggcatcctccactggtggatggagcagagctggctgcccacctccacggtggtggccggcaccacgccgctgcccaacgagcgcgacgccgagatccggagcaagatgaaggcggacggcacgttccagcagaagcgggagcaggcgacgcagcaggggatccacgagtcctactaccgcgacatgaccgtcatgttcggcaagtgggagttcgaccccatggcgctgccggagccgccgtgccccgtgcacctctggcagggcgacgaggacggcctcgtccctgtcgtgctgcagaggtacctcgccggcaagatcggatggatcaactaccatgaactccctggcaccggccacttcctgtcgtcggtgcctgggctcggagacaacgtccttaggacccttttcagtgacaagcagtaaacaaacaatcctccctcacgacgtatcgaagctttcgagcatggtggtggtggtggcgcattagttcattttattattgtaaaggcccgtggttgtcgctgattagagatgataaaataatggtgatgtagatgcaagaccttaaagtgaaatactatatcagagatgtaatatacatacatagtgatgacctttctgttttcattataaaacaaattgtctagtcaagtgtgtgtgtgtgtgttttgccacgataacaaaggtgtcgctaaaaagataaacccagttaatcgcatgacagatcaaaattcgctttgtggcgaatatccatatacagactctctacatgctcgtgcaaatggatatccaggagcaggttaggctttagcttctccagatgacccaagcaagatccatagcgactgaaacatagcaatttcaattgttaaaaaaaaaaagaaa

SEQ ID NO: 156966 - DNA, 2721 bp, Zea Mays
cgcgctgggctggaccaatgaagcagcgccccacgcgtgaccgaccaggaacggctgccccgccgagtcaaaaggccgccgagctaggtgagcgagttccgggacgggcggacggacggtggcccacccaccaacctctgaccccgacccggcgcgtctcgccctgaagcttaaatactagtcttggctagctactatattatactagccgtctagccctcgagccgtccagggcgcggcgacgacacccacaggccacagccacaggccacacgacaccaccgctcggtctcggcgtccgcctccacgcacgcttcctcccgcaggccatccacccgatccgatccgatccgagcgtccaccatgtgggtgacgtcgatgccgcaggtttgggacgaggagggcgcggccaagggcggcgcggtgaccccggcgccggccgcggccatgctgggctcgctggcggggtggctgtcccggaccgtgcagccgcagccgccggcgccccgggtgtgcggcaccgcggggggcccgcccgtgacggcgcccaggctcaggctccgcgacggccgccacctcgcctactgcgagagcggcgtgccccgggaccaggccaggttcgccgtcgtcttctcccacggattcaccggctcccgcgaggacagcgtccgcgcctcccagaaaccgcgaatcaaggtcggtttcgatgagcccggatcataggtgcaaggcatcgaacccgtgactattctctccttggcgtcgtcgtcgtccttgttggcgatggcaatgtcagggccgctggacagcgacctccgtatactgtttgtccacatgcaatgcaaagctggagtttggcgagctacagctagtcagctacacagggtcgctgccattggccaggcgtctatcggttggctgccacttccactcccaggcagcggacggagcattgcgtcgcgacgcggtcatcgcggcgagcgacgcggactgggcggtgggggggccgtcacgtatctcgcccgggaacgcctcccgcatttttttacccctagctcattaggataggactagtagtaggacccttggaggagcagtcgcgtcacggacatgcggacacagcgggatccagcaccaagagcctaggaaggccaggggcaggggtcctcgccctcgccgcaatggagctgctggccaaggcgcccgtgctgggctgcgccgggaagatgcagaggcagcggcaacgggggtccgcgctgggcaggtggatttgccgtgccgtggcgccgccgagggccgcgccagccacgccgccgagggtgcggctcagggacggccgccacctggcgtacgccgagtccggggccagcaaggaggacgcgaggttcaaggtcgtcttctcccacggcttcaccggctcccgcctcgacaccgtccgcccggcgccggtcagtgtcccgccccggcctctggatctggctctgcacggaaaagattcgagcttttgtggatccgcttgtgttctcccccccagttcctgtacacatcgccagccagcgcgattgtgcattgcgtggttcgccggtgccatccgtgcgaccacacgaacatccttactgtaggcgagttcgtcttcgatcgggccgatgcaatcgactccgtatctcacagccgctccgtatcctcaactgaatgaatttgtttctactttctaggaagttgcggaggagctgggcgtgtacatggtgggtttcgaccgcgccgggtacgggcagagcgaccccaaccccaaccggtccgtcaagagcgcggcgctggacgtggaggagctcgcggacgcgctggggctcggccccaagttctacgtcatcggcatctccctcggctgccatgccgtctggggcgccctcaaatacatccccgacaggatcgccggcgcggcgatgatggcgccggtggtgaactactggtggccagggttctcgccggagctggcggcggaggtgtacgcgaagcaggaggtgggcgaccagtgggcgctgcgcgtgtcgcaccacgcgccgggcatcctccactggtggatggagcagagctggctgcccacctccacggtggtggccggcaccacgccgctgcccaacgagcgcgacgccgagatccggagcaagatgaaggcggacggcacgttccagcagaagcgggagcaggcgacgcagcaggggatccacgagtcctactaccgcgacatgaccgtcatgttcggcaagtgggagttcgaccccatggcgctgccggagccgccgtgccccgtgcacctctggcagggcgacgaggacggcctcgtccctgtcgtgctgcagaggtacctcgccggcaagatcggatggatcaactaccatgaactccctggcaccggccacttcctgtcgtcggtgcctgggctcggagacaacgtccttaggacccttttcagtgacaagcagtaaacaaacaatcctccctcacgacgtatcgaagctttcgagcatggtggtggtggtggcgcattagttcattttattattgtaaaggcccgtggttgtcgctgattagagatgataaaataatggtgatgtagatgcaagaccttaaagtgaaatactatatcagagatgtaatatacatacatagtgatgacctttctgttttcattataaaacaaattgtctagtcaagtgtgtg

SEQ ID NO: 156967 - DNA, 853 bp, Zea Mays
cgcgctgggctggaccaatgaagcagcgccccacgcgtgaccgaccaggaacggctgccccgccgagtcaaaaggccgccgagctaggtgagcgagttccgggacgggcggacggacggtggcccacccaccaacctctgaccccgacccggcgcgtctcgccctgaagcttaaatactagtcttggctagctactatattatactagccgtctagccctcgagccgtccagggcgcggcgacgacacccacaggccacagccacaggccacacgacaccaccgctcggtctcggcgtccgcctccacgcacgcttcctcccgcaggccatccacccgatccgatccgatccgagcgtccaccatgtgggtgacgtcgatgccgcaggtttgggacgaggagggcgcggccaagggcggcgcggtgaccccggcgccggccgcggccatgctgggctcgctggcggggtggctgtcccggaccgtgcagccgcagccgccggcgccccgggtgtgcggcaccgcggggggcccgcccgtgacggcgcccaggctcaggctccgcgacggccgccacctcgcctactgcgagagcggcgtgccccgggaccaggccaggttcgccgtcgtcttctcccacggattcaccggctcccgcgaggacagcgtccgcgcctcccaggtaccgaccgatccaagcaccaccaccaccaccttgtctacctcccccatctgctgctggacccgtacgccggccttcgcttcactcgcccgccaggttcatggacgtacgggagagatagatctggagcgcgcctctgtcggtgtcggtgtccttggaacgaagacgacct

SEQ ID NO: 156968 - DNA, 2261 bp, Zea Mays
caagcacacgccagccaacagtaaacaacttgatttccatccccaccagcacaagcacacggacccggcggcggtgggcggtggcgcacccacaccccagcaccagcaagcaggtgcagtcagtgtgaggtgcggcccggccgaagatttggcgcatgcacactcactcactccagtgcccactgcccactgcccactgcccgacgaggaagtttcacgatcccaacccgtataaatcgacgccgcgagggggagcgacgagcgatccccgtaattaacctgtcccagccgcaccgatccaccccccctcggcctcggcctccctccggccatggaggtgttctactacgtcgtgttcggcgcgctggccgccgtcgtggcggggctcgagctcggcaagagcggcaaggaccgcgtcgccaccacctccgcattcaactccttcaagaacaactacgtcctcgtctactccctcatgatgtccggggactggctgcagggcccctacgtctactacctctacagccagtatggcttcgacaagggcgacatcggccgcctcttcatcgccggcttcggatcctccatgctcttcggcaccatcgtcggctccctcgccgacaaacagggccgcaagagggcctgcgtcacctattgcatcagctacatcctcagctgcatcaccaagcactcccccgagtacagggtcctcatgatcggccgcatcctcgggggcatcgccacctcgctgctcttctccgccttcgagtcctggctcgtcgccgagcacaacaagagaggctttgacccgcagtggctgtccataacattctctaaagccatcttccttgggaacggcttaattgccattgtatctgggctatttgcgaaccttcttgctgagaacttgggctttggtcctgtggctccattcgatgcggctgcgtgctttctggcgattggcatggctatcataatgtcctcatggagtgaaaactacggagatccatctgaaagcaaggacctgatggcccagttcaaggttgcggctaaggcaattgcgtcagatgaaaagattgcattactgggagccatacagtcattgtttgagggctccatgtacacatttgtcttcctatggactccagcattgagtccaaatgaagaagacattcctcatggttttatttttgctacattcatgctgtcatccatgctgggtagctccatcgcgtcacgtctattagcccgaaagctcaaggttgaaggctatatgcagatcgtgttctcgatatcggctgtcacccttgtcctccctgtcgccaccaacatcttagtgccaacgtcttctgtgaaaggaggcagcgtatcaattggaggttctcttcagcttcttggtttctgcacctttgaggcatgtgttggtatattctggccgtcaatcatgaagatgagatctcagtacattcctgaggaagcgagaagcacaatcatgaacttcttccgcataccactcaacttatttgtttgtgtggtgctttacaacgcaaggagccattccctctcccaactactatgttctctttagttgtgctggcaagaattatacagaaatatcagcacacaagtaacgctttgcctgtggacatggtctttgcaggtgaatgcattccctatcactgtcatgtttgggatgtgttctatcttcctcttcatggcagcaatcttgcagagacggctgatggttgtctctgatcaagtacacaaatcatcaactaaagcacaagaaatgatcggggaagatgagccactaaatccttagatgtcgacagaaccatacatgcgaaatcagatattgacgacgacgtccatactccatactgcatttcgtttcgtcacctgtgcaataagatggacgtcaaaaccatgtagtctagtggttttcgtttctgtagtgtagatttgaccaggctgctaagtttgcacctgtcccgagaagattagatgagcaagtcaatcgatattggctattcgcattgttgtttcttttttttaaaaaaagatgttcgctttaaagtttaaacgatacggtatatatccttgtaagtgttgcattgctgcatctgatgacaattctagtggtgctgttactgactgttgagggctctctctacttggtcgttgtaagaactgttgcttcttaatgaaaaacgggctcaataaattcagtagaagcctgcagttgcagtaatcatacaaca

SEQ ID NO: 156969 - DNA, 2147 bp, Zea Mays
caagcacacgccagccaacagtaaacaacttgatttccatccccaccagcacaagcacacggacccggcggcggtgggcggtggcgcacccacaccccagcaccagcaagcaggtgcagtcagtgtgaggtgcggcccggccgaagatttggcgcatgcacactcactcactccagtgcccactgcccactgcccactgcccgacgaggaagtttcacgatcccaacccgtataaatcgacgccgcgagggggagcgacgagcgatccccgtaattaacctgtcccagccgcaccgatccaccccccctcggcctcggcctccctccggccatggaggtgttctactacgtcgtgttcggcgcgctggccgccgtcgtggcggggctcgagctcggcaagagcggcaaggaccgcgtcgccaccacctccgcattcaactccttcaagaacaactacgtcctcgtctactccctcatgatgtccggggactggctgcagggcccctacgtctactacctctacagccagtatggcttcgacaagggcgacatcggccgcctcttcatcgccggcttcggatcctccatgctcttcggcaccatcgtcggctccctcgccgacaaacagggccgcaagagggcctgcgtcacctattgcatcagctacatcctcagctgcatcaccaagcactcccccgagtacagggtcctcatgatcggccgcatcctcgggggcatcgccacctcgctgctcttctccgccttcgagtcctggctcgtcgccgagcacaacaagagaggctttgacccgcagtggctgtccataacattctctaaagccatcttccttgggaacggcttaattgccattgtatctgggctatttgcgaaccttcttgctgagaacttgggctttggtcctgtggctccattcgatgcggctgcgtgctttctggcgattggcatggctatcataatgtcctcatggagtgaaaactacggagatccatctgaaagcaaggacctgatggcccagttcaaggttgcggctaaggcaattgcgtcagatgaaaagattgcattactgggagccatacagtcattgtttgagggctccatgtacacatttgtcttcctatggactccagcattgagtccaaatgaagaagacattcctcatggttttatttttgctacattcatgctgtcatccatgctgggtagctccatcgcgtcacgtctattagcccgaaagctcaaggttgaaggctatatgcagatcgtgttctcgatatcggctgtcacccttgtcctccctgtcgccaccaacatcttagtgccaacgtcttctgtgaaaggaggcagcgtatcaattggaggttctcttcagcttcttggtttctgcacctttgaggcatgtgttggtatattctggccgtcaatcatgaagatgagatctcagtacattcctgaggaagcgagaagcacaatcatgaacttcttccgcataccactcaacttatttgtttgtgtggtgctttacaacgtgaatgcattccctatcactgtcatgtttgggatgtgttctatcttcctcttcatggcagcaatcttgcagagacggctgatggttgtctctgatcaagtacacaaatcatcaactaaagcacaagaaatgatcggggaagatgagccactaaatccttagatgtcgacagaaccatacatgcgaaatcagatattgacgacgacgtccatactccatactgcatttcgtttcgtcacctgtgcaataagatggacgtcaaaaccatgtagtctagtggttttcgtttctgtagtgtagatttgaccaggctgctaagtttgcacctgtcccgagaagattagatgagcaagtcaatcgatattggctattcgcattgttgtttcttttttttaaaaaaagatgttcgctttaaagtttaaacgatacggtatatatccttgtaagtgttgcattgctgcatctgatgacaattctagtggtgctgttactgactgttgagggctctctctacttggtcgttgtaagaactgttgcttcttaatgaaaaacgggctcaataaattcagtagaagcctgcagttgcagtaatcatacaaca

SEQ ID NO: 156970 - DNA, 1202 bp, Zea Mays
cacaaccacttggtgggcgcaccgcagctgagcctgtagagcacgagcgcgcccgtgagagtggaaaagagagggctggccccgccggcctgatcagatcagcggaaggcacaccgagctcttgcctgcctccactccacccaatggcgatgccgagggcgccgggcgcggggtcgctccgcttcctgggcctgctgaagcagccggagtccgacgccgccgccccattcgagctcgacgagcgcgacgtgttgtggccgacgggcggggggcagcaggacggttgggccgccccgccggcgaggcggcgtcgcgcgcacgccatgccgctgtacagcttcgggctgtcgtcgctgctcgccgaagactgcggcggtggggtgcccgtgcccgtgccggggagggcgatggcgatggcgccgagcgccgcgccgaggcagtcggcgccggtgcgcgtgccggcgccgtggccaggcggcaggagggccgacgaggacgaggaggacggcgaggaggtggtgccgccgcacgtggtcgcggcgcggcgccacgcgcggtcgtcgtccgtgctggagggcgccgggcgcacgctcaagggccgcgacctccgcagcgtccgcaacgccgtgctccggcagaccgggttcttggacctgtgaacgtccgcaggcagccatggcacaagacgccgatcgatacattgttgtgtgtctgtgtgtcgttctagcgtcccttacaagttacacatgaagaactgaactcaatacgttcaatcatccgatgggtctgctcttcttctccgcctgtgcacaaagcctccgactttttttccacctgaatgcagcaccaacccaaccgccaatatttttctcctctgctctgctcccaccggcggcggcggcggggttggtggctggcggcgtgacggcataatgcggtttcgtcagagatcggagatgggaaaaaggcaggctcagatccccatgccatgccgtgattgtccacaagctaaagctagcctgcacaggcaggcggtctccagatccatgccgtctctcgtgtgcgccagccgtcctttttacatctcgtcgtttggtgcagcgtgggatatgatgtgacgtgaggtccccggtggcggcttcaatgttccaggagctaaacagtttcatgatttggatgttctcgtcgacattaacgttgtc

SEQ ID NO: 156971 - DNA, 7061 bp, Zea Mays
atggaggccgccgcgcccgacggggccggcaaggcatccccggcccccgaggagcccgactggccgcccgagctccgcctcctcgcgccgccgccagctgcggggacggacgatccgcagttcctcagctcgatcatcggggacgcggccgcccctcccccgccgatgccgccgctcgcgcagaagcggaaacgggggaggccgcccaagaggaaagacggcgcgggcgcggtggtaccggcccggcccgccaggcggagggaggacgaggaggaggtcgtctgcttcatctgtttcgacgggggcaacctcgtcgtctgcgatcggaggggttgccccaaggtctaccatccggcgtgcatcaagcgtgacgaggcattcttccagtcgcggagcaagtggaactgcggctggcacatatgcagcagctgtgaaaaggcagtgcactacatgtgctacacttgtacatactccctctgcaaagtgtgcatcaagcagggtaaattcttcagtgtcagggggacaaagggcttctgcgacacatgttatgggactatacttctcatagaatccaaagatgaaagtgcaataaaggttgattttgatgacatactcagctgggagtacctgttcaagctatattggttagatctgaaagggaagctttcattaacattggaagaacttactattgccaagactagatggaatgttcctagcacttctgctaggaaagaaaaagatgagtcgtctgatgacctgtatgacgctaataatgatgatgatgctggtactgactgctcctcaggaaaacgaaggcgaactaattcaaggaaaaagggtcaaaaatgccggaaggtaaataaagattgtagtgttcctgcaaaaaaggtcgagcttccaattacaaatactgagagcgttcccacagaagtgacaaatgaacgagtgccattgccagtagacacaaaagtaccaaatggatgggtacccttgccagtagacacaaaagtaccaaatgaatcagtgcccttgccagcaaacacaaaatgggcatcaccagagctactggagtttgtaggacatatgagagatggcgatcaatctttcatttctcagtttgatgttcagactcttctgcttgattatatcaagaagaataaccttcgcgatcctcagaggaaaagccaaattatttgtgacttgagacttcatcgcttgttcaggaaagcacgggttgctcactttgagatgttaaagcttttggaaatgcattttcttatgaatgagacttcaacagtaactgatagtagacaagtgactatcgatctcaattcagcttatgtagataccaatggatacaatgacatggctgcaaaattttctcctgataagaggagaaagatccatagaaagatggaaagagatacccaagttaatcttgaggactatgcagcaattgacatgcataatataaatttgatttttatgaggcgcagcctgatggaggatttagttgatgatgccaaattctcagacaaaattcatggtggttttgtgaggattaaaatttctgatgtgtatcagaaacaagacatataccgtctagtaaaagttactggaacgcacaaggttccagaaaagtatagcattggaaagaagatgacaaattttgcactcgagatattgaatttaaacaaaaaggagattattacaatggatacaatatctaatcatgattttacagaggaagagtgcaaacgtttaaggcagagcatgaagtgtggcgtgattagcagactaaaagtgggggatatcctagagaaagcaaagatattgcaatctgtaaaagtgaatgattggtttgaaaatgaaaagcagaggcttgggcatcttcgtgaccgtgcaagtgaaactggacgcagaaaggaatatcctattagaccatactatgatgtgcttctcaacgattctgaggaaagaacccgcaggattaatgaagttctggaagtgcatgttgactcacatatggatcctaattatgagtctgctgaagaaacagatgagaaaagaactgttggaaagtcggtagatcggacaagaccagatacaaccatatcacgacgaatatcaagatatcttagcactatgcagaaccatcctcaaaaagtttctgattgtagccaccatccaaaaaacttgtcaacagaaagtacaatatgtggatcaggagcaagaagtttggagaacagcacagcaaacagaactatgtatgaagctggatcattttcatcttctggagtaacaatgtcaaatgacacggagccggagaaagtctggcactacaaggatccttctgggaatgttcagggtccatttactcttttgcaactatcaaagtggacaagttacttcccacgtgatctgagagtatggcttacatttgagagtgaggagagatctttgctgttgactgaagtgctttcaaaacagcagaaagatttcactcaggctgcatcacatacaagcagcaaggcaacgctggttggcactggacatacaaggaacaaccctagtgtggatcagaccaatgctttctcccctgctggtcatagtgtggttagttcttcaggaataactgttcagtataataagtattctgttccagaaagggaaagtgtgtactctccagatgatagcttgtcgctgtcaactagttcggttccgccgaaggatgcttgtactgtgaatagccaaacacactgccagaataagcattctgttttcattcaatctcctggaagtgcatatgggcacacagacttgaaccatgatggaatacagggaggatgctctggtgaatcaaaccaccatcacagcagcggagccctatggagtcctaccgtggtacaggtgagttgtggacatggtaatgtggaatctcatcagagccagcatgtttcctggtcacaaagtcaacatgaatctaaaaatagttcacaacgacctgttaaagatctgaattcaaggcgggatctatcgaaaaacctacctactcaacgtatagggaaagatgtctccagtcctttgtttgcttgtgcttggagtccggccgagtcgaggacagcttcaagtcaacatgacggctcttgcttaagttcaacaactaatccaaactttctcgatgaacttcattattctattgcttccgcaaagcctaagagctgcgctccagcaacccctattgaagacagaggttctagttcaccatcaggcatgctgagtcatgcagaaagagttccaatctgcagtccacaatcaacccctttggcatctgctttcgatatgtgcaagatggaggagatcatgaatcagcaaagaacactggagccggatacatcaaatgcttcaattaaccagtctcccgaatcaaagattttccctgtatcctctcctgataaccatgatattgaccgtgagtttcctagtccagttccaagatctgagaataaggacattgcggttgacagctcaggattaacaccagcatcacctgaaaatattactacgaatttgcctggttcagatacatgcaagatggaggtcatgagtcagcaacaagtaactgaggctgtcgtatcgaattcttcagataatcattcccctcaatctaaggtttcccctgtatcatctcctaataacgaagatatgaaacatcagtaccccagttcaacccgaaggtctgagaataagattcctgctgtggacaatttactttcaacatcagctgctcgtgaaaatctaacgacaacttctgcccatgattctgatacatgcaaaatggtggagttagtgaatcagccaaaaacacctgaagtggatgcatcaaatgctccactttgtcaatctcctcattctcacacttcccaggtaccttctgacaatcaagatattgaacgtgaatgtccaggtccaactccaagatctgacagtaaagaacctcttgtaaacaactcagcgacaacttctgcatcagcctctgatacaatcaaaatggaggagtttgtgaatcagcaaaaaacagttgaagcagatgcatcaaatgctccacttaatcaatctcattctcacatttttccagtaccttctgacagtcaagatattgagcatgaatgtccaggtccaactccaagatctgacactaaggaacctcttctgaacaactcagtgttaacattagcagcgtctgaaattctaacaacaacctctgcggcctctgatacatgcaaaatggaggactcagtgaatcagcaaaaaacgcttgaagcagatgcattgaatgctccacttaatcatcatcctcattctcacgttcttcctgtatcatttgataatcaagacattcagcatgaatatcctagcccaactccaaaatctgacagtaaggaacctcttgtggacaactcagtattaacatcagtagggcctgaaatgctagcgacaacttctgtctctgatacatgcaaaacggaggagtttgtgaatcagcaaaaagcagttgaagcagatgcatcaaacgcttcacttaatcagcctcacatttccgctgtaccttccgataaacaagatattgaatgtgaatgttctagcccaactccaaggtctgactgtaaggaacctcttatggacaactcagtattaacatcagcggtgcctgaaattctagcaacatcttctgcttctgataaatgcaaaatggaggagtttgtgaatcagcaaagaccaattgaagtggatgcatcaaatgcttcacttaatcagtattctcgttgtcacattttcaatgtatcttctgataatcaatatgttgagcgtgaatgttctagcacaactccaagatctgactgtgaggaacctcttatggacaactcaatattaacatcagcggtgcctgaaatactagcaacatcttctgcttctgcttctgataaatgcaaaatggaggagtttgtgaatcagcaaagaccaattgaagcggatgcatcaaatgcttcgcttaatcagcctcatcgttgtcacattttcactgtatcttctgataatcaagatattgagtgtgaatgtcctagcccaacttcaagatctgacagtaaggaatcccttgtggacaacttagtgttaacatcagcagtgcctgaaaatctaccgacaagttttgcagttgcctctgattcatgcaagatggagatcttgaataagaaaagaacacttgaagcagatgcatcaaatgcttcacttgatcagccttctcactctagcgttttcacttcatcttctaatgataatcaaggaaatgcgtgtgaacgtcctagtccaaatccaagacctgagggtgagcagcctctcatggataactcagggttaacatcaccagtgcctcaaaatctaacttctgcttccgacatatgcaagatgggggagatcttgaatgagaacaggacacttgaagcaaacccatcaaatggttcaattactcaatctcatcaatccaaggttttccttgtaccatctattgatatcctagagcgtgaatgttccagtgaaacgcctaggcctcagtttaaggaacctgttgtggacagctctgggttaacatcagcagcacctgaaagtttaacagctaagcaacatgtccactcaccagatgcctttataccaccaaagcatggtgctccaactggggaattaggtgatgcaaaatcagattttaaaggtgaagaaattattcaaaaagaacaatattgtgaaagagaacctattgttgctacaagagagaatttgctaattgatctttcctgtggtgccgagtcgatagatgtgtcagatgtattggaatctttaatggaagaaaggagtgtaacttcgtacgtgccagtatcaatagaggacttcctagccgcttcagcagtggaagaaccacaatactctagccctatagcgttatctccttggggtgaacctagttactaccaaggtgatgctggtgattctgcgctatggggtattcaagattcgatcaatgatatgtggtcattgctttcaccaagacctatgctccaagcttcatctggtattggaactgaggggaaggaaacttttgatatcaacgaggtggctgtgacccatgttaatagtgattttttccaaagaggatcgatgcttggggaggaaaatatgaatcaggcaaacttgagtgttgctgcagataggatgctgctgcctgagcaggtcccatcaataccaaatggtatgtcaacatcatcagtagacgagggcaccagagttataggttctcaagcatcaatcaatcagagcttagactggggtactacatggaggactagtcagaatctcagcgtgtatagcaatgaaatagcagggccctcgagtaaaagctattgggaagaatcaaggaagcaggaagccaccaattcgggcgtttctatttcaggggaagccattagaaacaagcgcttgaaccctcctgataatgctattcggggcagccatcatcaccgtggcaggtactcccaaatcagtgaatcttggctactcagttcaaatcactctaggagtagttctgctaaatttggcagcggtgggtcatcaagatcaacttcaaagggtcaaactaggggctaatgtaaattctcgggtgcaggagaaaggatgcatcttgtagctacctgcatccttgatctctgcagcaggaataggttttaaaattctctgttatatctttgcagtttgtataggctaattaaaattaagtcaacagagcgtaaatgaccatctctgctccactcaactcaactgtagcaaggagcatatgtttagcatagaggtttgactgaatggccctgcccaagaagcagattcagctcttgggcatggtctgtatcatcctgacattctgttggatggaactgcaattgtgcaaccggcatctcttgacaccgaaacgcccctgatgtgttggaatatctgatcgattggtttag

SEQ ID NO: 156972 - DNA, 2212 bp, Zea Mays
tatcctatttgtgctatctgcctggcatctgagtactatcctatttgttcctacatactttgttgcattacattatccttcttatgcaactatacaggtgagtgcctaccttcttggggagtatggccatcttttggcccggagacctggctgtagccctaaggaattgtttgctattataaatgataaacttccgacagtatcgacaagtactgtagctattcttctctcaacctatgccaagatattgatccacactcaacctcctgatgttggactgcagcaacaaatcctcacaatatttaaaaagtacgagagctatattgatgttgaaatacaacagagagcagttgagtattttgaactaagcaggaaaggccctgctttggcagatgtgttggctgaaatgccaaaattccctgagcgtgagtctgcacttctgaagaaggctgaagacgctgagattgacacagcagagcaaagtgctataaagctacgcagtcagcaacaaacttccagtgctcttgttgtagctgatcactcccctgcaaatggatctgcaccaccagctaatcatctcactcttgtgaagatgccaagccaaattgtttctgacactcaggagagtggggtaattcatgaagaagttcctaatcctcctgttgaagctcccaaagaaaatgggactcccgtcgaagtggaaagcagggacacaaacattactggaatcaacaatgaggttaaaactgaaccaccctctacatcgcattctacctctcccgcggacctcctggcagatcttttgggtcctcttgcgatagagggccctcctgccgtagagcaaaatcctacccaaggattgaatagtaatcaaagtccagttggtgacttggcacttgctacccttgatgatcaatccaactcagttcagccaattgtcaacgtcgaggaaaagttccatatattgtgcacaaaagatagcggagtgctgtacgaggatcctcacattcagattggtatgaaagcagagtggcgtgcccatcatggccgtcttgttcttttcctgggtaacaaaaatacttcagcccttacgtcagtgcgggtgctgattttgcctcctagtcatttgaaaatggaactttcgtctgttcccgatactattcctccaagggcgcaggtgcaagttccacttgaggttgcaaatctccgtgcaagtagagatgttgcggttttagatctctcatatacttttggaacttcactggtggatggcaaacttcgacttcctgttgtattgaataaatttttgcagcctataactcttacccctgaagaatttttcctccagtggaaagcgctgactgttcacttgctgaaggttcaagaagtggttaaaggtgtgaaaccaatgcctctttctgagatggctaatcttttcatgagccttcacttggcggtcgctcctggacttgataacaacccgaacaatctggttgcatgcacgacattcttttctgaagcaacacgggccatgctttgtctgataagacttgaaacagatccacaagacaggacccaactgcggctgacagttgcctcgggcgatcaacatttgacattcgagttgaaagagttcgtcaaggaacatttgattgatatcccaaggactcaggctgccccacctatggcaatggtccagccacagttgcttactgcagcacctgccacatacaatgaccctggtgccatgcttgctggattgctatgagaagtaaaaaaacaaaagccatagtgttttgatgtacatgacagatgttgatctaacatctccaaaagcatcttgctgccaagacgaacacgtggagcaacgaaagggctggcggagtagtcttcagctggattctaaaccgagaaaaagctagattcttttgggcggtttgaaggcctccttcccctccatggagcagtccccatattgtgtaagcgtaatttgttgtttctcatttatcatccccttttggcccatttatataacttgtattgcccaggtctgttggtggacagtcggtagttatgtgtgttaatataaggtgctaggttttccaccatgccggttgtaaagttgagttggtgcgcattgcattacgatttgtaccaataaggtcgaaatagggaaaggaaattaatagggttttgttttgtgcattttata

SEQ ID NO: 156973 - DNA, 1469 bp, Zea Mays
cctccgcgacgatcctttccgccgccccatagggttctgctgctcccgatccgggcgccagatctcgcgtggcgacgcgcggatctcggatttctctagaggcggcggcggcggcggccggagcaggaggagatggcgctctcggggatgcgggggctctcggtcttcatcagcgacgtacgcaactgccacaacaaggagcaggagcgcctccgcgtcgacaaggagctcggcaacatccgtacgcggttcaaaaacgagaagggcttgtcaccatacgagaagaaaaaatatgtatggaaaatgctttacatttatatgctgggttatgatgttgattttgggcatatggaaactgtctcgttgatatctgcaccaaagtatcctgagaagcaggttggttatattgtgacatcttgcttactgaatgagaataacgatttcttaagaatggtaataaatacagtaaggaatgacataatcggacgaaatgagaccttccagtgcttagcattgacaatggtaggtaacattggtgggaaagaattttctgagtcactagccccagatgttcagaaacttcttatttcaagcagttgccgtcctgttgtcagaaagaaggctgctctatgccttctgcggctttataggaagaatcctgatgttgtgaatattgatggctgggctgatcgaatggcacaacttctagatgagcgtgatctaggtgtgctgacatctgtcatgagtctttttgtttcactagtatccaacaattctgaagcatattggaattgtcttccaaaatgtgtaagaatattggagagattagcaagaaatcaagatattccacaagagtacacttattatggaattccatctccttggcttcaggttaagacaatgagagctcttcagtacttccctaccattgaagatcccaacgcaagacgggctttgtttgaggttttacagcgtattttgatgggtactgatgttgttaaaaatgttaacaagaacaatgcctcacatgctgttctctttgaagctcttgctctggtcatgcatctggatgctgagaaggagatgatgtcacagtgtgtggctcttcttgggaagtttattgcagtccgggagccaaacattcggtacctcggtctggaaaacatgactaggatgctgttagtaacagatgtgcaggatatcattagaaggcaccaggcccagatcattacatctttgaaggatccagatatcagcattagacggagggctcttgatttattatatggcatgtgtgatgttacaaacgcgaaagaaattgttgaggagttgttgcagtaccttgatacagctgaatttgcaatgcgtgaagagttgtctctgaaggcagctattcttgcagaaaaatttgctccacaactattgtggtaagattttgatcacaggatctgccaattctccagctacta

SEQ ID NO: 156974 - DNA, 4217 bp, Zea Mays
gccgcctcgccgatggccgccggcggccacctccgcccgggctcctacctgggggacgtatcagcgctctccttgctcccctcctcgccgcaccctctcctcctcgccgggactggatcgcagctgctcttgtacgaggtgggcgctgccaggctcgttgcgtcgttccgagtgttcgacggggtgcgcgtccacggcatcgagccccggagcggaggccccggctgtcacagctacacgcttgcgttgtttggcgagaggagggtgaagctattctccctcggattcggtgttgaagcagatggcggtgaggcgcggctggagctggagcagaggctcccggggtttgaccattgggtgctcgacactcgtttccttgaggtcgatgggctgcttgcgattggtctgagtgacaattcagtagcgctgtgggatctgagcaagcgtgcgttggttacccgagtgaagtctccagagaagtgccttctgtattccatgagaatgtggggagactctgttagagagtttcttgtggcatccgggaccattttaaacgagattctcatatggaaattggcaccgcaagttctgggatcctccatggtatgctccaatgaaggaaatacttctgatgtaaacagtcccaaaattatgaatcctgatgatagtcagcacatggcagttcatcttggtaggctcaaggagcatgaaggctcaatattccgaatagcttggtcctctgatggatcaaagtttatgtctgtttctgatgaccgtagtgctcgcgtgtggactttgagtttcaaatcacagggtttcgccaatcatacagccagtcacgacaatgttgaaattataccaaaactcacactttttggccatagtgctaggatatgggactgctatgtttctgattctatggttataactgctggtgaggattgtacttgttgcatttggggaatggatgggaagcttatcaagatgttcaaagaacacattggacgaggaatatggcgatgtttatttgacccaagctcactgcttgtggtcaccgctgggtttgattcagcaatcaaagtgcaccatctatgcaactccatttttcatgacatagtggacgataaaaaggtctctggcctgaactatgattctgagatctttgtagtatcctctccttctgtttcggggcagtatggtcccctggatagcaaaagcgagtatgttcgctgtctacactttgcagaagaaaatgttctgtatgttgccacaaataatggatatctgcgtcaggccaaactctctaacatagaggatgtaagatggactaagattattcaggtcactgagaaagcaccagttatctgcatggatgtcttgacaacatactcaaacctttctttgaatagggaggacataattgcccttggagatggacggggaaatgttactattgtccgtttaaccagtagcagcagtgaacctaaactagacctatcttttacctggtcagcagaaaaagataggcaactactaggagtgtactggtgcaaggctcttgaatgtagccacattttcacagctgatcctaggggtgtgcttaagttgtggaacataagaaatgtcctgttctcaagtactgatattatcaatgcacctcagatgtttccacctgtagcagtgtttgaaccgtcctttggagctcgaattatgtgtctagatgcatctcctgaagaggagatccttatagctggtgataaaaagggtaacatcacagcctatcctttccctaaaatattggtactgcatgacagtggtctgatgcaacagaagatgcttccatgttgtcgctttaaaggagctcatggcatttctagtgtcacgagtgttcatatagaagactccacttctgatcatattgaaattcacactaccgggggagatggttgcatttgctttttcaagtatggaagaattgcacaaaagattgaattttttggaatgaggcaagtaaaagaactgggcaccattcaatccatctacactaatcttgcatctgagagccaatctagtagtacctacgcaataggtttcacctctgcagattttatcatttgggaccttgagaatgaaacaaagatggctcaagtatcctgtggtggctggcggcgcccttattcttattatcttgggacagtccctgaatatcagaactgctttgcctttgtaaaggatcatgatattcacattcacaggcactgggcaccaactcatgataagaaattactcgctcaagttctccatttgcagtttcatggtagagaagtgcactcgttgtgtttcataaatccagcaagccattcagatcctgagaatagctcagatctgttgatagcaaccgggtgtgaagatggaactgtgcgccttacaggatttttgactggtagttctggaaaatggcattcctcaaagttgctaggggagcatgtaggcgggtcagctgtgcgagctacatgcttcataccagagacctacacagtaacatataattcatgtaactacagttcgaacggtatttctgatggcattgctgttgaaaaagacgagactttcttactcatatctgttggatcaaagcaagtcctcactacttggattttgcaaccgaggaatgcagaaaacagacaagtatattcaagtggcttagatattgactccaagcaaaactccagaaacttggaaaacgttgattcagccatgtcatttcaatggctaactacccacatgccaccaaagcttcctaggaacagactgaaatctggccacataaaacagagggttgaggaaggaaatttttctgttgttcagccaaatatggacgttatggatcacatggaaaatgactggcgttacctttctgttacagcatttcatttgaagcatccggttctcagcaggttgacagtatgttttgttgctgttgcttgctcggatgcaacagttgtgctccgtgctcttctgttaccttctcgattgtggtttgacgttgccttcttggttccacatgcatcaccagttttggtgctgcggcatattatcatcaatgctagccactataaagatgatgctggagacagataccttattgcgagtggatcaacagatggtagcatcactttttggaacctgacagagaccattcatggcttcatgcaactaatatcagagactcaaccacatatgagtattgattatcaaaagcgtcccaggacaggaagagggagtcaaggtggtcgtctccggtggagatcactgtcatacgcttcgaagaagagagatggagatatgtcatcctctgacggaagcaacccgggtagcctaaacactgctgaaaattcatctgaagcttctggtgtggaaaacactcagattgtagtgcatgaagcaagtgacagctcaaaaactgagatgccttcaagtacccagtcatgtgatatacctgaattgagaccaatgcactcgttatccggtgttcaccagtcaggcgttaattgcctccacatatcattctcaacacctgacaagtcatactgcattataagtggtggagatgatcaatctgttcagcgcttcaacttcagagtaatatcttcggaggattgcttaacaaccccagcaaggctaaattcgcatgacaatgacacacttaaaattctatatcaacataaggtagcatcagctcatagtgcagcagttaaaggaatctggacagacggcacttggtcgttctctactggccttgatcagagagtaagatgctggaagatgggattagccggccaattcacggaatactcccatgctatcattagcgtgcccgagcctgaaactctagatgttttccatgaccgggcaaagaggaagtaccacattgctgttgctggaaggggtatgcaaatggtcgagttctcaccacctgaagatgattgactacaatgattgcaacccctgctatggatgtcacatggatgttgattttgctcggcttgcgtggatcatgtagttctatactgagacggttttttttaaaaaaaaaatggttaaggatgtaacaaacagagaatttgatgtgttatcaggctatgacaaacagatcctacatatacacatataaaacactgttttgcatttgcaatgtataatgtactatttacaga

SEQ ID NO: 156975 - DNA, 1850 bp, Zea Mays
atcgtcgggatgtctgtgccagcatcagcccaggtgcctcacaccatacgatctgctgggagctgctgcttcaggtcgtcgcatcaactatctgcgcagaatctgggccgacatcgcaggtggcgggggaccggaaagaagaagatcctttccacccgtggcgtgcttgagtccagaaacggcgcacatcctggtggccttatgaagagaagcgcacgccttgcaggaaggtcgtggagcacatcatcctgctcagagccaagcccaacatctcagacgctgaagagaaagacatgctggactacctatacacatcgcagtaccagatgcgagggatactcgcggtctcgctaggccgcatcgaggaccccaacagcgacaacttcacgcacgctgtgttcatgcgtttccagcagaagcaagacatcgcggagttccagagtaacgcgtactactccaaagttgtcgacgagcacgtaaagcccgtttcctatgtacgccccagcccccagccccagcatgtgaaaaatcttctctccagttcttggatatatatataaatatatatatacggcaccgtgatggtcactgtttgggttaaacttacagggctcggtttctgtagatttcgagtccgaggtggaagacgacattatacctctctttcgcaggggagaggtatggccatggcctaaatcgatcgataccgttctttcttttttctttttcttttctttttttggcaacagaaagaagaagaaaaatgtggcaggattttaactacggcgtcgagtttatgctgctggtgtctttcttgaagactgcgtctagagaggcaacggaggacgcattagcgtctcttgacaagttgatcagccaatgcagcgcttctattgtgcaggcaacatgtggctgctgtttggatcgtccggataacgggtacagtcatgctgcagtaatccgtttcccatcatctgatgagttgaagctgttcagggagagcgaggagtacaaggatatgtgggcgtccaagttccgcccgatcgtggagagatccctgcacctgcacttcaccgttgaccccgtggggaaccagctgatgtagaccaaccgagtggtcatccctatacatgggaccaagagcatctgtactgtacagtgtaaaacagagagatggggtaatatagaggataccgatagggtcaacaagtgccagtgctcggttacattacatcacggcaaaaaaaaaacaaaaaaaacaagagaaaatagcctcccttgtcgctcaggagctcagatagatagatagacagatagatgctgagcaccgaccgagttgaggtccctcttgagagttcagttgtgcagcgggtttgacccctgcggcacccttctcttagcctcggacagatcctgcacctgcacgactcgcctccagccaagtttctgttgaccgtgctgcctgaaagacgacgtcccctcggcgtcggattccggaacccgtcggccgtggcagaagaggcctctctgctctgctcccaggagcgagactgtgagcactactactaccatgagcctgaccaagctttgttgcggcaatcccatgctttttcaggcagggtttcaacagcacaagttggagatggcaagggacggtagtttgtaatacatcacgcacaagcaacggaataaagattttatatacgcagacaacaagggcggcacagaaagtaaatccagctcggccatctggagacccgtggcggtgataccagacaccggggcaggcgtgcgcttgcctcaccaattttggtttggtgcggcggacagcgatgcatgcattttcatca

SEQ ID NO: 156976 - DNA, 1709 bp, Zea Mays
atcgtcgggatgtctgtgccagcatcagcccaggtgcctcacaccatacgatctgctgggagctgctgcttcaggtcgtcgcatcaactatctgcgcagaatctgggccgacatcgcaggtggcgggggaccggaaagaagaagatcctttccacccgtggcgtgcttgagtccagaaacggcgcacatcctggtggccttatgaagagaaggaaggtcgtggagcacatcatcctgctcagagccaagcccaacatctcagacgctgaagagaaagacatgctggactacctatacacatcgcagtaccagatgcgagggatactcgcggtctcgctaggccgcatcgaggaccccaacagcgacaacttcacgcacgctgtgttcatgcgtttccagcagaagcaagacatcgcggagttccagagtaacgcgtactactccaaagttgtcgacgagcacgtaaagcccgtttcctatggctcggtttctgtagatttcgagtccgaggtggaagacgacattatacctctctttcgcaggggagaggattttaactacggcgtcgagtttatgctgctggtgtctttcttgaagactgcgtctagagaggcaacggaggacgcattagcgtctcttgacaagttgatcagccaatgcagcgcttctattgtgcaggcaacatgtggctgctgtttggatcgtccggataacgggtacagtcatgctgcagtaatccgtttcccatcatctgatgagttgaagctgttcagggagagcgaggagtacaaggatgtaagaactctgctcaaatggatttggatctggttctccacaagtgaagtaactcgtgtgtttggtggcctgtgcgttgcagatgtgggcgtccaagttccgcccgatcgtggagagatccctgcacctgcacttcaccgttgaccccgtggggaaccagctgatgtagaccaaccgagtggtcatccctatacatgggaccaagagcatctgtactgtacagtgtaaaacagagagatggggtaatatagaggataccgatagggtcaacaagtgccagtgctcggttacattacatcacggcaaaaaaaaaacaaaaaaaacaagagaaaatagcctcccttgtcgctcaggagctcagatagatagatagacagatagatgctgagcaccgaccgagttgaggtccctcttgagagttcagttgtgcagcgggtttgacccctgcggcacccttctcttagcctcggacagatcctgcacctgcacgactcgcctccagccaagtttctgttgaccgtgctgcctgaaagacgacgtcccctcggcgtcggattccggaacccgtcggccgtggcagaagaggcctctctgctctgctcccaggagcgagactgtgagcactactactaccatgagcctgaccaagctttgttgcggcaatcccatgctttttcaggcagggtttcaacagcacaagttggagatggcaagggacggtagtttgtaatacatcacgcacaagcaacggaataaagattttatatacgcagacaacaagggcggcacagaaagtaaatccagctcggccatctggagacccgtggcggtgataccagacaccggggcaggcgtgcgcttgcctcaccaattttggtttggtgcggcggacagcgatgcatgcattttcatca

SEQ ID NO: 156977 - DNA, 4441 bp, Zea Mays
aaagcggtcagtgggtggaggcagccaagagtcaccctgtcgccgttgccgtcgccgaggcaggcagagtctccctgtcgccgttgccgtcgccggcctcctcctcctctgccacttcctcccaactcccagccgcaggggccgacggcgacgggagggaagaggcggcagaggtactccgaggggcgcggagagaggctgtgccaggccacgccgtccagtgcctccgggtccgtcgccgcagcttccggccgcgtcggagaggtagcccccggagctcttcgcggaggctcgggaatggtgcactgggttagcgacagtgatggcagtgataacttcgaatgggacagtgatggtaacggggagcagacagtgagcttcaacgctgctggtgctggttcatcagctctggcagcgacgaacactgatgctcctggcccatcgacacgggttgctaatggcaatgggaaggctgggcgatctgcctctttggttcagaagtatgtggacatgggtttctcagaagagattgttctgaaggccatgaaggacaatggggataatggagcagattcattagttgagctccttcttacttaccaggaactaggcaatgacctcaaagtggataatgactttgcttctagttgtgcccccaaaactgctgacgatagtgatgatgatgacacactggaaatctgggatgatgaggatgctggagggagaagcaccagggttgctaactctgttgatgattctgatgacgaggatttcttacatgagatgtcacggaaggacgaaaaagttgattccttagttaaaatggggtttcctgaagacgaggctgcactggctattaccagatgcgggccggatgcatctatttctgttctggtggattcaatctatgcttcacagaccgcaggagatggttactgtggcaatctgtctgactatgaggataattcctatggagggagaagcacagggaacaagaaaaagagaaaaagatatggaggccaagcacagggaagtagaggcccattagatggtagctgtgatgaacccatgcctctcccacatccaatggttggatttaacttgccagaccagtggtcaagacgagtggacagatcgttgcctgcacaagctattggtccgccgtacttctactacgagaacgttgctcttgctccaaaaggtgtctggactaccatatcaagattcttgtatgatattcaaccagagtttgtggactcaaagtacttctgtgctgctgccaggaaaaggggttacatacacaacctgccacttgagaacaggtcacctctcctccccatacccccaaagacgatatcggaagcatttcctcggaccaagaggtggtggccttcatgggacccaagacgacagttcaattgcctccagacttgcgtgtctagtgcaaaattgttagagaggattcgcgtagccctcacaaacagttcagacccacctcctccaagagttcagaagtatgtgttggaggagtgtaggaaatggaacctggcatgggttggcttaaacaaggttgctcctctagagcctgacgagatggagtttctactcggctttccgaaggatcacacgagaggtatcagcaggacagagaggtatcgatctctaggaaattcatttcaggtcgatactgttgcttaccatctctcagttctgaaggatctgttcccacaaggcatgaatgtgctgtctttattctctggtattggaggagcagaggtggctctccacaggcttggcatacagatgaacacggttatttcagtggagaagtccgaggtcaaccggacgattctgaagagttggtgggatcagacgcagacgggtactctgattgagatcactgatgtgcagacactgtcatctgagaggatcgaggcgtatattagaagaattgggggcttcgatcttgtgattggtggaagtccctgtaacaacctcactgggagcaaccgtcaccacagagatggtttggagggcgagcattctgcattgttccatcattattttaggatcttacacgccgtcaagtccatcatggagcgtttgtagttcttagaatctttactgttgttttggttctagtagaatactttgtgaccgaacttgtaaatggtttgcaggttgactggtttagttctcttgccactctaatttaggctagttttttttttatttaatcttctttggtgatcttggtgcagttctgtggcactgttgggtattcaaatgcagattgatccgagaggctgccctgttgcattttctttttaaaatttgtatttgtcaatgagagatcaggtattctggttgccaaaaaaaaatctgaagttgtggagctgagaaaaggacggtgctaagctacaaccacccactgccacaccatgcgcacccccaacccaaaagatcctgcttttgctcacgcttatcaccactcccatctccatccaaaaccataaaaaaaaccagtgcgagctgaagcatccaggctctggaatcatcgtcgggatgtctgtgccagcatcagcccaggtgcctcacaccatacgatctgctgggagctgctgcttcaggtcgtcgcatcaactatctgcgcagaatctgggccgacgtgagttcccgatctcagctttgagtggccttctttttgaaagtgagcacaggttcttccaaagcccgttgtgttcgtgtagatcgcaggtggcgggggaccggaaagaagaagatcctttccacccgtggcgtgcttgagtccagaaacggcgcacatcctggtggccttatgaagagaaggaaggtcgtggagcacatcatcctgctcagagccaagcccaacatctcagacgctgaagagaaagacatgctggactacctatacacatcgcagtaccagatgcgagggatactcgcggtctcgctaggccgcatcgaggaccccaacagcgacaacttcacgcacgctgtgttcatgcgtttccagcagaagcaagacatcgcggagttccagagtaacgcgtactactccaaagttgtcgacgagcacgtaaagcccgtttcctatggctcggtttctgtagatttcgagtccgaggtggaagacgacattatacctctctttcgcaggggagaggtatggccatggcctaaatcgatcgataccgttctttcttttttctttttcttttctttttttggcaacagaaagaagaagaaaaatgtggcaggattttaactacggcgtcgagtttatgctgctggtgtctttcttgaagactgcgtctagagaggcaacggaggacgcattagcgtctcttgacaagttgatcagccaatgcagcgcttctattgtgcaggcaacatgtggctgctgtttggatcgtccggataacgggtacagtcatgctgcagtaatccgtttcccatcatctgatgagttgaagctgttcagggagagcgaggagtacaaggatgtaagaactctgctcaaatggatttggatctggttctccacaagtgaagtaactcgtgtgtttggtggcctgtgcgttgcagatgtgggcgtccaagttccgcccgatcgtggagagatccctgcacctgcacttcaccgttgaccccgtggggaaccagctgatgtagaccaaccgagtggtcatccctatacatgggaccaagagcatctgtactgtacagtgtaaaacagagagatggggtaatatagaggataccgatagggtcaacaagtgccagtgctcggttacattacatcacggcaaaaaaaaaacaaaaaaaacaagagaaaatagcctcccttgtcgctcaggagctcagatagatagatagacagatagatgctgagcaccgaccgagttgaggtccctcttgagagttcagttgtgcagcgggtttgacccctgcggcacccttctcttagcctcggacagatcctgcacctgcacgactcgcctccagccaagtttctgttgaccgtgctgcctgaaagacgacgtcccctcggcgtcggattccggaacccgtcggccgtggcagaagaggcctctctgctctgctcccaggagcgagactgtgagcactactactaccatgagcctgaccaagctttgttgcggcaatcccatgctttttcaggcagggtttcaacagcacaagttggagatggcaagggacggtagtttgtaatacatcacgcacaagcaacggaataaagattttatatacgcagacaacaagggcggcacagaaagtaaatccagctcggccatctggagacccgtggcggtgataccagacaccggggcaggcgtgcgcttgcctcaccaattttggtttggtgcggcggacagcgatgcatgcattttcatca

SEQ ID NO: 156978 - DNA, 1270 bp, Zea Mays
acaagcctctctcacacacacacacatcgttgtccaaacaagatcggcgcggctcacgcggcctagctcgccggcctaacgaggccggatattccttaacctagctagctaacagctaactagatagatcgatccatcagctggcagccatgaatatgatcagggcagtacggcgccggttcaccgtcggccacctggctacggccaaagaccccgccacgctgcgccacgcggccgccgaactcctcgccaccgccatcttcgtcttcgccgccgagggtgccacgctctctctcggtacgtacctacctacttacgttatatatatactgtgtataaattaacggtgcatgctgtgtgcttgtcgtcgcgcgtgtctcctcactcgtcgtacgtcgtaaacgtgtgcaccggtgccgcgcgcgcgcagggaggatgcaccaccatgacaagggcggcggcggcctggtggcggtggcgctcgcgcacgccctcgcgctcgcggccgcagtggggtgcgccgccaacatctccggcggccacgtcaacccggccgtcaccttcggcgcgctgctcgccggccggatctgcctcgtccgctccctcgtctactgggccgcgcagctgctcggcgccgtcgccgccgcgctcgtgctcaggctcgccaccggagggatgcatctgccggagtacgcgctggcggggggcgtgagcggatggaacgcggcggtgctggaggcggccatggcgttcgggctcatgtacgcctactttgcgacggtgatggacaaagcgcggagggtccgcgccggcgccggagcgctggcggcgccgctcgccgtggggcttctggcgggggccaacgtgctggcctgcggcgcgctggagggcgccgtgatgaatccggcgcgcgcgttcgggcccgccgtcgtgggctcccgtcgctggagacaccaatgggtgtactgggtggggcccatggtcggcgccggcctctccggcgtcgtctacgagcacctcgtcgccggcccggccgccgaggaggaggagcccgcgccgagctgcggcgaccgccgtcgtgcgtagaggactacatgcatgcaggagcagcaggacgtcgtcgtcgtccccgctcctcggaatcttctgaataaaaaaaacagcttgcatgcgtgctcaattgttgtgtgtcgtggtcgatcatgagtagaattaatgtttcatgcatgcactcttaccgtcttctacttatgtccttgtttgcttcaat

SEQ ID NO: 156979 - DNA, 1139 bp, Zea Mays
ctacaagcctctctcacacacacacacatcgttgtccaaacaagatcggcgcggctcacgcggcctagctcgccggcctaacgaggccggatattccttaacctagctagctaacagctaactagatagatcgatccatcagctggcagccatgaatatgatcagggcagtacggcgccggttcaccgtcggccacctggctacggccaaagaccccgccacgctgcgccacgcggccgccgaactcctcgccaccgccatcttcgtcttcgccgccgagggtgccacgctctctctcgggaggatgcaccaccatgacaagggcggcggcggcctggtggcggtggcgctcgcgcacgccctcgcgctcgcggccgcagtggggtgcgccgccaacatctccggcggccacgtcaacccggccgtcaccttcggcgcgctgctcgccggccggatctgcctcgtccgctccctcgtctactgggccgcgcagctgctcggcgccgtcgccgccgcgctcgtgctcaggctcgccaccggagggatgcatctgccggagtacgcgctggcggggggcgtgagcggatggaacgcggcggtgctggaggcggccatggcgttcgggctcatgtacgcctactttgcgacggtgatggacaaagcgcggagggtccgcgccggcgccggagcgctggcggcgccgctcgccgtggggcttctggcgggggccaacgtgctggcctgcggcgcgctggagggcgccgtgatgaatccggcgcgcgcgttcgggcccgccgtcgtgggctcccgtcgctggagacaccaatgggtgtactgggtggggcccatggtcggcgccggcctctccggcgtcgtctacgagcacctcgtcgccggcccggccgccgaggaggaggagcccgcgccgagctgcggcgaccgccgtcgtgcgtagaggactacatgcatgcaggagcagcaggacgtcgtcgtcgtccccgctcctcggaatcttctgaataaaaaaaacagcttgcatgcgtgctcaattgttgtgtgtcgtggtcgatcatgagtagaattaatgtttcatgcatgcactcttaccgtcttctacttatgtccttgtttgcttcaat

SEQ ID NO: 156980 - DNA, 1577 bp, Zea Mays
gtgaatcgtgatcccctgtggttccttccgagcaagggagaaagaatgcagtcgtctcctccgcgtcgccctcctccagtgtagaaaactgcagcccgtatagtgtcctcggcgctaagggacgaggatgcaggaggcggcagcaggcgcctatccctcctacatggagccggagccggagccggagcagacgggtgcatcggcgactgtgggtgtgatgggctgccgctcgcccacgtgcccgccttggctccaagcggccattgcagacatcgatcagcgggtgcgcgcgctggcggtggacgatgccgcgccgcccacggagcactccttcgcggagcgcgccgaggagtactaccagaagcggccgcagctgctggccctcctcgccgacctccaccgccgctacctctgcctggccgaccgctactgccaccaccagcacaagcgagagcagccctcgctgccggcgtctgcctcctccgactgcggctcgtccgacgtcgacgaccgctgctccgacgccggcagctcgctctccttccaggcccagcacgcgccgccgcgggccggactccccgccgacgaagaggaggagctgctggtggcggagctggtggccgcgtgggtggagcgcgacgtgctggcggacgaggcggcgcggcgcgcggcggagtcggcgcgcaggatccagctgcaggggagcctggtggaggtgctggagtcggagcgcctggtgctgctgggcgagaacgcgcgcctggggttccgcgcgacggcggccgaggacgaggccgcggcggcggcggccgacctgggctacgcgcgccgccgcgccgccgagatggcccgcctcgtgctcaggctccgcgaggaccaccgcgcctgcgtgctggggcgcagggccgaggcgctgcaggcgcgggtgtacgcgctggagctccgcaaccgcgagtgctgcgaggccacggcggcgtgggaggccgaggtccagcggctcagcgcagagaaccgacgcctcgcggaccaagccatgatggcgaggaggaagcgcaagggcggtggtggtgggtggtgggcgagggtcaggatggcagcggccgggtggacgccgtgtgcgcccgcggtcacggtcgccgagcagaccaaggggaaggaggacggcaagtaccaccactacggcggcggatgcttctgtgtctagactaggagatgagacggcggcggcgatctagccctcctttttgttagtagtaattactattataattcaggacttggcaggtgaatgtgaatgctgctgggtcggatgcataattctggagaagacgatgattgtgctccgcaggcactagtaaaacaacatgcaattcgtatgatctgttcaatacattataccatggtgttcccgtattctgtagtacaagaaattccaagatctcaatatattgctcttgggaatttagcacacggttcaaaacttgtgaatttggccgcgtgaggatgtgatgaatggcacttgcttcaggttgtaatcaattttccctattcagtcaatctttgctctggaggtttta

SEQ ID NO: 156981 - DNA, 1417 bp, Zea Mays
gtgaatcgtgatcccctgtggttccttccgagcaagggagaaagaatgcagtcgtctcctccgcgtcgccctcctccagtgtagaaaactgcagcccgtatagtaagtgtcctcggcgctaagggacgaggatgcaggaggcggcagcaggcgcctatccctcctacatggagccggagccggagccggagcagacgggtgcatcggcgactgtgggtgtgatgggctgccgctcgcccacgtgcccgccttggctccaagcggccattgcagacatcgatcagcgggtgcgcgcgctggcggtggacgatgccgcgccgcccacggagcactccttcgcggagcgcgccgaggagtactaccagaagcggccgcagctgctggccctcctcgccgacctccaccgccgctacctctgcctggccgaccgctactgccaccaccagcacaagcgagagcagccctcgctgccggcgtctgcctcctccgactgcggctcgtccgacgtcgacgaccgctgctccgacgccggcagctcgctctccttccaggcccagcacgcgccgccgcgggccggactccccgccgacgaagaggaggagctgctggtggcggagctggtggccgcgtgggtggagcgcgacgtgctggcggacgaggcggcgcggcgcgcggcggagtcggcgcgcaggatccagctgcaggggagcctggtggaggtgctggagtcggagcgcctggtgctgctgggcgagaacgcgcgcctggggttccgcgcgacggcggccgaggacgaggccgcggcggcggcggccgacctgggctacgcgcgccgccgcgccgccgagatggcccgcctcgtgctcaggctccgcgaggaccaccgcgcctgcgtgctggggcgcagggccgaggcgctgcaggcgcgggtgtacgcgctggagctccgcaaccgcgagtgctgcgaggccacggcggcgtgggaggccgaggtccagcggctcagcgcagagaaccgacgcctcgcggaccaagccatgatggcgaggaggaagcgcaagggcggtggtggtgggtggtgggcgagggtcaggatggcagcggccgggtggacgccgtgtgcgcccgcggtcacggtcgccgagcagaccaaggggaaggaggacggcaagtaccaccactacggcggcggatgcttctgtgtctagactaggagatgagacggcggcggcgatctagccctcctttttgttagtagtaattactattataattcaggacttggcaggtgaatgtgaatgctgctgggtcggatgcataattctggagaagacgatgattgtgctccgcaggcactagtaaaacaacatgcaattcgtatgatctgttcaatacattataccatggtgttcccgta

SEQ ID NO: 156982 - DNA, 1875 bp, Zea Mays
atggaggaagctaacgtccacgggaccagcggccggccctccaccgctccttctgatgcatctccggactcggctgttccatccacttctcaccaaggctctcgatcctgtgaggcccagctagatgaaatgcaggagccagacgtcgattccgtcaagggcgccgtcggcaaattcggagtcggaggggttcttgactggagagagaaacgcaagaacgtccagaatgagctcgacaaggtgcaggacgaggtcaccgagtaccagaagagagtacaggaggcggagtccggcagagcgcaagctctggaggagttgggaaccgccgtgagcgccgccgacgagctggcccggggcctagatagggcgcgggccgagcaggcccaggcgcggcagcaggcggagctcgccgagctacagctcgaggagttgcggcgcggcgtcgcggcgcaggcgaaggcggagctcggcgccgccatggaccgcagcgcggccgcgctcgcggacctgcgggcggcgcgagcggaagtagagtcgctggagaaggagcacgcgcgcgccgcggccgaggcgggcgcggcggtggcgcgggcgcgggaggccgccgcggcgtcgcgggaggctgggaaggccgtcgaggacctcgcggccgagctcgccgcgctgaaaggggagctggagtcctcgcgcgccgctcatgtcgaggcggaggagaagacgaggagcctggccgtcgcgtgggaggatgacaagacacggtggcagatcgagctggaggaagccgagcgggaggacaagaggctgcgcgaggtcgagatgaaggcggaggcagcttcccaactgatggcgagcctcaaaaccgagctgttcgcttgcgccgtcgaaggaacgcctggccaggaggagaagccggcggcgagcacccagtcgatgcaggagaagaccgagaaggagctggacgacgtgaaggcgagcattgagtgggccaaggacgaggtcaagtgcctgcgcgtcgccgccgcctcgatgcgcgatgagctggagaaggagaaagcggagctcaccgcgctgcggcggagggagagggaagggctctcgccagcgtccattccttaccccgaggaggagttgaggcgagtgaccaccgaggtcgccgcggcggaggcaggagcgaaggcggacgacgacgatagcaagatggccgagcgggtaggccaggcacggcgagaagcggaggaagcgaaggcgaaggcccagtcggctcgagagaaggtcgccagggccagggaagacgcgggcgtggccaaggcagccctcgccgccatggaggcgcggctggaggcggtgacgcgggagatactcgccgcggacacgtcggaggtgacgctgacggtggacgattacaacgagctgcgccggagagcgcaggagacagaggaggccgacagcatgcgggtggtcgaggcggtgaagctggtcgaggaggccaaggacgcggaggcgaggaagctggagaaggtcgctcggctggcgaagcggaccgagcagaggcggcaggcgctggaagccgcgacgctggaggccgacgaggcggagttcgaaaagctgtcggcggagcgggagctcaggcagtggcgcgccgagcacgagcagcagcgcgcgcccggcgagaccggctcgccccggccggacctcgccgagatctccgtgctcgacgacccggcggccggcgacgggcgcgggaacccgcacatagtcagcccgagaggagggtacatgtcggcggcggacgcggaggacgaggacgcgaggcagaggaagaccttcttcccgcggattgtcatgttcttggcgcgaaagagagctcagacttga

SEQ ID NO: 156983 - DNA, 3758 bp, Zea Mays
ctgcactctccccactcaacaatcaaccacggcgtcacaaccgcacccctccgaaccctagctagcaccgcgcgccggagccccggagtaggtgcctgcttgccctcctgcggtggccgtcgcgctgccgccgcctgatccgattcgtctagccgtgtcaagcgccaccaccggtgatcgatgcgaggcgccgcgggaggcggctcgggctcgggcaggctgtgaggagaggctgtccgctcgctgcgtcgtgcgcctgtctgcgcgcgcgtctgctccgccgtccgcgccaagccgtccctcgccgaggggggctgcctctcacggccgctcggcctcgccgcgcgtctgcttcccaccacccacgcagggatcctcgcgggctggaggtcgaagcgcgagcggagagctaagagcaacaaggcgacgagatttgtgtggctacgattttgcgttgccgacggaacatgggaacaatggttgcagcggtggcgttgcgagggggaagcagcgatagcggaggatttgataaggttcccgggatggactcgggaaaatacgtgcgctacaccccggagcaagttgaggtgctcgagcggctctacatagattgccccaagccaagctcctcacggcggcagcaactgctgcgcgagtgtcctatactctccaacattgagccaaagcagatcaaggtctggttccagaaccggaggtgccgcgataagcagcggaaggagtcttcgcggcttcaggctgtgaacagaaagttgacggcaatgaacaagcttctaatggaagagaatgagcggcttcagaagcaagtctctcagttggttcatgaaaacgcgcacatgcggcagcagctgcagaatacttcattggccaatgacacaagctgtgaatcaaatgtcactacccctccaaaccctataagggacgcaagtaacccttctggactccttgcgattgcagaggagaccttcacagagttcctctcaaaggctactgggacagctattgattgggtccagatgcctgggatgaagcctggtccggattcagttggtatcgtggccatttcgcatggttgccgtggcgttgctgcccgcgcctgtggtttggtgaatctagaaccaacaaaaggcatagagatcttgaaagatcgtccctcttggttccgtgattgccgaagtcttgaagtgtttacaaggtttccagctggaaatgggggaacaattgaacttatttacatgcagatgtatgccccaacaactttagtccctgcacgtgatttttggacactacgatacacgacaacaatggaagatggcagccttgtggtctgtgagagatccttgagtggttctggtggtggtccaaatgcagcctctacacaacaatttgttagggctgagatgcttccaagtgggtatttagttcgcccatgcgaaggtggaggatcaattgtgcatatagtggaccatctagatctcgaagcatggagtgttcctgaagtgcttcgaccactgtatgagtcttctagagttgttgctcagaaaatgactactgtggcactgcgccaccttagacaaattgctcaagaaacaagtggagaagtagtgtacgccttgggaaggcaacctgcagtcctacggacctttagtcaaagactaagcagggggtttaatgatgccattagcggtttcaatgatgatggctggtctgtaatggggggagatggcattgaagacgttgttattgcttgcaactcaaccaagaaaattaggaataccagcaatgctgggattacatttggagccccaggaggcattatttgtgcgaaggcatccatgttactgcagagcgtcccaccggcagtactggtacgatttctgagggagcatagatctgaatgggctgattacaatattgatgcgtatttggcttcatcattgaagaccagtgcgtgctcacttcctgggttgcgacccatgagattttctgaggggcagatgatcatgccacttgctcacacagttgagaacgaggagattcttgaagttgtccgccttgaaggtcagcctcttactcatgatgaagctcttctttcaagggacatccaccttctccagctttgcactggaatagatgagaaatctgtgggttcctccttccagcttgtgtttgcaccaattgatgagcatttcccagatgatgctccattgatttcttctggctttcgtgtcataccacttgatgtgaaaacagatggtgtatcctctggtaggacgctagatttggcatctagtcttgatgtgggctctgctgcaccccaagcctcaggggaatctccagatgactgcagtttgagatctgtgctgacaatcgcctttcaattcccgtatgagatgcaccttcaggacagcgttgcagcaatggcccgtcaatatgttcgtagtgtcatttctgctgtgcaaagagtgtcgatggctatatctccctcccaatctggtctaaatgctgggcataggatgctttctggcttccctgaagctgccacacttgctagatgggtttgccagagttatcagtaatttccttcccgtgctgtttctgatacctcacctaaatggtttggttcttttttattgtaatctcatagctattcttttgggccccaatacagctaccatctaggtatggaattacttaatcaatcagatggagctggtgaagcattgttgaaaatgctctggcatcatccagatgctgttctgtgctgctcctttaaggagaaacctatgtttacgtttgcaaacaaggcagggctggacatgttagaaacatctcttgttgccctgcaagacctgacgctagacaagatcttcgacgagtcaggaaggaaagcactattctcagacatctcgaaactaatggaacagggctacgcgtacctgccgtcaggcgtgtgcatgtcaggaatgggccgccatgtttctttcgaccaagctgtagcgtggaaggtgctcggcgaggatagcaacatccactgcctggcgttctgcttcgtcaactggtccttcgtgtgactgacgcccaacccgtcgggtggttatggcgagctgaccctttttttgtatggaaaatcatcagctgtgacaaaaggcatatgttgcatgcactagttgaagaaactggtccaaatgctttttttgtttgtcattccattcagatgttgctaggtgtggagtggaaatggggcaatagtgtcacggttacacatgacccagcattaaccaaacaaccgcgtcgccagtttctttctattcgatcagggagatgcattttctggcaaaaatctcctatttttttgttgcaaatttggtctatgtatatggaactgctgctggacgccgagaaagcaagacatatgcggaaactcactatggctcgaggaaaatatatgcctacactgtcttcagaaaacataatgcagtaatgcttttcgaacccaaagcacacttgacacaaagctggagcacatgtaaagaggcacgccagatgagcaggtagggtctctcgcaaggctgatgccaacaattaaaccgacgacccttcacaacaaaatcacgattctttgttctcatcctgctccagttgaggctccttctctgcagcctcctcaaatgtctctccttggacaagctcagggacgtcgtcatcatcctgtgcagctgcttcagcaccaggtacct

SEQ ID NO: 156984 - DNA, 3662 bp, Zea Mays
ctgcactctccccactcaacaatcaaccacggcgtcacaaccgcacccctccgaaccctagctagcaccgcgcgccggagccccggagtaggtgcctgcttgccctcctgcggtggccgtcgcgctgccgccgcctgatccgattcgtctagccgtgtcaagcgccaccaccggtgatcgatgcgaggcgccgcgggaggcggctcgggctcgggcaggctgtgaggagaggctgtccgctcgctgcgtcgtgcgcctgtctgcgcgcgcgtctgctccgccgtccgcgccaagccgtccctcgccgaggggggctgcctctcacggccgctcggcctcgccgcgcgtctgcttcccaccacccacgcagggatcctcgcgggctggaggtcgaagcgcgagcggagagctaagagcaacaaggcgacgagatttgtgtggctacgattttgcgttgccgacggaacatgggaacaatggttgcagcggtggcgttgcgagggggaagcagcgatagcggaggatttgataaggttcccgggatggactcgggaaaatacgtgcgctacaccccggagcaagttgaggtgctcgagcggctctacatagattgccccaagccaagctcctcacggcggcagcaactgctgcgcgagtgtcctatactctccaacattgagccaaagcagatcaaggtctggttccagaaccggaggtgccgcgataagcagcggaaggagtcttcgcggcttcaggctgtgaacagaaagttgacggcaatgaacaagcttctaatggaagagaatgagcggcttcagaagcaagtctctcagttggttcatgaaaacgcgcacatgcggcagcagctgcagaatacttcattggccaatgacacaagctgtgaatcaaatgtcactacccctccaaaccctataagggacgcaagtaacccttctggactccttgcgattgcagaggagaccttcacagagttcctctcaaaggctactgggacagctattgattgggtccagatgcctgggatgaagcctggtccggattcagttggtatcgtggccatttcgcatggttgccgtggcgttgctgcccgcgcctgtggtttggtgaatctagaaccaacaaaaggcatagagatcttgaaagatcgtccctcttggttccgtgattgccgaagtcttgaagtgtttacaaggtttccagctggaaatgggggaacaattgaacttatttacatgcagatgtatgccccaacaactttagtccctgcacgtgatttttggacactacgatacacgacaacaatggaagatggcagccttgtggtctgtgagagatccttgagtggttctggtggtggtccaaatgcagcctctacacaacaatttgttagggctgagatgcttccaagtgggtatttagttcgcccatgcgaaggtggaggatcaattgtgcatatagtggaccatctagatctcgaagcatggagtgttcctgaagtgcttcgaccactgtatgagtcttctagagttgttgctcagaaaatgactactgtggcactgcgccaccttagacaaattgctcaagaaacaagtggagaagtagtgtacgccttgggaaggcaacctgcagtcctacggacctttagtcaaagactaagcagggggtttaatgatgccattagcggtttcaatgatgatggctggtctgtaatggggggagatggcattgaagacgttgttattgcttgcaactcaaccaagaaaattaggaataccagcaatgctgggattacatttggagccccaggaggcattatttgtgcgaaggcatccatgttactgcagagcgtcccaccggcagtactggtacgatttctgagggagcatagatctgaatgggctgattacaatattgatgcgtatttggcttcatcattgaagaccagtgcgtgctcacttcctgggttgcgacccatgagattttctgaggggcagatgatcatgccacttgctcacacagttgagaacgaggagattcttgaagttgtccgccttgaaggtcagcctcttactcatgatgaagctcttctttcaagggacatccaccttctccagctttgcactggaatagatgagaaatctgtgggttcctccttccagcttgtgtttgcaccaattgatgagcatttcccagatgatgctccattgatttcttctggctttcgtgtcataccacttgatgtgaaaacagatggtgtatcctctggtaggacgctagatttggcatctagtcttgatgtgggctctgctgcaccccaagcctcaggggaatctccagatgactgcagtttgagatctgtgctgacaatcgcctttcaattcccgtatgagatgcaccttcaggacagcgttgcagcaatggcccgtcaatatgttcgtagtgtcatttctgctgtgcaaagagtgtcgatggctatatctccctcccaatctggtctaaatgctgggcataggatgctttctggcttccctgaagctgccacacttgctagatgggtttgccagagttatcactaccatctaggtatggaattacttaatcaatcagatggagctggtgaagcattgttgaaaatgctctggcatcatccagatgctgttctgtgctgctcctttaaggagaaacctatgtttacgtttgcaaacaaggcagggctggacatgttagaaacatctcttgttgccctgcaagacctgacgctagacaagatcttcgacgagtcaggaaggaaagcactattctcagacatctcgaaactaatggaacagggctacgcgtacctgccgtcaggcgtgtgcatgtcaggaatgggccgccatgtttctttcgaccaagctgtagcgtggaaggtgctcggcgaggatagcaacatccactgcctggcgttctgcttcgtcaactggtccttcgtgtgactgacgcccaacccgtcgggtggttatggcgagctgaccctttttttgtatggaaaatcatcagctgtgacaaaaggcatatgttgcatgcactagttgaagaaactggtccaaatgctttttttgtttgtcattccattcagatgttgctaggtgtggagtggaaatggggcaatagtgtcacggttacacatgacccagcattaaccaaacaaccgcgtcgccagtttctttctattcgatcagggagatgcattttctggcaaaaatctcctatttttttgttgcaaatttggtctatgtatatggaactgctgctggacgccgagaaagcaagacatatgcggaaactcactatggctcgaggaaaatatatgcctacactgtcttcagaaaacataatgcagtaatgcttttcgaacccaaagcacacttgacacaaagctggagcacatgtaaagaggcacgccagatgagcaggtagggtctctcgcaaggctgatgccaacaattaaaccgacgacccttcacaacaaaatcacgattctttgttctcatcctgctccagttgaggctccttctctgcagcctcctcaaatgtctctccttggacaagctcagggacgtcgtcatcatcctgtgcagctgcttcagcaccaggtacct

SEQ ID NO: 156985 - DNA, 3000 bp, Zea Mays
cttttgttgtgtgcatctcgtctctcgacccccagcatttgtacgaagtttgacgccttcggtgccgtagctcatttgcagccctccatttcctctgtctcccagggatcctcgcgggctggaggtcgaagcgcgagcggagagctaagagcaacaaggcgacgagatttgtgtggctacgattttgcgttgccgacggaacatgggaacaatggttgcagcggtggcgttgcgagggggaagcagcgatagcggaggatttgataaggttcccgggatggactcgggaaaatacgtgcgctacaccccggagcaagttgaggtgctcgagcggctctacatagattgccccaagccaagctcctcacggcggcagcaactgctgcgcgagtgtcctatactctccaacattgagccaaagcagatcaaggtctggttccagaaccggaggtgccgcgataagcagcggaaggagtcttcgcggcttcaggctgtgaacagaaagttgacggcaatgaacaagcttctaatggaagagaatgagcggcttcagaagcaagtctctcagttggttcatgaaaacgcgcacatgcggcagcagctgcagaatacttcattggccaatgacacaagctgtgaatcaaatgtcactacccctccaaaccctataagggacgcaagtaacccttctggactccttgcgattgcagaggagaccttcacagagttcctctcaaaggctactgggacagctattgattgggtccagatgcctgggatgaagcctggtccggattcagttggtatcgtggccatttcgcatggttgccgtggcgttgctgcccgcgcctgtggtttggtgaatctagaaccaacaaaaggcatagagatcttgaaagatcgtccctcttggttccgtgattgccgaagtcttgaagtgtttacaaggtttccagctggaaatgggggaacaattgaacttatttacatgcagatgtatgccccaacaactttagtccctgcacgtgatttttggacactacgatacacgacaacaatggaagatggcagccttgtggtctgtgagagatccttgagtggttctggtggtggtccaaatgcagcctctacacaacaatttgttagggctgagatgcttccaagtgggtatttagttcgcccatgcgaaggtggaggatcaattgtgcatatagtggaccatctagatctcgaagcatggagtgttcctgaagtgcttcgaccactgtatgagtcttctagagttgttgctcagaaaatgactactgtggcactgcgccaccttagacaaattgctcaagaaacaagtggagaagtagtgtacgccttgggaaggcaacctgcagtcctacggacctttagtcaaagactaagcagggggtttaatgatgccattagcggtttcaatgatgatggctggtctgtaatggggggagatggcattgaagacgttgttattgcttgcaactcaaccaagaaaattaggaataccagcaatgctgggattacatttggagccccaggaggcattatttgtgcgaaggcatccatgttactgcagagcgtcccaccggcagtactggtacgatttctgagggagcatagatctgaatgggctgattacaatattgatgcgtatttggcttcatcattgaagaccagtgcgtgctcacttcctgggttgcgacccatgagattttctgaggggcagatgatcatgccacttgctcacacagttgagaacgaggagattcttgaagttgtccgccttgaaggtcagcctcttactcatgatgaagctcttctttcaagggacatccaccttctccagctttgcactggaatagatgagaaatctgtgggttcctccttccagcttgtgtttgcaccaattgatgagcatttcccagatgatgctccattgatttcttctggctttcgtgtcataccacttgatgtgaaaacagatggtgtatcctctggtaggacgctagatttggcatctagtcttgatgtgggctctgctgcaccccaagcctcaggggaatctccagatgactgcagtttgagatctgtgctgacaatcgcctttcaattcccgtatgagatgcaccttcaggacagcgttgcagcaatggcccgtcaatatgttcgtagtgtcatttctgctgtgcaaagagtgtcgatggctatatctccctcccaatctggtctaaatgctgggcataggatgctttctggcttccctgaagctgccacacttgctagatgggtttgccagagttatcactaccatctaggtatggaattacttaatcaatcagatggagctggtgaagcattgttgaaaatgctctggcatcatccagatgctgttctgtgctgctcctttaaggagaaacctatgtttacgtttgcaaacaaggcagggctggacatgttagaaacatctcttgttgccctgcaagacctgacgctagacaagatcttcgacgagtcaggaaggaaagcactattctcagacatctcgaaactaatggaacagggctacgcgtacctgccgtcaggcgtgtgcatgtcaggaatgggccgccatgtttctttcgaccaagctgtagcgtggaaggtgctcggcgaggatagcaacatccactgcctggcgttctgcttcgtcaactggtccttcgtgtgactgacgcccaacccgtcgggtggttatggcgagctgaccctttttttgtatggaaaatcatcagctgtgacaaaaggcatatgttgcatgcactagttgaagaaactggtccaaatgctttttttgtttgtcattccattcagatgttgctaggtgtggagtggaaatggggcaatagtgtcacggttacacatgacccagcattaaccaaacaaccgcgtcgccagtttctttctattcgatcagggagatgcattttctggcaaaaa

SEQ ID NO: 156986 - DNA, 1294 bp, Zea Mays
atcgtcaaataattaaactaaaagaactggaagctgttggactccgtcttaacaaaaggcctccccagatatacttcaagaggaagaagacgggtgggatttctttcaataccactgttcctttgactcatattgatgagaagctgtgctatcagattctgcacgagtacaaaattcacaatgctgaggtgttattccgtgaagatgctactgtggatgatctcattgacgttatcgaagggaaccgaaagtacataaagtgcgtctacgtatataacaagatcgatgttgttggtatcgatgacgttgataatcttgctcggcaaccaaattcactagtgatcagctgcaatttgaagctgaacttggacagactacttgcgagaatgtgggaggagatgggcctagtgagggtgtatacaaagccacagggccagcagcctgatttcacagaccccgttgttctttccaccgacagaggtggctgcacggtggaggacttctgcaatcatatccatagaagtttgctcaaggacgtgaagtatgtgctcgtatggggaaccagcgcaaggcactatccacagcattgcggcctcggccatggccttaacgacgaggatgtcgtccagatagtaaagaagaaggaaaaggaggagggtgggcgaggccggttcaagtcgcacacgaacgcacctgaccggatatctgatagggtgaagaaagccccactgaagacataataacgggttccctgagcgcgtcgtgatcagcttctccaaaccagatggacaacacaagctcggtgggagatcataaaatctggaactagctgagccgcggcgtgctacttgttttgtagtaccagaacagaaggggccaccgccatgtttggagtactccaccttccacaatacctacaccaatgcggcaccaccatgaacactgctgcgtcttgctcgtatgatgtgggcttatcactgtgtgttacctgctatatatgatatgataaatacttgccaactcacggattctgcgtctgcttattagcagcagcctagcctttgttgtgggaaacatttgtgggtaccaacgcgagggcagtttgagaaaggtccgagccgacatcttgagtgtgatagattgaacatgagggtgaaggggattacaagttctagtatcacctttatgggagggcaagggataagagatgatctaaataatattgttcattggatttgagtgagtctagtgatctaaaccgttagttttgatgatgtgttaagtttggatataa

SEQ ID NO: 156987 - DNA, 776 bp, Zea Mays
accatgggatggaagcaggcgccgaagtcgtgggaggcgacgaagacgtggtcggccccggcggagcgattccaatacggcatcccggcctggacgaggtcgacggcgtcggcgagcatgccccgggcgtgcgacagcgaggggaagccgttgggcgtggagaagttgcaggagacgtagacggggacgaagaagaggtcggcgtcctcgggccgcgcggcgcggccggtgtaggcgagcagcgcttcatgcaccgctacctcggccgcgaagaggtggcgcgcgcaccgcgcgtcggcgaccgcccagtcgcggttgaagcgggcggggaggtcgtagacgtagatgcggacggggggcgccgcggctgcgccggtggcggcgagggcgcggggcttggagcggaggaaggaggagcggcggagcggagcagctgcgggcggcgtggcggagaggaagagggcgagggagacggcgaaccagagcaggaggaggagccacgtggagtgcttccgcagcttgtcggcgagagtgggggctgctgggcttctcctcggcctgggatctcccatggccgatgcgcgagggtggacggagatcacaccgaagctcctctcagctatgcttttgtttggctttgtggcatcatgttgtttttttcagagctcgctggttcggctgctgtgctgtgcgtataaacgcaccgttctaatttataattgctttaactttttaaatttaagtttaacctactcatcttattcaaaaaattataa

SEQ ID NO: 156988 - DNA, 572 bp, Zea Mays
tgccaactgttgtcttccacaattttctttcagtaaggtacatgtgtacacataactgattttatttcataaagcaaatagaagtactccattttgtcttcatctctactaatgccaactaacactgcgtgcagtttccatttctaatctacattctatggatttcatgattgttgtttattatctttttgcttttttgcctatcaaagtcaaagttgcagaatatgattgagattcatgcatttactatgctttgataatattgctacctcacgagcaaaaaaacggattgttaaacaacaatttggttacataaattgcagaattgtgtaatcagtagtgtgttccatgtttcatatatatgaaaaaattgtgctacatttgtcagaccttatgagaaggaaagttttggtaaactattatttaatttaatataagatatctatcacttagtaattgaataatattgtagcaatttgatttccatctcagctcatgctaaatattattacaactaatgtatatgactagcaataatcaacatgcacaatgatgagtatcttgttcctttc

SEQ ID NO: 156989 - DNA, 2465 bp, Zea Mays
ccggctcttgcctcactcctcaaaaaatctcgccagctctctctccaatctcgcctcccccgcgtctccggctgcgtttgctccgccggcgctccactcgcctcccccgcgtctccggccgcgtttgcttcgcggcgctccaaggttccagaacccgtcgtcgcggcggtgtcctcgcgccatgcccttcttcctggaccagcgccgcgacccgcgcctgttgtcggtgccaccgccgcagtcccactcccgctgcagcaactggtgcagcgcgctgccgttgtcgctcgagctcagctgccccaggaagtgctcgcagctgctccccgctgctccccatcgatccactcccgctaccgccgcgaggtgcgtgtgcgcgtggcttggtgcgtgcgcgctctgtggtggtgtcgagagctgggcttggctttggtgcacatcaaatgtggttcatcctctcatttgaagccctacatgaaaataataaaacgtgtcacacatcaacatattacaatggcatctctgttttgctttgatatttatagtttccctcttaattatatgaagcccacatgtttcaattctgtattgctctgcttaataaatgggatgcttcatattggtgagggtaaaacataagcgaaggcaaatgatgctaaaacagagaaatattggacaaaaatcactcaagatcttctactattgcctgatcatgacgatttgcagtgcattgtagttgtagattatgcttatctaaatctagaagacaagtttgcaagcattgaatacttcaaggataatgtagacttcaaatttaatagttatattatagataccattttctggataaacaaaggaatatcttagcaaaaatagattgccaaaggaccagatagacattgttgggactatgcttcgtcgcgccgaaggtcttgtaggaagaagcagcttcagctgaagctgtccgcaggagatgaccgaaggttcttcttcatgaagcttcggaattacaaaccgacttaaaagtagaatgacttttcagtccataaatgtttgggtcgctgttgtaatcccttatgaaggacataattgtaattcctcacagactgtgtcccgtgcctataaatagtgaacagtactcccttactgagggaggacatttttccgatatttgcaatcgcatcatttgggaaccaacctttgttaaggcagaggtataattgtattcaacacttaaatatattgaatgaatacaatatggttcatttatgattcacttacctatgatactctatattttttcttatacaatctgttgtaattcaattacgaagatttaaccttcgtaattgtattgacttcaaccttcgtccaaggcccattattctcgagggaataatgcttcattggacgaagaacattaacatttaacattttatgttgccttgttcttaattcatagcatttgagaacttctatttccgtttttgacaatttttctccaaccaaattttggaacatgaaagcttcgtcctctgaagcttcgtcagcaatctccttttctttcccagacactgcggccatggcctcttcggcggcggtagtggcttcttctgcggccatgtctagcagtattttgtcgatgtgttcaattgtgctttccaagttcaagccttcagttgaggtagcttcggcagccgtgacctccgaaggtgtgatttcaatatttgttatttcttcagccgttggtatcttttgagctgaagctcttggtggtgtcttgtcaataacttctgtcactgcaatgattctttgtctctttgttttagttgttttcttcgttttttcgggctccttttccttctgaaaaaattttgtcagttgaggccctaatggacttagtttcacaggcagggattcagtcattaccttcaaaatctcttccacgtcagtagcagagtgtgatgcgggagtctcttcttcgtcagatactttttgcttcggagatgatattttcttcttcttcggaatattcttctcttttggtggttctttctcatcttcatttaaagcttcgactccccttttccttttccgaccttcgacaattttattcagttgttcgtagtcagggtattcaaaacccaaggcgtccagcactcgattcaatcttcgcttcggtcgggtaccgaaagccgcagtcatcagctgatcttcttttttggagtaattaccgagtatttcattgcacattatttcaactgtgtccagccactcttggcaaggttttttaaagtatttcttaaacttgtaatagtaaggtaaccgcacaagttccccttctttcttctccccctctagcttcggcatttcccattcttttaagttaggaaaaaccctgaaggccaagaactcttgaaccaggtccctagtgctgatatgctctgaaataattttaaactcag

SEQ ID NO: 156990 - DNA, 691 bp, Zea Mays
ctcactcctcaaaaaatctcgccagctctctctccaatctcgcctcccccgcgtctccggctgcgtttgctccgccggcgctccactcgcctcccccgcgtctccggccgcgtttgcttcgcggcgctccaaggttccagaacccgtcgtcgcggcggtgtcctcgcgccatgcccttcttcctggaccagcgccgcgacccgcgcctgttgtcggtgccaccgccgcagtcccactcccgctgcagcaactggtgcagcgcgctgccgttgtcgctcgagctcagctgccccaggaagtgctcgcagctgctccccgctgctccccatcgatccactcccgctaccgccgcgaggtgcgtgtgcgcgtggcttggtgcgtgcgcgctctgtggtggtgtcgagagctgggcttggctttggtgcacatcaaatgtggttcatcctctcatttgaagccctacatgaaaataataaaacgtgtcacacatcaacatattacaatggcatctctgttttgctttgatatttatagtttccctcttaattatatgaagcccacatgtttcaattctgtattgctctgcttaataaatgggatgcttcatattggtgagggtaaaacataagcgaaggcaaatgatgctaaaacagagaaatattggacaaaaatcactcaagatcttctacta

SEQ ID NO: 156991 - DNA, 104 bp, Zea Mays
tcgggtttatcaagtgcagggtcacgagggaggggaattgtctagatggcgttgtaggagaagtgtccaagatctgcgaacattgcttcggatcctgaatgaac

SEQ ID NO: 156992 - DNA, 101 bp, Zea Mays
tttttattgtcacaatctcagaggtattatttcaaagagtagaatgctttcttagatattggagaaatataaattgttacattgtatgtcacaccttttta

SEQ ID NO: 156993 - DNA, 357 bp, Zea Mays
atgtaccgcagtaactctgctataacagaagaaactgaaggtccttttggactatcaacaacagaagcatcattgagacgtctcactagtagctccacaaacatgcgcacatatgtttgtgagagagtaatggtgtcaaccagaccaagcataataggcaagagaagttctaaaacgtcaactgaatctctctcctggagttggttagatagccattcgataagtactgagggaacaagcaattcttctgtgagatgccattggatgagacgaaccatataccgccatttgaagtgcaccaagggttcttcaatgtctccagcagctggagatgcttcagttttcatttttatctga

SEQ ID NO: 156994 - DNA, 834 bp, Zea Mays
atggagatgagggcagccccggacagggctacgcctagaatggtcgcggcgatgagtccgcccacgccggagagggggacgctggggaggagggttgcagctgtggctgtgtcggcgggctcgccgcgaagttcgccggacagagggagaccggcgctggtggagagaagctccgctacagcgctggctgttgaattgattgatgcagaaatagcccagtcattttcacaacaaaggaaacaaagagagggcggtggtcctacatatcatgaaacttttgcttatgctcaagggccgtttgctcgtgtacctgaagcattaagttctaagcctgggcatttatctgcttcccaacagagagtgtacgaggactttgttcatgtatggcatccccacaatcaaaatgtgggagctacaggttctggtctgtctggtgttgctactgtctcgagtactcttggtgtacttcgagcttacagtccaaattcgacatcagcatcctccagtaatttgtcaactgtccatatgggtggactaacatgtataactcagccgacagaactggggtctgaggatactgttatcgcacaatttttgagtaatcctgcccaagttggaccaagcgagtctcctgtcctatttagtggaacagttggtgctgcatctacattttctccattggcatctaatgaccttcctgaaataagtgctatggtgccccctccatcaacatctgctgatcgtctgggatctattttacctgaacctttgaatactggggatgctttggagagatacaaacaggttgctcagaagtacctagttatcccttaa

SEQ ID NO: 156995 - DNA, 3432 bp, Zea Mays
atggccgtcggggccggggtaggcgccggtgggggggggggggggtgggcgggaggcggagaggttgggagccgaacggggcaacatgccatctactgtattatagtaactttgattcacagctacactgttatgatgtcttttttaggattaccgaggcagccttcatatactactggatttgggactgctttgaatatagagacgcttgttgcagcagcggaacaaagagatataccaattgagacacctccacctgaagttcaggacaagattctttttatgatcaacaatatatccatctcaaacatggaagctaaggcaaaggaatttaatgaggtcatacaggaacaacattatccttggtttgcacaatacatggtcatgaaaagggcaagcattgaaccaaatttccatgatctgtatttgaagttctttgataaattaaactcaaaatccttgaacaaggaaatgctgaaggctacgtatgagaactgcaaggtcttgttaagatcagaccttatcaaatctagttctgaggagcgttccttgctaaaaaacttaggcagctggttgggcaagttcaccattggtaggaaccaggcactaagggctaaggagattgacccaaaatctcttattgtggaggcgtacgagaaaggattgatgattgcggtcataccattcacttcaaagattcttgaaccttgccagtcaagtatcgcatatcgtcctccaaatccctggaccattggaattctaagtctacttgctgaaatttataatcttccaaacctgaagatgaatctgaaatttgatatcgaggttctgtttaagaatcttacagttgacatgaaggatgtgaaaccaacttccctgcttaaagatcgtctgcgcgaggtcgaaggaaatccggatttttcaaataaagatgttactacctctcaaacccctgtggttccagaagttcttccagggactattccttcatcaactcatgttgaactgcagcctgagatcaatattacatcccgagctatgagtcttccaaatatactcaatcagtatgtggctcctgtccgtctacccacaaacagcacggtagaagctgacaaagttgctctgatgatgcctgagcaagtgtcctccttgacccagcttatggcagctattccacgtgatgagatatgcttcaaaataaacccaaagcttggctcaattggtccacaattgcagtatagcaaaattatggatttggctttggataaggctaacagggagataatactccctgttattcaaagaagtgtgacaatagcaagccgaactacaaaagaacttatcctgaaggattatgcactggagtctgataacaatatgataactcgatctgcacatttgatggttggaacattagccggaagtcttgcccatgttacttgcaaggacccttcccctggtgttcagcgcggcggacgtccggaggtgctgcgctacgcgccgtgtcctccttcctctggcctctcgccggctcttactccaagaccgacgaccactcaacttccctccccggcgtcggaggattatccccttggtgttgtgcacggcggaagatcgaaggagcaacgctggctggaggacggtggagcttgtgcctcctctgctgcgtcactagttcagggtgacgtggggaagaaatcctatagggaggctctgctttctcccaagcctgctgcgtccagggacgttggtggttgggtaacggtggttcgtcggcgttcgaacaccttgaagtccctctccagacctgtcccggtggatttgcgcggaagatgcttcaattgtttctcgtctgagcaccgtgcggctgtgtgccgtaatcgcgtgcggtgttttttctgccggttcccggggcaccgtgtgggcgtgtgcccgcgccggcggacggaccctcccatccctggacgcactttggtgtggcgacctgtggctatgagaccttcggagaagactgtctgcggtcgagagatggctgtggctggcgggtctggacctgttacaacgactggtgaaggcgcaaagaagagaactcgccgtggacagtggaagaggaagtcgggcgctggggagcagttgcctcctccgcctgccttcggcctggataagccggtgagctttgtcgggcgttgtggaagaattgatcgggctgaggaggaactccgtcgtgcactgatcgtcagtgttgtaggcagggaggattctggctgcgccgtggaggtgcgtgacgcgatcgccttgaggttttgccttgaagcagggtcgctccgcatacgtcgtgctgcgcctaattctttccttgtcttcttcccctcggttgccgtggctgatcgggtgattggggaggggcaatctcttcatgtccctccgctcaggttgcatattcgaaggtggtctcgtcaggctttcgcttctggaggtggacaaccgcttgtgcccgttggcgttgaacttcgtggaattcctgcgcatctctgggggattgaggcggctgaggctgttcttggtgcattctgtttgattcatgggtttttgcctggcttgggtaaggaggaagatatgtctgttctcagactgaaggtatggtgccggtcacctgtgctgctgccggcggtggtggatctccttgctgaagagccgttggtctgtggagaggatgggagctgggttcctagcacgttggtgttccctgtttctgtggtggttcttcattctgatggaagttcagcttccggtgtggatcctcctgcgccacccccttcgggctttgtcgacgaagatagtgatcatgaacatcatgtggagcggccggggcgccctgcgtcttctgttcgggttccaattcatttgcgtctgggtcagcgcagtcgttctgggctggtggatgacatgtctgttgaggctgttcatcaggagttggtggaggggggatcagttgatgctccggctctcccgattgtttcggttgaggagcgggaggcgcctggtcaccctccagatttgggatcagttgatgccctggctctcccggaaatttcggttgcagagctggaggcgcctggtcaccctccagtgttagcgttggatctggcagaggatttgggggtcagttgtcaggaggactggtcttcgcatgttgttatctcgccggctgggccttgcttggacaatcctttggtgggggaccttatgtccggcttggcggaggctgtcactgctgggcagcatggttccgggttctcctatttgctgaccgacggtgtttctgctaatgtggaggaggcagtcactgctgggcagcatggttccggggtctccccaattggtggctgttggttctcctgctgttgtctctgccagggtgcggaggtttga

SEQ ID NO: 156996 - DNA, 2853 bp, Zea Mays
atgatccctgtcagcgccgatatccctgtggagctgcgcttccttctcgaatgcgccaccggctccaacttcgactccattcggctcgagctctgccagttagttgacagtggcttggatggatgcattttggtgctccgagtatgtctgaatcaaatgttgctaaatgctggggaggtcaagaacctccagttgcaacaaaagcttctatctgatgttttcagatattgtttacataagacctgcttcacaactagtttttgtgaggcgctggcaacgatagccttgacggatgattttcttgaaagcttgacaaatctgctggagctctcagttgctgagaaaattggtgttggacttgcgctgtcagattctgaggactcagagatgaagcaaaaaggtagtcatttctgtatggtcattgatatcgcctcttctgttccagggcaatggttttcaattgctcaaattgaaaagctgtgtacgagtcatatccaatctctatcaaatggtcaaattcatgaaattgtcatgtttctgcatcagtctgatggcctgtcaaagcatatggacacttttaataatattatatctctactaaaagtcacggagaggccattttttgtacctgttacgaatggagattttgatagccaagcaaatccttcaagacatttggagatgtactttggtagcacaaatgatgattttgagtcacttctgtctgaaattgggaaagagataagcatggctgacattgtagccgagttaggttacggatttactgttgacagcactcactgtaaggaaatactttccattgtggagcctcttgatgatatcgccatatctaagttgcttggggctgttgtcggcactcatattggtcttggagaggcccataacacatatgcaacatttgtatctgctattcgtaatagccacacgaatgactcacctcagccgactaaatggaacacagatgtccttgtggactcaatcaatgaacttgccccaagtacaaactgggtgcgtgtaattgaatatcttgatcatgagggtttcaatatacctgatgaagcgagcttttatctattgatgtctatatacgagtgtgcttgcaaggatccatttccacttcatgctgtttgtgggtcattgtgggaaaacacagaaggccagatatcgttcttaaagcatgcagtttgtgctccatctgataaatttacatttgcacattcttctagacacctggcatttcaggacttggcaggccctagtcaaggcaatcatgcttggttctgccttgaccttctagaagttttatgccaactagctgaagttgggtacactgcatctgtacgatcaatgcttgagtatccactgggacattgccctgagctcttacttgttggtgttagccatatcagtaccgtgtataatcttctccaaaatgaagtactgtcctgcgtatttcctgctttactgaaggatccaacaaagcgcaatgtagtgaattatctctggcatacaaactcatatctcacacttcaaggttttgttgatgctcataatgatccagattgtttgctaagaattgttgatgtttgtcatgacttgaagattctgtcgactgtccttgattctactccatttgcattttccattaaattggctgctgcttccttgaggaaagactatagtaatcttgagaaatggctgactgaaaagctatctctttatggaaaaggttttgttgaggaatgtgtgaattttctgaaagcaactatgagcaacacagattacgtcttagagggcacgacacaacctcaatctattgtcagaaacatatattgggagtcttcttatgccttcataaaggtctacatggttctccagtctcactcggggcagctcttgtcagatgcaatattggatgaaataaggaaactgtgtgtttcgtttgaatcgaggaatcctagctctgctgtaagagagcttgctaattcagacggagggtcagatgacattgaagtagaggctaatgcatattttcaacacatgttctctggacagataagtgttgattccatgatacaaatgcttgggcgcttcaaagaatctacagataagagggaggtatcaattttcaactgtatgatctcaaatctttttaaagaatatacattcttccccaagtatcctgataagcagcttaagatagcagctgttctgtttgcatgtggcggctcttcatttgaaggcacctcatcattaccactgtcattacaactggagagccgggcaacaactgaagggtcgtgcgaaactggagagatgtttatgtttggtacatcagcactggaacagtttatggaccgtgtcatagagtggccacgatactgtaattacatattgcagatctcacatcttcgtggaacacatttagaaatggtttctgttattgagagagccctagccaaaatctcctcaagtcaaaatgagccaaatgttggcaacctgctttctgcagagcagcatgtttctggttcatcatccatggaaggcatagaggcatctgaatcatcatggttgatgggtaccatcccaagtcaactaggaaggcctctttcttctcctttgcaacataggcagcagggtcttctctcggagaggtctgaggtttctatgaattcactgaataagagcaatttatccagtcagcctccccttgcttcatcgtctgctgatttgactattaattcaaagttacactgttttattgaatacgcaggagacctgcgtattaatatattaaggacaaaaaggtccaatgtggaccaagtacaatag

SEQ ID NO: 156997 - DNA, 1385 bp, Zea Mays
attagagaagagaaatagacaaccagcggtattcttcatatttatctctttgttttcagttttattttagttaaggggtaaagggtcgtattcgctagcgtttgagaaggagcatcatccccagccgaacgcacagcaatctggtccaacatccctgcctattcctcaaaggccatggtggccgctggtcgtcatgcaccagtgccaccaaggtatctccgtccagatctggccgcggatgtcgtcgttgccgacgacgcgacgaccatccccatcatcgacttccagcgactgctgctggtcgacccagaggaatctgcgcgcctccatgcggcctgccaggactggggcttcttccagctgataaaccacggtgttccggacgatgtgatggaggcgatgaaggccagcatccagtcattcttcgcgcttcctgcggaggccaagcagcagtaccgtcagcaggcaggccagctggaggggtacggccagctgttcgtcgtctccgaggaccagaagctggactgggccgacgtcctctacctcaacacgcagccgcccgagcaccggaacctcagcttctggcctgctggtgagagcttcaggcagacgctggacacctactccgccgccgtcaagcacgtcgccgaccgcctgctgggagccatgtacatgaacctgggcctccagctgagcatcatggacatggacccggagcggggtgccgggatacagtcggtgaggatgaactactaccctccctgcgctgaagcggcggacaaggtcctgggcttctctccgcactccgactcggaccttctcaccctcgtcctccaggtcaaccagctccagggcctgcagatcaagaggccgcccgacggcggcggtgcctgggcctggcttcccgtcacgccgctgcagggcgccttcgtcgtcaacgtcggggacgtcctcgagatcttcaccaacgggaggtacaggagcgtcgagcaccgggctctagtcaacgcccacacggagcgcttgtccatcgcggcgttccactctcccagcatccatgccaccatagggccgctgccggagctcctcggggaccaggaggtgcccaagtataagacgctggaccaccaaagcttcattacgctcttcttctccgccaagctccagggcaagagcttcttggaacggatgaagaagctttcgtagagccaatcggacggaccggaaagttaagcaggccgacgtaaagtcggattacatgttatcggttcggccatagcaatatagcacgcatgtatgtccggattaatttggtgaccgacgagactagttttgtctaccaattcacttttacatcgatttttaaatataaaaaacttacaaaa

SEQ ID NO: 156998 - DNA, 1335 bp, Zea Mays
aataatccttaactgtctgatcatccatgttgcaacgattctcctgtactgtacgattctcccggggagctcgacgatctagatggagatgacggggtctctccctgtgcccagcgtgcaggccatggtggccgctggtcgtcatgcaccagtgccaccaaggtatctccgtccagatctggccgcggatgtcgtcgttgccgacgacgcgacgaccatccccatcatcgacttccagcgactgctgctggtcgacccagaggaatctgcgcgcctccatgcggcctgccaggactggggcttcttccagaagatgtgcacgcagctgataaaccacggtgttccggacgatgtgatggaggcgatgaaggccagcatccagtcattcttcgcgcttcctgcggaggccaagcagcagtaccgtcagcaggcaggccagctggaggggtacggccagctgttcgtcgtctccgaggaccagaagctggactgggccgacgtcctctacctcaacacgcagccgcccgagcaccggaacctcagcttctggcctgctggtgagagcttcaggcagacgctggacacctactccgccgccgtcaagcacgtcgccgaccgcctgctgggagccatgtacatgaacctgggcctccagctgagcatcatggacatggacccggagcggggtgccgggatacagtcggtgaggatgaactactaccctccctgcgctgaagcggcggacaaggtcctgggcttctctccgcactccgactcggaccttctcaccctcgtcctccaggtcaaccagctccagggcctgcagatcaagaggccgcccgacggcggcggtgcctgggcctggcttcccgtcacgccgctgcagggcgccttcgtcgtcaacgtcggggacgtcctcgagatcttcaccaacgggaggtacaggagcgtcgagcaccgggctctagtcaacgcccacacggagcgcttgtccatcgcggcgttccactctcccagcatccatgccaccatagggccgctgccggagctcctcggggaccaggaggtgcccaagtataagacgctggaccaccaaagcttcattacgctcttcttctccgccaagctccagggcaagagcttcttggaacggatgaagaagctttcgtagagccaatcggacggaccggaaagttaagcaggccgacgtaaagtcggattacatgttatcggttcggccatagcaatatagcacgcatgtatgtccggattaatttggtgaccgacgagactagttttgtctaccaattcacttttacatcgatttttaaatat

SEQ ID NO: 156999 - DNA, 1247 bp, Zea Mays
ctgatcatccatgttgcaacgattctcctgtactgtacgattctcccggggagctcgacgatctagatggagatgacggggtctctccctgtgcccagcgtgcaggccatggtggccgctggtcgtcatgcaccagtgccaccaaggtatctccgtccagatctggccgcggatgtcgtcgttgccgacgacgcgacgaccatccccatcatcgacttccagcgactgctgctggtcgacccagaggaatctgcgcgcctccatgcggcctgccaggactggggcttcttccagctgataaaccacggtgttccggacgatgtgatggaggcgatgaaggccagcatccagtcattcttcgcgcttcctgcggaggccaagcagcagtaccgtcagcaggcaggccagctggaggggtacggccagctgttcgtcgtctccgaggaccagaagctggactgggccgacgtcctctacctcaacacgcagccgcccgagcaccggaacctcagcttctggcctgctggtgagagcttcaggcagacgctggacacctactccgccgccgtcaagcacgtcgccgaccgcctgctgggagccatgtacatgaacctgggcctccagctgagcatcatggacatggacccggagcggggtgccgggatacagtcggtgaggatgaactactaccctccctgcgctgaagcggcggacaaggtcctgggcttctctccgcactccgactcggaccttctcaccctcgtcctccaggtcaaccagctccagggcctgcagatcaagaggccgcccgacggcggcggtgcctgggcctggcttcccgtcacgccgctgcagggcgccttcgtcgtcaacgtcggggacgtcctcgagatcttcaccaacgggaggtacaggagcgtcgagcaccgggctctagtcaacgcccacacggagcgcttgtccatcgcggcgttccactctcccagcatccatgccaccatagggccgctgccggagctcctcggggaccaggaggtgcccaagtataagacgctggaccaccaaagcttcattacgctcttcttctccgccaagctccagggcaagagcttcttggaacggatgaagaagctttcgtagagccaatcggacggaccggaaagttaagcaggccgacgtaaagtcggattacatgttatcggttcggccatagcaatatagcacgcatgtatgtccggattaatttg

SEQ ID NO: 157000 - DNA, 237 bp, Zea Mays
atgggtatgggcatggtagatgtgggtggtagcaaggctgaggttgacggtggaaggttggttgaggtggatgggagtggagtggctgtggtggtgatcggcgatgatggtatgggtggcgtggtggggtttgacaagggaggtatccccgccataacctggcatgccatatggatggaagtagggctggtggacgctgggggcggtggtggtgttggcggcctactgatcatttga

SEQ ID NO: 157001 - DNA, 1118 bp, Zea Mays
aatgggattgggaatccatatcatccaccaaccgcccccacccagtctgagtctgagtcagaggtacccacccactcatccgtccgtccatccaatgcgatggtgtcgttggcgcgccggccgctctccgccgccgtacctgcgggcaacctcctcggcatccatctcttccggtgccccgacgccgttggcatcgtcgccaagctctcggaatgcatcgcctcccgcggtggcaacatccacagcgtcgacgtcttcgtccccgacgacaaacccgtcttctactcccgcagtgagtttacctacaatccaaggctctggccgcgtcatgagctccacaaggatttcctcaatctctcccgctgcttcaatgcgcaaacctccaccgtacgagttcccgatcttgaccccaaatacaacatctccatcctcgcatcaaagcaggaccactgcttgttcgatttgctctatagatggcaagaaggcaggcttccagtacacattaattgtgtcattagcaaccatgatagaccacaagataatcatgtacggcgttttctccagaggcatggaatcccataccactacttacccaccgcacctgccaacaaaagagagaaagagatcttggaattgatccagggtacagattttgttgtgctggcaagatacatgcagatactctcagaaaacctgttaaaagcatatggtaaagacattatcaatattcatcatggccttcttccctcatttaagggagggaatccttcaagacaggccttcagtgctggggtgaagttaatcggggcaactagccatttcgttactccagaacttgatgctgggccaatcattgaacagatggttgaacgagtctctcaccgagacacgttacagagttttgttgtcaagtctgagaaccttgagaagcagtgcttagcagaggctatcaagtcatattgcgagcttcgtgtcctaccatatgaactcaggaagactgtcgtgttctgatctgagctccctttattttctgtcttattgtacttttatatggattgataaaatgaattttttagcttaaatatatccatcccctcgacattattttaggtaagaaa

SEQ ID NO: 157002 - DNA, 1039 bp, Zea Mays
ggcctgatcagggcccggcgtgcttcatgtaagctccggcccgatcgatgagaggagtcagacggaggcaaggccggggtcggcagcagaggggagcagagagatctcattctccgatccgcccaggccaccatggcggaggatgctacgagcagccacccgtcacgctacgtcaagctcaccaaggaccaggacgcccccgccgaggacatccgccccggcgagctcaaccagccagttcacgtcccgcagcagctcgaaggccggaggtgtagcgagtgcggtcaggtcctgcccgagagctacgagccgcccgccgacgagccctggaccaccgggatcttcggatgcaccgatgacccagagacctgccgaactggattgttttgcccctgcgtgctgtttgggcgcaacgttgaggctgttagggaggacatcccttggacaactccttgcgtgtgccatgctgtattcgttgaaggagggatcacgctggcgattctgacggcgatatttcacggtgttgatccgaggacgtcattcctgattggagaaggtctggtgttcagctggtggttatgtgctacctacactggcatcttccgccaggggcttcagaggaaatatcatctcaagaactctccgtgtgacccatgcatggtccactgctgcttgcactggtgtgccaactgccaggagcatcgcgagaggacgggacggcttgcagagaacaacgcagtgcccatgacggttgtgaacccgcctccggtgcaagagatgagcatgctggaggaggtggaggagaagggagcagagaagagtgaacacgatgatgtggaggtcattcctctatagataatagggtcggagtccgagtgaggatagcactagcagcatcagatgacgatcacaacttctggtcattcctctatagttagttagttattgatctttcaacaacaaaatgtggtggtgtggcaactgtccatttttattatcccaaataataatactgtactacgttacggcccacgcccaa

SEQ ID NO: 157003 - DNA, 1036 bp, Zea Mays
ggcctgatcagggcccggcgtgcttcatgtaagctccggcccgatcgatgagaggagtcagacggaggcaaggccggggtcggcagcagaggggagcagagagatctcattctccgatccgcccaggccaccatggcggaggatgctacgagcagccacccgtcacgctacgtcaagctcaccaaggaccaggacgcccccgccgaggacatccgccccggcgagctcaaccagccagttcacgtcccgcagctcgaaggccggaggtgtagcgagtgcggtcaggtcctgcccgagagctacgagccgcccgccgacgagccctggaccaccgggatcttcggatgcaccgatgacccagagacctgccgaactggattgttttgcccctgcgtgctgtttgggcgcaacgttgaggctgttagggaggacatcccttggacaactccttgcgtgtgccatgctgtattcgttgaaggagggatcacgctggcgattctgacggcgatatttcacggtgttgatccgaggacgtcattcctgattggagaaggtctggtgttcagctggtggttatgtgctacctacactggcatcttccgccaggggcttcagaggaaatatcatctcaagaactctccgtgtgacccatgcatggtccactgctgcttgcactggtgtgccaactgccaggagcatcgcgagaggacgggacggcttgcagagaacaacgcagtgcccatgacggttgtgaacccgcctccggtgcaagagatgagcatgctggaggaggtggaggagaagggagcagagaagagtgaacacgatgatgtggaggtcattcctctatagataatagggtcggagtccgagtgaggatagcactagcagcatcagatgacgatcacaacttctggtcattcctctatagttagttagttattgatctttcaacaacaaaatgtggtggtgtggcaactgtccatttttattatcccaaataataatactgtactacgttacggcccacgcccaa

SEQ ID NO: 157004 - DNA, 1068 bp, Zea Mays
ggcctgatcagggcccggcgtgcttcatgtaagctccggcccgatcgatgagaggagtcagacggaggcaaggccggggtcggcagcagaggggagcagagagatctcattctccgatccgcccaggccaccatggcggaggatgctacgagcagccacccgtcacgctacgtcaagctcaccaaggaccaggacgcccccgccgaggacatccgccccggcgagctcaaccagccagttcacgtcccgcaggtctcgctctctttcttcattagggtaggcagctcgaaggccggaggtgtagcgagtgcggtcaggtcctgcccgagagctacgagccgcccgccgacgagccctggaccaccgggatcttcggatgcaccgatgacccagagacctgccgaactggattgttttgcccctgcgtgctgtttgggcgcaacgttgaggctgttagggaggacatcccttggacaactccttgcgtgtgccatgctgtattcgttgaaggagggatcacgctggcgattctgacggcgatatttcacggtgttgatccgaggacgtcattcctgattggagaaggtctggtgttcagctggtggttatgtgctacctacactggcatcttccgccaggggcttcagaggaaatatcatctcaagaactctccgtgtgacccatgcatggtccactgctgcttgcactggtgtgccaactgccaggagcatcgcgagaggacgggacggcttgcagagaacaacgcagtgcccatgacggttgtgaacccgcctccggtgcaagagatgagcatgctggaggaggtggaggagaagggagcagagaagagtgaacacgatgatgtggaggtcattcctctatagataatagggtcggagtccgagtgaggatagcactagcagcatcagatgacgatcacaacttctggtcattcctctatagttagttagttattgatctttcaacaacaaaatgtggtggtgtggcaactgtccatttttattatcccaaataataatactgtactacgttacggcccacgcccaa

SEQ ID NO: 157005 - DNA, 909 bp, Zea Mays
ggcctgatcagggcccggcgtgcttcatgtaagctccggcccgatcgatgagaggagtcagacggaggcaaggccggggtcggcagcagaggggagcagagagatctcattctccgatccgcccaggccaccatggcggaggatgctacgagcagccacccgtcacgctacgtcaagctcaccaaggaccaggacgcccccgccgaggacatccgccccggcgagctcaaccagccagttcacgtcccgcagctcgaaggccggaggtgtagcgagtgcggtcaggtcctgcccgagagctacgagccgcccgccgacgagccctggaccaccgggatcttcggatgcaccgatgacccagagacctgtatgtaatctagtctctcttttggattggaacttgggcatggtggtctgctgattctgttagcgacaacacatgctgattcaaaatattcattcagtccaaaatgcctgatcaaatgtttgctttgcttagcacttgtatgatctccctgtcaatatctgtatggaatcactaggccgaactggattgttttgcccctgcgtgctgtttgggcgcaacgttgaggctgttagggaggacatcccttggacaactccttgcgtgtgccatgctgtattcgttgaaggagggatcacgctggcgattctgacggcgatatttcacggtgttgatccgaggacgtcattcctgattggagaaggtctggtgttcagctggtggttatgtgctacctacactggcatcttccgccaggggcttcagaggaaatatcatctcaaggtggccaattcaactcaactcaactctcctctctttccactactgttaattaagagcgagctaactcttgtttggccagaactctccgtgtgacccatgca

SEQ ID NO: 157006 - DNA, 2463 bp, Zea Mays
catgggcagatggggcttggcaaaaccctacaagcgatttctctattgagctatctcaagatccaccgtattgcacctggaccatttctggtcttatgtcctctaagcgtcacagatgggtggctgtcagaattcagtaaattctgtccttccttcagggtgatgcagtatgtaggtggtaagcttcaccgccgtgaccttcggaggaccatctatgaagatgtacagaaagcttccacatcatctcgatcctttgaattaccatttgatgtgctcatgacaacgtatgacatagccttgatggatcaagatttcctttcacaaatcccctggcactatgcagttattgatgaagctcaacgtcttaaaaatccatccagtgtactgtataatgtccttgagcaacgtttcatcatgccaagacgtctactactaacaggcacacctatccagaacaatctttctgaattatgggctttgatgcacttttgtttgccttcaatatttggaaagctggatgagttcctttctacatttaaggaagcaggggaatcactgacaggtgatgaagctaataaagcaaaaggccaattcaagatcattaaacatgtactcaaggcatttatgctacgtaggacaaaatttttactaatcgagagtggaattctggcgctgcctccactaactgagctaacagtgatggtgccgttgacacagttacaaaagaagctttacatgtcagtgttgcggaaagagctgccaacacttatttcatttgctagaggatcatctcgccaccagtctttgcaaaacattgttatacaactgaggaaagtttgcagtcacccatatctgttcagtggcattgaacctgagccttatgtggaaggggaacatttaattcaggctagtggaaagctcattgtcctagatcttatcctgaagaagctccatgaatgcggacatcgtgttttgctatttgctcagatgacccagacactggacattcttcaggattttctagagctacgcaattacacttatgagcgcctggatggttcagtacgtgctgaggaacggtttgcagcaataagaaatttcagttctcaatctacaaaaggtcttatcagagatgataatcgaagtgaagcatttgttttcatgatatcaactagagcaggtggtgtggggcttaatctcattggtgccgatactgttatattttatgaacaagattggaatcctcaagctgacaaacaggctctacagcgcgctcaccgcattggacagctgaatcatgtcttgtcaataaatttggtgtcacagcgcacaattgaagaggtcataatgcgaagagccgacagaaaacttaagcttagccataatattattggagaagaagacgggactgatgggaagggaggagatccaggaattgaagctagtgacatgagatcaattatctttggcttgcacctgtttgatccagcagatacagctacagaaacaatcgatgaggatataactgctgagacattcagtgtcgagaaactggcaaagttaaaaacaatgtctgaaaaggttgtcatgatgcgtagccatgagtcttctgaaaaggatgaacgagcatttgagatcaatccaaatatgactgatgacagtggaactgtgattagaagggcttctgattctatccgcattgatcctgggctaaatgaagctgcatacctatcctgggtcaagaagttcaaagaggcttccatttctagtgaagatgccacagttggatttggaaggcaaagagcagcgcctgaagaaaagctcctgaaacatgatgttaacaagcaaaaaatagaagaaaagagattggccaaatgggaaagtttgggttaccagacactagcagttaaggaacctgatatcacagcaagccagaatatttcagacgcgggatccatccaatttgtatatggagattgtactaatccttcaaaagtttgtcccgcaaagcctgccatcatattcagctgcatagataattctgggacttgggggcatggagggatgtttgatgctttgactagtctgtcgacatgcattccagatgcttatcaccgtgcttctgaatttgatgatctccacatgggcgatcttcacttgattcagcttgatgaaggcaactgtacccggagtttggatgcacctttatgggttgcactagctatcgttcagtcttacaatccgaggcgtaaagttccgagaagtgaaatctccatgtctgatttggagctctgtatatcaaaagcagccttctcagctgctcagcattctgcggctatccacatgccccgaattggttaccaaggtggctcccaacgatcagaatggtatacaatagaacgcctgctcaggaaacactcatctctccatggaatcgacatttttgtgtatgccatgagaaca

SEQ ID NO: 157007 - DNA, 2509 bp, Zea Mays
ctctccgccgacgcccaggacaaaggaatccgcctcccggacctcgggcgtcacggccgacctcaagccgcaccagctccatggcgtcgcctggctcatccgccgctatcgcctcggcgtcaacgtcgtactcgtggtcttatgtcctctaagcgtcacagatgggtggctgtcagaattcagtaaattctgtccttccttcagggtgatgcagtatgtaggtggtaagcttcaccgccgtgaccttcggaggaccatctatgaagatgtacagaaagcttccacatcatctcgatcctttgaattaccatttgatgtgctcatgacaacgtatgacatagccttgatggatcaagatttcctttcacaaatcccctggcactatgcagttattgatgaagctcaacgtcttaaaaatccatccagtgtactgtataatgtccttgagcaacgtttcatcatgccaagacgtctactactaacaggcacacctatccagaacaatctttctgaattatgggctttgatgcacttttgtttgccttcaatatttggaaagctggatgagttcctttctacatttaaggaagcaggggaatcactgacaggtgatgaagctaataaagcaaaaggccaattcaagatcattaaacatgtactcaaggcatttatgctacgtaggacaaaatttttactaatcgagagtggaattctggcgctgcctccactaactgagctaacagtgatggtgccgttgacacagttacaaaagaagctttacatgtcagtgttgcggaaagagctgccaacacttatttcatttgctagaggatcatctcgccaccagtctttgcaaaacattgttatacaactgaggaaagtttgcagtcacccatatctgttcagtggcattgaacctgagccttatgtggaaggggaacatttaattcaggctagtggaaagctcattgtcctagatcttatcctgaagaagctccatgaatgcggacatcgtgttttgctatttgctcagatgacccagacactggacattcttcaggattttctagagctacgcaattacacttatgagcgcctggatggttcagtacgtgctgaggaacggtttgcagcaataagaaatttcagttctcaatctacaaaaggtcttatcagagatgataatcgaagtgaagcatttgttttcatgatatcaactagagcaggtggtgtggggcttaatctcattggtgccgatactgttatattttatgaacaagattggaatcctcaagctgacaaacaggctctacagcgcgctcaccgcattggacagctgaatcatgtcttgtcaataaatttggtgtcacagcgcacaattgaagaggtcataatgcgaagagccgacagaaaacttaagcttagccataatattattggagaagaagacgggactgatgggaagggaggagatccaggaattgaagctagtgacatgagatcaattatctttggcttgcacctgtttgatccagcagatacagctacagaaacaatcgatgaggatataactgctgagacattcagtgtcgagaaactggcaaagttaaaaacaatgtctgaaaaggttgtcatgatgcgtagccatgagtcttctgaaaaggatgaacgagcatttgagatcaatccaaatatgactgatgacagtggaactgtgattagaagggcttctgattctatccgcattgatcctgggctaaatgaagctgcatacctatcctgggtcaagaagttcaaagaggcttccatttctagtgaagatgccacagttggatttggaaggcaaagagcagcgcctgaagaaaagctcctgaaacatgatgttaacaagcaaaaaatagaagaaaagagattggccaaatgggaaagtttgggttaccagacactagcagttaaggaacctgatatcacagcaagccagaatatttcagacgcgggatccatccaatttgtatatggagattgtactaatccttcaaaagtttgtcccgcaaagcctgccatcatattcagctgcatagataattctgggacttgggggcatggagggatgtttgatgctttgactagtctgtcgacatgcattccagatgcttatcaccgtgcttctgaatttgatgatctccacatgggcgatcttcacttgattcagcttgatgaaggcaactgtacccggagtttggatgcacctttatgggttgcactagctatcgttcagtcttacaatccgaggcgtaaagttccgagaagtgaaatctccatgtctgatttggagctctgtatatcaaaagcagccttctcagctgctcagcattctgcggctatccacatgccccgaattggttaccaaggtggctcccaacgatcagaatggtatacaatagaacgcctgctcaggaaacactcatctctccatggaatcgacatttttgtgtatgccatgagaaca

SEQ ID NO: 157008 - DNA, 587 bp, Zea Mays
cctcgcttagttcgtttgttgcgtgaatcttggtttcttcagacgctgtttacatacatacatattgtgccgatcgacaggtgaagggaattgaccgagaagtgctgctgccaaaagatgggcaccaggaagtggctgaggtcgcgctgcagctggggaagtactgcatagatgaccccgtcaagtccccgccgggcggacggaggatggttattcgtactgccaaaagaatgggaggttgtgtactgctcggtgccaacctcgccgggcgggctctaccggacgcccttggccgcctggtattcaaaaccgacgagatggtccaggcggtggaagcgcctgacgtggtcaggaacaaggtgtcgttctccgtctttggcctagagggcgcagtgtcattgaaaggtaagctgaatgtgctggacagtaaatggattcaggtcgtgtttgaagcgccggaactgaaggtcggctccttggggtttcagtacggtggcgagagcgaagtcaagctggagaagggaaggagatgggagaagacaacagcgcgcggacggaggatagttattcgttctctcaacgattaa

SEQ ID NO: 157009 - DNA, 864 bp, Zea Mays
atggcccagacatccctggttgctgccgccaaagctcacgagacctccctcggctatcgcagaacacagatagcaccgcacagctttaacgaatggctggcgaaaggtggcatctggatcccgagggacagcgtcaacggcaaggtgaagcaggtggtgaatgccaggctccacaacgtccagcgcggccagcttgacggagatggggatcccgacggagatttatccccgtggagaacatggacaggaaagaaatgtctgccgcaagggcttctgaggatcccagcggggaaattttttcgtcacgaggatgatgatgaaaaaaaggggaccacggggtcgtcgggccaccgggtgcccatccgggacttcctcgagtacgacctggacgactactccggctggctgcgcgcccgcctggacgcgccggggcgctgggaccggatcaaggcctgcctggccgccacgcccacctgcaccgacttcaacgccacgtacgccacggcgcaggacctcttctcggccgcccccaacaggatgagcccgctgcagtccggctgctgcaagcctcccaccaagtgcggctacaccttggtcaccccgacgtactggatcagccccatcagcgccaccgccgaccccgactgcgccgcctggagcaacgaggaggccaagttctgctactcgtgcgcctcctgcaaggccggcctgctccagaacctgcgaggggagtggcgccgcgcagacctcatcctcgccgtcgccactgccgcgctgctggctgtctacgccatgggctgctacgcgttccgcaccgccaagaccgacgaactctttcgccgctacaggcagggctatacatga

SEQ ID NO: 157010 - DNA, 107 bp, Zea Mays
cttgggacaaaaggctatgttattgttgttgttgttacctttcacgtcatcaagttaaattcataattaatcacccagatggccagttcaccatctctggacaccag

SEQ ID NO: 157011 - DNA, 659 bp, Zea Mays
agttcgatgaacaagttttaggacctaaatagcgagtggtttcagttgcttgcggcagcggcccctgccgattgacgggcccgcaacatcatgccgagctcaacccagcctgctgacttggggcaccaccgtctggacggtttgcagtgcggcgaagcggtccgcccacgctgccagcagcggagcccgtcggggatggaagcactctatgccccaaacctcctggtttgcgctgacccacccaagcaggctgccgagcaccacgtccacatagccgacgctgtcgccgccgaagaagggcatcatcatccccttgccggcggcgcagtccctcagcgctccctccagcgtctcaaccacgacgagccactgttttcttccctcggctctgtcctcctccgtcttgcccctggaggcctgcatccaagacgacagcacctcgtcgtcgatgtaggcggcccagaagcgagcgacggcgcgttcgtaggggtcggccgggaggaggcacgggccggtggctgcgaagattaattatgactcctcctcgtttgtttagtgtctgaacggttgcgtgtgcgcgagcgcgactgggcaggctgcgacgcccacgcgatgtaacacaaatggaaatggattatatggcataatggatactaata

SEQ ID NO: 157012 - DNA, 1378 bp, Zea Mays
tttacaaaagaaacaagaggaacaaagaacaaaagctaaatgacacacctatcatgagttcagagctcatgatcaaataataatcctgtacttggttgatgctacgctaccagggcggctgatgaaccgaagagtgtccgtagaacggtgtccccgaggccagggacggcggacaggaagtgtccggtgccggggagctcgtggtagttgacccacgcgagggttccggcgacgtggcgctgaaggacgaccggcacgaggccgtcctcgtcgccctgccacaggtgcacggggcagggcggctccggcaggtccatggggtcgaactcccacctgccgaacatgacggccatgtcgcggtggtaggactcgtgcacgccctgctgtgtggccgcctcccgcttccgccggagcgtgccgtcggcggcgagcgcgcggcggacctcggcgtcgcgcccgttggggaggtgggtggtgttgtcgacgacggtggaggtgggtagccagcgctgggccatccaccagtggaggagcccgggcgcgtggtgcgccacgcgcagcgcccactggtccccgcgcgcctgccgcgcgtacgcctccgccgccgggcccgcggggagcccgggccaccagtagttgaccacgggcgccagcatggcggcgcccgccagcctgtgcgggatgtagcggagcgcgctccacatggcgtggcagccgagggagacgcccacggcgtagaacctgtcgcccaggcccagcgcgtcggccagctcctccatgtccagcgccgcgctccgcacggagcggcaagggttcgggtcgctctcgccgtagccggcgcggtcgaagcccaccatgtacacgcctagctcctccgcaacttcctgaaagagagaggctttgttcagcaggctgcacggtgaaatcaatcaaacgatagtactagattcgttgttctgacttaatcgttcttgttttagtgacgttatgctgtaatcgttgtgaaatttgttcaatgtcggctgttgacggaaagagacagaattgttcctccgaacggctaacctgcgaggcgcgagccggcgaagccgtgcgagaagatgatcctgtagcgcgccacctccttgggcacgccggactcctcgtaggccaggtggcggccgtcgcgcaggcgcacccggcgcaccgtaacgggcggccccccgggcgccccgcacacccgcggtggcggtagcgcggcccggcagagccactcgcccagctgccccaccagcccggcttcgtcgcgcttgccgccgcagccgagcgcctgcgtggacgcccacagcagccgctccatggtcatggtctggtccgagtgcctgagttggtcatggtg

SEQ ID NO: 157013 - DNA, 2069 bp, Zea Mays
aaccctccccttcctccgcctcccattcccaaaattttcaccgcacgccctctcgctctcctcggctaaccgcgacgacgacccccgaagcttcgcgaagcttcctgggcctccccccgcggccgcccctccctagatcgccgcctctggcagcggcgaggctgcatcgcgagggcggtggaggctggaggagccgggccacggggtcgacgaaggcgagactagggtttgggtttggtgtccagctgcatcggtcggcgccctgtgagggagaaggatgcatatgatgcggcggctcaagagcatcgcctccggccgctcgtccgtctccgatccgggtggtgactctggctccaaaaggccaaaatttgagcaggatggagcaggggatattgttattgagccacacttaactgaggccaagcctgtccggatagaccaagaatcatcatcatcatctaatagggatgctgaggcaagcacatctactagcatgaagcctgttaaaactgaagaaccagtagcagatcttcttcccaaagaattgaatgatatgacaattagtgacgataaagctgatgaccataatgataaggaaggtgaaggtgttactcttgatgggaatggagccgagacaggacagataattgtgacaacaataggaggtcataatgggaagccaaagcagaaggtctcatacatggcggaacgggttgttggtactggttcgtttggtatagttttccaggcaaaatgcttggaaactggtgagacggtggcgataaaaaaggtgttacaagataagcgctacaagaatagagagctccagactatgcagttgcttgaccacccaaatgtagttcagctgaagcatcacttcttttcaacaactcaaaggggagaagtttacctcaacctagtacttgaattcgtatctgagacagtttatcgtgttgccaaatactacaaccggatgaaccagcgtgtacccatattatatgttaagttatatgcatatcagatgtgccgtgcccttgcttacatccatcgtgttgtcggtgtgtgtcaccgtgatattaaacctcaaaatctactggtcaatcctcatacacatcaacttaagatttgcgattttgggagcgctaaaaaattggtccctggtgagcctaacatatcgtacatttgctcgcggtattatagggctcctgaactaatatttggagctacggagtataccactgcaatcgatatctggtctgttggctgtgtagtggctgagcttctgattggtcagcctttgtttcctggtgaaagtggtgttgatcaactggtggaaatcataaagattttgggtactccaacaagagaggaaatcaggtgcatgaatccaaattattctgaattcaagttccctcagataaaagcccatccatggcacaagctttttggtaagcgcatgccacctgaagctgttgatctcgtgtcaaggctacttcagtactcaccaaacctgcgctgcactgctgttgatgcttgtgcccatccattctttgatgagctgcgggaccccaaggtctgcttgccaagtggacgaccgctgccagcgctgttcgacttcacagcagccgaactcgaagggctcccaatcgagcttgtccatcggatcgttcctgaacacatgaggaagtgaaccggtggtggacgtgctggagagatccctgtttcgtgagggcatgctatggaggagcgatgtagctagcgaacgccttgctagatgtaaagagggctgaaagttccttgattgggcgtgtcaccaaggtgaccctagagggcaggcaaaccttacgtttgcttgttgcccatggtggaaatcggcttgtacctttcgcaatcgcatcttgtgtatcgacgatgacttaggggctgctgttgtattgtcaggttcatgctgaacaagagaattcagagtgctgtgctgtgcttgcttcgttagctggagatcaacaggatgtcagttttgatctgcttgcgcgtggtttcttttttttttttacgtcatcaacgacact

SEQ ID NO: 157014 - DNA, 215 bp, Zea Mays
cacagtttttccaaactgcaatttttcaaatactaaagtatactttagtcatgacattactacagtttataatgcttcagttttcgaatacaacagtatccaatatatcaaggtgtttggcaaaaactttggttgagaccaatcagccagagcgggacccagctggcgctctctttacagagaaaaactttggctgagaccaaagtttcaaaaac

SEQ ID NO: 157015 - DNA, 1481 bp, Zea Mays
tattgttagttgcagccttgcaggcagcaaagcaccgggaccaggacgccggccgcttcccgggttataaaagtcaacagcctccgcccaccaccctgtcggctaagcaagctaaaggtaaccccccccaaacctcaccgccgatcccaccgcccggcgccgcgttctatggcctacacctcctccctcaacctcccaaagcacctcctcctccccagcccccgccggacaaggcacaggccttcctccttcgtccccaccgccgcggccaaggtcaacggtgacgcgcccgagaggccggcgcccaacggcaaggcacgcatcaacggccagggcaagaagggagtgaacgggcatgcggaccggatccacctctcggtgagcacgggcggcggaggccaggacggctccggcctgcgcgtggcgttccagggcgcgccgggcgcctacagcgagttcgcggccaagacggcgctgcccggctgcgacacggtcccgtgccgcgccttcgcggacgcgctggctgccgtggagcgcggcggcgccgaccgcgccatcctccccgtggagtccaccatggaggggacggcgctgcgcaactacgacctgctcctgcggcacggcctggtggtggtgcaggagatcaacctgttcgtgcactactgcctgctggccatgcccggggtgcgcgccgccgaggtgcggcgggtgatcagccaccccatggcgctggcgcactgcgggcgcgcgctggcccgcctcggggtggaccgcgagcccgtggaggacacggcgggcgccgtggagatgctgcggtccaagcggatgctggacacagccgccatcgccagcccgcgcgccgccgacctgtacgggctccaggtcctcgcgcacgggctccaggacgagtcctggaacgtgacgcgattcctgctcctctccaggccgccgtcgcctgtggccgtggcgctgggcgtggacgccgacgccaagaccagcatggtggtcgcgcaccggggcggctccatggtggtcgtgctcaaggtgctctccgccttctcctcccgcaacatcaacctcaccaagctggaggtcatcaacaacgaaggcgctggatccggaccaggcgagcggccgccggtggtgatactggacacgagcgcccggggcgcacccacgctgcgcgccttcccgcacgtcctctacgtggactgcgagggcgccgcgcacgacccgcgcgtccgcgaggccatccaggagatggagaggttcgccgtcttcgtgcgcgtgcttggatgctacgccgccgactccaccgtctacgatctgcagtgagctctcagatatgatctagctactacttactattcagaagagaaagcagcgcgtaatttctgtacagatgcaataagaagaatcttccttcctataattatttgccaacaaggtctgctttttagcgactagttctaatcttgttt

SEQ ID NO: 157016 - DNA, 1737 bp, Zea Mays
gaacaatcatatatatattgttgcttaaagagaagagaagagaagagaagatcgacaagagattggcggtaatggactcctcggagctgcacatactggccttgcagagggtgaagcaggtggagccggagaacgcgagcaagatcctcggctgcatcctcctggaggaacccgacaaccaggatatgctgcagctcgcctacggcaacgacgccgaggtgcacgccaagatcagccacgccaaggccatgctggacgccatcgtcgcgtgctgctcctcctcgccggccttcggctaccactactggccgccggtgcccaataaggcgcaggcagaggagtacgcgttgcagccgcagcactacagtggcggagggtgctactacgcctctgagaacgcgctcatctacaatggcggggggccgccgaggtccaggctgtcgtcgacgcggcgcccctgccactacttcatcaagggaatctgcaagaacgggcagagctgccactactcgcaccaccggcaggaggcccaggtctgctccggcgcgctggagaagctggagctggagatcattgagctgctcaagtcgcggcacgggcagccgctgtccatcgcgtcgctgcccacgctatacggcgacaggtacgggaagagcctaaaggccgatggctacctcacggagagcaagcggcatgggaaggccggctacagcctgagcaggctcatctcccgactcagcaagatcacaaccatagaaaggccgcacgggcagcactatgtggttctggcggaggacgccggcaggtacaaggagttgatgagcaggggcgagagaggaggagacatgggcagcagctcgcaccaggtatacctcaccttcccttcagagagcaccttcatggaggaagacgtggccaattacttcggtttgtatggttcggtgcgcgacgtgaggatcccatggcaggagaaacggatgtttggcttcgtgagcttccacaatccggagacggtgaacaccatactcacgatgcgcatcccacatttcatcggcgaatcaagggtcctggtcaaacgctacatagagaaatccaagtgcatcgaacgctatcgtccgagggcgcttcgtcgcttcgtcggcatggacatggacatggacatgaacgacgatgatgatgactacgacgaccagcctccagcccggatggtgatgaggaatcagcaacgactactggcgacggagaagcggctgatcgagctcgagaggaagcgcttcttcgcgatgccgccgcagcagtaccagcacgtctacttcgactgcagcatcggggacgacgacggccagggccagccaccaccacgacatcttcccctcatcataacccaaccagctcgggcaagcagcagcagcagttacgacgacgacgacgacgacatccaactcccagaaagcccattcacgtcgtcagccgtgccgatgctgatgtaatgggccgggaaagggaaaccaaggtccacttaattagcttcctttgttacacaggacaggacaggacacaaaaacaccctcttttttgttgtagatataaacaaattaagggagtcacagtacacagagagagttggtgttcttagaatgcaggcacactggtgagttttaaacaagggtgccagaaagaattacttattagctgtgccataataataataagatcgtcgtctctgtttgtgccttc

SEQ ID NO: 157017 - DNA, 1716 bp, Zea Mays
gaacaatcatatatatattgttgcttaaagagaagagaagagaagagaagatcgacaagagattggcggtaatggactcctcggagctgcacatactggccttgcagagggtgaagcaggtggagccggagaacgcgagcaagatcctcggctgcatcctcctggaggaacccgacaaccaggatatgctgcagctcgcctacggcaacgacgccgaggtgcacgccaagatcagccacgccaaggccatgctggacgccatcgtcgcgtgctgctcctcctcgccggccttcggctaccactactggccgccggtgcccaataaggcgcaggcagaggagtacgcgttgcagccgcagcactacagtggcggagggtgctactacgcctctgagaacgcgctcatctacaatggcggggggccgccgaggtccaggctgtcgtcgacgcggcgcccctgccactacttcatcaagggaatctgcaagaacgggcagagctgccactactcgcaccaccggcaggaggcccaggtctgctccggcgcgctggagaagctggagctggagatcattgagctgctcaagtcgcggcacgggcagccgctgtccatcgcgtcgctgcccacgctatacggcgacaggtacgggaagagcctaaaggccgatggctacctcacggagagcaagcggcatgggaaggccggctacagcctgagcaggctcatctcccgactcagcaagatcacaaccatagaaaggccgcacgggcagcactatgtggttctggcggaggacgccggcaggtacaaggagttgatgagcaggggcgagagaggaggagacatgggcagcagctcgcaccaggtatacctcaccttcccttcagagagcaccttcatggaggaagacgtggccaattacttcggtttgtatggttcggtgcgcgacgtgaggatcccatggcaggagaaacggatgtttggcttcgtgagcttccacaatccggagacggtgaacaccatactcacgatgcgcatcccacatttcatcggcgaatcaagggtcctggtcaaacgctacatagagaaatccaagtgcatcgaacgctatcgtccgagggcgcttcgtcgcttcgtcggcatggacatggacatggacatgaacggtaaatactttaatttaatttgttggtgcagccagcaaattaatacttaattttgtatgtagacgatgatgatgactacgacgaccagcctccagcccggatggtgatgaggaatcagcaacgactactggcgacggagaagcggctgatcgagctcgagaggaagcgcttcttcgcgatgccgccgcagcagtaccagcacgtctacttcgactgcagcatcggggacgacgacggccagggccagccaccaccacgacatcttcccctcatcataacccaaccagctcgggcaagcagcagcagcagttacgacgacgacgacgacgacatccaactcccagaaagcccattcacgtcgtcagccgtgccgatgctgatgtaatgggccgggaaagggaaaccaaggtccacttaattagcttcctttgttacacaggacaggacaggacacaaaaacaccctcttttttgttgtagatataaacaaattaagggagtcacagtacacagagagagttggtgttcttagaatgcaggcacactggtg

SEQ ID NO: 157018 - DNA, 1370 bp, Zea Mays
caatcatatatatattgttgcttaaagagaagagaagagaagagaagatcgacaagagattggcggtaatggactcctcggagctgcacatactggccttgcagagggtgaagcaggtggagccggagaacgcgagcaagatcctcggctgcatcctcctggaggaacccgacaaccaggatatgctgcagctcgcctacggcaacgacgccgaggtgcacgccaagatcagccacgccaaggccatgctggacgccatcgtcgcgtgctgctcctcctcgccggccttcggctaccactactggccgccggtgcccaataaggcgcaggcagaggagtacgcgttgcagccgcagcactacagtggcggagggtgctactacgcctctgagaacgcgctcatctacaatggcggggggccgccgaggtccaggctgtcgtcgacgcggcgcccctgccactacttcatcaagggaatctgcaagaacgggcagagctgccactactcgcaccaccggcaggaggcccaggtctgctccggcgcgctggagaagctggagctggagatcattgagctgctcaagtcgcggcacgggcagccgctgtccatcgcgtcgctgcccacgctatacggcgacaggccgcacgggcagcactatgtggttctggcggaggacgccggcaggtacaaggagttgatgagcaggggcgagagaggaggagacatgggcagcagctcgcaccaggtatacctcaccttcccttcagagagcaccttcatggaggaagacgtggccaattacttcggtttgtatggttcggtgcgcgacgtgaggatcccatggcaggagaaacggatgtttggcttcgtgagcttccacaatccggagacggtgaacaccatactcacgatgcgcatcccacatttcatcggcgaatcaagggtcctggtcaaacgctacatagagaaatccaagtgcatcgaacgctatcgtccgagggcgcttcgtcgcttcgtcggcatggacatggacatggacatgaacgacgatgatgatgactacgacgaccagcctccagcccggatggtgatgaggaatcagcaacgactactggcgacggagaagcggctgatcgagctcgagaggaagcgcttcttcgcgatgccgccgcagcagtaccagcacgtctacttcgactgcagcatcggggacgacgacggccagggccagccaccaccacgacatcttcccctcatcataacccaaccagctcgggcaagcagcagcagcagttacgacgacgacgacgacgacatccaactcccagaaagcccattcacgtcgtcagccgtgccgatgctgatgtaa

SEQ ID NO: 157019 - DNA, 2210 bp, Zea Mays
cccttctcgccgcgtacgcacgggtcgcacgcacgcacaccccgttcgtgccacactgccacctaacccccctcccccacgatcccgaggctactagcactaggcgtcgtcctcggcagcaacggcggctgggctcccgccgatggcggcgtccctcgccgccgccgcctctcgcctcgccgccaccggcggcgagttgtcgtggtcggcgcggccctgccccgggagtctcgtggcgagcttccccagcgccgggcggctccggcgccccgcttcgggcgtgcggtgcggaggtggggttttgcccgcggccgcggggacgggggcggaagcggaggaagggggccgcttcgttggctggttccgggaggcgtggccttacatccggggccaccggggcagcaccttcgtcgtcgtcatctccggggaggtcatcgccggcccgcacctcgacggcattctgcaggatatatcccttcttcatggtctcgggatcaaatttgttcttgttcctggaacacatgtccagattgataagctcttggctgagagagggaagaaggctaagtatgctggtcgctaccgcattactgattcagattcattagatgctgcaatggaggcagctggccgaatacggctaactatagaagcgaagctgtctcctggaccaccaatgttaaatctccgtaggcatggtgttaatggccgttggcatgaaatctctgataatgttgcaagtggaaatttccttggtgctaagaggcgaggggttgttggtggcattgattatggattcaccggtgaagttaaaaaaatagatgtttcacggataagagaaaggcttgatagagacagcatagttgttgtgagcaacatggggtactccagcgcaggagaggtcttgaattgcaatacctatgaagttgctacagcatgtgctttatccatagaggcggacaagcttatttgcattgttgatggccaaatatttgatgagcatggtagagtcaatcgttttatgtctattgaagaagcagatatgttgatcagaacacgtgctaagcagagtgaaattgctgcaaattatgtgaaggttgttgatgaggaggacatcaatcatgtccgctgcctcccaatgaaacatggtacagaacatggtatgaatggaagggaccatattaatgggtatactgcatcttttcggaatggtgtgggtttcaatgatggaaatggtctgtctggtgagcaagggtttgctattggcggggaggagcgcttgagcaggtcaaatggttacctatcagagttagcagcggcagcatacgtatgccatggtggtgtccaaagagtgcatatcatagatggtactgttggtggagcattgttgctagaactattcactagagatggtgttggaacgatgatagctagggatatgtatgaaggaacaagaatggccagagaggaagatctttctggtattagaaagatcattcgtcctctagaagaatctggtgtcctggtgcgccgaacagatcaagagcttcttgaagcattgacatcatttattgtcgtggaaagagatggctcaatcatagcgtgtgctgccctcttcccttttcttgaggataaatctggggaagttgctgctattgctgtatctgaagaatgtcgaggccaaggtcaaggagacaaattacttgattacgttgagaagaaggctttgtcccttggacttgagaaactattcttgcttaccacaaggacagcggattggtttgttcgtcgcggctttaaggagtgctcgttcgattccctgcctttggtgaggagaaaacgtatcgacctctcgcgcgggtcaaaatattacatgaagtggctccaggcagcagaggttgggcatatggctgccgacggttttgccatgagatgatgagtgctgcaaacaagcatctctacgaatctagtcgatggacgtgaggtttctttatgagctgtgcagtcgcttatacatcgtagaaatgtatatttattgtgcaagaaaataatcagtcaataatcgaagatgtggttgtgtttcttgagttgatttcttcttgagcatagcaatgctcaaaagagttgttgatctgcacactgctgacaaagcctgcacgactgcgctttttaaactgataaatacttagctgcaaattcagcaatgttct

SEQ ID NO: 157020 - DNA, 2265 bp, Zea Mays
gaaaaggatgaaaaacagaattctttggaactattgttaagacggattgaagggctacaatatgaaatggatgaaaaagtagatcttgttgaagtgttaactcgtcaagttgaaaatctgcagcgagagcgtgatgagctcagaaaagatattgagcaattatgtatgcaacaagctgggcctggttatgtttctgttgcaactcgaatgcttactcagaggacagcagctttggaacaggatattgagaacctccagaaaaagttaggtggttgcttaagagagaatcaaaatttgcaagaggagcttgctgaagcttatcgaattaagagccagcttgctgagttacatggtgctgcactatcaaagaacaaggatcttgaaaagcaagtaagatttttccagagcagtgtcgctcaagcgtttgctgaacgggacagttcattaatggagtgtgagaaagcaaaagagcgggaagaagcagtgtcaagaaagtttgctgattttgaggaaaggatgagagaatatcaatcagagattgatgaacagaaacacttaaatgatgacttgcagagagaactgacagaactgaaggcacatacagaattgtccttgaaagttattctaaaattctatgaccttcgttgcagagactctggatgttcttcaagccttactattgaagagaagtgttcaatccttcttggtgattctgctgacaattggagttttagctctgatggcggaacctcaactttgaagcatctttagaagaggagaaagagtcacttaaagctaaaatatcgaagctgcaaagcaacctaagaatgggccttgaaattgaacaacatttgcaaagaaatgcacgaatattagagaaaagacaggcactgtatgatggattcctgagaaatggattgtccgaacttcaaaagttctacacatgtcaaaaggctgaaattatgaaaatattggaagaagaatcgttgcggttgatgaaagttgttgcagagattcaggataaactaactgaaatttgtatcaacactgaagttagtgaccaccctgccgatgagattcaatgttgtgacagcagttgtaaagatgtgcatgttactaaagatatcagtcctagcacatgtcgtaagagtgattatcctgctgatcttaactccgtgtcgtttgatgaatctaaagcacttgcacaagccttacaggagaagatggaagcacttatgctcttctcacaggaacaagaaagatacctattagagaaacagagagacctgattgttatcgaggaactccagaagaacttatctcaagttaaagatgaaaaggtgaaggtcctgatggaattaacaaaactaaaagaacaatatttgctattgaagggctctgctgtcaaggaaggtcatgatactggtgattcatctaaactcattcctgggcatgaccaacaagggatgctgaagactatgctgaagaggacatctttaagacactggatgaggaaagaaagtaatactattggacatgggagctctgatggaaatgatcatacagtttgcaaagaacattcagtggatgttgcaagattaagagttgaaaatgctatgcttcttgaaggtgttggtactgttgagcatctcacttcttcagtgcatagactgcatattgtgcttttgaaggcttatgatgatatcaagtcagctgatcctttggagagtacctttgaagcgctcaacagtcttataactgaagcaaaccttatgaagacagctcttaatgtggttcttcctgtaagctggtccggggattcatcagatgcaattaaatatgaagctatgtgcgatccatctgattcacctaaatcgaagtctgggaaagtagacccgctctcttctgcaggcatggagatggtggagctactaatattggctgctgagattctcaaggagagctttctggtgaagaaataaggcctccatgtaaggacgagtatggctctccttgtttgtttagaagcatgcaatttaatccttaatttttttgggtgtatatacttaaactgattgctaaaagtgcactactagattatttcggatgtagagaaagagccgaatgtgcactgtaatttacggttcgctgctattgatgtgtcttgtgttggtagactaaaggatttaagagccatgtgtacaaaattcagtttacaagcaaagatcaaagaatagacatgaactagggaaagagaaagaaaaa

SEQ ID NO: 157021 - DNA, 2515 bp, Zea Mays
gttctttataccttttaattccttctttgttaccatgttgcatcggatgcatgtcaccttatcctgattccctatttctgtccaataaccgtacttccagcctgggtcattgaattttgcctctggatcttgcatggggtgataaggatcaacatcaatgggagcagcagcagcggatgcggatcagacactctccatgacaatggcttactctgtacaggtggatagtaagaaaaaggcaaaggttcagctcactaattaacatcagagagtggggaacagagcagcacggaggcccattatcttgcaccggatttaaagcagagggctgctgctaggatgctggcctgcccgccctgtctggctgcgccagcgccacccctcctgcgtggccacaccccactcctccctgtctgcgcctgcatgccttgcttggcccgtgccgcccacctcgctgtgccgcccgtcctgcctggtcacgccactcctcacccctccttcgaacagaacaggcgcaccgcgcaactcagcctttgaacagagcagcctccgcccacaaccagccgccttttcattcccttattcccataatgcgacaccctagaaccgctttacggacgtctgaggtgccagagcgactagacggtaaggaagatgccttagtgtcaatcttaaggcgggtaaatcacctcattttttctgaccgccttaccgcctaagggacgccttaatagtttgcattagagattttcccttcaatgtatttgacattttttgtaggcatctttagaagaggagaaagagtcacttaaagctaaaatatcgaagctgcaaagcaacctaagaatgggccttgaaattgaacaacatttgcaaagaaatgcacgaatattagagaaaagacaggtacaattctgaagtattgtattgttctttctcatgacctctttaattgtatactttggagtgcaggcactgtatgatggattcctgagaaatggattgtccgaacttcaaaagttctacacatgtcaaaaggctgaaattatgaaaatattggaagaagaatcgttgcggttgatgaaagttgttgcagagattcaggataaactaactgaaatttgtatcaacactgaagttagtgaccaccctgccgatgagattcaatgttgtgacagcagttgtaaagatgtgcatgttactaaagatatcagtcctagcacatgtcgtaagagtgattatcctgctgatcttaactccgtgtcgtttgatgaatctaaagcacttgcacaagccttacaggagaagatggaagcacttatgctcttctcacaggaacaagaaagatacctattagagaaacagagagacctgattgttatcgaggaactccagaagaacttatctcaagttaaagatgaaaaggtgaaggtcctgatggaattaacaaaactaaaagaacaatatttgctattgaagggctctgctgtcaaggaaggtcatgatactggtgattcatctaaactcattcctgggcatgaccaacaagggatgctgaagactatgctgaagaggacatctttaagacactggatgaggaaagaaagtaatactattggacatgggagctctgatggaaatgatcatacagtttgcaaagaacattcagtggatgttgcaagattaagagttgaaaatgctatgcttcttgaaggtgttggtactgttgagcatctcacttcttcagtgcatagactgcatattgtgcttttgaaggcagggcaggattttttttggttgtattactaggtgataactttcataccaacaaacatgtcaggcttatgatgatatcaagtcagctgatcctttggagagtacctttgaagcgctcaacagtcttataactgaagcaaaccttatgaagacagctcttaatgtggttcttcctgtaagctggtccggggattcatcagatgcaattaaatatgaagctatgtgcgatccatctgattcacctaaatcgaagtctgggaaagtagacccgctctcttctgcaggcatggagatggtggagctactaatattggctgctgagattctcaaggagagctttctggtgaagaaataaggcctccatgtaaggacgagtatggctctccttgtttgtttagaagcatgcaatttaatccttaatttttttgggtgtatatacttaaactgattgctaaaagtgcactactagattatttcggatgtagagaaagagccgaatgtgcactgtaatttacggttcgctgctattgatgtgtcttgtgttggtagactaaaggatttaagagccatgtgtacaaaattcagtttacaagcaaagatcaaaggtggatggatgtttgatatgcatacgaagtcttccttttacatatatcaatatttttgagaggatgtcgtcatcatttgatataacatagataggttgtgtgaattgtgcgtcttgcagtgggttcgtttccct

SEQ ID NO: 157022 - DNA, 2451 bp, Zea Mays
gttctttataccttttaattccttctttgttaccatgttgcatcggatgcatgtcaccttatcctgattccctatttctgtccaataaccgtacttccagcctgggtcattgaattttgcctctggatcttgcatggggtgataaggatcaacatcaatgggagcagcagcagcggatgcggatcagacactctccatgacaatggcttactctgtacaggtggatagtaagaaaaaggcaaaggttcagctcactaattaacatcagagagtggggaacagagcagcacggaggcccattatcttgcaccggatttaaagcagagggctgctgctaggatgctggcctgcccgccctgtctggctgcgccagcgccacccctcctgcgtggccacaccccactcctccctgtctgcgcctgcatgccttgcttggcccgtgccgcccacctcgctgtgccgcccgtcctgcctggtcacgccactcctcacccctccttcgaacagaacaggcgcaccgcgcaactcagcctttgaacagagcagcctccgcccacaaccagccgccttttcattcccttattcccataatgcgacaccctagaaccgctttacggacgtctgaggtgccagagcgactagacggtaaggaagatgccttagtgtcaatcttaaggcgggtaaatcacctcattttttctgaccgccttaccgcctaagggacgccttaatagtttgcattagagattttcccttcaatgtatttgacattttttgtaggcatctttagaagaggagaaagagtcacttaaagctaaaatatcgaagctgcaaagcaacctaagaatgggccttgaaattgaacaacatttgcaaagaaatgcacgaatattagagaaaagacaggtacaattctgaagtattgtattgttctttctcatgacctctttaattgtatactttggagtgcaggcactgtatgatggattcctgagaaatggattgtccgaacttcaaaagttctacacatgtcaaaaggctgaaattatgaaaatattggaagaagaatcgttgcggttgatgaaagttgttgcagagattcaggataaactaactgaaatttgtatcaacactgaagttagtgaccaccctgccgatgagattcaatgttgtgacagcagttgtaaagatgtgcatgttactaaagatatcagtcctagcacatgtcgtaagagtgattatcctgctgatcttaactccgtgtcgtttgatgaatctaaagcacttgcacaagccttacaggagaagatggaagcacttatgctcttctcacaggaacaagaaagatacctattagagaaacagagagacctgattgttatcgaggaactccagaagaacttatctcaagttaaagatgaaaaggtgaaggtcctgatggaattaacaaaactaaaagaacaatatttgctattgaagggctctgctgtcaaggaaggtcatgatactggtgattcatctaaactcattcctgggcatgaccaacaagggatgctgaagactatgctgaagaggacatctttaagacactggatgaggaaagaaagtaatactattggacatgggagctctgatggaaatgatcatacagtttgcaaagaacattcagtggatgttgcaagattaagagttgaaaatgctatgcttcttgaaggtgttggtactgttgagcatctcacttcttcagtgcatagactgcatattgtgcttttgaaggcttatgatgatatcaagtcagctgatcctttggagagtacctttgaagcgctcaacagtcttataactgaagcaaaccttatgaagacagctcttaatgtggttcttcctgtaagctggtccggggattcatcagatgcaattaaatatgaagctatgtgcgatccatctgattcacctaaatcgaagtctgggaaagtagacccgctctcttctgcaggcatggagatggtggagctactaatattggctgctgagattctcaaggagagctttctggtgaagaaataaggcctccatgtaaggacgagtatggctctccttgtttgtttagaagcatgcaatttaatccttaatttttttgggtgtatatacttaaactgattgctaaaagtgcactactagattatttcggatgtagagaaagagccgaatgtgcactgtaatttacggttcgctgctattgatgtgtcttgtgttggtagactaaaggatttaagagccatgtgtacaaaattcagtttacaagcaaagatcaaaggtggatggatgtttgatatgcatacgaagtcttccttttacatatatcaatatttttgagaggatgtcgtcatcatttgatataacatagataggttgtgtgaattgtgcgtcttgcagtgggttcgtttccct

SEQ ID NO: 157023 - DNA, 1087 bp, Zea Mays
atggagcagagggtcgccggagcaaagggccgcgatggagtagagggccgtcggagcagagggggtgcggtcgcatgctggagaaggggcggcggctactatggagcggaaaagaggcagacatgtgtcataaacatcataaataaatcagtcgtagatgcttaccattcacaactgcttgggtgtaagtgcatttatgatacggagacacctcatgagcaactggcactggcttttgatcctcaggaatctgttgcaaagatggttttctcgaaggcagaaggtactgagaactctttctttcttcaggctgctgctggtggtggtggtggtggtcatcacttgtagtggggcgaagaagtggcttaacaagattggagatgatttcaggggttttaccccgaaaagagttggacaatctgcttagagttggggttcccaagaagctcagatttggtgactgcacgctactaagaatgtcgatggactgcctgtacattagaaagagagcgagacaaatatttgtgattgacgtgacatgtaaactagtatttcggccatttcgatggatctatattttttgagatttcaagtccacccgggaaataaaggaatggaagggtcatgggtgcaggggcatgcaggattgacgatgtaagccaaaaatgtagtggccaatcaaatcgcaaagaagggaagcagggattttgacctgtagctctgtggccattgctgggtgtaggaggagtcggtggccggaccgcgcggggtgccgcaggaggacgaggaggaaccggaatcggagtcggatcctgcggcggagtcctcctcgtgttggtggtggcgtcttctgctgcgggcggcggcggatgaccgggattggggatggtcgtcgtcgtcgtcgtcgctctcgatgatgaggctgcgctcagagacggagctcctcattttgcttttgttttggcgactctgctggctgaaccggttctccggctctccctccggacttgatgatgaaaaggagactgcgtctgcgctgcgtgggcaacaccactcgtcctccactccgcgccagcagtctagtagc

SEQ ID NO: 157024 - DNA, 486 bp, Zea Mays
atgtgtgccgagagtaatgacacaacaaaaattctgatgggactgagcggtgtcataaggtcaaccaggatgacactggttcttggagcacccggatccggaaagtcaacatttttaagagtattggctgggaagctagatccttctctcaagttcgaaggcaaggttacatacaaagtagaggcaaagtcctctgcgcctgagcacctgagcgcatatgttagccagcatgatcttcatcacgcagagatgactgtgagagagacgatcaatttctcctccaacatgctgggaaccagcaacgaattcggtgagatgttagttggccgtgcaaggtgcttctttatggatgatgtatcaacaggccttgacagctccaccacatatgagattatgacatttctccggcaaatggcacatatcatggggtcttacaattgttatttcactgctgcagccatctatagaaacattagcgttgtttga

SEQ ID NO: 157025 - DNA, 1609 bp, Zea Mays
gacgaaacatcgttttttcgattttgactgaattggtcggagcgtagacgagcgagcagagcccaggaaagaggtcagatcgtcatagagcagtcgactataagtataagactgctggcctgagagaaggcagtctctctcgggaaacatggcccagggttctatagtatagtatagtagccagactataggaaaatcaagtctcatgttgctcctcagaaaacgcgtatagtatatagtatatagtatatagtatatagtatatagtatatagtatatagtagtagtagtatcattggccaaagtaaagtcgatgggacaaacgctgttcgttagaactagcattttgttttgtcatggaatcaagtctatttgttcgaatgttctttttttcgtttcgttggaaaaaccaacgccgacgtcaagaatggatcagtctagtctcctttctcttttgggagcagagctgaaaaagatggaattgtcaagtacgatgatatttttattaacggatagaaaaatgctattatcaagtagtaaacccattatgattgcaactcgtgggatgcctggaatcccactaaatcgagaatcggaatcggtggaggatgtgcatagggtactccgagccctccccttatttagagaaatggaaggtatcttgcgtgagaggaacctgaatctcccgtcagtacaggaaataagcgctttccgtgtgaatctattctctggtatccggcgtgagagtgcgattgcggactacgacgctttttggcgctccttactcgaggagattcacacacctcagggacgtagttgttttggtcagagaatacaagatctgcacgcccgaatgtctgccgagggcaactgggactacttgattgcccaacaaggcagagggtattttggtaacctacctaatctcaacagcccgttggatcaatatcaatttggaattcacccaattctggatctgaatattggtgagtactatgtctcattcacaaatctatccttgtctatgtctatgctactcactctcggtttggtcttacttctgaccaaagtatttatggaatcgtccggccagaaacggggaagagcccatgctgtcgtagaggcctcgtcgagtgcttccgctacgcctaattctgaggatgatgataagcggaaaaaagtgtcccgccaagacgccaatggcaaagagtcagagccgcccataaatggggcgcaacctgaagtaccatccattgcgttcttaaagaaaagaattaaaacagttctaaggtcctgtcgagataggaaccctagggagagcacattacgctctacttacgaggatcttcaccttgaaacggcgagcgccgagaagcgggtaaaaatcgcccaggccctagaaaatctgtacaggcgaagccaatatttccggagtaacaaaaggcagcagccccataccgacttgattattcaaatctgcgattgggagcgtacgaagaggtaaagaaattcactggtgtaggcataggaaaccgaggccccccaaacccatctactatacggttgaggtgagggggggaaagaagagtgggcatgtgggcttctttca

SEQ ID NO: 157026 - DNA, 748 bp, Zea Mays
ggggtggggcaataagcttgcttcttcacaagcttatccccgccccctttcctgtccgtcccgaccggcagcagttgggtctccccatctctcctcaacttccccggtcttcggcccgagctgtatgaggcagaaactcgtcccacgtacggttcggaggccgagccccacccctgcaataatggtgcagcttaggtcaactaatacgaataagatacagttcactcaacgattgcctttgggtcccgaactccatatggggaaggaacgttgttgtttgcgaggtctcgatcatttacatggacccacttctcattccatttgtgggaattttatgatttataaaccgtccccaacgagcgaaaggttcatgtttgaacatgatgaatcacttcgtgccgacctgttgcccataaactttcctgcctcatatgagaatggaaaactggaagattttctgatgaagaatcacgaacataagaatttctggtttagcatgttcccagaaagaagatactactggtcgcgagaaacgaggagcacgactgaagtggctatacatacaaatccattgacggatctatatgctccgattggaactggaagttccagaactggcggctggtataccaccataatgaaattgccttttatttttagtattcggataggatttctgttggcttcatcgggaggctcgcgtagtttgttacgtcaactccaaaaggataagttgcattggaatcga

SEQ ID NO: 157027 - DNA, 573 bp, Zea Mays
atggataaccaatccattttcaaatatagttgggagattttacccaagaaatgggtacataaaatgaaaagatcggaacatgggaatagatcttataccaatactgactacccatttccattgttgtgctttctaaaatggcatacctatacaagggttcaagtttcgatcgatatttgcggagtggatcatccctctcgaaaacgcagatttgaagttgtccataatttactgagtactcggtataactcacgcattcgtgtacaaacaagtgcggacgaagtaacacgaatatctccggtagtcagtccatttccatcagccggccggtgggagcgagaagtatgggatatgtctggtgtttcttccatcaatcatccggatttacgccgtatatcaactgattatggtttcgagggtcatccattacgaaaagactttcctctgagtggatatgtggaagtacgctatgatgatccagagaaacgtgtggtttctgaacccattgagatgacccaagaatttcgctattttgattttgctagtccttgggaacagcgtagcgacggataa

SEQ ID NO: 157028 - DNA, 351 bp, Zea Mays
atgccagtaactgacgaattggatgctccagcagtagttccagttccgaagggaaaaaaaaagggaaagtcccgcttgtcaaccatgcctgagcccaaaggaaaagcagtaccaatccgcttcaaagcttcagtcctagctagcctatcttcgacgtcagaaccaatttcttcaattcaaaagctttcttcagctcgcccttgtgcttacgccagcctttgttcacttgtctcgggcttacttctagacttggatggacttcgatcttcatctttagtaatacctaacgttgctagggtcttccatgcttataaagtattactaaaaagaatcttttttcctagtgtttaa

SEQ ID NO: 157029 - DNA, 921 bp, Zea Mays
tgttccatgatctatgggtctactggagctacccacttcgatcaattagccaagattttgaccggatacgaaatcactggtgctcgatctagtggtatttttatggggattctttttatcgctgtaggatccctattcaagattactgcagttccttttcatatgtgggcacctgatatctatgagggttcacccaccccggtgacagcattcctttctattgcgcctaaaatctctatttctgcaaatatgtcacgtgtttctattgttgcttcctatgggggtacattacaacaaatcttctttttctgcagcattgcttctatgatcttaggagcactggccgccatggcccaaacgaaagtaaaaagacctctagctcatagttcgattggacatgtaggttatattcgtactggtttctcatgtggaaccatagaaggaattcaatcactactaattggtatatttatttatgcatcaatgacgatagatgcattcgccatagttccagcattacggcaaacccgtgtcaaatatatagcggatttgggcgctctagccaaaacgaatcctattttggctatgaccttctccattacaatgttctcatacgcaggaatacccccgttagccggcttttgtagcaaattctatttgttcttcgccgctttgggttgtggggcttacttcctagccccagtgggagtagtgactagcgttataggtcgtttttattatatacgcttagcgaaaagaatgttttttgatagacctaggacatggattctatatgaaccaatggatcgtgacaagtcgttactactagcaatgacttcctctttcattacttcatcctttccatatccctctcccttgttcgatcttactcatcaaatggcactcagttcatatctgtaa

SEQ ID NO: 157030 - DNA, 3766 bp, Zea Mays
atgaactatcctccactgacagcaaaaaaattggccgaagtgaaaagactcttgaaaaagagtcagattcctgaattggaatatagagaatacgagtatgaggttagatatgagaaagaaatgcgtgaattagaattgcagaaagataaaattaagagcgatttctttaactgtaattataacccgatcagggagtcagttagggtatcaacggatagagaccctgatttagaggatgaaaaaagagagcagctaggagagtctatgcaggctgaatgggagagactaaggcggggtgtagaagtcggtacttcagaagatatcaatgttgacacagtcaaacgttggggtttgcaaaataataagtacaacgctgaacactggatccctccagggggtcagcgcacagctgaggatatgggaaaactctaccaattctgggatgaattcattgaaacatatgaaaatgaggttatgatgaattcggggtacagggaacccttaaataaagataaagtgtttaatacactactagatcattctaataataagaccaatcagacggctgaggaattaaaaggcattcaaactaaaatagaacgtatgactatgtatttttatgaggccaatgtctatgaatcattaggtcagttgaagaataagttcatcaatatagatgagcaaacagcaaaggattaccttcttgataagttagagaaaccagacgatctagatatcgttagagctatgggcacctatacactggaatgtatagttgtatttgtcttaagcaagcagtttaatgtgtttgctttggagaaggctagtgttcaagttgctacattggtgagtgaactagattccgcagctaagattgagtataatcgtataatcgctgagggtagaaagcgcaaaaaagctaagcggggtgataagcagataaatgaagatgaaaacatcttattgcaagataaaggtgtggatacctttaatggtgatgtacattccgagctggatagaaagaaaaagagcatatcaaaacaaacgaatcgaaaaagagttcgaatcagtaaacataaggagcccggtataggggaagccctgtttggctggctggctagcaggaaattgatagaagtcaaaaaacctgtttttctctttgataagaagaataagaagccaaaaaatgtaatatacccgggctatgtagattgtctatttgacattaaagatctacccttctgttcaaccttacctatggtataccctccagccgattgggaattacggcccaccgcaaccgcggaagtctcggatccatatataacgaatctgacccctctatcgagttatagaggtggttacctcacaaccctacaaagggagagtggagatagtccgactctcttaagtgaaaaagattatggtgtatttgacatacatatcgatcgcgagagatctcaaccagtgttgagtgctgtgaagaagcttcagcggcagccctatcgaattaataaattagtctatgattttatacaaaaacattggagtgtattagtgtccgtggggcttctcaggccgaagaatctagctttatttaaacgaaaggaggcgctcaggctactatctagccttttgtttaaacacgaggagctttcaacgatttatcgatatagtgagttgaaatctgtattgttaaaaaatatacacgcgtcaaccttcgaactatatactatgaaaatagctgaggcttatctagattataaaatctattttccaatctttctggacttcagggggcgaaattaccgccatggacccttccatttccacgaacgtgatttagtgagatcactcatcatatttgatgaaagtgatgactcagcagcacatactataaatagtgatgatgaggatagaatcctccataatttccttatatcagcggcataccataaatctaaatttggtgtataccaagacgctatggagtttatctctaaaataataccagatatggtaagtaaacctacattctttgaaaaagatatctttatggatacactgtgctgcaggcacccatttcagtatatatcatcatgtataagtttgaagacgtacgcggatacaggagacttgtctgtgctgcgatacacaccagtatcccaagatgcctcagcaagtgcttatcagatgatgagttactttttgttggatattgattatgggatacatacaaatcttttaaaaaccccaaatacggatggcagatatatcagggatatatatgaattcatgcgggattgtttaataaactatctcatcgctgaagaaaagatagaactagtaattaaactacttacacgtaatgaaaaagatcaagaaagtgtattagctaagattgttagtatatttgatcgcaatgtggtaaagaaaatgtttatgcccatgatgtatgggaaaaccgattataccttaaaaaaggatgttgaagatctattaaagggtaagtcggattccgagggaataaacctaatttcaaaacatatttctacatattggaaagagaattttggaaaaatgaaagatcttatggatcttatcaattatgttagctggtttggagcaggacaggataaaccggtggtatatagtacgccgtactgggtaacgctgcaaacatataagcggcgtaaacgcgtaaaaatgaaaatacagtatgaaacaaccaaaaataacgaaaaggaggttaaaacaacatcggctaaaatgcttgtaccgttaaacgataacgatattagaaagagctcaacctcaacctttgccaacttcatccatcaaaaggatgcatttactgctatccagcttgttgagtttatcaataaactcgagaatgcttcctcaattcctatatacgcagtacatgataattttataactatgcctgaatatgcttggattttgccgaccctttatagggaatcaatctttcgtatggggcacccactcatcataataaacaaatttttatttgatcatatacttctacctgcaatacaaaacgaacatcctaaagataaacacttcttctccgtggaagagcgctctatgttatatcgtatgatgattgatttacagaatccattgattcccgattttggaagtgttgatattactaaggatagaatcaaatctatagtgattccgaaagatcttcttcttaagtgcttttcatgtttatggatgagtaaaactaaaaaaatatctttagttagatgggaatcttgtcgtgataaaatcatcaaggtatacatgaggtatactgatgatatctcttcagatgaaggggttagtagatggttggaatacaagaagaatcttgacttagctagtgatcctgtatggagttgtgataatactaatggtactcaggcggattcgcttgataaaggcgaggatgactactgcatccattattaaatgttgttttactcaactgattccctgcagctttctcagcataaaacatattttatatcccggtttagtaggtatatacaaataccgaggccaccactaccaactacttggtagccgtgtgggaaagaagtgtgggaaagtgggcttctttcgctgtgaatacagatgtttctccccccttgagacagggaaaacattcaagagcttatttcattatttccatttctatttagtgatgtataaagcgtatagcgtagatttagcgtttgattatttcaagttgaaa

SEQ ID NO: 157031 - DNA, 360 bp, Zea Mays
atgcatgggatccgtgttctaagtgttgtcttaagtgttctaagttcagttgtatctttttcttgtaagtttccgaatattctaaaaaatattggaatgcctctgtcttgtcctttgagaagtgagtggagggtaggatcccgccttcttatattcgtcacgttacaactcttatccttcgatttcgcaacgaaggaactctggcttggtatggtaggaggatggatatgctttgtagcagaatcagatgctggctttatattctcttttctattcttttcaagcgagaaacgactaattcatgaggaactcccggttatattctattcattatacttgccttggttgttccgaatctag

SEQ ID NO: 157032 - DNA, 2211 bp, Zea Mays
atgtttttccatactttccgccttcaagtcctatctccgtctaggacctctgaggtgtctcattcccatctcctctctctcgagattagcttccgtccctttagaagcccggaggtcccggaaatccttataaatttaagcgaaatagggtccctaaaactttgtaagatttcgggcatcttttccgccccgtggcgctcagttaaatcatccaccaagtgggcgcaactcgcccactttcttcgaccccaattcattgtaaaaaccaataatgattggtttcaattcttcttcaatatcgaataactgttccatagtcctgatatcttgctcggtaagcggccttgaaggtgcactgctgtcctctggctggtccggcccaagcggagcactcgacggctctgctctccccgatcagttggctgaatcgatggattaggcgccgctaaagccatttccggctgctgcacctcttgcccaggttccacaggtgccccgggtatctcccgagaaagcccctggaaaaacgacgaggacgggctagaggttccatcggggttgcccgcagcggatcccccccgcattctgatcaggttcgttacccattccgctgtggtcatcaaagaagaataataaaaaagtgctgttgttacactcaacagagtgaaaacgcgagcagcccaaactgggcaacgcggccataaagcgcgaaccaacatccgtgatacgaaaaccaaaatcagaatgaggaagaaaaggatatctttaggtaagtcatgaaaatgaaaacccaataagaacttacccaataatttagaacagatcacttccaaacgagacatgatgagctaaagtcaaaataaaatgcaagagaaattcaaattatgtaaggcttagaaaaaagtcctgcgtagagtccacggggagcctttttcgatttgatctctagtcaaactaagactggagcttgaagccactactctagaaccggaagaagcctaacttctgcattttgagtagattttctgactatcatttgccttgaattacaatacgataatcttcgattggtagaagtgagtccggatctccctcttttccactaaacccgccactcctacttgtactttattttccacctggctagcttcaattgcttagtagggagtttccatccttgactttcgcggttctttctttgctttcttcagttgtgttgaggagctatcttttgaacccaactaactcttaaatccgaactttccctgcagctttagggcttctagtgaggagaggtgattctctagtttctcattcgcatagccatctcgattaactgagttgacttgtgagctcccctaacccggcaggcaggccaaagaatgaagggcagtgaaaatggtttcttcttctggctaattccgatacgaataccaaaaacagcttacttccgttcgtgtcctcggaaattggattacttatgagtttcttcggtgcaaaagtaggcaagtccattttatcgtgtttttcgtcctcaagacctgattttccaaagaaaatagcctgccaaagagctagctatagaaatacagtcagtcggggtaaactgaaagaaggaaatctacattcatagatagtagggcaataggctcacttacatagtggggacagcaataggctcacttacttttgaaataagagggtcggtcaactctcggcagatagggtagttgctaaataaaagcaaagaaagagtgagttgaaagaagaaatgtatgtgggtcaccatataatatatataatagtacctaacttactaggtatctcggtcaactgctagcttttcatccttggtgcagtatttccaccttctattgctttgcttgcctagctcttactaccgttatttccatctgagaactagacgcccggttcaacttagccaagttaagggaacgcactactcttccctacaagcaacggattgagcgctagcgcgaaagccggtgcgcgttaggcgcatccgttttcttgcttagtagttactcactgggattcccgcagtgcagccgttgcttgttgggctacaaagcacttcttagacggaagagcggcaagcaagcctactcaagtacctagcactccacaacccattagttggaaggcaatcagcaacttagcacactagagcatacaacgacctttagcaac

SEQ ID NO: 157033 - DNA, 450 bp, Zea Mays
atgattgcttttcaaggacatccggataaggggactgagagagtagatatgggacttttcctcataaaagcctatataggtgggtggtatgatagtaagtcttttcctactgatgtgttcagtcgatggcttgattctcctccgggcgtgaattggaagggccaagggtttacaatgaaacaaattgcgtataatttgcacggcgatacgaacagtatagaatttctgcactccttatatgcagacttagttagtcaagggaaggggtgcatagccaatacttccttctcagaagtggctacgaaccacggtgtcgggggttcgaatccacttctgagcgggctggcggctccaccgggagcgagcctactgaaggaaagttttattgttgaacttctatttttatccaatatttatcttttgtttggaaaaaccaaacccacatattga

SEQ ID NO: 157034 - DNA, 1488 bp, Zea Mays
atgttagaacatttcagtgaatgctatttcgatctaagtggtcctattctctgtcccgtgctaggaagcattactcctcttttcattccaaattcttcaataagaccgatacgattgattggtctgtgcgtttctcttattacttttttgtatccccctgttcctcggatacaattcgatccttctacggccaattctcaatttgtggaaagccttcgatggcttccttatgaaaacatccatttgtatatgggtatagacggtctttcattattcttcgtgatattgaccacatttctgatccctatttgcatttcagtgggttggtctggtatgagaagttttgggaaagagtatattacagcatttctaattcgtgaatttctaatgatcgccgtgtcctgcatgctggatcctctactattctatgttctttccgaaagcgtgccaatccctatgttcatcattataggggtatggggttcgagacaaagaaagatcaaggcagcatatcagtttttcctatatactttacttggatccgtttttatgctattagctattctgttgattcttctccaaacaggaaccaccgatttacaaattttattaaccacagaatttagtgagcggcgccaaatccttctatggattgcctttttcgcctcttttgccgtcaaagtgcctatggtaccagttcatatttggttacccgaagcccatgtagaggcacctacggctggatccgtcatcttggcaggaattcttttaaaattgggaacctacgggtttttaagattttcaatacccatgtttcccgaagcgacactttgtttcactcctttcatttatactctaagtgcgattgctataatatatacttccttgaccactttaagacagatcgatcttaagaagatcattgcctactcctcagtagcccatatgaatttggtgactattggtatgtttagtccgaacataccgggaattggaggtagcattttacttatgttaagtcatggactggtttcttcagccctttttctatgtgttggtgttctatatgaccgacataagactcgacttgttagatattatggaggtttagtgagcaccatgccgaatttctctaccattttcttctttttcactttagccaatatgagtttacccggcactagcagctttatcggggaatttctaatcttagtaggagctttccaaagaaatagcttagtagccacattagcagcgcttgggatgattttaggcgcggcgtattccctttggctatataatcgtgtggtttctggaaatttaaaacccgatttcctctataaattctccgatctaaatggcagagaagtttccatatttctaccttttcttgttggagttgttcggatgggtgttcaccccaaagtgttcccggactgcatgcatacatccgtaagtaacttagtgcaacatggcaaatttcattga

SEQ ID NO: 157035 - DNA, 752 bp, Zea Mays
actcaggaaagtagtagccgtgtaagtcagtcactggttaaaagcaagcaattagttagcaatcaagctcttccgcagcgcgccttgtctacgattaagaatgtcatgcctaacccacccttatccactaataaaggcaactctagcttctggcacaactggacttatgaaaccgatcatgctggacaataaaatacttcttccctcatacttatctacttcgcttaggcaaaagatttcaaaagtctgtatctgtctacatgtgcctccgtctatgttaccccttccccggaaaggtgattatacgtatagtataaaaaactagaataaaaaataaaaaagaaagaagagaaagggcagtagaatttctgactacgtcaaaggctcgtttcactctaatttaaaggctgtaactcctacttatttatattaattaaagcttgcccatggctgctttcttcccattctttcttctttccactaatctaatggtttcattctcccatcgagaggttatgatactagcaagagtcctattcttctcctctcgatcctaccttgggttatgtttgacagggatggtcagtgaacttctactggtttcaaaggaggatagagatccattggggaaggctcgaaaggttattcgatatcaaccctcgacgcgccgcagccactattttgactccttttatgcaattatgaacgaaactttctcgattccaatgcaacttatccttttggagttgacg

SEQ ID NO: 157036 - DNA, 351 bp, Zea Mays
actaccagaaagtctatcattgccgaagaccgggccgaactcgacccttaggggaattttgcctaacggttgcagagtatctccagtgaatcccactaggggtgttcgtacctgacctagatgacgcagctctaggttcatttgatcgaatgctcgtttgtataatatatccgccgaactccctgtatcaaccaaaacacgtttgactctgtttcctcctattttcaggacaagaactatcgcatcatcatgaggtcgctgtatgccctcagaatcttgatccgaaaagctgatcacgctaccttcccttggccttttcttgtcgacctgaaggatgatcgggaacttcat

SEQ ID NO: 157037 - DNA, 1342 bp, Zea Mays
agcccggcccgcgttagaggggaagattagcaaagcggaaaaagacagagggagggggagctgcatcttattctcttcgcgttcaggatcggagaagcattcggaaggggctaggccttcatttcgttggcagaagcagaaacgatccaatccattcggggaacccaaaaacgaactctgtttacttttttcatagatagatgatatatataggaataatatatacatccctttactgtatatgtctatgtatcttttaatctcccgattctcttttttttttagttcgcactgctctttctctctaaattgcatcaaagaaaatagagagagagagcagatggatcctatcccctataacgaacactcattcctatctattgatagaaagatcttcgtcacggactttgccttagactgacggaacaaagctaagaagtaggctgaatggaaaaaggaaagggacaagggcggtcgtcgcttggcgcgaaggctgctggttcggtacggtactaaaggtcctcggacttccaggcggtttttcttttgggctgctgtgaacccttggatctcgccaatacagcctcctatggttttcgttaccgagatatcttttcttttttcccagggattttttgggtaatcagctcccatgctgcaaacagtcaaatctgaaccttgccgctcttctttcctcgtgggcaggaagcacaccagctgcgtgcgttgcgtgattccactgtgttttttgcacttgactgggcggacagttgaccggaagataacttcgattcgcccggccagcaggcgggcggcgtgcttatcttgtgtgacaacactacagagcgagtagctcttctagtcgggcagctgtgtgacaacactccagagaaagcggcgcttttgtgtaacatgctatggtctcaacgcccttacgaggtagtgatgagtttcacgcgctctaagcccggcccgcgcgcagttaggaggattggccgctatctgagcggtaccacccatcctaccctactacctatagggggccgtccgtcctacagccgcccgaaaaggaactgcagtaatcttgaatagggatcctacagcgataaaaagaatccccataaaaataccactagatcgagcaccagtgatttcgtatccggtcaaaatcttggctaattgatcgaagtgggtagctccagtagacccatagatcatggaacaaatagggtgggtaggcccaaccaccacactacacgtatagacgcgaacccccctccttaccgtacgtgcgactctcaccgcatacggctcgcacaaagactcaaaaatccatcccgag

SEQ ID NO: 157038 - DNA, 484 bp, Zea Mays
agtagatgccgaacctgctgctcagtgggcgggcgcagcagctacatggacccctttctttatgttgttgccagcgctttcccgggccgagccggaattctttattagaacgtcggcaggcaaagcccgaaggaaggctgctatcccctcggccttcttccttttcgatgaaaaacaaatcaatctccgaaagcgttttccttacccttcccccccttcgtcgagcctttcctttagtggtaagggatatgcaccttatctgaacgtcggcaggcattccggaattctcctttttgagccccgggtgaacataggctcaaacatgattgggggggtcctagctacgccatgcgttcaatacaaaaaaaagcctctgggaagcagcagagattacaaaaagagggtgctttcctgtgttgcactgaaaaaaggacaaaggagaagacgctcttcgactttctttcttcctcccgcgcccgcctaa

SEQ ID NO: 157039 - DNA, 3052 bp, Zea Mays
atggattgggatacatattctagaataatatagaaggagtattattttttaatctaaatctaaatctaagtagataaatctctaaatagagacacttctttttctttagggtcaaaatctcgggttattttcttttaatagagttgtatctctctgaccaattacaaggatagaggtggggataccacaatcgggtagatacaactaaactcatggaaaatcccaataaatccataaatagaacaactgaaaagatacaaaacatggcaaacactccatactcctcatggtcggattattcttcaaggtcggacttacccaaaactacagcaatatcaaacatatgttgcaaactgatgaagagagcattcttaacagctttgctaaaatcaacatgtataagcaatctttacttgctaagaagctgtgcgatagagttttccataatgaatataaagtattaccacaaatggaatacaccaatgagactgctttcagttactatactatatagatagacctatatggagtctcgaatgtatatgatttgatagaagagtttcatgaattgcctcatgttttaacatgctgcggtcaaacccttatttacgacggtgagatattatctcaaaaaaatacaaacattcgtttagtagctaaaaatgcatgggagaggttaggagatcttagagacgatccaataagagatcctgttattgatactatatatgaaggggcagactatccccataatgagtttttatcacgaaaactgaagtgggccgaggattgaaaggtattttgttggatacaatacagtattttctagtgctataacgcaagttagaacttgcacttttaacaaatcaaacaataagtttgtctggggtatgtttaatatccttgtattaatggggataggagttgtagtttggtacaggtatgttcagtgtgataacccttttattatcccccaagaaatagctcacccattggcaaatttgaatgcttttaagaacccagaagccgttattaatggttacaagagggtgactttcttgatcaataaagacatagtgaatactgttcttatcttagtacatttatgaatgatccaacctttcctttacggaggtttttaacgttaaccaagccgagaacatggataataatgttgctatgaagcgagtgtcggcactgccatcatggtagcaagctttatagctaccaatgcgttggttttaccaaccccataagatgtttggtagaatacaataatgattattcatatagggttccatgcagattcaacaatgactgtttcccttattcttttacagtaagaatttagaagaggatttacaagcgtattctaataaattgagcacacatttcgttgaacggttggtttcctgtatagtgagttcgagtctaggttactgtacctaagatggattatatagcctaagtcggggaacagctgagtagatattagctttaaccatagcatccttgtgcatcaaatgggtagcagtttcatactgtgaccctttatagctataaattcgtagtggtaggccgcgggctttcctgttaatcaacccccgaactaggtgtgttatcgaaaagtaatctctgtctgggttagacccttttggagtaagagaatgtatagtcgaggaagacaaaacagaagtggtgaaagctgacaaactaaaaccgttaaatagtttacttcttttattaaggaaagacgatgtcaactgttagctatgaatgtttaaggcaatcaggttgaagggataaatgttcaacctcaggtaatactttctgtggaaagcagttgagattgtgataaaggttgagtagtcattggttggagggattccagtcttttaaggataaagaattcagctatttcatttctaggaggcatttctatttagatttcaaataaaaccctaacctaaaggcagactaagactaaatactcccctcccaccattaagtgagatatttgccaacccattctttattaatccccgccgccccccttgtcctgtcctgggggctccccggccggggaggcaaaggggattgctatcgtcaccctttctcccggaaaagagaaaaagtgactaactttttttcttttcggttggttggtccaaagaacgagagtcagcttccttaagtccgttcttcctcagtagctcagtggtagagcggtcggctgttaactgactggtcgtaggttcgaatcctacttggggagatttgattcattctgaattcgaattgatagttatcgcttttctgaccctgtccttctcctttttcttttctaaagacgcagcagaatcgtcaaacgggacataaaaagtgggaagttgattgtaggatttctattcctcactctcgtataggtgaacttggttcgttcaatgaaaaggatccactgggaatgaatgggaagactggggtagtatcttcattagccggaaggaattagtctccactagcgtaattcgaagaacgaacaagaaaaggcgtcactgtttaggtaggaggatggatggatgtggtccaatggctaaagctctgccagcttcttgtagactggcagtctccgagaggaaccttaaccccccggggggaggccgggtgggatggtatacttttttttcgccacaagtgggaactcagtccttggtaagacacaaggggggaaggaagatcttcactcattcattttcattaagtgcctgcggtgagacgcgacccacaacaaacgaagggggtggagggagaccgaagaaggaacaattgtcttgaatgctacgctgggatcagcagcttccagtgaagacaaaatgagtcgggcaggaagaggaagatcgtgcggggaaaacggggttcgaacccgcgacttctggcgtgacagaccagcactctaaccaactgagctatttccccctttcgtaactactgtcgattcaacagtcacctaccggttacctttgtaactataccaaaaccaaagtagctgtac

SEQ ID NO: 157040 - DNA, 483 bp, Zea Mays
atggcccaagtctacccaattaagaaagggagccaggaattgtggataaaaaataagaaaagagaagtgtttagccgtaccaagcaggcacttctgccgccgactcccgccaggttggttggctacctgtccattcgggggtgggtatatagggtgcccaaggactccggtctaagggcggccttcttcgtttcccgagtcaaagactggaattcctggatggagaatctgcctcaatacaacgtgagctactatgcccaatggggacttcccctgctctatcaaagaggttttccactagcacacgaccaactatcttttcagactgtatcgccgtttatcttcctccggccacgaaagggatttttgcttttggtgaaaagagtattccttggaagcagtatcgtaactgctctattgcgacgacagagaagagaggtattttggtgtccccacgacttatatacgttacgaattaagtag

SEQ ID NO: 157041 - DNA, 318 bp, Zea Mays
atgcaaggcgccgtcttagccttgccttcccaggatcgctcccgcacctgtcacgttcgtgatcggcctcctcaactgtgtatcgatcgaaaggcagggcggcagagcccccaaccgacgggagttgttacgtccagtatgtcccccctcgattcccgacatgctatgataccccacccagggtgggtaggagcgggtcgagtccgtatcaccgcggaacaactgcagcgtccggatcagatctatctactcggcaattcatccggtgacttcacggtcgccaaagaagccccaagaagcatcaaacatttccgatga

SEQ ID NO: 157042 - DNA, 381 bp, Zea Mays
atgattactcatcgtttctctgcatacagtccctatgaagttgctgaaactttcaatgcactgaaacaagacaacatgacagtcaatgcttatattgataagtttgaagatttcatgactatgttgaaacaagatacaccagagctaaccgaagagtggtttgtaaaatgctttgtcaacggccttcgtcatgacatcaaacaccaactcaggcctctccatccagagtccctgactgatgcgtactggcaggccaaagacatggaacgcagtgccccacctaagaaacagttttcttcatatcagagacaaatcactgctgctccatacagaactctccttttgtgcagaacctgctaccaccacaccagacaaaactaa

SEQ ID NO: 157043 - DNA, 543 bp, Zea Mays
aatttttgggccaattcccccttcgtactaccaaaaaatgagattcttgccgaatccgagtttgctgctccaaccattacaaaactaatacctattctgtttagtacttcaggtgcttctctagcgtataatgtaaatctcgtagcggatcaattccaacgagcctttcaaactagtactttttgtaatcgactctatagcttcttcaataaacgctggttcttcgatcaagttttgaatgactttctagtcagatcgttcctgcgtttcggatattcagtctcattcgaagctttagacaagggtgctattgagatattgggcccttatggtatctcgtacacattccgacgattggccgagcgaataagtcaacttcaaagtggatctgtttatcattatgcctttgcaatgttacttggttcaactccatttgtgaccttttctcgtatgtgggactctctatcttcttgggtagattctagatcgtctttcattttgttagtgagtagttttattattaataagtcaagtcaagaataa

SEQ ID NO: 157044 - DNA, 612 bp, Zea Mays
atggccgttggattcgctctacgggccttcttcctcgctaccggaggggggctatccatggcaaattacatgatgcacggagcagccgaatcctccaattcggccttatttacttatacttccgattcctatttggtagaggattcggccagttccgggcgtagtagaagtaccacctcgtcggtcaatcaaccgcttcagggggaacaagctacgcctcccgctcttcctgttatgcaggaagcagctaatcgggctccgccctacgtcccctacccccatcaactaaatgaaataataggaggggatagcgtagaatccattcagaggcggctgttggggactaattggaatccttcagcccatgacataagaatggcccggattcaagccgaagacctatttgaggtcaaggttgacataatccggaagatggcgggcctgcatccaagtggcgattggatgggacggggggcgcgggccctggacaacccccgtacggccactggtgaagaacacttggctaggttgcatcaaatgcttgacgacctacagagcgggaattttccatctgcaaccttctgtcgaaagagtccgcttacgggcgggtga

SEQ ID NO: 157045 - DNA, 378 bp, Zea Mays
atgcctacaaaaaatcaattgattcgtcatggtagagaagaaaaacggcgcacggaccgtactcgagcttcggatcaatgtccccagaagcaaggagtatgcctgcgtgtttcgacgagaacaccgaaaaaacctaattcagctctacgtaagatagcaaaagtacggttgagcaatcgacatgatatatttgctcacattccaggcgaaggtcataattcgcaggaacattctatagtcttagtcagagggggtagagtgaaagattcgccaggtgtgaaatcccatcgtattcgaggagtaaaggatttgctgggaattccggatcgtagaaagggaagatctaaatatggcgcagaaagaccaaaatctaaatga

SEQ ID NO: 157046 - DNA, 357 bp, Zea Mays
atgtcggaatttgcacctatttgtatctatttagtgatcagtccgctagtttctttgattccactcggtgttccttttccatttgcttccaatagttcgacctatccagaaaaattgtcggcctacgaatgtggttccgatccctccggtgatgccagaagtcgtttcgatatacgattttatccggttcctattttatttattatccctgacccggaagtcaccttttcttttccttgggcagtacctcctaacaagattgatctgtttggatcttggtccatgatggcctttttattgattttgacgattggatctctctatgaatggaaaaggggtgcttcggatcgggagtaa

SEQ ID NO: 157047 - DNA, 423 bp, Zea Mays
atgaggccttttggcgaagccaagtcaatttcgggccaccaaaccctgcaactgaggaaaaggccctatggagtaaagggaagcatgtacgttgtcacactccctgccctccaaaggtgcctagaggacgggccagacgcagcagagcgacgccccaggagcggattccccacgagcagggggacaggagacggccatctcgaggcacatcacgacctacaggcaacaccggcgagacccgggaaggtaacccgattgggagtcagaggatccatagtacccgcagcctcccggacttcatattcatcattttataaagaaaacaagcaacggattgagcaactagcgctaggcgcatccgttttcttgctgggtaagggatctcttttctgcaacggaaaaaaatctgctccgctgatttga

SEQ ID NO: 157048 - DNA, 258 bp, Zea Mays
ggtctatgcacatcgctctttccaggaggttggccgcctatcctagatcttcccatttccaagaagatcccttgttcgatctggtttagtatcaaggttcttctttttctgtttctatatatatgggtccgtgctgcatttccacgatatcgttatgatcaattaatgggacttggccggaaagtgttcttgcctctatcattagctcgggtagtccccgtttcaggtgtttcagtcacctttcgatggctcccttaa

SEQ ID NO: 157049 - DNA, 2126 bp, Zea Mays
gggactacttcctgaaagagcctttcgttcgggccggcaggaggggccctgatctatcaattgagggagcaaaaaacaggctttgctcccctttttttaaatgaagaaagaaagaagggtcgaagtttagaccgctcacagtagttctacccatagaaaagatcatgaaagaggcgatcagaatggtacccgaatccatttacgatcccgagtttccagacacatcgcacttccgctcgggtcgaggctgccactcggccctcagacggatcaaagaagagtggggaacctctcgctggtttttggaattcgacatcaggaagtgttttcacaccatcgaccgacatcgattcatctcaatcttgaaggaagagatcgacgattccaagttcttttaccccactcagaaacagttttccgccggacgactcgtaggaggtgagaagggccctgactccgtcccaaacagtgtactactatcggccctattaggcaatatctacctacacaagctcgatcaggagatagggaggatccggcagaagcacgaaattcctcttgtagtgaaaataagatcggttctattaagaataggtcgtcgtattgatgaccaagaaaagtatggaaaagaagcaagcttcaacgctccccaagacaacagagccctcatagtggggagggtaaagagcatccaacgcaaagcgacctttcattcccttgtttcgtcgtggcacaccccccccacaagcacccccaggcgaaggggagaccagaaaacgcctttcgttttccctccttccctagccgccttccttaacaagccctcgagcctcctttgcgccgccttcctcatagaagccgctgggttgaccccgaaggccgaattcaatggtagagaaggctttaataagaatttggccatgagagaccttcttaagtattgcaaaagaaggggcccgctgatagagctgggcggggaggcgatactagttaccaggtcagagagaggcctggcccgtaagctggccccctttaaaagccattccttattaataaggatttgttacgcgcgatatgccgacgacttactactgggaatcgtgggtgccgtatttcttctcatagaaatacaaaaacgtatcacccacttcctacaatccggcctgaacctttgggtaggctccgcaggatcaacaaccatagctgcacggagtacggtagaattccccggtacggtcattcgggaagtccccccgaggacgactcccatacaattcttgcgagagctggagaagcgtctacgggtaaagcaccgtatccatataactgcctgccacctacgctccgccatccattccaagttaagggacctaggttatagtatccctatcaaagagctgacgaaggggatgagcggaagaggtcgtctactggacgcggttcaactagcggagactcttggaaaagaaagtccccaagttagcgtattatgggggaccgtcaagcacatccggcaaagatcaagggggatctcgttgttgcatagctcaggtcagagcaaggtgccatcaggcgttcaacaggcagtctcacgatcgggcatgagtgtcctgaagaataaattgtatactccctttggtcggaaggcggcgggggaaggaaggggacactgggcgggatctttcagcagcgaattccccatacagatagaggcgcctatcaaaaagatactccgaaggcttcgggatcgaggtctcattagccgaagaagacccaggccaatccacgcggcctctttgaccaacgtcagcgacagagacatagtaaattggtccgcgggcatcgcgataagtcctctgtcctactacaggtgctgcgacaacctttaccaagtccgaacgattgtcaactaccagatccgctggtccgctatattcaccctagcccacaagcacaaatcttcggcgcggaatataatcccaaagcaccccaaagactcaaatatagtcaatcaagaaggtggtaagacccttgcagagttcccaaacagcatagagcttgggaagctcggactcggtcaagatccgaacaacggcggagcactcaactacatgtttaataagtag

SEQ ID NO: 157050 - DNA, 2519 bp, Zea Mays
atgggaataactaagcagaaattaggaaatgagcacgaaatgtctataaatgaattttctcattatttgttatttccgggtcttttcgttgcattcacttacaacaagaaacaaccaccagcgtttggtgcagcacctgcattttggtgcattcttctttctttccttggtctttcgttccgtcatattccaaataacttatctaattacaacgtattaaccgctaatgcaccttttttttatcaaatctcagggacatggtctaatcatgagggtagtattttctcatggtgttggatcccaagtttttatggattccttttttgttaccggtaccggggtcgaccccaaagccataatgtctcaaaacgcagaggctatagagaaacttttattttttcctttgtctcgaacttcgtgaagaactccattctatctctccaacaaaaaagtggagctgcgccccagttgtacactcccttcgttcggagaacccttgttgattctgaacttcgttcgcaaagtaagcgtccttttaacgggccagccctttttaatgcgccgcttgacccagttttgaaaatgagctttgctcttctgggcgctgggcgctcccgtggttcgcgagaaggaaaaaggactaatcttttgttacatctggcacgagatgaaaaagagagagcttcgtctatcgatgaacagcagattgacggagctcttggcattgctttgtttttctctcctttcctatcagcgagttccgatccttttgttcgaaatttcttcgttcgtaccgaaccgcttgcagaatcaaatcctgttccacaagatcctatatcagctatacatcctccttgcatttatgccggagacgtcgccagtgctatgggctttgggttatgtagatcaaaaatgatgaatgggattgtggcactccactcgccgccaatgcggaaggatgccgccgaaaagaatggaacgctgcttcgctctgctggatgcgtcggatcccatataagaagctcgctctttacccgatcattcaaacattttgtgggcggcgcgcctgctctattgttgcgtagcaatagaagcctgcttcggcggcgctttttcgccttctcttcgctctggacaggagcgctaatggacacggggagggagcaggcgaagcgtgttgtcgttcgtaatggaaagaaagacaccactacttcgcctctttgttggaccgccggcgcgaacacagtggtctctgaccaggaccaggaaccaattcgaatttggatcttgacatgttggttgtttttaaccgtaggcatctcgccaggaagttggtgggctcatcatgaattaggtcggggtggctggtggtttcgggatcccgtagaaaatgcgtcttttatgcctcgggtattagccacagctcttattcattcagtaattctaccccttcttcattattggacctcgcttctgaatattttgactcttccatgctgtgtctcaggaaccttttcaatacggtccggattgctagctcccgttcatagttctgctacagacgatacacgaggaagatttttatggcggttcttccttctaattacaggcatatctatgactcttttttaccagatgaagcaggtccgtagaacctataaaaaagagatggttgtggcgcgaagtactcttgtgcacctacgtcacccggctcgcgcgcaaccccgccccgttatgttatggaagaatttagcttcttgctgggctggttattccgagccagcaactggctggctgccggatttcgtcccgtccgtagcgcttcggaagtcactctggcgtggcgctgctggatacttctgatcaataggaataggaggaaaaaaaagcttatgatgagcatctattggagtcgatcatttccaagatctaattcgagtttcttattatgtagtggaaacgccttacaatcttcagttttacgcttacgcttaagggaagaaatgttcttggtggatgcaggccttggtaccccaaaaatttgtatgcaagatgagcttacaggactgccaatcaagcgagccaccaggtttgagaataaggtgggatccaagaatgtagtggctggtgaatcactgatcaaaaagcggatttttgagagattcttcatcgatctagtggccggtgaatcactgatcaaagagcgagcagccgccgggtttaatgattttgtgggatccctggatgtagcggctggcgaaccgcttcttcttccacaaagattcagacaaaaccgagcttggatagaactgaagaagatttggcgaacgaagaaaaaggtaaaagggtttcaaattaataaaatagaaggaggttattcagtagccatcgcaggtttcattacttttcttccattcaaagctaaaaaaataaaaaggatagcgaatgctcgattcgccattgatagctttatccctaaaaggagggatattgtgataaggcagattcaaacaagaact

SEQ ID NO: 157051 - DNA, 444 bp, Zea Mays
atgaaagaagcccacttacccactcttctttcccaccatccgcagtataccaatcactcactagatggtggcctcggaatcggaaaggaaataagctcatactactggaatggaatggaatatgagacactttacttcctacaaaactcaagtgaggggagggatggatgtcccgccacgaacggaaacatcaagcctccccaatggttatgttacgtatccactcatcctacaaggaactatgtccaacctattctatttattccgctattctatttattcacgacgaatttgtttccggaagtggcattgagaagtgttgctccagcctttcatactttactcgaatattttagaacacaaataagatccctcataagtgcaaacaatgcaatagcttcggttaaggcaaagcccaaacaaatcaaaagaaaagaaaaataa

SEQ ID NO: 157052 - DNA, 665 bp, Zea Mays
aatttccgtccaccttctcacggagccgtacgtggacgttaccgctcatacagctcccagccagcaagcagttagctttcctctagaagtcatggaagtgtggataaatcgacatcaaactctagtcgacagaaggtttttctttttttcccgctcgcagtagtatagtagtcccaatattccaatactacagcgttagcagcgttttgtctcgatgaaaaatcttctggtgaccatgaggatttcttctctatcctttggacttgaacgatccaatttcgaatcttgttggagattctttatctggctttgacgtatggggccctttccccactgtttgagaaaagtttttcatctttcctttacatccgaacaggacgggccactagtccctgatctggacgccgcacctggaactccttctacctgtggttgtggggttggcgcctcctgagctgcttgagcagcacccacaagggggtgggaaggaataagactacataagagaatactctctttttactttattgactggtgtcccgcggatctctctctttaggcgcttcgtttagttcgtttatagcgagaaagcccatgcgagtcaattaagtaagctggaaggcactttttaaaaagcctggaacttgatccaatctctaaccaat

SEQ ID NO: 157053 - DNA, 363 bp, Zea Mays
atgtccttgaaaagcaatcataagagggaagtgcgccgctacagattgaggtctgaacactgctttcggcaagaaaacccttctttgacttatgcacttaggcaaacaaagccttcagggcaggttcaatataatggttgttgcttgcctctccgcttatgtcagcatagaggatttcactccagtcgtagaaggaagcctttctatgaaacaataaagactaactcgaaggagccagttttgaataaggaccttgtctttcaagctggaagaccagaacgaggtaaaggtgaatcccttgaccgagtgaaggagagcgaggaagtaatcaagttcgagcaaagcttaacacaagcaagttga

SEQ ID NO: 157054 - DNA, 1785 bp, Zea Mays
atgggtttgccttggtatcgtgttcatactgtcgtattgaatgatccgggtcgattgctttcggtgcatataatgcacacagctctagtttctggttgggctggttcgatggctttatacgaattagcggtttttgatccctctgatcctgttctggatccaatgtggagacaaggtatgttcgtcatccccttcatgactcgtttaggaataacgaattcgtggggtggttggagtatttcaggaggaactgtaacgaatccgggtatttggagttatgaaggtgtggcaggtgcgcatattgtgttttctggcttgtgtttcttggcagctatctggcattgggtatattgggacctagaaatattctgtgatgagcggacgggaaaaccttctttggatttgcccaagatctttggaattcatttatttcttgcaggggtggcttgttttggctttggtgcatttcatgtaacgggtttatatggccctgggatatgggtgtccgatccttacggactcactggaaaagtacaagctgtaaatcctgcgtggggtgcagaaggttttgatcctttcgttccgggaggaatagcttcgcatcatattgctgcgggtactttgggcatattagcgggcctattccatctaagtgtccgtccgcctcaacgtctatacaaagggttacgtatgggcaatattgaaactgtactttccagtagtatcgctgctgttttttttgctgctttcgtagttgccggaactatgtggtatggatcagcaactaccccaatcgaattatttgggcctactcgttatcagtgggatcagggatactttcagcaagaaatatatcgaagagttagcgatgggttagccgaaaatcttagtttatcagaagcttggtctaaaattcccgaaaaattagccttttatgattatattggtaataatccggcaaaggggggattattcagagcaggctcaatggacaatggggatggcatagctgttggatggttaggacatcccgtctttagagataaagaaggacgcgagctttttgtacgtcgtatgcctactttttttgaaacatttccggtcgttttggtagatgaagagggaattgtgagagcggacgttccttttagaagagcagaatccaaatatagtgttgaacaagtaggcgtaacggtggagttctatggtggcgaacttaatggagtaagttattctgatcctgctactgtaaaaaaatatgcgcggcgtgctcaattaggggaaatttttgaattagatcgagctactttgaaatcagatggtgtttttcgcagcagtccaaggggttggttcacttttggtcatgctacctttgctttgctcttctttttcggacacatttggcatggcgctcgaaccttgttccgagatgtttttgctggtattgatccagacttggatgctcaagtggaatttggaacattccaaaaagttggagatccaactacaaggagacaggcagcctgataccacattgctatggtatctttcacctccattttttgtttgatttgacatgaggaacatctcctgtcctttctttgactctttttctttttttatatgggaaatgatcccaaatgataagtgaataggtgtggaagttataattgtaaataaaccaggatcgaatctatggaagcattggtttatacgttccttttagtttcgactttagggataatttttttcgctatcttcttccgagaaccacctaaggttccg

SEQ ID NO: 157055 - DNA, 555 bp, Zea Mays
tgattaaatagaatttatggctacacaaaccgttgaagatagttctagacctaagccaaaacggactggcgcaggtagtttattgaaacccttgaattcggaatatgggaaagttgctccgggttgggggactactccttttatgggggtcgcaatggctttattcgcgatattcctatctataattttagaaatttataattcttctgttttactggacggaattttaacgaattaggtttctactaactaaaactatgacttcatagtttttccatccaaaaaaagcctttctactttaagctccacatttctagacattctggtagttcgaccgtggatttttttgttttggtatctctggaatatgagtgtgtgacttgttagaattgatcctattgataatacatagaaggggcctgttatctctatcaagatgattctaattcgtcagatattatttattctagtatctggaacacgaaatacatagagtggatcaaaaaaaaaggaactatgattcatactcactatttagacctcgcaaccagactt

SEQ ID NO: 157056 - DNA, 1076 bp, Zea Mays
atgactgcaattttagagagacgcgaaagtacaagcctgtggggtcgcttctgcaactggataactagcaccgaaaaccgtctttacattggatggttcggtgttttgatgatccctaccttattgaccgcaacttccgtatttattatcgccttcatcgctgctcctccagtagatattgatggtattcgtgagcctgtttctggttctttactttatggaaacaatattatctctggtgctattattcctacttctgcggcgatagggttgcatttttacccaatttgggaagctgcatctgttgatgaatggttatacaatggcggtccttatgagctaattgttctacacttcttacttggtgtagcttgttatatgggtcgtgagtgggaacttagtttccgtctgggtatgcgcccttggattgctgttgcatattcagctcctgttgcagctgctactgctgttttcttgatttaccctattggtcaaggaagtttctctgatggtatgcctttaggaatatctggtactttcaactttatgattgtattccaggcagagcacaacatccttatgcatccatttcacatgttaggtgtagctggtgtattcggcggttccctattcagtgctatgcatggttcccttgtaacctctagtttgatcagggaaaccactgaaaatgagtctgctaatgagggttacaaatttggtcaggaagaagagacttataatattgtggctgctcacggttattttggtcgattaatcttccaatatgctagtttcaacaattctcgttctttacacttcttcttggctgcttggcctgtagtagggatctggttcactgctttaggtattagtactatggcattcaacctaaatggtttcaatttcaaccaatctgtagttgatagccaaggtcgcgttattaatacttgggctgatatcatcaaccgtgctaatcttggtatggaggtaatgcacgaacgtaatgctcacaacttccctctagacctagctgctcttgaagttccttaccttaatggataaggtttttctcctaa

SEQ ID NO: 157057 - DNA, 1386 bp, Zea Mays
atggtaaaacttcgtttaaaacgatgtggtagaaagcaacaagctatctatcgaatcgttgcaattgatgttcgatctcgaagagaaggaagagatcttcgaaaagtaggtttttatgatccgataaagaatcaaacttgtttaaatgttccagctattctctatttccttgaaaagggtgctcaacctacaagaacagtttatgatattttaaggaaggcagaattctttaaagataaagaaagaactttgagttaattgaagaactaaatgaataaaaaagtaggagagggtccttagtaccccttaattatttagacacaatttgcctctttcttagtcctattttttttttgctgcatttatgtcgtgccaatccaacaaaagtccctattttatttcctttttatatctaattacattgtatttgcattgacaaaggtctattgaacaaatagaatttgtagatagatgggtctctttattgtcactccatattaggtatttctgtctacacttcattcaaatgatagggttgcccctcttgcatgtactctcatacacatacaagattattttacttctttaaattgccaaaaaaatcacaattttgccattgtgattggggctgctttttttttttacccttagccttagtgaaatttaaccggatctgttcattttgtatttgagtgtttttaatggattagaaaatctttcttttgatgtcttgctaattcaatgtggtataatttcatcgatttttagattttgatcgtatctaagagatcctattttatccgggttgctaactcaatggtagagtagtcggcttttaagtaaggctatgatcttttacacatttggatgaagcaacaaattcgtccagactcttggtagagtctagaagaccacgactgatcctcaaaggtaatgaatggaaaaaatagcatgtcgtaataaaatcaatttcttttttttttttgaataaaaaaaattctgattttctgggtctagtgaataaatggatagagcctggctctaattctggtaaaataaaaaaaaagcaacgagcttaacttcttaattggttaattggaaggattccccgatctaattagacgttaaaaatagattagtgcctaatgtggggaaaggttaggttttcctatgaatggacccttttactttttttttttaggaaatcctaattattcttgattatgggattgaaaagagatgttatgaattgaatgtgtaaaagaaacagtatattgataaagagactgtattccaaagtcaaaagagcgattggcctgcaaaaataaaagatttgttcttgtttgttttataattagaacaaacataaactaattagatagaaaa

SEQ ID NO: 157058 - DNA, 123 bp, Zea Mays
atggccgatactactggaagaattcctctttggctgataggtactgtaactggtattcttgtgattggtttaataggttttttcttttacggttcgtattctggattgggttcatctctatag

SEQ ID NO: 157059 - DNA, 734 bp, Zea Mays
tatgaaaataagagcttccgttcgtaaaatttgtacaaaatgtcgactgattcgcaggcgtgggcgaattagagttatttgttccaatccgaagcataaacaaagacaggggtaatctttcgaaaaagaagcttttctttctaatagcttttctttctaattaaagtaaaaagtacccacggaaatgcccaaattgcaaataaaaaaaatgaaagtaaaggatatattttaacctgaaacggatatctttgtatcttttttctttttgttatttctaactcatatttatgagataataaaatatgacaaaagctataccaaaaataggttcacgtaagaaagtgcgtattggtttgcgtaggaatgcccgttttagtttacggaagagtgcacgtagaataacaaaagggattattcatgttcaagctagtttcaacaataccattataaccgttacagacccacaaggtcgggtcgttttctggtcctccgcaggtacttgtggattcaaaagctcaagaaaagcatcaccctatgctggtcaaagaacagcagtagatgctattcgtacagtgggtttgcaacgagcagaagttatggtaaaaggtgctggtagcggaagagatgccgcattacgagccattgctaaaagtggtgtacggttaagttgtatacgcgatgtaacacctatgccgcataatggatgtcgacctcctaaaaaaagacgtctgtaa

SEQ ID NO: 157060 - DNA, 324 bp, Zea Mays
atgacagaaaaaaaaaatagtagagaaaaaaaaaacccgagagaagcaaaagtcactttcgaaggtttagttacggaagccctacccaacggaatgttccgcgttcgcctagagaatgacaccatcatcctgggctatatttcaggaaagatccggtctagttctatacgaatactgatgggggatagggtcaaaattgaaataagtcgttatgattccagcaaaggtcgtataatttatagacttccccataaggattcgaagcgtaccgaagactcgaaggatactgaagatttgaaggataccaaagattcaaaggattag

SEQ ID NO: 157061 - DNA, 411 bp, Zea Mays
atgggcaaggacactattgctgatttactaacctctataagaaacgcagacatgaataaaaaaggaactgttcgagtagtatccacaaatattaccgaaaacattgttaaaatacttctacgagagggttttattgaaagtgttcggaaacatcaggaaagtaacagatatttcttggtttcaactttgcgacatcaaaggagaaagactagaaagggaatatatagaactagaacctttttaaagcgtatcagccgacctggcttacgaatttatgccaactatcaaggaattcctaaggttttgggcggaatgggaattgctattctttctacttctcgaggtataatgacagatcgagaagctcgactaaacagaattgggggagaagttttatgttatatatggtaa

SEQ ID NO: 157062 - DNA, 372 bp, Zea Mays
atgattcaacctcagacccttttaaatgtagcagataacagtggagctcgaaaattgatgtgtattcgagtcataggagccgctggtaatcagcgatatgctcgtattggtgatgttattattgctgtaatcaaagacgcagtgccccaaatgcctctagaaagatccgaagtaattcgagctgtaattgtacgtacacgtaaagaattcaaaggcgacgacggtataataatacgctatgatgacaatgcagcagttatcattgatcaaaaaggaaatccaaaaggaactcgagtttttggcgcggttgccgaagaattaagagaattgaatttgactaaaatagtttcattagctcctgaagtattataa

SEQ ID NO: 157063 - DNA, 363 bp, Zea Mays
atgaagggaaaatcctgccgaggcaatcatatttgttttggtagatatgctcttcaagtacttgaacccgcttggatcaccgcgagacagatagaagcaggacgaagagcaatgacacgatatgcacgtcgtggtggaaaaatatgggtgcgtatatttcccgacaaaccggttacaataagacccacagaaacacgtatgggctcgggaaagggatcccccgaatattgggtagccgttgttaaaccaggtcgaatactttatgaaatgagcggagtatccgaaactgtagctagagcagctatctctatagctgccagtaaaatgcccatacgaagtcaatttcttcgattagagatatag

SEQ ID NO: 157064 - DNA, 1406 bp, Zea Mays
ataatggaaaagaacatatacctatttacataacaaatcctatggtaggtcgcaaattgggggaattcgtgcctactcggcatttcacgagttatgaaagtacaagaaaggatactaaatctcgtcgttaattgaattcagaatagaaagattcagaataaacaaaatttataggattcaaataatcaaataaagtaaaggtaggcgggtaataaccttatttatgacaagtttcaaattggtaaagtatacccctaggataaagaagaagaaggggctgagaaaactcgcaagaaaagttccaaccgatcgtctacttaaattcgaacgggttttcaaagcacaaaaacgcatacatatgtctgttttcaaagcacaaagagttctagatgagattcgctggcgttactacgaggaaaccgttatgatactgaatctcatgccttatcgagcatcgtatcccatcttaaagttggtttattcggcagcagcaaatgctactcattatagggatttcgacaaaacgaatttattcatcactaaagccgaagtcagtaggagtactattatgaaaaaattcagacctcgagctcgaggacgtagttattctataaaaaaaacgatgtgtaatataacaattgtactaaatatagtaaagaaatcaaaataatctttagatcaatctaagatttcgattcccagtaaaaaaaaaagaaatataatagaaaaatatgggacaaaaaataaatccactcggtttcagacttggtacaacccaaaatcaccattccttttggttcgcacaaccaaaaaattattctgaaggtctacaggaagataaaaaaatacggaattgtatcaagaactatatacaaaagaataggaaaaaaggctcgaatagaaaaatggaatcagactcaagttctgaagtaattacacatatagaaattcaaaaagaaatcgatacaatccacgtcataatccatattggattccccaacttattaaagaaaaagggagcaatcgaagaattagagaaagatctccaaaaggaagttaattctgtaaaccagagacttaatattgctatcgaaaaggttaaagaaccttatagacaacctaatattcttgcggaatatatagctttccaattaaaaaatagagtttcattccgaaaagcaatgaaaaaagctattgaattaactaaaaaagcggatataaagggaataaaaatccaaattgcgggtcgtctagcaggaaaagaaattgcacgtgccgaatgcatcaaaaagggtagactacccctccaaacaattcgcgctaaaattgattattgctgctatccaattcgaactatctatggagtattaggtgtcaaaatttggatattcgtagaagaagaataa

SEQ ID NO: 157065 - DNA, 1548 bp, Zea Mays
atgggcttttctggtcaaaacgtatcttgtctttattactttatcatgagttattttccttggttaacaatacttgttgttttgccgatatttgcaggttcattaattttctttttacctcataaaggaaataaaatcgttaggtggtatactatagctatttgtttattagaattccttctaatgacttatgcattctgttatcatttccaattggaggatcctttaatccaattaaaggaggattctaaatggatagatgttttcgatttccactggagattgggaatcgatccactttcattaggatctattttattgacaggatttatcactactttagctactttagcggcttggccggttactcggaattcgcaattattctatttcctgatgctagcaatgtatagcggtcaaataggattattttcttcacgagaccttttacttttttttatcatgtgggagttagaattaattcctgtttacttacttttatccatgtgggggggaaagaggcgtctgtattcagctaccaagtttattttgtatactgcaggcggttccatttttttcttaattggagttctgggtatgggattatatggttccaatgaacccggattagatttagaaagattgattaatcaatcataccctacaacatgggaaatactactgtattttggcttccttattgcttatgctgtcaaattgccgattatacctttacatacgtggttaccatatacccatggggaagcgcattacagtacatgtatgcttttagccggaattctattaaagatgggagcatacggattgattcgggtcaatatggaattgttaccgcatgctcattatctattttccccttggttggtaataataggagcggtgcaaataatctatgcagcttcaacttctcttggtcaacgaaatttcaaaaaaagaatagcctactcctccgtatctcacatgggtttcataattataggaattggttccataaccaacattggactaaatggagctattttacaaatattatctcatggatttatcggtgctacactttttttcttggcgggaacggcttgtgatagaatgcgtcttgtttatctcgaagaactggggggaatatctatcccaatgccaaaaatttttaccatgtttagtagcttttcaatggcttctcttgccttgccgggaatgagcggttttgttgcagaattagtagtattttttggactaattactagtcctaaatttatgttaatgccaaaaatgctaattacttttgtaatggcaataggaatgatattaactcctatttatttattatctatgttacgccagatgttctatggatacaagctatttcatgttccaaacaaaaattttgtagattctggaccacgagaactctttcttttaatttgtatctttttaccagtaataggaattggtatttatccagatttggttctctcgctatccgttgatagggtagaggttctattatccaattattatactaaatag

SEQ ID NO: 157066 - DNA, 246 bp, Zea Mays
atgtcacattctgtaaaaatttatgatacatgtataggatgcactcattgtgtacgagcttgcccaacagatgtattagaaatgataccttgggatggatgtaaagccaagcaaattgcttccgcgccgagaaccgaagattgtgtgggttgtaagagatgcgaatccgcctgtccaacggattttttaagtgtccgcgtttatttagggcctgaaacaacccgcagcatggctctatcttattga

SEQ ID NO: 157067 - protein, 168 aa, Zea Mays
MLLKYPWILSTSVIENYSQMLLFFNQKRISSTVLAIAVKSWPHILGSSSKRMNSVLELFHVLGISKKMVVPVITSSPQLLLRKPDQFMQNVLFFREMGVDKKTTGKILCRSPEIFASNVDNTLKKKIDFLTNFGVSKHHLPRIIRKYPELLLLDINCTLLPRYDCNLV

SEQ ID NO: 157068 - protein, 210 aa, Zea Mays
MVSCIIDRTTDLQLGPLLHPPQECSLHPRFHLLQRWEGCSRRCRLSYSRYTAENGGGATPEMDTSGVVSLSWLQCCCFGLPHGGAHRVPHGRHGQRDGLRCCLPRSRRRPLQPHRRRRGGSAWLGVAASVSGEARVASSPRSESLWGRVDRWGRGGGEGVARRWGRGIGADGSARTCGRAMVNRKDGGVGENVGWVTGADWSGRICAYVC

SEQ ID NO: 157069 - protein, 149 aa, Zea Mays
MDTSGVVSLSWLQCCCFGLPHGGAHRVPHGRHGQRDGLRCCLPRSRRRPLQPHRRRRGGSAWLGVAASVSGEARVASSPRSESLWGRVDRWGRGGGEGVARRWGRGIGADGSARTCGRAMVNRKDGGVGENVGWVTGADWSGRICAYVC

SEQ ID NO: 157070 - protein, 56 aa, Zea Mays
MGCLIHLWSLSAASGLASQADSSLSPPLSFPSRANPLLSLSYSPVSGQGITLISNI

SEQ ID NO: 157071 - protein, 129 aa, Zea Mays
MAVMRPPDLPLPLPAFSLPFSSPCSIKRSSVPDCPWCRFPAIPSSPSRSRPPCSRRPPPVPCSLPPEPRSRHPETSAPSSSTPPPSDVDQRCRGPRHRPCRPLCSVDHRRPSRARSQPPYAQGTEEEAD

SEQ ID NO: 157072 - protein, 64 aa, Zea Mays
MAFLRISRFIMLSSSKWQGDVGWWQLPVWFSHREINLLRNLTRVPQKGYQLHGCYHHMSKPQPC

SEQ ID NO: 157073 - protein, 131 aa, Zea Mays
MCGIGMISQVNICSRIRKVAFRFITYKGPGCAATMMATTKEAKLMSGLLRNRCRENNGPFSRSVFIRKWTFAAMFRICEECSPVEESTGGYTATKLILDGSDDKNPCDKELVNKDNLLQRNKINQKYQDLL

SEQ ID NO: 157074 - protein, 53 aa, Zea Mays
MRCTWLCPLKPGVLHPGTHFPALPSSSTGCFNCGKSEHFIKDCPYPKQNKTNF

SEQ ID NO: 157075 - protein, 424 aa, Zea Mays
MGTTPSRGDIITKSVDASSEVHDAFMLADLLGKKIEEIGKEKVVQVITDNGANYKAAGRILMERFPSLFWSPCAAHCLDLMLEDIGNLKEFKKPTVRARRVTTFIYRHGRILSLMREKTGGADLVRAAATRFATAFLTLKSLYKHKDPLKALFLSEEWNGNKLAKTAAGKEACDIVLSVEFWNKVEDCLRASAPLLIVLRVVDGDEKLKRIIDIIEKRWMKQMDHPLYGAALYLNPGKLHPLIRDDDDATVGQLRGCFLDVLARMQVYTLTSKFMLYFTFGNQVDWWRSYGGRAIEIQRFARRIVGLCASSSGCERNWSRFEFPQGARGCDCGEDENGLTWELVDQAVGASSSLRGRNLPRNANKRARVSHSRFDFEEDFGSANEEEEDQDPHDDVDVTDSEDAHDDVGGENTEAAPDEFEDGY

SEQ ID NO: 157076 - protein, 359 aa, Zea Mays
MGTTPSRGDIITKSVDASSEVHDAFMLADLLGKKIEEIGKEKVVQVITDNGANYKAAGRILMERFPSLFWSPCAAHCLDLMLEDIGNLKEFKKPTVRARRVTTFIYRHGRILSLMREKTGGADLVRAAATRFATAFLTLKSLYKHKDPLKALFLSEEWNGNKLAKTAAGKEACDIVLSVEFWNKVEDCLRASAPLLIVLRVVDGDEKPAMPEVAALMKHAKEKIKLSFAIDSKKSLLKRIIDIIEKRWMKQMDHPLYGAALYLNPGKLHPLIRDDDDATVGQLRGCFLDVLARMQVYTLTSKFMLYFTFGNQVDWWRSYGGRAIEIQRFARRIVGLCASSSGCERNWSRFEFVSIVVFV

SEQ ID NO: 157077 - protein, 527 aa, Zea Mays
MDANANALGMDAITNETVDLEHVPVEEVFEHLKCTRDGLTSAAAQDRIDAFGYNKLEEKQESKVLKFLGFMWNPLSWVMEAAAIMAIALAHGGRDVRGKPMGIDYHDFVGIMLLLIINSTISFIEENNAGNAAAALMARLAPKSKVLRDGTWSEMDASLLVPGDIISIKLGDIIPADARLLEGDPLKIDQSALTGESLPVTKQPGDGIYSGSTCKQGEIEAVVIATGIHTFFGKAAHLVESTTHVGHFQKVLTSIGNFCICSIAAGMTIELIVMYAIHAREYRQIVDNLLVLLIGGIPIAMPTVLSVTMAIGSHKLAQQGAITKRMTAIEEMAGMDVLCSDKTGTLTLNKLSVDKNLIEVFARGMEKDDVVLMAARASRLENQDAIDFAIVSMLPDPKEARAGIQEVHFLPFNPTDKRTALTYLDARGKMHRVSKGAPEQILNLASNKSEIERKVHHSIGNYAERGLRSLAVAYQEVPEGTKESSGGPWQFIGLLPLFDPPRHDSAETIRRALDLGVSVKMITGLEC

SEQ ID NO: 157078 - protein, 517 aa, Zea Mays
MDANANALGMDAITNETVDLEHVPVEEVFEHLKCTRDGLTSAAAQDRIDAFGYNKLEEKQESKVLKFLGFMWNPLSWVMEAAAIMAIALAHGGRDVRGKPMGIDYHDFVGIMLLLIINSTISFIEENNAGNAAAALMARLAPKSKVLRDGTWSEMDASLLVPGDIISIKLGDIIPADARLLEGDPLKIDQSALTGESLPVTKQPGDGIYSGSTCKQGEIEAVVIATGIHTFFGKAAHLVESTTHVGHFQKVLTSIGNFCICSIAAGMTIELIVMYAIHAREYRQIVDNLLVLLIGGIPIAMPTVLSVTMAIGSHKLAQQGAITKRMTAIEEMAGMDVLCSDKTGTLTLNKLSVDKNLIEVFARGMEKDDVVLMAARASRLENQDAIDFAIVSMLPDPKEARAGIQEVHFLPFNPTDKRTALTYLDARGKMHRVSKGAPEQILNLASNKSEIERKVHHSIGNYAERGLRSLAVAYQYLKGLRKVLVGLGNLLVFSHSLILLAMTVLKLYAELLTLESV

SEQ ID NO: 157079 - protein, 902 aa, Zea Mays
MWNPLSWVMEAAAIMAIALAHGGRDVRGKPMGIDYHDFVGIMLLLIINSTISFIEENNAGNAAAALMARLAPKSKVLRDGTWSEMDASLLVPGDIISIKLGDIIPADARLLEGDPLKIDQSALTGESLPVTKQPGDGIYSGSTCKQGEIEAVVIATGIHTFFGKAAHLVESTTHVGHFQKVLTSIGNFCICSIAAGMTIELIVMYAIHAREYRQIVDNLLVLLIGGIPIAMPTVLSVTMAIGSHKLAQQGAITKRMTAIEEMAGMDVLCSDKTGTLTLNKLSVDKNLIEVFARGMEKDDVVLMAARASRLENQDAIDFAIVSMLPDPKEARAGIQEVHFLPFNPTDKRTALTYLDARGKMHRVSKGAPEQILNLASNKSEIERKVHHSIGNYAERGLRSLAVAYQEVPEGTKESSGGPWQFIGLLPLFDPPRHDSAETIRRALDLGVSVKMITGDQLAIAKETGRRLGMGTNMYPSSSLLGDKKGDIAVLPVDELIEQADGFAGVFPEHKYEIVQRLQARKHICGMTGDGVNDAPALKIADIGIAVADATDAARGASDIVLTEPGLSVIISAVLTSRAIFQRMKNYTIYAVSITIRIVLGFLLLACFWKFDFPPMLVLVIAILNDGTIMTISKDKVRPSPHPDSWKLAEIFATGVIIGAYLAVTTVLFFWVIYKTEFFVRVFHVRTMNRKKIEETGDQNLLADNMEMLASAVYLQVSTISQALIFVTRSRGWSFMERPGLLLMAAFVIAQLIASVLAAMVSWELAGIKGIGWRWTGVIWLYNLVVYLLLDPIKFAVRYGLSGKAWNLVIDHKVAFTNRKDFGKEAREAAWAHEQRTLHGLESAGTPGEKAASVELGQMAEDARRRAEIARLRELHTLKGKVESVVKLKGLDLEDINNQHYTV

SEQ ID NO: 157080 - protein, 979 aa, Zea Mays
MDANANALGMDAITNETVDLEHVPVEEVFEHLKCTRDGLTSAAAQDRIDAFGYNKLEEKQESKVLKFLGFMWNPLSWVMEAAAIMAIALAHGGRDVRGKPMGIDYHDFVGIMLLLIINSTISFIEENNAGNAAAALMARLAPKSKVLRDGTWSEMDASLLVPGDIISIKLGDIIPADARLLEGDPLKIDQSALTGESLPVTKQPGDGIYSGSTCKQGEIEAVVIATGIHTFFGKAAHLVESTTHVGHFQKVLTSIGNFCICSIAAGMTIELIVMYAIHAREYRQIVDNLLVLLIGGIPIAMPTVLSVTMAIGSHKLAQQGAITKRMTAIEEMAGMDVLCSDKTGTLTLNKLSVDKNLIEVFARGMEKDDVVLMAARASRLENQDAIDFAIVSMLPDPKEARAGIQEVHFLPFNPTDKRTALTYLDARGKMHRVSKGAPEQILNLASNKSEIERKVHHSIGNYAERGLRSLAVAYQEVPEGTKESSGGPWQFIGLLPLFDPPRHDSAETIRRALDLGVSVKMITGDQLAIAKETGRRLGMGTNMYPSSSLLGDKKGDIAVLPVDELIEQADGFAGVFPEHKYEIVQRLQARKHICGMTGDGVNDAPALKIADIGIAVADATDAARGASDIVLTEPGLSVIISAVLTSRAIFQRMKNYTIYAVSITIRIVLGFLLLACFWKFDFPPMLVLVIAILNDGTIMTISKDKVRPSPHPDSWKLAEIFATGVIIGAYLAVTTVLFFWVIYKTEFFVRVFHVRTMNRKKIEETGDQNLLADNMEMLASAVYLQVSTISQALIFVTRSRGWSFMERPGLLLMAAFVIAQLIASVLAAMVSWELAGIKGIGWRWTGVIWLYNLVVYLLLDPIKFAVRYGLSGKAWNLVIDHKVAFTNRKDFGKEAREAAWAHEQRTLHGLESAGTPGEKAASVELGQMAEDARRRAEIARLRELHTLKGKVESVVKLKGLDLEDINNQHYTVSGRTGDT

SEQ ID NO: 157081 - protein, 105 aa, Zea Mays
MEYGFGAHEYPTSGVFQVEPKSCPGFIFRRSVCVGVTHMSRSQVRTSIEDLAEDYHGDTYHLILKNCNHFTADVCERLTGKPVPGWVNRLARLGPISFHNQSVAP

SEQ ID NO: 157082 - protein, 141 aa, Zea Mays
MRRTATAALVLVPLLAAAVQTSALPFIVLHGIGDQCVNHGVAKFTKLLADWSGSDGYCLEIGRGTWDSWVMPLQQQADIICNKVKEMKQLRGGYNIVGLSQGNLIGRAVVEYCDDGPPVKNFISLGGPHAGTASVPLCGPV

SEQ ID NO: 157083 - protein, 220 aa, Zea Mays
MMDRRYDPDRTWQVKNFISLGGPHAGTASVPLCGSGFFCIIVDALIKLEIYSDYVQEHLAPSGYLKIPTDMADYLKSCRFLPKLNNEIPDKRNATYKERFSSLENLVLIMFQDDAVLIPRETAWFGYYPDGAFDPVLPPQKTKLYEEDWIGLKTLDEAGRVKFVSVPGGHLGISKGDMKKYIVPYLTNKKASVTVSDLLVAIWHAVLGLALAEGDDAVLI

SEQ ID NO: 157084 - protein, 176 aa, Zea Mays
MRRTATAALVLVPLLAAAVQTSALPFIVLHGIGDQCVNHGVAKFTKLLADWSGSDGYCLEIGRGTWDSWVMPLQQQADIICNKVKEMKQLRGGYNIVGLSQGNLIGRAVVEYCDDGPPVKNFISLGGPHAGTASVPLCGSGFFCIIVDALIKLEIYSDYVQEHLAPSGYLKIPTII

SEQ ID NO: 157085 - protein, 66 aa, Zea Mays
MARSSSLNKQAIFQDSDHHIIYVNMKTTCILSANRKLKHECDPNCLNKKLKNENLKSGNWASNFSL

SEQ ID NO: 157086 - protein, 101 aa, Zea Mays
MAASNPTVLSRVTKLLNILFSKAYSCLATLPWYPTQLVHITIQNDTKIEMSLGQGPSLMSCSENLVLSTIIYLFPKIYKMVVIIFLIKNPSDLITDAHTNS

SEQ ID NO: 157087 - protein, 404 aa, Zea Mays
MEVPDILRRCVSRDEAALAVAQKVFKSLYDNTSNTTYVSWLLATLVAIRDVCKLVVKELTSWVIYSDEEKKFNIDIIFGLIRSELLNIGEYNVHLAKLIDGGRNKVATEFAMSLVQALFAHDPVGFTEFQNVLDALSKHTKRPGSPESLQQLIEIARNNVSTTTGFVAVKDEKVKLPKDKKVLATRANKEENTANEITLVDPNQVAVLFSEWCQMCNHVSASDAAYTRFVTQLQQDGLLKGDDISERFFRILTELAVTHSLVSEQIVAPGGSSQQSPQQPHISYFSIDSYAKLVVMVLKYSVEITPNKASILSKILSVTVRSIQKDAEEKKASFNPRPYFRLFINWLYDLTTTDGHHDSSNFQVLTAFANAFHMLQPLRVPAWRKVGHFFSDCLLLFSSSWNHI

SEQ ID NO: 157088 - protein, 397 aa, Zea Mays
MEVPDILRRCVSRDEAALAVAQKVFKSLYDNTSNTTYVSWLLATLVAIRDVCKLVVKELTSWVIYSDEEKKFNIDIIFGLIRSELLNIGEYNVHLAKLIDGGRNKVATEFAMSLVQALFAHDPVGFTEFQNVLDALSKHTKRPGSPESLQQLIEIARNNVSTTTGFVAVKDEKVKLPKDKKVLATRANKEENTANEITLVDPNQVAVLFSEWCQMCNHVSASDAAYTRFVTQLQQDGLLKGDDISERFFRILTELAVTHSLVSEQIVAPGGSSQQSPQQPHISYFSIDSYAKLVVMVLKYSVEITPNKASILSKILSVTVRSIQKDAEEKKASFNPRPYFRLFINWLYDLTTTDGHHDSSNFQVLTAFANAFHMLQPLRVPAWSDCLLLFSSSWNHI

SEQ ID NO: 157089 - protein, 69 aa, Zea Mays
MPSVIILLMQYLPMSIELFFFIYEFQPSTNIEGILVFLIQKNPINNSNNLGKQTGLLRLYNPDYIIQII

SEQ ID NO: 157090 - protein, 51 aa, Zea Mays
MNIKTNHKQCNGFFNAWWLHYTLPMGEKGGSSRTDGGGAFSLLRFFFFFSS

SEQ ID NO: 157091 - protein, 101 aa, Zea Mays
MSYETNSVTTELFTVPSFPTSEHKYDETCTCPTIGGKSQPPSLEILPAALDRFPPLWKVYIELNSSPFFQFLAEMDSPGPSTQNSKTWTPFLESNLRTAWR

SEQ ID NO: 157092 - protein, 495 aa, Zea Mays
MAALDDKAMTDLETLEEEEVLRRLGTAEEAGLTDNEAARRLRLHGPNVVVLSHHEGSMLHGFLMALFSLWGWDHVFPKYNNMVRVILNSMSWVTVLTIVVSLAITSAGQRSCELAIIIFVVATCLIACFTAMLVLEYAKAPLEAKAHAPRAKVLRDGNWRDVHAANLVPGDIIFLKVGDIVPANARILRFQKIDTMTCWAKRSVDCAHGFLLYYAWTVSCGQGTAVVIATGRGIPRSTLRLYPQRYARPGQLKEGAMLTGCFCASLVLVGTFAEIVLRFLFQKQNYRGMPLDAHFMPLIGGIPMAMPTFFYLALALGSVRLCFLGIASRGTVALEDLASVDVILFNMTGTLTCNQPCFVRDKIEMFADSVNKDHAIVLAARASRSQHELYIEPIDAAILSLLDDPEQVAHHCGSSKEVKEKISMIMDELALDGYQAIAVGHQVDSCWDFIALLPYTDDLRSDSADVVDSLIDLGLDIRVLTESPLSTTKQRTKAI
